United States Patent Application Publication US 2009/0311680 A1 - sequence listing, part 2

SEQ ID NO: 1781 - DNA, 2247 bp, Saccharomyces pastorianus
atggtatttggatttgcaaagagggataggagggtgcctgacctatccaggtatgactactattaccagaaccaagaagattacaacaagagtcctcaattatctgctgctgctgcttctgctgcttctgccgcgtcaccggatcaagccagttattcaaggtcgcattcgttggctgctcatgctccaccgatatcgaaacagaggaactcggtgaaaggtccagggaggcggctctcaacatcttctgctgtcccacaatcagccaaggggacggctaagcctcatccgcaaaagacgtactctctaagatcacagaggagtggggactatcatttgcagcggcccaataatgccaacaatgggagccgcataaactcgatgacgtcgggtgccaatgtcagaagaaaccttggcagcaagaacaagtctacaggcagcaaaagcgattctagagccaattccatcactgtgaaaacaacccaggtcacagacccctcaggaaggactcaatcaatcacgaaaaagacaattaagaaaatcaatggttacgagtatgtcgaaactacaactacgactaagaatctagttccattgggcgattcacaacgccatttcgatgaatttagtgggaattacatgttgcaagatgacgacatcggagaggaacaaaatgccgataatattcacgacataatggaggaaaacgaaacagaaaatgagaattcatactctccggcagacaaaaaccatttgcaaggtgactctgagctaaacttggaaaaatctgattttccgcctgggtcttatttccaccataagtattcaacagacgttatgcctctagaagaagaaagcagtttgtctaatttcagtgacgcactagattatattccccccacaggccaacccaataataaatatattcataaaaaaagaaaaccaacgtcgacagcaagaaaacagaaacatcctgctgtgaccaatacggagccaaaggttaagaaaccattaaccgaagcagaaatgtacgtaaaggccctcgaagtcgctaaaagaaacgtctatcacacggatgtaccttcaaataatgtttcaattccaattgggggtaccaaacaaaggaaaagcagaatgggcgaaaaaatgactttaagaggcggcagtgatgctccaaccactgctgcaaagtctaataccgaggctcaatctaaaaaatttaccagtactttgcttcatagaagcgataaaaatgaaccgaatgaagggcgcaaccactcactgatgtcgtattccaaatcggaacaaccatcagagcctttatcagagtctaagtacgcaaacacagggctgactgatgaagaaatgtacgctcaagctttgaagattgcacaagctagatattacaattctcatggcattcaacctgacactatcagcactaccgataacagcaatgctgcagtcaagcccatccagaacagtgttgattattctgtacatcctgaaaacgttgtgtctaacaaacaaacttatacaggggagccacaacttccagtacacagcgaagtgcatgaatacgagacggttcccctgcaaaaaacgaaaacaggcggttctcccaaaaacaagttcaagagcatgtttggtaaggtgctccagttttcacaagaaaattatggttaccaaaacaagaaggaccaaggacaacgtgtcccggcggacgataccaccgaagaaagcttccaggctgcctcacccatggacggtgtcctcgccgccggatcctattcaaataacggtatgacaacaagttcaaccaccgatggttccctcgcacctcatcaacaacaaaccgagtccgctctttcgtcctcaaatgggctaagccagagcaacatacaccctccggtagcgtctgccaccacgagaacaaagactactgaacaacaagaaaccgtgaggtcttcctcctcgcttttacaggaccaaaccccacagcgtcaagaaaacgctaccgatccgacaacagctacaaccaccacaaccaccacgataacgaacgaaatgtccatcgctgaaccacccacatcactcgccatacccgctgaaacacccgttgtctcccaaccaacaatagtcaccgcaacaaataccactaagacggtacaagctcaagcccctcccacaaagcacaaaaagtccagttttttcactaaactgtttaagaaaaagagcagacgttaa

SEQ ID NO: 1782 - DNA, 969 bp, Saccharomyces pastorianus
atgtccatagtagcactgaagaacgcagtggtgaccctcatacagaaatcaaaaggtggcgccgaaaactcggactccaggggatctgaatcgactcccttgctagcaggcagcaataacaatagtacaagacttgataattcttcctcgtccagttcggatattatctatggtagaaatgcgacacaggatctggaaaactcgcccggttcgatagggaaagataacaggaatgaagatgatagctcggataacgaaaaggcgaacctggggttcttccagtcggtagaccctcgtgttattagtgatttgattattgggctgagcgatggtttgaccgtcccctttgccctgactgctggtttatcttcccttggtgatgcaaaattggttatcactggtgggtttgccgagttgatctcgggtgctatttctatgggtcttggtggttacctaggtgctaaaagtgaatctgattattatcatgcagaagtaaaaaaggagaaaaggaaattttatgataactccaacctgattaacagagaaatcgaagacatcctactggaaatcaaccctaatttttcagatgaaacaatcgtctcattcatcaaagacttacaaaggacgccggaattaatggtggacttcattatcagatacggaagaggtttagacgaacctgctgaaaatagagaacttatcagtgccgtcacgattggtggtggttacctaattggtgggctagtaccactactaccatatttctttgtgtcagacgtaggcacgggtctgatttactcaattatagtgatggttataacgttattctgctttggttatctgaagacaaaattatccatgggtagtagtagttcgacatccaagaaagtcacagaaggtgtcgaaatggtcgctgtcggtggtgtagcagcaggtgccgcgtggttcttcgttaaattacttggttga

SEQ ID NO: 1783 - DNA, 2457 bp, Saccharomyces pastorianus
atggatttgaaaagctcatataaaggcgtttcattgaaccccatttatgcagggagtagtgcagttgccacaatttcagaagatggtaaaatactggctacgccaattttagacgaaataaacataatcgatttgaccgcagattctaggaagattctacacaagatttctaatgaagatgagcaagaaattactgcattgcaacttacaccagatgggcaatatcttacatacgtatcgcaagctcaacttttgaaaatatttcaactaaagactgggaaagttgtcagatctatgaaaatatcttccccatcatatatcctagacactgattccacctcaacacttttggcagtcggtgggactgacggtagtattattgttgtggacattgaaaatggatacatcactcattcattaaaaggtcatggtggtactatctctagcttaaaattttatgggcagttggatagcaaagtatggttattagcatctggtgatactaatggtatggttaaagtttgggatctcgttaaaagaaagtgcctacacacactacaagaacatacttctgcagtgagagggttggatattactgaggtagaaaatagcgatggacctagccatctgaaattaatttctggtggtagagacgatattatcaatttttgggattttgatatgaaaaagaaatgtaaattaatcaaaactcttccagtaaatcaacaagtagaatcatgtggattcttgagcactcgtaacggcaaacacattatctatacagctggtggtgacgccatctttcagctaattgacctcgaatctggtgctatgcttaaaagaactaataaacctatagaagagctttttattataggcgtacttccaataatgagtgattcaaagatgtttttggtaatgtctgaccaaacattacaactaataaacgttgaagaagctttagagagtaaagaagaaataattcaggctgagtcaagcattgctggtaaccacggtattattgctgatatgaggtttgttgggccagagctaaacaaattggcattggctaccaattctccttcattaagaataataccaattccagatttgacaagcaccgatacctcattacctttggatgttgaaatttatgaaggtcatgaagatctactaaactcactagatgccactgaagatgggctatggattgccactgcatctaaggataattcagctattgtttggaaatataataaagacaccagcaaatttgacatctatgctaagtatattggccattcctccgctgttacggcagtcggattaccgaacgtaatgccaaagggataccctgagtttttattgacagcatccaatgacttaactatcaagaagtggaaaattccaaaaccaacccctattactgacgtacagattgtcaaggtatcagagtatacccgtcatgcccatgaaaaggacataaacgcattatcagtctctcccaatgattctatttttgcaacggcctcatatgataagacttgtaaaatttggaatctagaaaatggtgagttggaagccacactagccaaccacaaacgtgggctatgggatgtttcgttttgccaatatgacaagttactagcaacgtgctctggtgacaaaactgtcaagatatggtcattggatacttttagtgttatgaagaccttagaaggtcatactaatgccgttcaaaggtgctcctttattaataaacaaaagcaactagtaagttgtggggctgacggcttaatcaaaatatgggattgctacagtggggaatgtctaaagactttggatgggcacaacaacagattatgggctttgaatactatggatgatggtgatatgatcgtgagtgccgacgccgatggtattttccaattctggaaagattgtagtgaacaagaaaaagaagaagagctagaaaagagcaaaatacaagtcgaacaagaacagtcgctgcaaaattatatgagtcaaggtgactggacaaatgcatttctgttggcaatgtctttggatcacccaatgaggctgttcaacgttttaaagaaatcacttggcgaagcaagatccaagcaaggtggtaaagaaattgacccaaaggtgattttcaatgaagagttagaccatgcaatttctactttaagcgacgagcagttaatgttgctaatgaaaagatgtagagattggaatacgaatgctaggacccatgctatagcacaaagaactataaggtgcgttttgatgtatcataatatagcaaaattaagcgaaataccaggtatggtgaaaatagttgatgccatagttccatacacacaaagacatttcacaagagtggataatttagtcgaacagagttatatattagattatgcattggtggaaatggacaagcttttttga

SEQ ID NO: 1784 - DNA, 1110 bp, Saccharomyces pastorianus
atgaatcagagcgatcacagcctgatggatttaccattagaaatccatttatcattactagaatacgtgccgattgagctccgagcagttaacaaatatttttacgttttgcataactatagctataaagagaagagtttggcgtggatacctgaagaaaacgacctatgggcccttatcaagccctcgttgtgtcaatacatcaatagtttggacccgctaaggcagtacgctagacagattatcagaaatacggtagaaccaagtcctagtgtgccgctttccgtgaccacgttcatcgcagattcgtggtatatagtgtataacacgttgcgatatcctggaaagataatcaacaacggatgggacaaatttggcaaaaatcaagactcagctgcggtagaaaccaacagcagctttaataatcggcccaaggagagaaccctcatgcagtcattgactgcgttacctgtcgacttttggtccagaagaaaagatgaaccaacaccagtaaacgtttggttttatgtgaaaaacgcgcatgttgccagatacataccaaaagtcgttactgaaatagggatatgcaactacgggccgaagcaaatcgtggctagtgcaggttacatcaacgagctgatcacatcggagggaatatattgtattaatctggggcatctgcctagactatacaacgaacaaatttttgagggtacgggtacaacgcatcttcccctggagttgagaaccattgatagaacggattcagatgtttgtgttaatggcgatttagtactgttaggttatgactttattccgtacgaaatgactaaaccgtggttgctctttagaattgagcagataaatggtgctgaatccatattcaactataacgagtgctctttgtcatatgagtttgcatggggtttagcgtgtttacaatctgacgaaaacatcaaatttcccaaggacagaataagccggcgcaatttctcttataagcccttcaagttaataagaacctttgtatacaagcatccggaacaaaagcaagatctcgatcgagaaatagcattacccaattggaatacaccttatcttcgaagatga

SEQ ID NO: 1785 - DNA, 1227 bp, Saccharomyces pastorianus
atggccgttgcagttaaaaaggaaaagacaaagtttgctcccgtcagggaagttttatctaaagaagatcatggcaattacactaaatttcaggacacttcaaaactggaatggttctgtaggacatcaaaccacaagaaatttaagtcgcacagtttgttgaaagcggtaagaaaccctacagagacaagaatagagacacaaactctgtattttacggatctcaccaacgacaaatgcgggtttatccagttattatattctagtgttatggggggtatatataaagggtttcaattaaatttcaaagtctttaaagctagtagtggcgatgagtctgaagaaaacatagatatatgggaaagtttcaaaattgaaaacataaaagatttcgatacgctgagggtagaatcggacaatgttattttccacttcgtgccgctaaaggacccttcatctgacgggtttgctcaattatcgattaaaatagatattcctaaggggagcgcctctaattgtccattaaaagatctaaaagtcgacttagttgtcaatctacaagagggatttgtaataaatccggacggttctaattattatctggataagagcataagcttggaggatttggctaaacgaggctcttctgcgacttctaaaaggatgataagacatgtatttgttcctagagggttttgtaatggtaccatatcatacaagaaaaacggtcagccggtacatctaaatttgaaggacacacctatgttgtatcttgatgctgtccaggggctaatacctaacaaggcggccagtaaatggaatttcctttgtttcaacggtaagaagctttcaacaatgtgtattgaattcaccacaacaaaggagtatggtagtaccacagtaactatatgggctgtgagcgacaaggataaaatcttggaaatcggatccagtgtaaacgatcatgctgtaaagttcccaaccacacaagaggatgagcaaaatggttggaaataccctacatccgtcactttccctcgcgggtttgaagaagcaaatttaaggttagttaacaggtacgatataatgggtgaactacccgctatcatcaaatccattgctgagaatttagcaaacatgaaacctttcatctaccagttctgtcaaagatcaaaatacgaagatgatgaagggatttctattatcgaaagcacgttcatcagctag

SEQ ID NO: 1786 - DNA, 1188 bp, Saccharomyces pastorianus
atgtctgcttcatctccaaggggtggcgtggccacgacccccagtttgccaaggccaacgaataatgcatcgccaccgccagcatcgaatggattcaatgcaagaactctgtggccggatctgatagaaactccagaaaaccagtgggtttttgagtgcaaagaaattattgaaaaaatcggcaccgatgaaccgatcgcactggaaatgaaaagaaatatggaaaaatgcttgatgtatttttacacacttaagaagaaattgaatctgtttgatcatacatacaccgcatcgtgcattctgttttacagatattggtttgtatacggaataccaaccaccatcacggaatgcatccatatatcgcaaggaatcctggtcacggcatgtaaaacgatggagaataataggcctatcgaggcctatgtcaaggccacttgtgactttttgatgcagaatataccatccttgaagagtcgaacaaatatcgataaacttaaatgggaatttagagataaactagtaactaatgaaaaaaaaatactttgttcattcggattcgatttgaatattggtaatccaaaggaactaatcgaagagatatttagtggctattacagatttaacagagatcacaacctgccggatactttcaaaaaagccttcccaaaaattcttcaagaatcaagaaacttcatggtgcaagctgtcacccagcctgtttctttgttatgcgacggttacacattcattgcgttatctctcatatattgcggtctggagtataaaaagctggttgacaaagatttcaagtacccgaagaatttttttagggatagattccctattgaagtgacgtctgctaacttcgccaacatctttacggactataagttactggaggagaatttctttactttgaaaagtaacaaaggcgccaaattgcaaattgattcaggtatggtcgattcagtgattgacgaaagtaacggtgaagaaagtggagctttgaaactttcggatcccttcaattacgaattgatcagatccggcgaagtaaaagaagagtttttatctcatattgaaacgagggttaatgacctagtagaaaaggctaagcaggaaagtacgaagagaaaggccaacgagcctataacggcttcagatgctaagaaacagaaaatatga

SEQ ID NO: 1787 - DNA, 576 bp, Saccharomyces pastorianus
atgcagactctaaaatgtgttgtcgtcggtgatggtgccgttggtaaaacatgtctattaatttcctatacaacgaatcaatttccagccgactatgttccaacagtgtttgataactatgcggtaaccgtgatgatcggtgatgagccgtacacgctaggtttgttcgatactgccggtcaggaggattacgatcgattgagacctttgtcgtacccttccactgatgtctttttggtttgtttcagtgtaatttccccaccttcctttgaaaatgttaaagaaaaatggttccctgaagtacatcaccattgtcctggtgtgccatgcctagtcgttggtacgcaaatcgatttaagagatgacaaagtgatcatcgagaaactacaaagacaaagattacgtccaattacaccagaacaaggttccagattagcaagagaattaaaggctgtaaaatacgtcgaatgttcggcactaacacaacgtggtttgaagaacgtgtttgatgaggctatcgtggctgcgttagagcctcctgttatcaagaaaagtaaaaagtgtaccattttatag

SEQ ID NO: 1788 - DNA, 1362 bp, Saccharomyces pastorianus
atggaagaagcattgaaattggataaaaaatatccagaaactcttaaggatgaatttaacatacctacgtttaaatccatgggaatatcgtccgacaattcgccagtgacgtacttatgcgggaattcgttggggttaatgcccagatcaaccagagattcaatcattgcggaattggatgcatggagtaactgtgctgtggagtcgcatttttgtcatcctaaagaatccgagggcaagactccctgggtaaacattgacttacctattctgcctttgttggctcccattgtgggagcacaggaaaatgaggtcgcagcaatgaacagtcttactacaaatttgaattctttgttggtaactttttacaaacctaccgagaaaagatttaaaattctttttgaaaagggttcatttccatctgattattatgcgttttataatcaatgtaaaatacatggaatttcggaacctgagaatgttcttattcaggtcgaaccacgcaagggagagacttatattaaaacacaagatattttgcacattatagaagagaaccaggataaattagctttagtttgtttaccgggtgtacaatattatacagggcaatattttgacattggccgaataacttcttttgcacaccaattcttaggtattttggtcggatgggatttggcacatgctgtaggaaacgttccattacagctacacgattggggtgttgactttgcttgttggtgttcgtataaatacttaaattctggacccggcgctattggtggcttatttgttcattcgaagcacactacacctgaccctactaaagaacatttgccaaggttagctggctggtggggtaacgatgcttctaagagatttcaaatgttggagaatttcgaaccaattccaggagcattgggatttagacaatccaacccgagcgtcattgatacggtcgcattgaagagttcattggaaatttttgctaagtttgatggtatcagtgaagtccgcaaaagatccttgctattgacaaattatatggtggagttattggaagcatccaagtactacaagcatcctttgaagatggagaaattaccacacttctttacattactaactccaacggccaaagatgaagaccatggtgcccaattatctctttactttgattcagatactggtgaagagggcatcatgtctaaggtattccagtatttgcacgatcatggtgttattggcgatgcaagaagacccaatgtgatcaggttggcacccgcacctttgtataatacatttgcagatgtatacaatgcggtgaacgcactaaatcaggcaatgaataaattgtag

SEQ ID NO: 1789 - DNA, 1965 bp, Saccharomyces pastorianus
atgaaagtactatgcgtagccgagaagaactccatagcgaaggcggtttcacagatcttaggaggtggcagatctacatcaagggattctggctatatgtatgtgaagaactatgatttcatgttcagtgggttcccgtttgcaagaaacgggggcgactgtcaagtgaccatgactagtgttgcgggccacctgacagggatcgatttcagccatgattcgcacgggtgggggaaatgcgcaatccaagagttattcgatgcgccactgaacgagaccatgaataacaaccagaagaagatcgcaagcaacatcaagcgagaagccagggacgcagactacttgatgatatggacggattgcgaccgtgaaggggagtacatcggctgggagatatggcaagaggccaagagaggcaataggcgcatagaagacgaccaggtataccgggcggttttctcgcatctggaaagacaacacatactgaacgcagcaagaaacccaaataggttggacatgaagagtgtgaatgccgtggggacgcggatcgagatcgatcttcgagcaggtgttacgtttaccaggctgttgacagaaacgctgcggaataaactaagaagccaacccgtcacaagcaatgatggcggtagaacccgcagtggcaagaacgactcacaggtcgtgtcgtatggtacgtgccagtttccgacgctgggatttgtcgtcgacaggttcgagagaatacggaatttcgtaccggaggagttctggtacatccagctggtggtagaaaacaaggacagcggcggggtgacgaccttccagtgggacagaggccacctattcgaccgactaagcgtgctgacgttctacgagacatgcatcgagatcgctggtaacgtggcaaaagtggtcgacttgcggtctaagcccacatcgaagtacagaccgctgcccttgaccaccgtggagttgcagaaaaactgtgcccggtatctgcgactcaatgccaaacagtcgctggacgcggcggaaaagctgtaccaaaaagggttcatatcgtatcccagaacggaaaccgatagcttcccgcaggcaatggacctgaagactctggtggagaagcaggcgcaactagatcagcccaacgcgggcggcaaaaccgcatgggcagcatatgcggcatcgctgcttttgcctgaaaacactagcggcaaccgtttcaagcctccacgaagtggcacccatgacgacaaggcgcatcctccaatccaccccatcgtcagtctgggaccagacgctaacgtgtcccccaccgaaagaagaatatacgagtatgtcgcaagacacttcctggcatgctgctcagaggacgccaggggccagtccacaaccctggtgctggactgggccggcgagcggttcaccgccgccggcctcgtggtcctcgagaggaacttcctcgacgtctacccatgggcacgctgggaaaccaccaagcaactgccgcgcctggaactgcacgcgcctgtggacatcgcgaaggccgagatgaaggcaggcgccacggctccacccaagcccatgaccgaaagtgagctcatcatcctcatggacgccaacggcatcggcacagatgccaccatcgcagagcacatcgacaagattcaggtacgtaactacgtccgcagcgagaaggcaggcaaggaaacctacctgcagcccaccaccctaggcgtttccctcgtgcacggcttcgaggccatcggcctcgaagactccttcgcaaagcccttccagcgccgtgagatggagcaagacctgaaaaaaatctgcgatgggcacgcctccagggcagaagtcgtatctgacatagtcgaaaagtacaggaagtactggatcaagacgaatggctgtaagaataccctgctgcaagtttatgaccgcgctaagacatccatgtag

SEQ ID NO: 1790 - DNA, 1440 bp, Saccharomyces pastorianus
atgactgattcgggaccagagttcagtaaggaggaacactccaattctccgagcaagcaacacacaagaaataacagcatacccaaaaatacgaagttgagtaacatattgaatagctcacctaagagactagcagacaaatatgacaaaagaaaaagtgatttctcaaagggcttccttccgcataacatttcaaggacaccaaggagaaaatatacctacattctagttctcacttcactaaatggaacctttgaaaggaagcacgtaatggtaccattcaaaccggacgggctgaagttggggagacctgttgctaacagcaacaataactccaactcatcgctcaggggcggcaagaaactagattcacacgccttttcccaggttaggtccgataatggtaatttcgattcaagagtactttccagaaatcatgcattgttgagttgtgatccccttacggggaagatatatatacgagacttgaaatctagtaacggcacattcattaatgggcacagaattggttcaaatgacgtagaaatcaaagttggcgacgtgatagacctgggaaccgatatagatacgaagattgagcatcgtaagataagtgccacagtggaagagctcttcatacagcctttgctagaagcaccaatccctcaagaagaccttgatgttcatgactgtggtacgatttcaaaaagagaagaggctgctgctataacaagttatatatatggtgattccaacaacctggagttggaagaagttattttaggttccgagacagaaatactcagtggaattttcatcaataattgtattggtacaagcagcacgttatccaacgtaataaagacattagcaactgaaatctcgttttccaaatacgacaattctaagctacagtccatggaaaactttttaattagttatacaactcacctggaatacacaaataaacttttggtggaaaaaaatgaccagcaattagtaaagttacaaaacggattacgaaggaagctatcagaaaaatatgaaaaaatcatagaacaaaacagaaaccaaataaaacagttagaaagagatcatatgttctccaagaaatcattcgaagtcaaaaaaagaagaagcaatgaaaaacagaggaatatcgaacgggaaatagaagacttgaagaccaggttagaagtcgaacgatataagaactcacaaatactgaaaaagaacaaactaaaagggcaagaacccttaactgcatccaagaaaaataaagacgcacatgatacaaaaagtgttccaggcgtgaatcccaacgatgttggtagatttagcatcaaaaaatcattaagtgatcacttgacgttattgacatttggaacaatttccattgggatcatagctatcgtgttcaaattcttcactccaagctag

SEQ ID NO: 1791 - DNA, 966 bp, Saccharomyces pastorianus
atgatatgcataacgtgtatgcagcctgtagattccctctatacggtgtactcaaatgaccacatacagttgacagactgtccattctgccaagagatagtggataaatatgtggagattgacaatgtcctgttattcattgatcttttattgttgaaaccaggtgcatataggcatttggtattcaactctttggaattgcatctagcaaaatatccaaagggaaaaacgttaaaaaattgccaatctttgtatgatcgtatgcaagttctaatgtttaatttcaagaactggttttgtaaatttgatagattgaaccgcctctggcttttgctattatcatttgagatttatttaacgtgggtcaccgaggagagtaaatacatttactatatgaaccgtaacaataatgacggtaaacttattatgctttcaaagaacttaccagaaaccttcaaatgggactcgaccataatgcgtaacaccatcacaagtaaagtgtttacctggagcccatcattacagtacctttacttcgcaagttattgtatccttgatgtttcattatttcacacacttactcggcgcttcatactaaaaaagctgcactggggccagaactttgcttattcgaaggacatcatatcctatacgatcctgttatcatatggggccaaaattttccccattttaatgttaatttggccttatgataccctcatttcaatgagcattataaagtgggtggccaacttttacatcatcgaatcactaaaaattgttactaaactctcctactggagcatcataaaagtctttataactgtttcgttcgtacggtactgtttagttaagccagtacttatattatttgtggccaaattcaacttttccattataaaaaatttaatatgccaagagtttatgttactactacagaaatcaggaacttatttacttttatga

SEQ ID NO: 1792 - DNA, 1164 bp, Saccharomyces pastorianus
atgaacaccgcaaccacgactgaaactgcctccgagcaagcctctcaccctgccacgatatattgtgccggtttgcaatgtggtaaggagacctcctcccagatgaaatgtcctatttgtttaaaacaaggtattgtttccgttttttgtgacacagagtgttatgaaaacaactataaggctcacaaggccttgcacaatggtaaggacgattcgaagagcgcttacgatcctttccccaaattcaagtattctggtaaattaaaggcatcctatcctttgactccaaagagatatgtccctgaagatatccctaaaccggattgggctgccaatggattaccgctcattgaacaaaggaatgacagattgaataatatccctgtttataaaaaggagcaactaaaaaaaatcagaaaagcatgtattctcggtagagaggtccttgacgccgcagctgctgaagtcagaccaggtatcaccactgatgaattagacgaaattgtccacaacgaaaccatcaagagaggtgcttacccatctccattgaactactacaatttccctaaatctctttgtacctctgttaatgaagttatctgccacggtgtgcccgacaaaactgtattgaaagaaggtgacattgttaacttggacgtttctctatactatcaaggttatcatgccgacttgaacgaaacctattatgttggcgacaacatttctaaagaagctttaaataccactgaaacatcaagagaatgtttgaaattagccatcaaaatgtgtaagccaggcaccactttccaagaattgggtgactacattgagaaacatgccactgaaaacaaatgttctgtagtgagaacttactgtgggcatggtgttggtgagtttttccattgttccccaaatattccacattacgctaagaacagaacacccggtgttatgaaacctggtatggttttcacgatcgaaccaatgattaacgaaggtacctggaaggacatgacctggcctgatgactggacttctaccactcaagatggtaaattgagtgcacaattcgaacatactctgttagtcaccgaacatggtgttgaaatcctaactgccagaaacaagaaatctccaggtggtccaagacaaagaattaaatag

SEQ ID NO: 1793 - DNA, 1830 bp, Saccharomyces pastorianus
atgctaaaaataaaggctcttttctcaaaaaagaagccggatcaggctgatttgtctcaagaatccaaaaaatcattcaagggtaagactagatcgaacggtgcaaacagcaatgttttcgaaaatgcctcttccaccaaaaaaaggcagcaagaaggaaacataacgcaatactcgaacgccattgctgatgaccgtcatatgaagtctttaactgatgagcttgtaaacacattagattcagactcctctccgagtgataacattatcacagaaaatatagaaaccgttccttctgttccaatcatcgatgtttacaaaagcagtgacgaccaactgagttacgagccatcaatgtctgatgaatcccttccaatacaggatgggattatcagtgacagccaagatgacgatactgacgatgaagagctggaagatgaaactcccgaaaagtcatttcttgagcaaaaggagttaataggttacaggctaatcaataaaattggtgaaggtgcattctccaaagtctttagagccatccctgctaagaatagttctaatgaatttttaactaaaaactacaaagctgttgccattaaagttatcaaaaaggctgatttatcgtcgatcaacggtgaccaccggaaaaaagataaaggcaaagatggtaccaagacatcatctagagatcaagttttaaaggaagtcgcactacacaagacggtctcaactggttgttcgaaaattgtctcgttcatagatttccaagaaagcgacagttactattatatcattcaagaattgctaactggtggagaaatctttggagaaattgtcagattgacctatttcagtgaagatttatcaagacatgtaatcaaacaattagcactggctgttaaacatatgcattcactgggcgtggtgcatcgtgacatcaaacctgaaaatcttctattcgaaccaatcgagttcactccctctttaaaaccaaagtttaggaaatctgatgatcagcacacaaaggcagacgaaggcatattcacaccagaaatcgggggtggtggaatcggtatagtgaaactagctgatttcggtctgtccaagcaaattttttccaagaacaccaagaccccttgtggtacggttggttatactgcgcccgaagtggtcaaagatgaacattattccatgaaagtagacatgtgggggattggctgcgttttatacacaatgttatgcgggttcccgccattctacgatgagaaaattgacactttgactgaaaagatatcaaggggcgagtatactttcttaaaaccttggtgggatgaaatcagtcccggtgccaagaacgcagtgggcaaactactagagctcgagccatccaggagatacgacatcgaccagttcttggacgatccatggttgaactcatacgattgtttaccaaaggaaggtaactctttacaaaagaaagcaggtacttctgagagacgccatccacacaaaaaacaatatcaactatttcaaagagactcttccatactgttttcgccggccgctgtagctatgcgcgacgcctttgatatcggtaacgcggtgaagcgtacagaagaagatcgcataggaactcatggagtattaggctcgcttgctgaagacgaggaggcggatgacaactacaacgccggtctgacaaatgaaaaacttgaacaaagtatgttccaactaactttgaacacctcgactattctacaaagaagaaagaaagtccaggagaacgatgtaggtgccaatattcccatcggcgccactatccaagaatag

SEQ ID NO: 1794 - DNA, 3135 bp, Saccharomyces pastorianus
atgtctgattcccagcaatccattaaggttctagaagaactcttccagaagttatctgttgccactgctgataacagagatgaagttgcttctgaagtatcttcttttttaaatggtaacatcatcgaacatgatgtcccagaacacttcttcagtgaattggccaagggtatcaaggctaagaagactgctgctaactccatgcaagctgttgctcacattgccagtcaatctaacttgtccccatctgtcgaaccatacatcgtccaattggttccagctatttgtgaaaactccggtcacaaggacaaagaaatccaaaccattgccagtgaaactttggttgccatcgtcaacgctgtcaacccagttgccatcaaggctttgttgccacatctaactaaggccattattgaaaccaacaaatggcaagaaaagatctctatcttgagtgccttctccgccatggtcgatgctgccaaggatcaagtcgctttgagaatgcctgaattgatcccagttttgtctgaaaccatgtgggacactaagaaggaagtcaagtctgctgctactgccaccatgactaaggccaccgaaaccgtcgacaacaaggatattgactgtttcattccaagtttgatccaatgtattgctgacccaactgaagttccagaaaccgttcacttgttaggtgctaccactttcgttgctgaagtcaccccagctactttgtccatcatggtcccattgttgtctagaggtttgaacgaaagagaaaccggtatcaagcgtaaagctgctgtcattattgataacatgtgtaagttggtcgaagacccacaagttattgctcctttcttgggtaagttgttgccaggtttgaagagtaactacgctaccattgctgacccagaagccagagatgttactttgagagctttgaagacattgaagagagttggtaacgttggtgaagacgacgttatcccagaagcttcccacgctggtgacgtttctactactttgcaagttttccacgacttgttgaaggaagaaactgttgctccaagatttaagattgtcgtcgaatacattgccgctatggctgctgatttgattgatgaaagaatcattgatcaacaagcttggttcactcacatcactccatacatgaccatcttcttgcacgaaaagaaggccaaggacatcttggatgaatacagaaagagagctgttgacaacattccagtcggtccaaactttgatgatgaagaagacgaaggtgaagatttatgtaactgtgaattctctttggcttacggtgctaagatcttgttgaacaagacccaattgagattgaagagagctagaagatatggtatctgtggtccaaacggttgtggtaagtccactttgatgagagctattgctaatggtcaagttgatggtttcccaacccaagaagaatgtagaaccgtctacgttgagcatgatattgatggtactcactctgacacttctgtcttagacttcgttttcgaatctagtgtcggtaccaaagaagctatcaatgacaaattgattgaattcggtttctccgatgaaatgatctctatgccaatctctgctttgtctggtggttggaaaatgaagttggctctagcaagagctgtgttgaagaacgctgatatcttgttgttagatgaaccaactaaccatttggataccgtcaacgttgcttggttagtcaactacttgaagacttgtggtattacatccattaccatttcccatgactcctctttcttggataacgtttgtgaatatgttatcaactacgaaggtttgaagttgagaaaatacaagggtaacttctccgagttcgttaagaagtgtccagctgctaaggcttacgaagaattggctgccaccgaattggaattcaaattcccagaaccaggttacttggaaggtgttaagactaagcaaaaagctattgtgaaggtttccaacatggaattccaatacccaggtacctctaaaccacaaatcactgacattaacttccaatgttctttgtcctcaagaattgctgttattggtccaaatggtgctggtaagtctactttaattaacgttttgaccggtgaactattgccaacaaccggtgaagtttacactcacgaaaattgtcgtatcgcttacattaagcaacatgctttcgctcatatcgaatcccatttggacaagactccatctgaatatattcaatggagattccaaactggtgaagatagagaaaccatggacagagctaacagacaaattaatgaagacgatgctcaagctatgaacaagatcttcaagatcgaaggtactccaagaagaatcgctggtatccactccagaagaaagttcaagaacacttacgaatatgaatgttctttcatgttgggtgaaaacattggtatgaaatctgaaagatgggttccaatgatgtccgtcgacaacgcttggttgccaagaggtgaattggtcgaatctcactccaagatggtcgctgaagttgatatgaaggaagctttggcttctggtcaattccgtccattaaccagaaaggaaattgaagaacattgtgctatgttgggtttggacccagaaattgtttctcactccagaattagaggtttgtctggtggtcaaaaggttaagttggtcttagctgccggtacatggcaaagacctcatttaatcgtcttagatgaacctactaactatttggacagagactctttaggtgctttgtctcaagctttgaaggatttcgaaggtggtgttattatcattactcactctgctgaattcacaaaggacttgactgaagaagtttgggctgtcaaggacggtagaatgactccatctggtcataactgggtcagtggtcaaggtgctggtccaagaatcgaaaagaaggaagatgaagaagataaattcgatggtatgggtaacaagattgccggtggtaagaagaagaagaagttgtcttccgcggaattaagaaagaagaagaaggaaagaatgaagaagaagaaggaactgggtgatgcttacgtttcttctgacgaagaattctaa

SEQ ID NO: 1795 - DNA, 705 bp, Saccharomyces pastorianus
atgaggtttttaaagggagttgtgctttctctggctttttctttgtataaggtacgtgctacggcagaagtaggatcagatgttaatgtggaaaatgaaaagccacctgaaggactatcgtgggaagaatggcatatggaccatgagcatcagttgaaggactacacgccggaaactttctttgcactacatgatgttaagaagaagggatacttagatgaaagtgatattctgtctctctacgggctgaaccgtgatgaaatcgtggggtccggtgatggtatgggccagcatgatgaatctgaaaaagtggacaatgctatggccaagcgtgtcgttaactttatcatgaagctattggatgttgacgatgatacaaaaattgcaaaggaggagtatttaaaatatgctaagaaaggaaacaagttccctgatcttggcgttggtgtaggacaccattccggttttgaactagagtatgaaatacatcactggaacaagttccacaaggacgaagatccggacgtcaaggtcgttcacaaagaagatattgaacacgagttacttcatcacgaacatgaaatagagcacgaagaagaaatccaaagaggcgcctctagagctacagtgataactgatgacgagctagaatccaggatagaattgaaaaacatacccgagaaattcaagaacgggattttttaa

SEQ ID NO: 1796 - DNA, 594 bp, Saccharomyces pastorianus
atgaggttactgcaattgtacgaagtcagcttgaaaagaaggcccaagacgactaacgcgattatgacgggtgcattatttggagttggcgatgtttctgctcaatttttgttccccagttccaagatagacaagggttatgactacaaaaggacagctagagccgtcgtctatggttctttgattttttcctttataggcgataaatggtacaagatcctgaataataagatatatatgcgcaataagccacaatatcactggtctaatatggtcttgcgagttgcagtggaccaattagcgtttgcgcccttggggctgccattctattttacatgcatgtctatcatggaaggtagatcgtttgatgtggccaaaatgaaaataagggagcaatggtggcccacacttttgaccaactgggcagtttggccagttttccaagcaatcaacttttctgttgttcctttacaacatagattattggccgttaaccttgttgctatattttggaatacctacttatcttataaaaattcaaaggtcacggaaagtaaatgggtacctgtgcattatcctcccgtggtcgaataa

SEQ ID NO: 1797 - DNA, 1710 bp, Saccharomyces pastorianus
atgattaataaagcgtttttcaacagattaccgtttgaggtattccgtcggtatgtaaggacgagtaagagtatccctcaaagaaaccgtaagacaaagaaggcactcctgatgggaggttcgatcacatcagccgtagcactgtataattttaacgacacattccacgactccgttaaacatacagcactgacaagtaaaagggttgccgttgtcacacaggctaccactcgttgtttttatcattataagagggctctgaataagacttatgagagtaagaaggagcgagaagtggccttgaacgactgtcataagatgtgtgctttgatcacgttgcaagcgctacgatcaaatggtgggatttacattaaattgggtcagcacattggtgccatgacgtatctgttgcctaaagaatggacggataccatgataccattacaagatcactgtcctgaatcaacttttgaagaaattaatcaattatttgaagaagatttggggaccagtattgaaaatatgttttgggaattcgacaagactccgataggtgtagcatcgttggcacaggttcatgtagccaagctgaaaagtagcgatggtaagggtgcgagtgtagctgtcaagtgccaacacccgtcgttgaaggagtttataccattggacgttgtgttgacgagaacagtgtttgaaatgttggatgttttcttcccagattacccactcacatggcttggtgatgagcttcaatcatcgatatacgtggagttgaatttcgacaaggaagccgaaaatgcagaaatgacacgtaaatattttagtaagttcaagagacaaactgcgttgaaaatacccaaagtcatcgaaagccataagagaattttgattatggaatacgttggaggtaaaaggctggacgacttgcaatacatcgacgggcacggaatatcccgaagcgaagtatcgagctgtctttcgcacattttcaataacatgatctttactccgaatgtgggaattcattgcgaccctcatggggggaatttagcaatacgatctgtaaaacccggtaaggataatggataccataattttgagattatattatttgatcacggactgtataggtaccctagcaccaggacaaggagactgtatgctaagttctggctatcgctattattcgacaaggaccaagcaaagatgaagaaatatgccaagggatttgccaacatcacagatgagcagttcccactcttggcggccgctataacggggcgtagtgtagacgcagcactgaactatgacatttccacgagtcgaacacaagaagagatggacgtcatggcggacgggctcttggagggaacattgctgagcgacttgatgagcattttatccagaatccccagcgtggtgttgctgattttgaagactaacgacctgaccagacatcttgacgagtgtttgcaaaacccgctggggccggaaagaacgtttttgatcatgacgcagtattgcgccaagacggtttatgacgaaaaagtcgaaaggatcgactcggagtatggcaaatggtccatcagttggatgtgggcgaatttcacgaactggatagtttacgagaggcgtatcaaccagttgtatttttacgattttgttttatggtggaaaaatattattccgaaggcatggttatcatcttga

SEQ ID NO: 1798 - DNA, 567 bp, Saccharomyces pastorianus
atggtgccgaatttggacttggaaactgcgatacagataatatcctcactggagagccagctcaatgagattgagactgccaccagggagtacgaaaacgatttggagcaggtcatctcaaacctgaaaaaggagctcttggaaagccacacgcaacaaaagtccagtaaaaagcaaataaccggcttggagatacaggtggacgagttggaaaatgaaaatattcaactgagaaacaggatagaaacactgcagctggagagtgaccgacgactagaacgcaacgttctcctggaacacgagttgctcgacaccaaggacgctttgcaaagactgaaagtgaacaaggaagaaagcaccgccggcgaggccaaaagaaacaccggcccattgcccacccaaaataaaaaaatgaaactgttcaaagacaccattaaagtctccaccacctgctccacgctgtatttacaaaacatgacgaaaagcaacgccgtcatgaaccactgtaacatcccgaatacccagataacgcaatccactgtaatagcaacaacatcgtccgtttaa

SEQ ID NO: 1799 - DNA, 648 bp, Saccharomyces pastorianus
atgagcagatctggaaagtcgttgacaaagtacaagattgtttttttgggagaacaaggtgttggaaaaacatctctgattactaggttcatgtacgatacattcgatgatcattatcaggccacgatcggtatagacttcctttccaagaccatgtatttggatgacaagacaatcagactacagttatgggatacggcaggtcaagaaagatttagatcgttaataccttcatacattagggattcaagagttgctattattgtttacgacatcaccaagagaaaatcttttgaatatatcgataaatggatagaagacgttaaaaatgaaagaggggaagaaaacgtaatattgtgtattgttggtaataaaagtgatttatcagatgagagacaaatctccaccgaagaaggagaaaaaaaagctaaactactaggtgctaaaatcttcatggagacctctacaaaggcaggttacaacgttaaaaacctattcaagaagattgctaaatctctccctgaatttcaaaacagcgaatcaacgcccttggatggggaaaatgtcaacagtggaaatcaaaacaaaccaggcgttattgatatttccacaaccgacgaacaagaaaatagtggctgccagtgttag

SEQ ID NO: 1800 - DNA, 195 bp, Saccharomyces pastorianus
atgtctggtcgtcaaggtggtaagatgaagcctctaaagcaaaagaagaagcaacaacaggatatggatcctgaagaagttgctttcaaagaaaagcaaaaggccgacgctgctgctaagaaagctttgatggctaatatgaagagcggtaagcctttagtcggtggtggtattaagaagtctggtaagaaataa

SEQ ID NO: 1801 - DNA, 204 bp, Saccharomyces pastorianus
atggattccaagaccccagtcaccttagctaaagtcatcaaagttctaggccgtaccggttctcgtggtggtgttactcaagttcgtgttgaattcttggaagacactacccgtaccatcgtcagaaacgttaagggcccagtcagagaaaacgacattttggtcttgatggaatctgaacgtgaagctcgtcgtttgcgttaa

SEQ ID NO: 1802 - DNA, 645 bp, Saccharomyces pastorianus
atgattaagtcaacgctaatttatagacaagacgggctgcctctttgtacgtccgtggacaacgaaaacgatccctcactgtctgaacaaaagcaaaaagtgaagatcgtggtctccagaatgacaccacagtccgccaccgaggccactttagaaagtggctcttttgaaatccactacttgaagaaatccatggtcttctattttgtcatatgtgagtccggatacccaagaaacttagcattttcataccttaacgacatagcccaggagttcgaacactcctttgccaacgaataccccaagaccaccgtgaggccctaccagttcgtcaacttcgacaacttcctacaaatgaccaagaaaagttacagcgacaagaaagtccaggacaacttggaccagctaaaccaagagctggtgggagtcaaacaaatcatgtccaaaaacatcgaagatctgctttacagaggcgattccctcgacaaaatgagcgacatgagttcctccctgaaggaaacctccaagagatacagaaagtccgcgcgaaagatcaacttcgatctcttgattagtcaatatgcccccattgtcatagtcgccttcttctttgtcttcctcttctggtgggtcttccttagatag

SEQ ID NO: 1803 - DNA, 1053 bp, Saccharomyces pastorianus
atgtcccagctcccaaccgattttgcctcattgatcaaaagatttcagtttgttagcgtcctagactctaacccgcaaaccaaagtcatgtccttattggggactatcgacaataaggacgcaatcatcaccgccgaaaagacgcactttctgttcgacgaaacggtaagaagaccctcccaagacggtcgttctaccccggtcttgtacaactgcgaaaacgaatattcctgtattagcgggatccaggaactgaaggaaatcacctctaatgacatatactactgggggctgtctgtgataaagcaggacatgcaatccaaccccaccgccaagctgaacttgatttggcccgcaacgccaattcatattaagaaatatgaacagcagaacttccacttggtcagagaaactcctgaaatgtataagagaatcgtccagccttacatcgaagagatgtgtaacaacggtagacttaaatgggtcaacaacattctttatgaaggtgccgaggcagaaagagtcgtttacaaagatttttccgaagagaataaagacgatggattcctaattttgcctgatatgaaatgggacggtatgaacctggactctttgtacttggttgccatcgtttatagaactgacatcaagacaataagagatttgagacactgtgacaaggaatggttaatcaacctaaataacaagatcagatccattgttcctggttgttataactacgcagtccatcctgatgagttgagaatattgattcactaccaaccctcttattatcatttccacattcacattgttaacataaagcatccaggtctaggtaacagcattgctgccggcaaagctattttgttggaggatatcatcgaaatgttgaattatttaggacccgaaggttacatgaacaagacaatcacctatgctattggtgagaaccacgatttatggaaaagaggtttggaggaagaacttaccaaacaattggaaagagacggtatcccaaaaatacctaagattatgaacggttttaagtaa

SEQ ID NO: 1804 - DNA, 3549 bp, Saccharomyces pastorianus
atgtcaggcttcaacttatctgagtatctgaccaagtttcaaacaaccgatcgggccacataccctcgtttggaagatccatcgagagaattaaatgtcattatagaccagttggcggtttcccccgaacaaatagatgccaaccaagagacgcttgaagcattaatagacctctgccatgactttccacatttatcgccgaaattgcaaactcagttaagttatttggtgggttcatctctgtcgaatctgtccaaggaaatcaacgctaatttgtcgtccaatattaatttcaatgagatcagcgaactgataccgcaatggaaaaggcatttggaagaatacggctaccttattcaagtgcttttgacgtttttacaagatgagttacataaagtctcatcacagtctactaacttaaatcgttctactaaaaatggtaaaaacgatagtgcaaatgttgaagtatttagaagagattgcaatcaattggaaagtttgcttgaatctataataaagctcctggaaattaatttatctaaaatttttcaaacgacacctgaaaaggatctgttcctcggtttgtttacacggccattgtttgtagtattggagatcgaatcagtgacaaaactatcatctatgaaaatgtttattcaaaaaattttggcaatatctgtcaaaaatcacggtcaaagttcaagcatacaaggttctttaatgacaaatttaacttactttcttcatttgtcgacttttaatgcagaattactaaaattattgaatgatgaatacaactacccacagctaacagagaatattttgaaagaaatcagtacaagggtgtttaacgccaaggatacgactgggccaaaggcaatatcaaactttttgatcaaactatcagagttatcaccaggaatcatgcttcgacaaatgagccttgtaatcactctgctcaacaacagctctataacattgagatgttccgtcgtagaagcctgtgggaacattgtatctgaactggctgaaaatgctcaaagcttagagcaatataagcaacaaatatccgtattgattgaattactggaagaaagatttcaggattcaaacccttacgttagaacgaaggcaatacaagggtgctcgaaaatctgtgacttgagttcaaaattcaacaagagtaaagcaaagtttactgccctggcagtaagatcattacaggaccggtcctctttggttcgtagaaattcagtaaaactactatccaagttactgctgaagcatccattcaaagcaatacacggtagtcagttaaagttgagtgagtgggaaaaatatctcaatgtatctgagacacaattaaaagtttctttagagaaacttgaatcacaagaaactttggatgaagcaattgaaaggtccatgattgaggatgaagtggaggagggtgaagaagaacataggacgggactaaaggaatctttcaacaaaggaccagatctttctagaatagaaatggaggtagagaatataaatgcaacaacaaatgcggatgtaatcatgaaactaaaactaatggttgtttactacaaagatgccatttcctttattaaagaaatacacaaaagtatcgaactaatatctaatctactgttctccaaaaatagaaatgaggtattggaatcaatggactttttggtcctagcagacgcgtatgatgttgagttaagcgagtttggtataaaaaaaatgctgcatttggtttggatgaaaggcacaaatgacgaaggaacaagtatatcagcgcacttgatagaatgttacaagcagttgtttttaaccgcaccagatggttgtgatatgcgagagaagaccgcacatattgccaaaaatttgatcaacttgaccgtcggcgcatcgatcgcagacttggcttctttggaacaattattgggaatgatgtacgaacaaaaaatgatagaccagaatgtcattaatatcctttgggctatttacaattcagcatcaaagactaatacagaattggaaaaaaccgtgaacaacagtgagccagataacaccaatgctgaaaggaggttttctaatgagcggatccatggttctattattattttaggaatgctatcgctggcagataacgaaatcgcgttaaaggggttagagtcattactgaacattgggctcggcagtgttggtatcaaagatttgacactctgtcggtattcttgtttaacattggagaggatggtcccaaagaaaagtactattatcaccaaggcaataaaccaagagcatgaagatgttgcggtcaaaaagctgtatgctatgattatcaattatactagagataatgaatattatcctatgtgtgaacaagcgcttagcgcattgtttacaatctcctccaagcccgacatattagctacggatctgataagggaaaagactatgatgacgtttggtaagcctgaaggagatgattctattctgtcatttgaacaatcctctagagtggtatccctcagtcaattgctgttcgttgttggacaagtagcgatcaaaacgcttgtttatttggaaaagtgtgaagcagaattcaagaaaagaaagattgaagcagaaactcggaaaggtaagggcaaaaatcaagatggtgatatgaccaatactacgcaagataatggtgacgacaaagaactagaaatgattggaggtactaatgaagacgatttcacagatgcaattcaatttgtaaaggagaatgaactattatttggagacaaatctatcctgggaaaattttgccccattgtggaagagattgtttctaattcaagtaggtttggtgatccgatgttacaaagaacggcaaccttatgtttagaaaaactaatgtgcttgtcttcgcagtattgtgaaaaaaggctaccgctattaattactgtaatggaaaaatcgcctgatcctactattcgctcaaacgctgtcttggggctaggtgatatggcagtatgcttcaacaatctggtagatgagaatacggattatttgtaccgtcgtttacatgatgaaaatttgatggtgcaaaggacatgtttaatgaccgttacatttttgattttagctggtcaagttaaagtgaagggacaattaggagaaatggccaaatgtttagacaacccagatcaaggtataagcgatatgtgtagattatttttcaccgaattagcttctaaggacaacgccatctataacgggttcattgatatttttagtagtttatcgtccgataatttattggggaaagaaagctttaagaagatcgtgaagtttttgataacattcattgataaagaaagacaccaaaagcaacttaatgagaagctagttggaaggttgaagaaatgtgaaacgcaaaagcaatgggatgacattgcattcgtgttaaataatctaccatataaaaacgaaactgtcactgcagtattggaggaaggtttcaaagtggtttctgcaagggaataa

SEQ ID NO: 1805 - DNA, 2328 bp, Saccharomyces pastorianus
atgtcatttgatagaccagaaatatacagtgctcccgttttacagggagaatcgcctaacgacgatgacaacacggaaatcattaagtccttcaagaatttcatcttggagttcagactggattctcagtttatttacagagatcaactgagaaataacatcctcgtcaaaaactattcattgaccgtcaacatggaacatttgattgggtacaatgaagacatttacaagaaactgtctgatgaaccttcagatataattccattgtttgaaactgcgatcacacaagtggccaaaaggataagtattctaaacaaagcgcagtccggtaatacgaataatcaggacggggagggcacaattgcggatacagactcgctcctgctgagctctttaccaacatttcaattagttttaaattccaatgcaaaccaaatacctttgagggatttagattccgaacacgtctccaagattgtccgtctttcaggaataataatctcgacttcagttttatcttcccgtgccacctacctttctataatgtgtagaaattgcagacatacatcatccataacgatcaacaatttcaattctatcacagggaatacagtcagtttacctcggtcatgtttgtctactgctgagagcgaatcctctatggccaatgaatcaaatattggtgatgaatcaacaaggaaaaattgtggtcctgatccttatattattatccacgaatcttcaaaatttattgatcagcaatttttgaagctacaggagattccagaattggttccagtaggtgagatgcctagaaacctgacaatgacttgtgatcgttacctaaccaacaaagttattcccggcacaagggtcactatagttggtatatactctatctacagttccaagaatggtgctggatcagggagaagcggtggtggaaatggtggaagtggtgttgctatcagaactccttatattaaaatcctaggtattcaatcagatgtggagacttcctccatttggaattctataaccatgttttccgaagaagaagaagaagaattcatgcaactgagtagaaaccccaagctttatgaaattttgactaactccattgcaccctctatctttggtaatgaagatatcaagaaagccatcgtttgcttattgatgggaggttccaagaaaatattgcccgatggcatgagattaagaggtgatattaatgttctactattaggtgatccggggactgcaaagtctcaattgctaaaatttgtggaaaaggtttcacccattgcggtctacacgtcaggtaaaggttcttctgcagcgggtttaactgcgagtgtccaaagagatccaatgacaagagaattctatctagaaggtggtgcaatggttcttgctgatggtggtgttgtttgtattgatgaattcgacaaaatgagagatgaagacagagttgccattcatgaagctatggaacaacagacaatctccattgccaaggcaggtataaccacggtgttaaactccagaactagtgttctagcagcagcaaatcctatttatggtcgttatgatgatttgaagtctcctggtgacaatattgattttcagaccactattttatcccgtttcgatatgatttttattgtcaaggatgaccataatgaagaacgtgatatttctatcgccaatcacgttattaatattcataccggaaatgcaaatgccatccaaaatcaacaagaggaaaatggtatggaaattagtatcgaaaaaatgaaacgttatatcacgtattgtagattgaaatgtgcaccaagactttcaccgcaggccgctgaaaaactatcttcgaattttgtcactattagaaagcaactattgattaatgaattagaatccaccgaaagatcgtctatccctattaccattcgtcaattggaagccattattagaataacagaatcactggctaaactagaactaagtccaatcgcacaggaaagacacgtcgatgaagcaattagattatttcaggcatctacaatggacgctgcctctcaggatccaatcggtggtttaaaccaagcaaatggcacgtcattatcagagatccgtcgttttgaacaagaattgaaaagaagactacctattggttggtctacttcttaccaaactttaagaagagaatttgtcgacacacatagattttctcaattagctttggataaagccttgtatgcgttggagaagcatgaaacaattcaattaaggcatcaaggtcaaaatatatacagaagtggagtatga

SEQ ID NO: 1806 - DNA, 1785 bp, Saccharomyces pastorianus
atgagtagcgaggataagtctgtacaaggcgcttatatcgatgactctacatctttcgaatcatttcaccttgactctcgtttattacaagctattaagaacacaggattccaaaatccaacactaatccaatcacattccatttctttggctttacaggagaagagggacattattgcaaaggcagctaccggttctggtaagactttagcttacttgatccctgttatccaaactattctagagtacaagaaaacaattggtaacgaagaagaaaatggcactctaggtattatacttgttccaacaagagaacttgctcaacaggtgtataacgttttagaaaaactagtcctatactgttcaaaagatataagaactctgaatatatcatctgacatgtctggttccgttttgaatactttactaatggaccagccagaaatcatagttggcacacctggtaagttgttggacctactccaaactaagattaattccgtttctttgaatgaattaaaatttctagttattgatgaagtggatttagtattaacatttggttaccaagacgacttgaacaaaattggtgaatacttacccttgaagaaaaaattgcagactttcctaatgagtgcaaccttaaacgatgatatacaagctttaaagcagaaattttgtcgttctccagctattcttaaattcaatgacgaagaaataaataagaatcaaaacaaactgcttcaatactatgttaaagttagcgaatttgacaagttcctattatgttacgttattttcaaacttggcttgatcaaaggtaagacactaatttttgttaataatattgacagaggatatagactcaagctagtcatggagcaatttggtatcaaatcttgtatactaaacagtgagctacccgttaattcgaggcaacatattgttgatcaatttaacaaaaacgtctaccaactactaattgctacagatgacaccgagtatatgaaagaggaggatgaagacatagaagaaggacataatagcgagaatgaacaggagaggccttcgaaagtcgaaccagaaaatggtgaaaagccaagtaagaaaaggaaggtccaagtgaagaaagacaaggaatatggtgtttctcgtggtgttgattttaagaatgtagcatgtgtcctaaattttgatttgccaacaacagccaagtcgtatgtgcatagagtaggtagaactgctcgtggtggtaaaaccggtacagcaatttcatttgtggtcccattgaaagaatttggtaagcataagccgtcaatgttgcaaacggctaaaagagatgaaaagattctttcgcgtatcatcaagcaacaaagtaaactagggttagaattgcaaccttacacatttgaccaaaaacaagttgaagggttccgttacagaatggaagacggtttccgtgccgtgactcaagtcgccatcagggaagccagagtgaaagagttgaaacaggaattactggcaagtgaaaaattgaaaagacatttcgaagaaaatccaaaagaactacaaagtttgaggcatgataaagagttacatccagcaagggtgcaacaacatttaaagcgtgttccggattatttgcttcctgaatcagccagaggaaatggggctaaagtcaagtttgttccgttccacaatccaaagaagcgtcatccacatagaaagggtaaagttggtaaacccaaaaatggtaaagttgatccattaaaaaacttcaaatga

SEQ ID NO: 1807 - DNA, 2340 bp, Saccharomyces pastorianus
atggaacaatcaaatacgacaaaattcaaattcttatcattgggaggaagtaacgaagtcgggcgatcatgccacgtattacaatacaagggcaagacagtgatgcttgatgcagggattcatcctgcttatcaagggctagcttcactgccgttttatgatgaatttgatctttccaaaatcgacatcttattaatttcgcatttccatttggatcatgctgcttcacttccttatgtgatgcaaaggacaaattttcaagggagagtttttatgacacatccaaccaaagccatttatagatggttgctacgagattttgttagagttactagtataggttcttcatcctcttcaatgggaggcaaagacgaaggcttattttcagatgaggacttagtagagtccttcgataaaatcgaaacagtggattaccattcgactgtggacgtcaacggcatgaaattcacggcattccatgcaggtcatgttttaggtgcagcaatgtttcaaatagaaattgctggtttgagggtgctatttacgggggactattcgagagaggttgatcgtcatttaaattctgctgaggttcctccactttcgtccaacgtattaattgtagagtctacctttggcactgcgacccatgagcctcgtttgaatagagagaagaaactgacgcaattgattcattccacagttatgcgcggtggtcgtgttcttctgccggttttcgcattagggagagctcaggaaatcatgcttatattggatgaatattggtcccaacatgccgatgaacttggtagcgggcaagttccaatattttatgcatccaacttagccaaaaaatgtatgagtgtctttcaaacctatgtaaatatgatgaacgacgacattcgaaaaaaattcagagattctcaaactaatccattcatattcaagaatatatcctatttgaggaacttggaagatttccaagattttggtcccagcgtgatgttggcatctccaggtatgcttcagagtggtttgtcaagagacttgcttgaaaggtggtgcccggaagacaagaatttggtactgatcaccggttattccattgaaggaacgatggcaaaattcataatgcttgaaccagatacaatcccttcaataaacaatcctgaaatcaccattccaaggcgttgccaggtcgaagaaatctcctttgctgcacatgttgatttccaggaaaatttggaatttattgaaaagattagtgccccgaatattattcttgttcatggcgaggctaatcctatgggtcgtttgaaatcagcattattgtccaatttcgtttccctaaagggcacagaaaatgaagttcacgttttcaatccaagaaattgtgttgaagtggatcttgaattccaaggcgtcaaagttgcaaaagctgtgggaaatattgtaaacgaaatatacaaagaaaaatcatcgggggacgaacctacggttaaaatagaacctgtaaaagaagaaactaagaatgcattggatctacaagctgaagatgatactgaaacagatgagcataaggatataatcgtttccgggattttggtctcagatgataaaaacttcgagttggactttctgtcattatccgacttaagagaacatcaccctgatctatctacaacaatattaagagagcgtcaatcagtccgtgtaaattgtaaaaaagagcttatttactggcatattttacaaatgtttggtgaggctgatgttcttcaagacgatgataaggtgacaaatcaagaaccaaagcttaagtcagaagaaggtgacggtacaaccaaatctggtaaactaattttgcagataatgggggatatcaaattaactgttgtcgacactatagctactttagaatggacacaagatttaatgactgacaccgtagctgattctgtcattgcaatacttatgaacgtagattctgctccggctagtgtgaagttatccagtcgctcttgtgacgatcatgaacatgaccatgacggcgaggtgcaatcttttgcacaattcaagatggatgaagtgtcgaaagcaaaacaaatctcaagattgttcaaagaacaattcggtgagtgttttactttgttactcgataaagatgaatacattaatagcaagcaaaatacaattaatggagttgtcactatcggtaagaacactgctaaaatcgatttcaataacatgaaaatactagagtgtaattcgaatccactaaaaggtagggtggaaagccttttgaatattggtggcaacttagtcacaccgctttgttaa

SEQ ID NO: 1808 - DNA, 786 bp, Saccharomyces pastorianus
atgtcagatatagaatcattaggcggggccgcaggtctattcgaagagccagaggactttcttcctcccccaccaaaacctcattttgcggaataccaaaggtcgcacagcactaaagagtccaaatccgatgtaacagacatcaagcttcgtctcgtcggtacgtccccgctttggggtcatcttttgtggaatgcgggggtatatacatcgaaccatttggatgctcatccagaactgataaaggggaaaactgttttagaattgggtgctgcagcagctctaccttctgtcatttgtgctttgaacggtgctaaaatggttgtttctactgattatcctgatcctgatctaatggaaaatattcgttataatataaaaactaacgttccagaaggactcggcaacatcagtgcagagggatatatttggggtaatgattatactccattattggccaacatcaacaagtctaacagtagcaatgagaagtttgatttgatcatcttgagtgatttggttttcaatcatacagagcatcataaattacttagaacaacaaaggacttattggctgaaaatggtaaggcgttagtagtgttttcaccacatagaccaaaattgttggcaaatgacttggaatttttccaattggctaacgatgagttcagtttggttcctgagttgatcgaaatggttaattggaaaccaatgttcgatgaagatgaagaaacagtcgaaatcagatctcgcgtttacgcatattatctaacccataaaaagtaa

SEQ ID NO: 1809 - DNA, 1602 bp, Saccharomyces pastorianus
atgtcattcttttataccatccttctatttacacaatttttagtgtcttcaactaatgcttttgatggctccgttaatactaatgttgctgtttactggggccaaaattcagcaggcacacaagaatccttagctacttactgtcaatcttctgatgctgatattttcctattgtccttcttaaaccagtttccaacacttggtttgaactttgccaacgcatgctctgatacattttccgatggcttgcttcactgtactcaaattgccaaagatatcgaaacctgtcaatcccttggcaagaaagttcttttatcattaggtggtgcgtctggtagttatttattttcggatgattcccaagcagaagatttcgctcagactttatgggatacttttggcgaaggtactggtgctagtgaacgtccatttgactctgccgttgttgacggttttgattttgacattgaaaacaacaacaatgttggatacagtgctttagctaccaaattaagaactttatttgccaaaggtactaagcagtactacctttctgctgctcctcaatgtccatatccagatgcttcagttggtgacctgctagagaatgccgacattgatttcgcgttcattcaattctataataactactgtaatgtcaacggtcagtttaattgggacacctggttaacctatgctcaaactgtatccccaaataagaacataaagctgttcttgagcttacctggttcttcttcagcagcaggatctggatatatctctgatacctccttattggaatccaccattgccgaaatctcatcttcaagtgcattcggtggtattgcattatgggatgcatctcaagcttttacaaatcaactaaatggtgagccatatgtccaagttctcaaggaactgttggcagatgctgactcaaccccgacctcttctactaccactaccttaaaatccacaactacttcaaaatccacgactactttaagttcaacaacttctacctctcaaaaaaagaccacccaaattaccactaccacacaaagtaagactaaagtaacgctatctccaaccactactagtactatagaaactccaactaccagcagtacagagataacatcatccaccatgacagagactacttccacgaccactacgtcaaagaatactcccgctatcaccacaacaaagagtcctttcactactgctaccaccactagcgtaaaaactactctgtctactccaacgactaccacaagcacactttctccaactacaagtacactttctccaactacaagtacactctctccaacaaccacaggctcaagctcagacagtgcggctcgtacaaccgctaaacagttaaatgctcaatatgccgccggtcaattgaatggtaaatctacgtgtactgagggcgagatcgcatgctctgctgatggagagtacgctgtttgtgaccacagcgcctgggtttatatggaatgtgcttcaggaactacgtgttatgcttttgactcaggtgactcagtgtacacgcaatgtaatttctcctatttggaaagtaactacttctaa

SEQ ID NO: 1810 - DNA, 1422 bp, Saccharomyces pastorianus
atgaagttgaagttaatagtgaatggttgcgaagcaccagatgactataaattattgagaactactatcaatacggtagcctcgttgagaaagacagctattttaagattcaatagcgaaaggttgaccataatatccactcccaaatcgtcactgaatagtagtagcaatggtacaatactacgcggagacactggacaactatggtgtactattcctcaggatgtgtttagactgtatacagtcatatccgctcgcgaactaaatacaataacaatggagtgcaattgtgactctttattgagtgttttcaaaagatacgaccgcgtaatgaatcaaggatcctcttctaatatgactataaagctgcagtcaatgcctgaatggaatacaaataacggaacactttcaggaggaacagccggaggtgtggatacaacatcaaaaccaaaccctatttgtgcattgggtgtaacttttgaagaaattgttcatactggcggtcccaatgatgctgtggtcatgaatgggggaatagatgatcaaaatggcttgccgacgacagtagctacaggaaatttacttgcaagtaacaaggttattatgcactcgtttaaggtgccagtaaaattattgtttcgtgctcaggacacgcgaatacaggagcccatgatcaactatattcagttaatgatgtacaaactgccgccgatttctggtgagttcggttctgcctttcatgggtttataagacgtgtcgaacggtatactaacgttaatcacattcatttaactggaatcaagaagaaaaagcagggcgacgagggagatgatgtggagttgaaaataattgtgaatgagttagattggcaattggaaatatgttggaatggacccttagactcagtgatacaacaacaagagagtagttctgccaatccttcccaaaatcataatatggacatccatcctgagcatgaacaagaatctcttcccatgattgatattgacaaaccgatgtcttcgctatataccaatactagagatggagagatagaggagaatgctcgttatgatgaagacctgttgaggattgaagacagtgaaattgctgatacgcgaaataattacactactgacaacagcgacgatacaagattcaatgatgtgtctgtaatggtagaaaaggcggaacaagagagttcgttcactcatgaagtaattatccgctgcaaagattggaaagtctgttccaaactatacgcagcgttcgaggaagttgttttggcaatttctcacgacgaatcttgtgtattccattgttcgctggaccgtggtagtttggaggacagcgaggacgtggaaaagccaagggaaagagggcagatcatatattacatggcgagatcaaaaggtttgtga

SEQ ID NO: 1811 - DNA, 1938 bp, Saccharomyces pastorianus
atgctaaaacttaaggtcaaaacgttaaagcaactatggtctcatcaacggcatacatacattctacgatataatcatacggtgacgcccgcacaggtcttgcaaacacggattgaacaaattccaatcgaaaattacagaaacttttctattgttgctcatgtcgatcatggaaagtcgacattaagtgacagactgctagaaataacacacgtcattgatccaaatgcgaaaaataagcaggttctagataaacttgaagtcgaaagagaaagaggaatcactataaaagcacaaacatgttcgatgttctataatgacaaaagaactggagaagattaccttttacacctaattgacactccaggacatgtagattttagaggggaagtttcaaggtcttacgcatcatgcgggggggctattcttttggtcgatgcctcgcaaggtattcaagctcagacagtggctaatttctatttggcctttagcctggggttgaagttaatcccggtaataaataaagtcgatctcaaccttacagacgtaaaacaggttaaagaccaaatagtgaataattttgagcttccggaagaagacataatcggcgtcagtgccaaaacaggtctaaacgtggaagacctgctattgccagctataattgaccgcataccaccaccaactgggagactcggcaaaccctttagagcactattagtagattcgtggtacgatgcatacttaggagcagttcttttagtcaatatagttgacgggtctgtacgcaagaatgacagggttgtttgtgcccagacaaaggaaaaatacgaagttaaagataccggaatcatgtatcctgacaggacttccacaggtactttgaaggcggggcaagttggctatatagtactgggaatgaaggactctaaggaggctaaagtaggagatactattatgcatttgggtaaggagcatgaaaccgaagtacttcctggctttgaagaacaaaaacctatggtgtttgtgggcgcatttccggcagatggggttgaatttaaagcgatggatgatgatatgagtagacttgttctcaatgacagatccgttaccttggagcgtgagacttctaatgccttaggacaaggttggaggttgggctttttaggatctttacatgcatctgttttccgtgaaaggctagaaaaagaatatggttccaaattgattattacccaacccactgtgccttatttagttgagttcactgatggttcaaaaaagctaataaccaatcctgatgaatttccagacgctgctacgaaaagagtaaacgttgcagcttatcacgaaccatttatagaggcagttatgacgttgccccaggaatatttaggcaatgttatacgtttatgcgacagcaatcgaggagaacagattgatatcacttaccttaacactaacggacaagtaatgctaaaatattaccttccgttatcacatttggttgatgacttttttggcaaattaaaatctgtctccagagggtttgcttctttggattatgaagaggctggatatagaaattctgatgtcgtgaaactacaactattagttaatgggaatgctatcgacgccttatccagggtattgcacaggtctgaagttgaacgagttggtagggaatgggtaaagaaattcaaagagttcgttaaatcgcaattatatgaggtcgttatccaagctagggctaataacaagataatagctagggagaccataaaggcgagaagaaaagatgttcttcagaagttacatgcttctgatctctctcgtagaaagaaactattggccaagcaaaaagagggtaaaaagcatatgaaaactataggtaatatccaaattaaccaagaagcatatcaagcatttttacgtcgttga

SEQ ID NO: 1812 - DNA, 582 bp, Saccharomyces pastorianus
atggttacccttgaatacaacacaaacagcaaacagataagtgcaagtggcgccgatgtcacacaatccaccgaaaccaatatcgatcaaataaatgtcctcactacatcattaataggtgaaacaaacccaaatcttactccacaaccaaatgaagctctaagtaaaatgatcaaaggcttgtttgaaagcggtatgaaaaatctacaacagaaaaaactgaacgaggctttgaaaaatgtttccttagcaatcgaaatggcacaaaggaaaagagcgccttgggaagcctttgctattcagctaccagagttgcacttcatgcttcgtagcaaaatagatttgtctttggtgcttggaaagtatttagaggcattgcaagatctagactttttactcggtacggggctcatccaaccagacgtctttgtgaggaaagcggactgtctgttgaaattaggacagtgggaagaagctagagccactttagaaagaggcttggcatttgttcccgacgatatgaaacttagagcccttctaatagaaacagcaagaaatttagccgaatataacggcgagtaa

SEQ ID NO: 1813 - DNA, 660 bp, Saccharomyces pastorianus
atgtctgccccagctgctaacggtgaagtcccaacctttaaactagtccttgtcggtgatggtggtactggtaagaccactttcgtcaagagacatttgactggtgaattcgaaaagaagtacattgccaccatcggtgttgaagtgcatcctttgtccttctacaccaatttcggtgaaattaaattcgacgtctgggacactgctggccaagaaaagttcggtggtctaagagacggttactacatcaatgctcaatgtgccatcattatgttcgatgtcacctccagaattacttacaagaatgttcctaactggcacagagatttggtccgtgtctgtgaaaacattccaatcgtcttgtgtggtaacaaggtcgatgtcaaagaaagaaaggtcaaggctaagaccatcactttccacagaaagaagaacttgcaatactacgacatttccgccaaatctaactacaactttgaaaagcctttcttatggttggccagaaaattggctggtaacccacaattagagtttgttgcttctccagctttggccccaccagaggtccaagtcgacgaacaattgatgcaacaataccaacaagaaatggaacaagccaccgccttgccattgcctgatgaagatgatgctgatttataa

SEQ ID NO: 1814 - DNA, 375 bp, Saccharomyces pastorianus
atgttccccgccgcttccagaagaatagtgctcaatgcttcgagattaccattgagattgtgtaatagaactttgacgaccacaagagtatcctacaacgtcatacaggacttgtacttgagggaactgaaggaaactaagctggcacccagctctttgcaagatgccgagggtaacgtcaagccttggagcccaccaaagaagccaaccttaccagaattggaacttcaaggcccagacgccctaaaggcatacgccgatcaaaacgtagaaaccgccaacgacaccaagagctctgtggagggcgaagccgaaccaattgaagaggactggttggtcttggacgacgtcgaggaaacaaaagaaagccattga

SEQ ID NO: 1815 - DNA, 696 bp, Saccharomyces pastorianus
atgacaaggtactattgtgagtattgtcattcatatctgactcacgatacgctaagtgttcgtaaatcgcacctggtgggtaaaaatcatcttcgagtaacagcggactattatagaaacaaggcaagagacatttctggcaagcatgatcataaaaggcgccacaaagggaaaaggggtagcaaagaaagggaagaatcaagtgcaagggaaaaactaaaggttacgtgcttgcccaataaggagaaaaggcgaaatatgcacgggaagaagatgaaccaaaaggaactggcacaaacctcgatcaacacactgcagtcgttatacgacggttctccgggctcttccaaggtgttcatagacgccaaccgctttgatataggagatttagtcaaggccagcaaattacctcaaagagccaacgaaagatctgcgcaacacaccgtcaagcaaacttcgagatctagggacgaaacatgcgagagcaatccgttccctagactaaccggtcaagcgaaattagagcctccgaagatattgtcacagtggaacaacaccattccaaagacttctattttttacagtacggacatcctacaaaccacgattaaggaatcgaagaaacggatccacccagatggcctacggaaaccggcgagttccaacgggtttaaaaggaggcgttatggaaattag

SEQ ID NO: 1816 - DNA, 1347 bp, Saccharomyces pastorianus
atgctttcgctaaaaacattactatacacactattgactgtgtcatcagtcattgccaatccagtccctgcaagagacccttcttccatccagttcgttcatgaagaaaataaaaaaagattttacgattatgacaacggtgcgctcggagagcctatccgtggtgtcaatatcggtggttggttagtcctcgagccttacatcacaccatccttgttcgaagccttccgtactaatgataacaacgacgacggcattcctgtcgatgagtaccattactgtcaatccttaggaaaggacttggctaagagccgtttagagagccattggtctactttctaccaagaacaagattttgctaacatcgcctctcaaggtttcaacctcgtcagaattcctatcgggtactgggcgttcgaaactttggacaacgacccttacgtcactggcattcaagaatcctacttggaccaagccatcggctgggctagaaacaatagtttgaaagtctgggttgatttgcatggtgctgctggttctcaaaacgggttcgataattccggtttgagagattcatatgagtttttggaagacagcaatttggctgtcaccacaagcgtcttgaactacatcttggaaaaatactctgctgaagaatacttggacaccgttatcggtatcgaattgatcaatgaaccattgggtcctgtcttggatatggacaaaatgaagaataactatttggcacctgcttacgattacttaagaaaccacatcaaaagtgatcaaattattatcattcatgacgcattccaacaattaaactattgggatgactttatgactgcaaacgatggctactggggtgtcactattgaccaccaccattatcaagttttcgcttctgaacaattagaaagatctatggaagaacgtattcaagtagcttgtgaatggggaactggtgtgttggacgaagcccactggaccgtttgcggtgaattcgccgctgctatgacagattgtaccaaatggttgaacagtgttggattcggtgccagatacgatggttcttgggtcaatggtgaccaaacatcttcctacattggttcttgtgccaacaacgacgatattacttcgtggtccgatgaaagaaaagaaaacacaagacgttatgtagaagctcaattagacgcctttgaaatgagaggtggttggattatctggtgttacaagacggaatcaagtctggaatgggatgtccaaagactgatgtacaatggtttattccctcaaccattgaccgccagacaatatccaaaccagtgtaacaccacttctaactaa

SEQ ID NO: 1817 - DNA, 1335 bp, Saccharomyces pastorianus
atgccatctcatttcgatactgttcaattacacgctggtcaagaggaccctagtgacaatgctcacagaacaagagctgtcccaatctacgccactagttcttacgtctttgaaaactctaagcatggttctcaattgtttggcctagaagtgccaggttacgtttattctcgtttccaaaatcctaccagtaacgttttggaggaaagaatcgctgctttagaaggtggtgctgctgctttagccgtttcctctggtcaggctgcccaaactcttgccattcaaggtttggctcacactggtgacaacattgtctccacttcttacttatatggtggtacttacaaccaattcaaaatctcattcaaaagattcggtatcgaagccagatttgtcgaaggtgacaatccagaagacttcgaaaaggtcttcgatgaaagaaccaaggctgtttacttggaaactattggtaatccaagttataatgttccagatttcgaaaagattgttgccattgctcacaaacatggtattccagttgttgttgataacacattcggtgctggtggtttcttctgtcaacctattaagtgcggtgctgatattgtaacacactctgctaccaagtggattggtggtcacggtaccaccatcggtggtattattgttgactctggtaagttcccatggaaggactacccagaaaagttcccacaattctctcaaccggccgaaggctaccacggtactatatacaacgaagcctacggtaacttggcttacattgttcatgttagaactgaactgttaagagatttgggtccattgatgaacccatttgcctctttcctactactacaaggtgtcgaaacattatctttgagagctgaaagacacggtgaaaatgccttgaagttggccaaatggttggagcagtctccttacgtatcctgggtatcctaccctggtttagcatctcattctcatcatgaaaacgctaaaaagtatctatcaaacggtttcggtggtgtcttatccttcggtgttaaggacttgccaaacgctgacaaggaaactgatccattcaaactttccggtgcccaagttgttgacggtttgaagcttgcttccaacttggccaacgttggtgatgccaaaactttagtcattgctccatactttaccacccacaagcaattaaatgacaaggaaaagttggcttctggtgtcaccaaggacttgattcgtgtatctgttggtatcgaattcattgatgatattattgcagacttccaacaatctcttgaaactgttttcgctggtcaaaaaccataa

SEQ ID NO: 1818 - DNA, 5703 bp, Saccharomyces pastorianus
atgagatttactagaggattaacagcctcatcgtctttaagggcgaaagctattggaaagttgaccaaattttccactgatactttagatgagcaacgtgacgatggaacaacgctagatttaataactcgtactctgcctatcttctactctacgaacacatcgaaaatatacaccatgccactcacactgagtgaatgggaagtgttaacttcactttgtactgccatccctacttcatttgatttggtggaaaagatgattaaagaaatcattgagccctactttctggaatctccaagacaaagaatttcggacgttctgtcctcaaggttcaaattgaaagagctaagaaatccgatcgagctactgactttccaattgacaaagtttatgattcacgcgtgtgaaaaatatcctattctttatgaaactataagcggtatcatatcagtctattttgagcgcgtattagaagtctttactgtaaagcaatcaggattactatcgttgattggtttcattaacgcgttcattcgctttcccgattctgcggaactaactaaatttgcttggagaaagttagcaaagcttgtatttcatggaccatttttaagtgaagttgaggcaatcttgaattcctcaacagcatttacgaatgattcaatcgtccagtactatgatgccggaaatgagctatccggcgcgtatatattagaattggtatctcgcttacaaatttccttaatatctcacctgctacatactccagatatcaatggtaatctagatgaattcctgttaaagcagcaacatcaattttataagtttgatcaggaagctgctgatattggcaccgacaccaagagtatcgatgagtttttctttaacatcagatgtaacaaggaattttttgtagatgtgtgcaacctatccttaaagttttgctctgagtctcatattctcgatttatctactgataatcgagcaaagttctcctttgatacgcgggcccactacttacaaaccctgtgtctaatcccatttatcgaagatacagaaagcgagatgtttgaaagtttcacaaaaattgtttcggaatccgttgataaattcttcctgtctgatgttgttacaccattattgacaaaagcgattgtaacttctgcctcactactgaatttttttacggaaaaattatcgctaactctaattcgtatgtttccgttactagttgcatcccctcacatcaccaccagtacggttaaagatgttgcaaaaatatttactacagggttataccctctaaatgaagatgcgattgtgagtacaatctattctatgaacaacttattagccgtttctgaagatggatctccagctccagtgcttcgcgagcgtcagttaacaataacatcaggcaaaaacattgagagagactacttacctttgagaaattcgttccctagtttgaatggcgccagtgccccccttgggaatgcaactgtaggtcaaatatcctcacacgatgccaacagcggaaccactatgacgtaccacgcctctttaatctctaattgcgtggctgcaacgacaacaattgcgtcgtattataacactcaaagcataacagcattgactatttccattctcactcagaaagttaatgctatgtttaaggagtttgatagtgttatcctagattctttggcaagattggctcccaatacatcagtgactgaattttcccttcttctaaaatttttcaaatcgagaactgtttttgccgccaaaaataacgatagtgcgttattggaaaatattatcaatgcaaagtctgcaatatccaaggaattattggctaatcatttttcaagtgacctatatttcatatatcttcacgatctattggattcaattatttctagtggggaagtagaacgattggaacatcacaggccgcaaacagaaatttctcgtgtggctgaccaaatagctacttatctaaagccacttgctgcgctcttacctgatccaggtaacaatcctatagacatcagcaaagatgaagccagtacaaataaatttaggaatgcatggttcaattttgttattcatggataccacttgaacgcacccattgtcaaagaaaatttttctgcgttattaaccattgcctccaattcaccgcctttagcttctgaattccctgccaataacaaagaactttctttggaaatgaacacaatcttgcgtcgtggttcctccaatgaaaacatcaaacaacaaaagcaacagataactgagtatttcaatacaaatatcgttcagtacaggaccacctcgtcgtccaaaatcatgtttttggcagccgcagctcttttagagacaataaggtgtgaagcaggtgattgctcaaaaacattactgtatttttccgatgcttctatcctttccggttcaatcgaaaaatgtatagcagttttatcggtttctatgatcagaaaatatgccaagttaattcaaaggggaaatgatgccatattcaactccaaaatgattgctcaacaacttaataacttgttactttgcctttcccatagggagccaactttgcaagatgctgcttttcacgcttgtgaaatatttatcagatccatcccatcatcgttatgtcatcacctatctctttacactttgctggatatgttgaccgccttatttgatagtatcttagattcggagtccaataaattcgagccacgttatgagtttaaactaaaacattctcgaacaaaaatcttgatcccgagttcagcgtcatggcgtactgcaacgttatcgagattgcataagtctgctaaagaatgggtaagaatagtattgaatagaagcaaccaggatgctaaaattttgctacaatcatacatctctgacttgggcgaatacagcagattaaattctgttgaatttggtgtctcgtttgcgatggacatggccggtttgattttacctgcggataaggaattatcgaggctgacctactatggtccggagaaaccaaacacaatatcagggtttatatctttgcactcttggagatctaaatatctttttgatactgctataacttcatcaccagaggatatcaagaggcaaatcactatttcaaaaaaaaacattagaaaaaatctaagcttaggaaacaaagttgttactaaagacgtcacagactttctcgacatgtctaccgctttgttaattcttggtaatggctcacctgcatctttggtatacgatatcgtgcacatcccctttgaagtctttacttctgcctctcttaagattgctacaaatgtctggttaacaatcataaccgaaaagcccgaagttgcacacctccttttagtagatgtgtgctattgttggatgcgctccattgatgacaacattggcctctattctcgtgatcatgacataaagggagaagagtaccaaaaaatggaatattctccctatgacaaggctggtatcaacagagacgcaaaaaatgcatctcaagctatgcaaccacatctccacgttattaaattctttgcttcccatttcgaaggaacattatttcagagtgactttttgttgaaaatattcacaaagtgtgtgttatatggtattaaaaacttgtataaggcttcactccatccgtttgccagaatgatccgccatgaattgttactctttgcaacgcttgtgctgaatgcgagctataaacaaggatccaaatacattggtcgcttatcgcaagagatcacaaatggtgctttgagttggttcaaaaagcccgtcgcttggccgtttggttctaatgaacttaaaattaaagctgacttatctattactagagatctttttgttcagcttaacaagctaagctcattaatgacgcgccactgtggaaaggattacaagattttaaactactttttggcaagtgaaatccaacaaattcagacatggttgaccccaatggagaagattgaaggggccaacagtaacgagctctcggacgatatcgttgaatctacgttcgcaaacgatccaattttagcaataaatcttttgcagagatgctacagtaagaaggcggaggaggcgctagtaaggttagtcgaaaagcaccccttaatgtgtgtgggatccccaagcgctcttgacctattcataaaaggaagtggtttaagcagtaagaaggacttgcacgcagctttgtattggataccagtcagtccattgaaatccatcaatcttttccttcctgagtggcaaggtaaccctttcatcttacaatttagcatctattccctggaatcgcaagacgtgaatttagtatttttctacgttcctcaaattgtccaatgcctaaggtatgacaaaactggatacgtagaaagattaattttagacactgcaaagataagtgtgttattctcacatcaaattatatggaacatgctagccaactgttataaagatgacgagggtatacaagaagatgaaatcaaaccgactctagatcgcattcgggagcgtatggtttctaccttcagccaaacccatcgcgaattttacgaacgtgaatttgaatttttcgatgaagttactggtatatctggtaagttgaagccttacttaaagaaaagtaaagctgaaaagaagcataagatcgatgaagagatgagcaccattgaagtaaaacccgatgtttatttgccctccaaccccgacggtgttgttattgacattgatcggaaaagtggtaagccacttcaatcacacgcaaaggcacctttcatggcaacctttaaaatcaagaaagaagtgcaggatcctttgaccaagaaaagcatggaaattgaaaaatggcaaggagcaattttcaaagttggtgatgactgtagacaggatgttctggcgttgcaattggtttctttgtttagaaccatatggtccagcattggattggatgtctatgttttcccttatagagtcaccgcgacagcgccaggttgtggtgtaatcgacgtgctacccaattcagtgtcccgagacatgttaggacgtgaagccgttaatggattatacgaatatttcacaagcaaattcggtaacgaatctaccatagaatttcaaaatgcacgcaacaactttgtcaaatcattagcgggatacagtgtaatttcgtatctgttgcaattcaaggacagacacaacggtaacattatgtacgacgatcaaggccactgtctacacattgatttcgggtttatctttgatattgtcccgggtggcatcaagttcgaggcagtcccattcaaactgaccaaggagatggtcaaggtcatgggcggctcgccccaaacaccggcctacttagacttcgaagagctgtgtattaaagcatatctggcggcacgtccacacgtggaagccatcatcgagtgcgttaaccccatgctaggaagcggtcttccatgcttcaagggtcacaagacgatcaagaatctaagagcaaggttccagcctcaaaaaaccgaccacgaagcggcgctatgcatgaagacgctaattcgcaaaagttatgagagcatcttcaccaagggttacgatgagttccaaagactcacaaacggcattccgtattga

SEQ ID NO: 1819 - DNA, 906 bp, Saccharomyces pastorianus
atgataatataccgtgcagtacaaactgcgctattggcaggtttttttttgaaatctggggagtgtttagcttccaatgggagcactgcattaattggggacgaagatatgcaaactccctttccagaatggctaaaagaatttaccaatattactcaatggcctgggcttgacccaccttatattccactagattacatagatctcactaaagtcccagagtttgaacggtatcaatctggtaggtgtccaaacatttccagagaacagtgctcattcgactgttacaactgtgttgatgttgatgatgttacttcgtgtttcaagctttctcaaacattcgacgatggtccgaccccagcaacagagacattgcttgaaaatttgagacacaggaccacttttttcgttttaggaattaacactgttagtttccctcatatatacgagagtgtcgtagagagaggtcatttagtcggtacacatacttggtcacatgcatttttaccaagcctatcaaatgaagaaatcgtagcccaaatcgagtggtcaatttgggcaatgaatgctaccggtaaacactttcctaaatattttagacctccttacggggccattgataacagggtgagagctattgttaaacagtttgggttaactgtggtcttatgggatcacgatacttttgattggaaattaattacgaatgataaattaagaacggaggagcaaatattcaaggatatagagacttggaagagtcaacgaaaaggcttaattttggaacatgatggtgcacgaaggactgtcgatcttgcgattaaaatcaataaattagttggtaatgatcaattgactgttgcagaatgtattggtgatacagattatatagagcgatatgactga

SEQ ID NO: 1820 - DNA, 264 bp, Saccharomyces pastorianus
atgtcactaagaaatatatcaacggtcacaaaaaacctaagattaacagcaaaatgctttaccccaaagagctcacctacatcaacaaccatcccagttataaaagatgctagtgctactcattatcgtagaatgtctaccataaacaactttacaagcttaaacggatattcttcagtttctaaaactgtccatgataagcccattgttatctgcacagataacgaagaggtggagactgtatcggagcacgtgaaagtttaa

SEQ ID NO: 1821 - DNA, 4761 bp, Saccharomyces pastorianus
atgtccgatactaatccgtctatgtccagtgcaaactctaaaagagaggacagtaacgcttctcaatcaagccaaacactattcagttcttcctcaaatacgtctacttctaccaattcggaagctttgtcagcatctccttcttcctccccctcggcgactgagttgaccagtattcgcccaattagtatagttgttgctgcttatgatttcaatcaccccataaagaaagatggctcttcccaacttttatctgtgcaacagggagatactatatatatactgaataaaaattcgtctggatggtgggatggattagtcattgacgacaatagtgggaaagttgatagaggctggtttcctcaaaactttggaagaccgttaagggacagtcattttcggaagcatagtcatccgatgaaaaagtatagctcaagtaaaagttcaagacgcagtagcttgaatagtttgggtaatggtgcgtatttgcatgtgcccagaaattcaagtaaaagtagaaggggaagctctactttatcagcgtcactggcaaccgctcacaatgcagagtcaagtaccggcaacaataatgctacatctgtgaataattctagtaccttttcgacttcgaatgatgattcccaagtgacccctgagtcgtcaaactttaactccaataccagccttacgcaagatttaacaaagagtgctgaacgattatccaaaacaaatacaaatacaacgatgaatgacagaaataccgatattcaatcttatagcgagaaggcaagccccgtaccaattccagaggatactatcaaaatattaccgttagaagagatagaaatgataataaatgggatacactccaacattgcatccacttggtcccctatacctctgatatcaaaaacatcagattataaattggtatactacaacaaagaactggatatttattgctcagaattacctttgatttcgaactcagtcatggattgcgatgacatttgtgatagagaaccaaaattcccctctaatgatcatttgatcaaattatacacaagagatttaaggaaaaatgcaaatatagaagacaattcgacaaggtcgaaacaaatgggaaatgaacaggacaggccgactcattcaatagaacaacaagacccagcgcaaattgatcatgttgatgacgatgataacgaaaataataaaaacgaatttgatggggctggtccttcatcattaaattctttgtctgcccccgacttggcacaaaatcagtcaagaacatccccatctcgttcttctctattagcgaaaagcgatatattttatcattactcaggagatataaaaatgtggatagagttacaagatttgactgtttactatacaaaaacagctcacaagatgtttctcaagaagagtcgtcaaaattttacaaagtacttcgatctgatatcagattcgatagtatttacgcaattagcctgtaggttaatgcaacacgaaatcaaagcaaaaaactgcagcaaagaaattaaaaagatttttaaaggtctgatctcctcattatcaaggataagtattaattctcatttatattttgattctgcttttcacaagagaaaaatggacacgatcaatggtaaaggcaacgatgaccaggggaataatggtattataggagaggcagatgaaaataggaacgaaggagagaatgcgcacgaccttgtttcggcgcctttatctggtaaacgtaacgtcagtactagtacaacggatactttaacgccaacaagatcatcttttagtactgtcaatgaaactgatatggaaaactttcagcttttagatccgagaaatagtatcaattccatggtaaccccgagaacttcaatacaatactctactttagaggacatttctctatcgccatctaataaaaatctaaagtcaatcaagacagtttatgaaatggttgatttggaactcagtaaattttcaagacatgttcagctactttattttgtgttacaaaactcggtttttttagatgataataccttgccacaattactaccaagattttttaaaggcacatttagcggtggttcttggacaaatcctttttcaacgtttattacagacgaatatggaaattcctcaaaaaataaagctgttccatcaaatgaggtaactgttttatcttccaagaactcttcgattacaaggatttcgccaaagatgacagataccattgcctccacaccaggctatagtggaaattcagaaacaaattcccaagctgactcgaaagcaggcacagccgtatatagttcggttgttacacctttcaacaggccttctcataacagaacattttcaagagcaagggtttcaaaaagaaagaaaaaatatccattaactgtagacactttgaatacaatgaaaaaaaaatctactcaaatttttgagaagctaaataacgctacaggtgaccacttaaaaatcataagcaaacccaaaagcagagttagaaacttagaaatcaattcaagcacttatgaacagataaatcaaaatgttttattattagagatattggagaatttagatttaacaatttttattaatttgaaaaatttaatcaaaactccaagtattttattggatttggaaagtgaggaattcttagttcacgccatgtcgtcagtctcttcagtattaacagaattctttgacataaagcaagcattccatgacattgtgattagactaataatgactacacaacaaacaactttagacgacccttacttgttttcctccatgagatccaatttccctgttggacaccatgaacctttcaaaaatattgctaatacatccttagttaagggtcctttgcataagaaaaacgagcaactagcgttgtctttgttccatgtattagtaagccaagacgtggaatttaataaccttgagtttttgaacaattccgatgattttaaggatgcttgtgaaaagtacgtcgagatttctaatcttgcatgcattatcgttgatcagttgattgaagaaagagagaacctgctgaactatgcggccagaatgatgaagaacaatttaactgctgaattgctaaaaaatgagcaagagaagtggttcgatatttattcagaagattacagtgatgaagattccgagaatgatgaagctattattgatgatgagttaggatccgatgaatatacggaacgcaaaacggccaatatagagaaaaaccttccatggtttctaacttcggattatgaaagcagtctagtgtttgactcaaggggaaagattcgcggtggaacgaaagaggcactgatcgaacatttgaccagtcatgaacttgtggatgcaggtttcaacgtgacaatgctaataacttttaggagcatattaaccgcaagggagtttttctatgccctcatttacagatataatctatatcctcctgaaggattgagttatgatgattacaacatttggatagagaaaaaatcgaatcccattaagtgccgtgtggtcaacatcatgagaacattcttgacacagtattggactagaaactattatgaaccaggcatacctttaattttaaactttgccaaaatggttgtttctgaaaaaattccgggggcagaagatcttctacaaaagataaatgaaaaactgataaatgaaaacgagaaagagataatgcatatgatgcaacaggattcggtgcaagtaattagttctacgcagaaacgggaaaataaatcgccgacacatatttcttcatcttctttgccatcctccgcttcttcagcatttttcagattgaaaaaattgaaacttttggacattgatccttacacgtatgccacacaactaaccgtactcgaacacgacttgtacctcagaatcacgatgttcgaatgtttggatagggcgtggggtaccaagtattgtaacatgggtggttctccaaacataacaagattcatagcgaatgcaaacacacttaccaactttgtttctcatacgattgtcaagcagtcagatgtcaagacccgttgcaaattaacgcagtattttgttacagtcgcacagcattgtaaggaattgaataacttttcttcgatgaccgctatcgtttctgctctatattcttctccaatttatagattgaagaggacatggaatctagtttctatagaatccaaagatattttgaagaatttaaacaatcttatggattccaagagaaacttcgtaaagtatagagagttactgcgatcagtgacagacatcgcatgtgtcccgtttttcggtgtgtacctatctgatttgacatttacatttgttgggaacgcagactttctccataattcgacgaacataataaatttcaacaagaggaccaagattgcgaatatcgtagaggaaatcataagctttaaaagatttcattacaaattgaaacgattagatgacattcagactgtcatagaagcctctttggaaaatgtcccgcacatcgagaagcagtatcaactctcattgcaagtagaacctagatccggaaatactaaaggtaactcacactctgctaccactagtgggacgaaaactgcaaagtttctaagtgagtttaccgatgataaaaacggaaactttttgaaactaggcaaaaagaaacctccttctagattgtttagataa

SEQ ID NO: 1822 - DNA, 1551 bp, Saccharomyces pastorianus
atggatttcaaggaagagcaagtgtccatcaagcaggacccggaacaacaagaacgccaacaagatcacttcaatgatgtccagatcaagcaagagccccatgaccatgacggcgaggactcacagttcaccaacggcacgcaggaccacgacgatgatgatacatttgatgccggtgagcctgtggtgaaggcagaatccggtgccggtattggcattaccacctcccataacgaaacaggccaggtcctgcctgatcaatcagaggtaaagtttattcgccgtcaaatcaatggatacgtagggtttgctaacttgccgaaacagtggcacagaaagtctatcaagaacggattcaatttcaacctattatgcgtgggatccaacggtattggtaaaacaactttaatgaaaaccttgtttaataatgatgatattgaggctaacttggttaacgatcatgaagaagaactcacgactgaccaagaagaggaagggcacgaggaccaagcacaaaaccaaactcacaaggtcaaaatcaagtcatacgaaactgttcttgaagaaaacggtgttaaattgaatttgaatgttgttgatactgaaggatttggtgattttttgaataacgaccaagactcctggaacccaatcattaaggagatcaactctcgcttcgaccagtacttggatgcagaaaacaaaatcaacagacgctcgataaacgataaaagaattcatgcttgtctctatttcattgaaccgaccggtcattatttgaagcctttggacttgacgttcatgcagatggttcacgaaaaatgtaatttgattcctgtcattgccaaatccgacatcttaaccgatgaagagattttaggtttcaagaaatctattatgggccaattagctcaatcaaatatcgaattgtttaaacccccaatttattctaacgatgatgctgaaaatagcagcttatccgaaagattattcacaaacttaccttatgctgtcgttgggtccaacgacctagtagaaaattataacggcagccaagtaagaggccgttcttatccatggggcgtgatcgaagtggataatgacagccattccgatttcaaccttttgaaaaatcttttaattaagcaattcatggaggagttgaaggaaagaacaaatagtacactgtacgaaaactacagatcatccaaattggccaatttaggtatcaagcaagacaactcagtttttaaagagttcgacccgatatccaaacaacaagaagagaaaactttacatgaagccaaattggccaaattggaagtcgaaatgaaaactgttttccaacaaaaggtgtctgaaaaggagaaaaaactacaaaaatctgaaactgagctatttgcaagacataaagaaatgaaggaaaaattaaccaaacaactgaaggctttggaagacaagaaaaaacaactagagctttccataaataatgcttctccaaacgttaatcattcccctatccccacaaagaagaaggggtttctgcgttag

SEQ ID NO: 1823 - DNA, 1278 bp, Saccharomyces pastorianus
atgtcacaccaaaaccagcttatcccacaggcctatatctccaattttcacaacagattgaccaacgaggatgataacatccccatttttacaatggcccagcaaacaaggcagcataaaagagctaaagtcgtcaattatgctgaatacgacaacgatcttttcgatgaattcaacatgaacggtaccaactttgccaatactgacacacactataaggataatgtcgtttctcatgaaaatacacccgcacttacaaatggtgcgaccatggacggttccgaatacaatgccctggagaatataaacaacaccgaaaatattctatcgaaccacaaatatgatatcgggtcaaacatggttgtagaatctttatccggtctaaataacgccaacaataccagcaacggcccaaataatgccaaagcacaagatattggaaacgccattttgccagatatccaggaccaacaccataacccattcaatatcttgaggtaccctaagataagagacacttttattaatgggagagtggtgtcaccatacagattgaacacagacgataaaacgaaggcaaatgcgaactctgaagaagcaatcatgataccaattactttggaagtagagcatatgggccatactataaaggaccaatttctctggaactacaacgatgactccataactccggaagaatttgcctccatatattgtaaagatcttgatatgacctctgctactttgcaaactcaaattgctaatataataaaagatcaattaaaagattcagaaaatattgcagccacagagataatgtctgacctacatgtaataatcaatttgacttgcaatctacaggacagattttttgaagataatttccagtggaacttgaacgataaatcgctaaccccagaaacctttgccgcttccattgtacaggaccttggtttaacaagagagttcattcccttagtatctcaatcgcttcatgaaacaatcttgaagataaaaaaggactgggtcgatggccatttaatccaggaccatgtaccaaacgatgccgcattcggttatctatctggtataaggttggatattgatgagttgggttctaattggtgcccaagagtagaaatattaacaaaagaggaaatccaaaagagagaaatcgaaaaagaaagaaacttgagaagattaaagagagaaaccgatagattatctagaagaggcagaagaagattggatgatttagaaaccacgatgagaatgtag

SEQ ID NO: 1824 - DNA, 723 bp, Saccharomyces pastorianus
atgtcaggattccttcagagcacgctgcttggtctaggtaaagactatttgcaagacgagtaccaagaacttgcaggacagcatttccagccgaccagggacccattctatgaaacgaacaaagacggtaagaagcatcgtctcaggcttccatattattgcactaaagacgaaagtaaggcgtggaagaatgttcaaaacaaggcgtggatgcatgacaaatcagtgtgtggatgctgttgctggacgtccgttataggatgggcgccattacttgcgcttttaccggtgataggacccttattgatgtattgggtgcatgagcagttaatcgaactggcagacaaaaaatacggattacctgtggaaaccaaggtgaaaatgcacggaaacattgttcttgatctactcatcagtttggtgccggttttaggcagtgttttcgcatggttgcatgcgtgttccacgagaaacgcagccattgtctataattttgttggacaaagagcgctagaaagaaagcaggcagaaatgatgcgtgagaaacaggaaagcgagaagtatgctaatactaataccaacggaccagcagtaaatgggaacgggaacgggaacgggaatgggaacgggaacagaaacaacggcaaagcttacaacaggccaccggcggtggccactccgcccaccgcagcatacacccgtactcagagaggctacaggtaa

SEQ ID NO: 1825 - DNA, 261 bp, Saccharomyces pastorianus
atgaccagaactaacaaatggacagtccacgaagctaagtctaacccaaaatacttttctcataacgggaactttggcgaatctccaaaccacatcaagagaggaggatgcgggaagggcaattggggcaaggcaggcgacgaaatcaacgacttgatcgactctggcgagatcaagaccgttttcaacaaggatagaagaggttctaattctcaaagcaatgagagaaagctttgcgacctgcaacaattccacatttga

SEQ ID NO: 1826 - DNA, 603 bp, Saccharomyces pastorianus
atgaacaacgaatcaatcacagctgagccagaactgcttacacggttgaaagatatagtatgttcaagtacccatttttgggaggagcaactattttataaagttcaagatgttgctacagaggaaaattgcatcactctcagtttaaagtgtacgatatggacggatgctcaaataagcacgttcttagacaggcctagagaacttcattcgcatgttaaagggtatcccgaaatctactatatctccgaattgtccacaactatcaatttcttttccaaagcgggaagttccatagaaatggaccagattattcctcacctaaacgaatatttctcttctttgatagtgtcccaactggaatttgagtaccctatggttttttctacgaccgcaagacttcgtttgaaatggcaacaaggctccctaggcccgatatcatacgctctaaccaattcttctgcattgcttccaataatgctcaaaatgattgcagaagacaagacctcaacaacagtgtatcaaattttatgtcaaaaaagaagcccgccaattcaaaacttccaaattttctgcttaccggcaatcaaacatgataagtaa

SEQ ID NO: 1827 - DNA, 1851 bp, Saccharomyces pastorianus
atgtcttccgtcgatgtgctgttaacagtaggtaaattggacgcctcattggcgttactgaccacccaagatcatcacgttatcgagtttcccaccgttttattgccagaaaatgttaaagccggatctatcatcaaaatgcaagtatctcagaatttagaggaagaacgaaaacaaagaaagcactttaagagcatccaagctaaaattctggagaaatacggtacccataaacctgaaaatccagttttgaaaatcatgaacgttactcaaacaagttgtgttttgacatgggaacagttaaaacttggatcggcaaaattgaaatcgttgattctttatagaaaaggaatacgctcaatggtcattccaaatccattcaaagtaaccacgaccaaaatatctggtctttccgttgatacgccttacgaatttcaattgaagctgataacaacatcaggtacattatggtccgaaaaaataatattgcgtacccataaaatgaccgatatgtctggtattaccgtatgtttggggccattggacccattgaaagagatttcaaacacgcaggtgtcccagtgtctatctcacattggtgcaagaccattacaacgtcacgttgccatagatactacacattttgtctgtaacgatttggacaatgaagaaaccaatgaggagctgatgaaggcaaagcacaacaacataccgattgttagaccggagtgggtgagagcgtgcgaagtagagaaaagaattgtcggagttagaggattttacttagatgcagaccaaagtatattggcaagttacactttcccaccagtaaatgaagaagagctatcaaattcaagggacaatgaaattgaatctagaccagctgttgaaaataaggatccagaaggcactgaaaatgttgaacaggctgaaccgccgtatagtgatgaggacaaattttcagagaataaggaacaaaatgaacagaaagaagatgaggttgctcaagatacacctgtggaagacacacctgtggaagacaccctgaatgcttcgccaattttggagaacgaaaacactactgaaactgttaatacttccgtaagaagtttgaaaagtgaacccgttggcactccgattatcgaggaaactgaaccaatctcttccgttcaaaacacagaacacgtacaaaacgaagaacaaagtgcggtcgaaactgatccaaatgaagaaaccacagaacatgccccagaagatgtcaaggatgccaagacaactgttagtgatcgtgttaccaatggattggcagaaactgaaggagaaggtgtggatatacagaacaatgaaagtaacataaatacggaactggtggaggagaacaacaaaaccgtggaagacacggtcgcaaatccagataatgcagaagctgaacttgaaattccggaagtaaacagctccgcacaagaagctgacaaggccatcaatgaaagtactgccccacaaaagcaagaagaagatatagatcctaaaatcgcacttgagaccgtaacggaaaaagcttcagaagagccatccaatgaaggtgccccagaaagtttagaaggcgaagttgcggagactcaagagaatgtcaacagtgctaccgaaccaaatgcagatgttcttgacgaggaaccagaaagcactgtcaatattgaagccagtgaagaaacagaagaacaggagacgacggaaaccgatgtagccgccaatgtaaccgccgatgatgttccgccctctgagcaatctaaaaaaagtaacaataacaagaagaaaaataagaagaacaagaagaaaaataagaagaaatga

SEQ ID NO: 1828 - DNA, 1134 bp, Saccharomyces pastorianus
atgttttctttaccaagcaagaacggcctccagatattacttttgacactttcatgcatatcaacgatagaggcccagttcttcggacaatcgtcgtcctctaattcatcggccgtctccagttcacactcgtcgtcgataagcacgttggaatcgtcaagcaccctatcttcatcaagtttgatttcctcttcaagtgctgtatcatcttctctttcttcgtcatcatccaagaagtcttcttcctctcagtcgtctttatccactagcgttgcctccgtgtcgttcacgtcatttagtttcacatctacctcaggtagtgacagcttttcatcagaggcttcgtctacatcggattcttcgagctcttccgtttcttcaacctcaacgtcttcagcatcatcgtctacgtccgagtcgtcatcaacatctttttcttcctcctcttcatctacaccatcgtccacttcttcgtccccctcgacaatcacctctacagcttcaactacttctgccccaaccgtttcttccgatagtcgcggcagcaccatcaccagtatcattaatggtaaaacgatcctttctaaccactataccactgttacgtattccccatcagcgactgccgatcctaataacaaaacaaaaagctctggtctttcgaaaaaaaatagaaacattgttattggttgtgtcgttggtattggtgttccattaatcttgataattctggtcttaatttacatgttttgtatccaatcatcaagaacagatttcattgattcagatggaaaagtcgttacagcctacagagctaacaaattcaccaaatggtggtatatgcttttgggtaagaaagtcagcgacgagtaccaatctaattcgccattaggtggtagcacatcttccgcaggtggtttggatctcgacgaagcagatgacgtaatggatcaaagttctctcttcgatatgagggtaagagacagcgacagcataccacgtactaccaataacgccaatcataatactaatagcggcggagaaaatgtgaatagtagtgccgcatcaaatgatattatagaagaaaagttttatgatgaacatggtaacgaattatcgccacgaaattactaa

SEQ ID NO: 1829 - DNA, 327 bp, Saccharomyces pastorianus
atgcctccaaagcaacaattgtccaaagctgccaaagccgctgccgctcttgctggtggtaagaagtctaagaagaagtggtccaagaagtccatgaaagacagagctcaacatgctgtcatcttagaccaagaaaaatacgacagaattttgaaggaagtcccaacctacagatacgtctctgtctccgttttagttgatagattaaagatcggtggttctttagctagaattgctttgagacacttggaaaaggaaggtatcatcaagccaatctccaaacactccaagcaggctatctacaccagagctgttgcttctgaataa

SEQ ID NO: 1830 - DNA, 939 bp, Saccharomyces pastorianus
atgggaggcgttcgtgaaaagaaagctgaatactttgctaagttgagagaatacttggaagaatacaagtccatgttcgttgtcggtgtcgacaatgtttcttctcaacaaatgcacgaagtcagaaaggaattgagaggtagagctgtcgttttgatgggtaagaacaccatggtcagaagagctatcagaggtttccttactgatttgccagactacgaaaagttgttgccttttgtgaagggtaacgtgggtttcattttcactaacgaatccttgaacgaaatcaaggacgttatggtttccaagagagttgctgccccagctagagctggtgccgttgctccagaagatatctgggtcactgctgttaacaccggtatggaaccaggtaaaacttctttcttccaagctttgggtgtcccaaccaagattgccagaggtaccattgaaattgtttccgatgttaaggttgttgatgccggtaacagagtcggtccatctgaagcctctttgttgaacttgttggaaatttctccattcacttatggtttgactgttgttcaagtctatgacaacggccaagttttcccatcctctatcttggatatcactgacgaagaattggtttctcacttcgtttctgctgttagcaccattgcttccgtctctttggctattggttacccaaccttgccatctgtcggtcacactttgatcaacaactacaagaacttgttagctgttgccattgctgcttcttaccactacccagaaatcgaagatttggttgacagaatcgaaaatccagacaagtacgcttccgctgctccagctgctgcctctgctgcctctggtgaatccgctccagctgaagaagctgctgctgaagacgaagaagaatccgatgatgacatgggtttcggtttattcgattaa

SEQ ID NO: 1831 - DNA, 306 bp, Saccharomyces pastorianus
atgcaatcagttggcaacggctctatcgctctagtttcgaaaaatgcaatgaattcaacgaccacatttacgggttggatggcatgcccatggaaatatatcaacggtgtgggttcgggtcgatatgttagcagcaagccagatagaattaccagatatgatcttctcaaagctgcgcatgagacagaaatgaaggaactgcttacgggaagtggtttgaaggccaagaataaaacaaaaaaaagcaccaaagtaacattggagactataagcgaagaaaactcttcgaatgaaagctttttctaa

SEQ ID NO: 1832 - DNA, 2586 bp, Saccharomyces pastorianus
atgtccactactgaatttgctcaactattagaaaacagtattttgagtcccgaccaaaacgtccggttgaccagtgaaactcaattaaagaaactgtccaatgaaaacttcttacagtttgctgggctttcctcgcaagtacttatcgatgaaaatacaaagttagaaggtcgtattttagcggcgttaactctgaagaacgaactggtttccaaagattccatcaagactcagcaatttgcccagcgttggatcgcacaagtcagccctgatgccaaggctcaaattaaagccaacgccctcactgcgttggtctccatagaaccccgtatagcaaacgctgcagctcaattgatcgctgctatagcagacatcgagttgccccatggcgcatggccagatttgatgaaaatcatggtcgacaatacgggcgctgaacaatcagaaaatgttaagagagcttccttactggctctaggttatatatgtgaaagcgcagaccctcagagccaagccttggtttcttcatcaaacaatatcttaattgctatagtccaaggtgcccagtccacagaaacttccaaatcagttagactgacagctttgaatgctcttgcagattctttgattttcatcaagaacaatatggaacgtgaaggtgaaagaaactacctcatgcaagtcgtctgcgaggccactcaagctgaagacatagaagttcaagccgccgcctttggttgtctgtgtaaaatcatgtcattatactatacgttcatgaaaccttatatggaacaagccctatatgccctaaccatagccaccatgaagtctccaaacgataaagtagcttccatgactgtggagttctggtccactatttgtgaagaagaaatcgatattgcttacgaactggcccaattccctcaatctcccctacaaagttataacttcgccttgtcgtccatcaaagatgttgttccaaacctcttgaatcttttaacgagacaaaatgaagacccagaagatgatgactggaacgtttccatgtctgcgggtgcgtgcttacaactattcgctcaaaattgtggtaaccacatcttggaacctgtgttggaatttgtcgaacaaaacattaccgctgataactggagacatcgtgaggctgccgtaatggcttttggttccatcatggatggtcctgacaaagttcaaagaacttattacgtccatcaagctttaccatccatcttaaacttgatgaacgatcaatccttacaagtcaaagaaactacgggttggtgtatcggtagaattgccgattccgtcgccgaatccattgaccctcaacaacatctaccaggtgttgttcaggcttgtttgattggtctacaagatcatcctaaagtggccacaaactgttcttggaccatcatcaatttggtggagcaattagcagaagccgttccatctccaatatacaacttctatcctgctctcgtggccggcttaatcagtgcagccaatagagcagacaacgagttcaatgctcgtgcctctgctttttccgctttaaccacgatggtagaatacgccactgacactgtagctgaaacatctgcttccatttccacctttgtcatggacaaactgggacaaacaatgagcattgacgaaactcaaatatcattagaagacgcgcaaagtttacaagaattacaatccaacgttttgactgttctagctgccgtcatcagaaagagcccaagcagtgttgaacctgttgctgacatgctcatgggcctgttttttaagttattggaaaagaaagactctgcattcattgaagacgatgtgttttatgctatttcagctttagctgcttctttgggtaggggatttgaaaaatacttagaaacattttctccctatttattaaaggcattaaaccaagtggactcgcctgtgtcaactactgctgtgggttttattgcggatatctcaaactcattagaagaggactttagaacgtattcagatgcaatgatgaacgtcttggctcaaatgatttccaatccaaatgctagaagagaactgaaaccagccgtcttgagtgtctttggtgatatcgcttccaatataggtgctgatttcatcccatacttgaatgatatcatggcattatgcgttgctgcacagaataccaagcctgaaaacggtacattagaagctttggacaaccaaataaaagtactagaagcagtgctagatgcttatgtaggtatagtcgcaggtctccatgataagccggaggctttgttcccatacgtcggtaccatcttccaattcattgcccaagtcgcagaagatcctcagttatatagcgaggataccacctcaagagctgcagttgggatgataggtgatatagctgctatgttcccagacggttcaatcaaacagttttatggacaagactgggttattgattacatcaaaagaacaagaagtagccagttgtttagtcaatctacaaaagacactgcaagatgggccagagagcaacaaaaacgtcaattgtctttatag

SEQ ID NO: 1833 - DNA, 876 bp, Saccharomyces pastorianus
atgagtgccactaagattctttcgcaaaaaatcaaagtcgccttggtccaattggcaggctctagccctgataagatggccaaccttcaaagagcggcaacgtttattgaaagggccatgaaggaacagccagatacaaagctcgtcgtgttgcccgaatgcttcaactctccatactccactgaccaattcagaaagtattctgagattattagtgccagtgaaccttcgacatcggttaagttcttatcgaacttggctagtaagttcaaaatcgtcttagttggaggaacgattccagaattggatccaaagacagacaaaatctacaatacatcgataatattcaacgaagatggagagctgatcggccaacatcggaaagtgcaccttttcgatgtggacattcccaacggcatatcgttccatgaaagtgagaccctgagccctggggagaagtccaccacgattgacacgaagtatggcaagttcggcgtgggtatatgttatgacatgaggttcccggaactggccatgctgagtgcacgtaaaggggcctttgctatggtctatccgagcgcgttcaacacggtcacgggtccattgcattggcatttactggcaagaagccgggcggtagacaaccaaatatacgtaatgctatgttccccggcaaggaatatgcagagctcgtaccatgcgtatggccactccatcgtggtggaccccaagggcaatatcgtatctgaagcgggcgaaggtgaagagattatctatgctgagttggacccagaagtcattgcggcgtttagacaagccgtgcccttgaccaagcaaagaagatttgatgtgtactctgatgtaaatgcgcattag

SEQ ID NO: 1834 - DNA, 2415 bp, Saccharomyces pastorianus
atgacagatataaagtctaaagctttaacaggccagtcgatgggtgctattccacctgagattgtgtaccaaatacttacataccaatttagggacttgctaagaaatgaccatcctgggaccgcggaaaaattcaatgaaaatttggctacgtttgtcaagagcaacttgaccgtcaataagacattctctcatatttgtcaagttctcatctatagatattgtaatttgactacggcaaaaagatttcatggtcttttgcaaactttaaaagcaaatagggtgctctgtaacaaagtcgaggtagctgatttccaagaactaacatccattggacttggcaggtctagtgagatgaataaaatgatcaaaaatttaaccaatgaaacccttctcgaatttttggtgctaacaaaagcaaacttaagggaatttttagcatgtgaaaatattcaagacgacttagacgataatatcataaaatacattttatccccaggaaaggtcttgactgttgtggatttctgtggctgctcaggcaccagtttcacggaaagttttattaaggctctggacagattataccatctcaataaatctactgatcagcatctgctcgaacccatccaacaaaattaccagattacatgtctgggcctaaacgactgtatcgatctgccatctcatgtgctttggaagattttcaagatgctgcctgagctacaaaaactcgatctgtctcatacttccattgacgataacactttgtataatggcattccacattggaaaaatttaacccatctttcgctagccacttgtcttcaagtaactccgagggcagttttagaattcttcagtcatcatccaacaatcactgattctgataatacatctacattggaatggctaaacgttagtgttatagcccattcgtcatcttggaacgaagtacatacgatgctttttttgaaaaagctttgccagcatggtcacagtaagactttacaatacttaaatattggtggtctgcccttacatatggcatcatcgtttagcgaggatcctatcacagaatccacttattactatcaatgccgtgatagcctacagtttataaagtggaattttcctaaattaaaaagtttaagtattaaaggcaataatgtcccaatatctactctggtggaatttttgacaccaattgaacaagactatcctaactgtattcaaaaattaaaggtcttgaatatatctggcaactcatacatcaataaatggaccattcaggattcgttactttatacatgttctccaagtttagtggcattagaagtaaactttgaatcctggcaacaaattgaaaaactaaacgaaagacatgaaatcattgcgtacaaatataaaaatacgagctctattatcaaagatacctcgaccgctgaacaagtgaaatggaaatgttatatcgattcttcttatggtagaagatattggttatacaagacggatccatttctaaaccgtgatgatttggaatcaaagtcaaatataaccaggtacgatgctgaaggccacaagatcatagagattattaatcagccagatttcttaaaatttgcccaaaataaaattatgcttggctgcggactagttcctcaaagtggtatcaggcgtaaattatgctacagagatttgaagccaccagtttcccagtttttgaataggaaaggtgccatcagtcttggtaacacgccattacctataattattccaacactaccccgaggtggatggagaattattcataacgaggacgaaagtaacagtgataatgataatcatatggctactattccaagaagaactccgctgctgagcagaccggttttgaggagcaacaatggtcctgttcgtcctgacccgattgctggtagtgcttccgcggcagctcaaattagagatgggttgtactgggataggtctgtacatgacttgcgtgaattatcattacaagaacaaagaattcaagatttagctgacgagcaacaggaattaaggacaatggctaattatgaagagactgacgatgaatatttgcatgatccggacttagagcggagaaggtctcaactgcgtctgtttgaaagttcacggtcacgttccggaaataaagcaagaccaagcctgaatagggaaaactcttcttccggttcatttttgtcattttctcacttaaatcaccatcgcaagcataagaactactacttcgcacaccctgatgagttcatctatgacccaagcgatccttggactactcaaagatatagactgcattttgaagtagttaacgaataccaagtttttgggtgcattgaacgcgggatgtatagatactacagtttaaaagcataa

SEQ ID NO: 1835 - DNA, 1800 bp, Saccharomyces pastorianus
atggtacaatcagaagaggacaatttagactcttcggaaacaacagcatccatatcatatattagtacttcatctgcatcatcaagagcacatccaaggacatcattatttttggagaatcttcatgacgcaaatgacgattttaatgcagaacaaatggcgatggctactgtttcttatgaaaatacaagtagaggtgaaggctttactgtatacattaacaatgaaagatactcgcgaatcatgagtgcatctacaagctctagctccagcattaaatcatctccaattgcacaattccgcagtatccaagatcataatgtaccaacgaacacagtggatccagtttggcttcgacgagttaatgaggagtcttcacccacaagaaatgcaacaccctcacaaactgtgacagtacgaccggaaagggccctgaattcaccttcttcacaaaggttaagttgcgcattgacaatatcaacttcagtactaatgggagaagatattgaggagagtcccttagagcgagaatctaacagggccgtatcttcaatatattcttctttggtaattcgcgggaacgatgagccaaagagtggaacgccccggcgccctactccaacttttcaacctaatgaaacaatggaaaattcatttctttcttaccaatacgacgaaactttggaacctagtgttgcagaagcagtaaaactaacgaaaaataggaatcccgatgtcaattacattagttcacgcagtggagaaggccaaaatgaaaaccaaagtcaatacgaactcacagacgaatcaaagttcataccgcataaattcaaaattccagagaagacggcatctatagtgtcatcagcaagtgatgagtttaattcgccaggtgctccgaacacagcaacaagagcgatgaaaattcctcagagtccatcactaataggaaatttactgattccgttacataacagtgacagcagtaacgggagttcccccagtgattgtagaggccccagtcgtgaaaatatattccgttccaagtcaacgtacaacacttcttcatccttagaggaagaaggccctcccattggagtaccatcaattcctgtcttaagaagtgtgtcgggaccaagcagatgggggaagacgcctctacgtgtagattccggaagatcgacgaaatctgaaccgttttcaccgtatggaggacctaagacgccatcaccattaagcaaagtaaacaacaaacgtaaaggagcctcggaacacgaacattttattgtattagctcctattaaatcgcaaagcacacagcaattagttgatgagaaaccgataatagaaataccaggccgaagtgtacgacgagaaatccaagagaaaactgacactacaaagcgagatggcggcggtgttgaggatatggatctggaagcaagaatgccgatccagcatatcgacaccgcatctatacattcttttgattcagggcagagtggattcaaagacgtttatagcgttgggagcatcgttatggtcatcatatgttgcatcgtggtaccgcccttgtttttcattattggatgtggccccagaagcaaaatggtttcagattataggttgatgagactgatcatgaataaggaacaccgagtggcgttgctacaaggattcatttgggacgttgatttgcgatggttccgaacactatgcctaatcctaggggctgctgaaaccatgatggtgatggcaggtattgccattggcttcggtgtaggtatcacacaagaatga

SEQ ID NO: 1836 - DNA, 1008 bp, Saccharomyces pastorianus
atgtctgaaccagcccaaaagaaacaaaaggtcgccaacaactctctagagcaactaaaggccgccggtaccgtcgtcgtcgccgacactggtgatttcagttccatcgccaagttccagcctcaagactccaccaccaacccatctttgatcttggccgctgccaaacaaccagctcacgccaagttgatcgatgtcgctgtcgcatacggtaagaagcacggtaagaccaccgcagaacaagtagagagcgccgtagatagattgttggtagagttcggtaaggaaatcttgaagattgtcccaggtagagtttctaccgaagtggacgccagattatctttcgacactcaagctaccgttgaaaaggctagacacatcatcaagttgtacgaacaagaaggtgtctctagagaaagagtccttatcaagatcgcttctacttgggaaggtattcaagccgccaaagaattggaagaaaaagacggaatccactgtaacttgactctattattctcctttggccaagccgtcgcttgtgccgaagctcaagttactttgatctctccattcgtcggtagaattctagactggtacagggccagcaccggtaaggaatacgccggtgaaaccgacccaggtgtcgtttccgtcaagagtatttacaactactacaagaagtacggctacaagaccattgttatgggtgcctctttcagaagtactgacgaaatcaaaaacttggctggtgttgactatctaacaatctctcctcaactattggacacattgatgaacagtactgagcctttcccaagagtcttggaccccgccaccgccaagaaggaagccggcgacaaaatctcgtacattaacgacgaagctaagttcagattcgacttgaacgaagacgccatggccaccgaaaaattgtccgagggtatcagaaagttctctgctgatattgtcactttgttcgatttgatcgaaaagaaagtcactgcttaa

SEQ ID NO: 1837 - DNA, 591 bp, Saccharomyces pastorianus
atgtctgtttgtttagccatcacaaagggtgtcgcggtttcgtcaataggtctctactctgggatcttggcttctgctacgttggtctcatccaccactccactagaggtcctgacaggctcgttatcacccgttctatccaatttgaggaatgcggccacctgcttaggggccatcgcctcgactttcttttgtgtgagtttcttcggcgcccctccttccctgagacacccttacttgttgtacggtatgcttgctgctccactgtcttcgttcgtccttggttgtgcgtcttattacaaatccagaaagctcactaaaatttcaaagcaatctgcattacaacctgatgagacgaagcctgtcgtttccgaactaagcgattccatcatcgatttaggtgagattgttcatgctgcaaaggactcaactcaagacaagagacctattactaccccgcccaagccggcagaggccctacaaaccggtcctccaatccataccaataatctagtcgtggctacagctattgctatccttggcttcgtacaagccgttgttggtatttacggcgaaggccaatttgtttag

SEQ ID NO: 1838 - DNA, 2673 bp, Saccharomyces pastorianus
atgatgcctgatgaaaattcaaactcgtccactctaagttcaagcgcgctgtacagggacctaaggaaagaatatgaatctcttttcacgttaaaggaaggttccggtctggaaatctcaccaatattcaacgttcttcctccaaagaaggactatccagactattacgcagtgatcaaaaatccggtgtctttcaacactttaaagaaacgtatcccgcactatacagatgctcaacattttctgaacgatgttgtccaaattccctggaatgctaagacctacaatacaagagattcaggaatttacaaatacgcgttagtcctcgaaaagtacttaaaagatacaatttatgcaaacctgaaagaaaaatatccaaagttggagtatcctgatttgggtcctttgcctgatgaaccaggctatgaagagtttcagcagaaattaagagaaaaagctgaagaagctgcgagggcaaatgctgccaaagctgaatctatctctttaataaactccaccgaagcagccaggaagttgaggaagacccgtaccgcttccgtcaaaagagaatctgaaccggggacggatacaaacaacgatgaagattacgaagccacagatatggatattgataactccaaagatgctgatttccctgatttgattcggaaacccctgataaacattaatccctacaatcgcaaaccattaagagataatagatccactacttcatctcattcgggcactccccaaccattgggcccaaggcatagacaagtatcaagaactcaagtgaaacgtgggagaccaccaataatcgacttaccttatattcaaagaatgaagaatgtaatgaagattttaaaaaaggaagtactcgacagtggaattggtctaacggacctttttgaaagattaccagatagacacagagatgcgaactactacactatgatcactaatccaatgagtcttcaagatatcaataagaaagtgaagactcgtcgttacaaagcattccaagaatttcaaaacgatttcaatctcatgttaaccaatttcagaatttcacacagaggcgatcctgagagtataaaaatctcgaatatcttggaaaagacattcaccagtttagcaagatttgaattatccaaacctgacagaagtttcattccggaaggtgagttaagatacccacttgatgaagttactgtaaataatatgtcatatcacgtgggggattgggcgcttctccgaaaccaaaatgaccctcaaaaacctatagtgggccaaattttcagattatggaaaactccagatgggagacaatggttgaatgcctgctggtattacagacctgaacaaaccgtgcatagagtggacagactgttttacaaaaatgaagttatgaaaacaggtcagtatcgtgaccatttggtatcaaacttggttggaaaatgctatgtgattcattttaccagatatcaacgtggtaaccccgatatgaaattggagggccctttattcgtttgcgaatttcgttacaatgaatcggataagatctttaacaaaattagaacttggaaagcttgtttgccagaagagattcgtgatctagatgaagccactattccagtaaatggtaggaagtttttcaaatatccttcccccatcagacatttactaccgacaaatgcatctccacatgatcgtgttcctgaaccaacgataggatcccctgacgcacctccattggtcggtgccgtttatgtgagacccaagatgcaacgggatgatttaggagaatatgccacatctgatgactgtccgagatatatcatcaggcccaacgattctccagaagaaggccaagtggacattgaaaccggtaccatcactacaagcacttcaacggcaaatgctcttccgagaacaggctattcaagtagtaaattgtctaatctaaggtacagcaggtcttctatgtcattagacaaccagcccccagttggtcaacaacagataccactatcaagagttggttctccaggtgcaggcaaccaccttactgttcagggtttaaagcaacatcaattacagagattacagcaacagcaacagcagtaccagcaacagaaaaaatcgcaagcctcgcgctacaatataccaaccattattgacgatttaacatcacaagcgtcaagaggtaatttaggaaatataatggtcgatgctgcttcatcattcgtcttacctatttccataacaaaaaacgtagatgttttacagcgtactgatccacatagtcaaaccaagagatctggaagagaagagatgttaccatggaaaaagacgaaaggtgaaatattatggtttaggggtcccagtgtaatagtaaatgaaagaataataaactcaggtgacccacgtttagaacagtcgttgaacagatggtccggcaccaacaagaaaagaaaactagaatacgaggaagtggaggaaaccatcgaaaacataactgaaaaagacgaaaaagatgatgcgatggaaccggatgtggaaaatgaaagagacaatttaccaggcccattcgtccttgggttgagaccttctgcaaagttcactgcgcatagactctccttgttgcggcctccttcatcgtcttcataa

SEQ ID NO: 1839 - DNA, 1449 bp, Saccharomyces pastorianus
atgtccgactacgacagttatgctactccattgtcttctagatatgcttctaaagaaatgtcaacaactttctctttgagaaacagattttccacatggagaaagctgtggctaaatttagccattgctgaaaaggaattaggcctaaacgttgtcactgatgaagccattgaacaaatgcgtcaacacattgaaatcactgatgatgagatcgcagaagcctctgctcaagaagctattgtgagacacgacgttatggcccatgtccatactttcggtcaaacttgcccagctgctgcaggtatcatccatttaggtgctacttcctgtttcgttacagacaatgctgatttgattttcctcagagacgcttacgacatcattatcccaaaacttgttaatgttattaacagattggctaagtttgctatggaatacaaggacttgccagttttaggttggactcatttccaaccagcacaattgaccactttgggtaaaagaaccaccctatggatacaagagttattgtgggatttaagaaattttgaaagagccagaaacgatattggattacgtggtgttaaaggtactaccggtactcaagcatctttcttagcgttatttcacggtaaccacgacaaggttgaagccctagacgaaagagtcactgaattattgggattcgacaaggtgtatccagtcactggtcaaacctactcaagaaagatcgacatcgacgtcttggctcctttatcttcctttgctgctaccgcacacaaaatggctactggtataagattattggccaatttgaaagaggttgaagaacctttcgaaaaatcacaaattggttcctctgctatggcctacaagagaaatccaatgcgttgcgaaagagtttgctctttagctagacatctaggttctttattcaatgatacagttcaaactgcatctgttcaatggttcgaaagaaccctagatgattctgctattagaagaatttctttaccaagtgcatttttaactgccgatattctattatctactctattgaatatttcatctggtttagtcgtgtatccaaaggttattgaaagaagaatcaaaggtgaactacctttcatggctactgaaaatattatcatggctatggtggaaaagaaagcttcgagacaagaagtacacgagcgtattagagtgctttcccatcaagcagctgcagtggtaaaggaagaaggtggtgaaaatgacttgattgaacgtgtaaagaatgataaatttttccaacccatctgggaagaattggattctttactggaaccatctactttcgttggaagagctccacaacaagtcgaaaaatttgttcaaaaagatgttaccaacgccttgaaacctttccaaaagtatttaaacgatgaacaagttaagttgaacgtttaa

SEQ ID NO: 1840 - DNA, 1305 bp, Saccharomyces pastorianus
atgaagtcatatttattaagtcgaagacaaagacacattcgtgcgatatgctttcataacattggtctctgtaagaccaatggaaataatatgtacataacggatcacgttgctgggtttgtgccatgcttctttattttagaatctataaggggggaactgctctatatcagtgaggtgcaatctgattctttacagaaacttcatttccaggaattaccgaaattgaatggcgcatctgctatgattgtattgaagttagttggaaaggtcccaaaggcagttttgcacagcattgtatcgaataagaatgccattaataatgataagtggtgcattttgtctacttatacgatcgatctcaacaagctgcaacctatttgtgacgacgtagcgttgattacaagtattaacatgccagttcttgaattggtagacgggtcttacacattatctaaggaaaacgttaaactattaaaggaaccaaccagcttacacaaaaggaatataagcgaaatcaaaatcaaaaattcactggcgtatagctccttactaaaactaaacaaattactcgagtattcttcgcaagttcatgaagaaatgagcgaactttccaccagaatagaagacagttttccattacataaaaaccaacatcaatggtacatagaaactgtacagaaatccattgctgcactacaaactaaaacaaataaaaaaaatatagaaaagtcacaatgtgaggataatggcaccatacaccattccaaaacagagatatccttggtttcacaagatgagtctataaacgatgattacgggagtatatattccagatttgtgcaaattaaagatagactagaccaactaaggataaagaaactataccagttgatagggatttttcgttcaacaaatttattcgatataggaaaaggttacatacgctttgagaggtcttctagctcggacaacattattgaaggtctcaaactaaaaactttacatatagagagtttattaaaagaggccgaagagtcttcaaagcaaagagagtatatgaacagccaactgggttattatcttttatttctccatttgacggcaactcaaatctttaaacttcctctaccttacaagttgatgtactatggaagtacttccgtaattgagagtcagtatcctctttactttactgattcaatgatcccaaagcatcaaacgaaactactgagagcaatgcattactttaacgccgacattttacaaattaaacagtttttggagaattattgttcaacatag

SEQ ID NO: 1841 - DNA, 1746 bp, Saccharomyces pastorianus
atgattcgtttaccgaaattatatcaaagattcctggtatacttatcaatttttggcttaatcgtattcctgtattatgatcataaccaaacatcaagagtacaagattataggatttctgaaggtcttaaaaaagagtttgacgcagatgccgaagagtggctccaggataacggtttagaatatctttctcctagtgacaatttgcttataaatattggcaatgagcaatgtttccatataggtcgtttttatgaaagatgcttcagtttttatgaactaagaccacaaccaaagagcgtacatttattggttgcaagaagaaaaatacataaagatttaaaaggttcatttgggcggaagtggttggggagatcagagtacctttattacgatatcttacgccttagctccttacattctctcggatctgattttggagagctgaatgtagatgctatcactggaatatctagtggtagtaaggataattctgtgtcatttaaggatttttctgttacgtttgaacccatcagcatagaactactacaaaagcgtggtataataagtgaaatcaatattctctttggcactgattgtgtggatccgcgagaaacttggagtttacaaaaggatgtttctttcacacactatgcaggtagtgaacctgcttacttgacttacagatttgcgggtttttaccctgcgaattcaaaagcccaacgtctacaggaaacagacgaaggcagattcaagatcgttcaattagcagaccttcacttgggtgtaggagagtctgaatgtgtcgacgaattcccaaaacatgagacttgcaaagctgatccaaagacagaggccttcgtccaacaagttctagacatcgaagcacctcagttggttgttttcactggtgatcaaatcatgggcgacagatctatccaagactctgaaacggcattactaaaagcagtcgcgcctgtcatttcgcgagggattccatgggcaatggtatggggcaaccatgatgacgaaggaagcttgacgcgttggcagttgtccgaattagcttcaaccctgccatattcgctttttcaatttagtacttacgatacaaaagataacacatttggtgtcggtaattacgttcatcaggttttttcatataataatacagaagtaccggtgagtacgctttattttttggattctcataaatattctactgttggtaagatttatcctggttatgactggatcaaagaatctcaatgggaatatatgaacaaatactatgatgaaaccttggaactgaaaactgagctttcaatggcgtttttccacattccattaccagaatatttgaatattcaatcgagtacacaccccggggaggaaaacgccctcgtgggtacttataaagaaggcgtcactgcacctaaatataactctgaagggatggctactttgcacaagttgggtgtggatgtcgtcagttgtgggcatgatcactgtaatgattattgcctacaagacgattccacaccaagtcaaatttggttatgttatggtggtggaggtggggaaggcggttatgctggttatggaggtacagagagacgtatccgtatttatgagattaatataagtgagaacaatatttatacatggaaaagactaaatggtagccccaaagaaattttcgattaccagtctatgttgaacaataattctccaaaaactgtttaa

SEQ ID NO: 1842 - DNA, 288 bp, Saccharomyces pastorianus
atggcagttggtgacaaaagtgatagtgataacagtcatactaaaaatacaacagagttggagcggagtttgggcgataatccaaagatcgttttaaaaggaggaggaaaaacaaagctgatgaaccttgaacaactacgcaagccccattgcataaaacccaatccaagagtttcagcaggagatgctggtggcctattaagaagcggcggtcacagacctggattaagtgaagaagaagtttctaaaagagactatgagcatttgcatgagcaagagaagcactaa

SEQ ID NO: 1843 - DNA, 657 bp, Saccharomyces pastorianus
atgacacagtataatttcattattgatgcctcggcttttgaaaagggtttaggtaacattaaaaggtggtgttctgactgcacggagacggtaactttgaatttctatattccaactttcacattaaatgaattggattttcttcaacagagacgtaagagttttgcggctcgcgaatccttgaagttcattgacaggttagacgatcctagctttactaacttgaaagttttcattgagtttcccgaagttttagatattatattatggtctgatgttatggaacataacaacaatgctggcaaggtaaatattgcgaagctgcctaaaagattgaagaatttactgaaaagttgcatctataaatgctatttagacgggaatgaggggttgcattggtttctaataagcgaagattctcaaattcgtgatatggctgtacaatgcaacattccctcttgttcaattgttgatgtggattcgatcttatctaaggacatgaacgacaaatcatttagagagagtgaaaaattcaataatatgatgcttaaaaatggcactaaggaagaaagcgaaaacggcagagaaaccatcaaaactaatttcgataagacagtatatgcttcgagaggtacgggtgaactgtggtctccatga

SEQ ID NO: 1844 - DNA, 330 bp, Saccharomyces pastorianus
atgtccgcttttgttactaaggctgaagagatgatcaaagctcacccatacttccaattatccgcaagctggtgtcctgactgcgtatacgcaaactctgtttgggacaggttcaacgtaaaggacgaagtgtttgtttttgacatcggttctctgccaagaaccgaacaagaaaaatggagggttgcatttcaaaaagttgtcggtagtagaaacttaccaaccattgttgtcaatgggaagttttggggaaccgagagccaattgcacagatttgaaaacaaaggtacgctaaaggaagagttgactaaaattggacttctgccttga

SEQ ID NO: 1845 - DNA, 531 bp, Saccharomyces pastorianus
atgcctgcctatcattcgactttccctgtagatcctcacaatgaccgcatggtaggaaactttgcgcttctgcccttaaacaccaagttcagaggaccagcataccctaccaattctgactacgatattattgacgagtgtttggacctgttccgcgctaactccttcttcaagaatttcgaaatcaaatctcctgccgacagagtgctcatctatggaatcctcttcattaatgattgcttagcccatttaaaaataacaactccccatagtgaggctgtgaaggtgttgactaacgtggccttagataacttcaccctacctggtacacccggttttcctctgaataacgtttatcaagtgccagtacaggaccataactcaatggacctgttaaagacctacatccaacagttccgtcaagagttgtcagtgagactattggaaagaatctacaaagactccaaagaccagccctccaagttttggctggccttcactagaaggagattcatgaataaatcgctatag

SEQ ID NO: 1846 - DNA, 4080 bp, Saccharomyces pastorianus
  modified_base (761)..(794): a, c, g, t, unknown, or other
atgagcgaagcaaacgttgacagcataaaggacagaaatgacatttactctcaaatattcggtgtagagaggaggccagactcgtttgtatcttttgatgacgatttgcatggcgacataaggtttcaggtgttgcccagccgaatcgaagatatcgagaacctaagtgttcttatttccgaggacattgccaacgacatcattatagccaaacagaagaggcattccgcttctcagccagtaaccaatgatcctattgtaaccagtagcgatatggggggaaaaaaatccaactcaaactatattctatcgcaacaagctactatcaaggatgtcccagatacacaaagtctatcgagtgctgataatacccctatcagtagcccgaaaaaagcgagggaccctccagcctcccctcccattattcatgctaaatcaatgtctcatatctactcaacaagtaataatgccagcagacaggccaaaaaccatagtgatcatcctttgcctccaatgtctccaagaaacgaagtctaccaaaaaaacaaaggtcctacggtctttgtacccaagaggaaaccttcactcccgcaactagcccttgctggtcttaagaagcaaactagcttctcaaatgggagtggttcgactacccctacacaggcaagaaagtcgcctttgcaaggctttagtttcttttccaggccaagttccaaagacctgcacgaacaacaactacatcagcagcagcagcatattcnnnnnnnnnnnnnnnnnnnnnnnnnnnnnnnnnncaacaataatactaataataacggtacccatcatcaagtgggcaataacaataataactacccacaacattcacattcactatcatctagatcgatgtcattaaactcttctactctcaaaaatattgcatcatcttttcagtccaagacttccaacggtagaaaagtccctcaaaaatatgaaatgtcttccaacccattcgcagattctcaccactaccatcacacttcaaatagtcacagtaacctcaacaatggtcacagttccatgaagtcctcaaacaccatgagtgcatcgtctgctattggtttgggtctcaagacgagagtttcttcgacttcattggcttcgaagcgatacacttcggtttcaggaacttccttagcatccccgcgtagaagcagcatgacacctctgtcattatcgagaccagtaatgagcgcttctacaaagaggccccaggtatatccagccttactgtcaagagtcgccactaaattcaaaagttccattcagctcggagagcataaaaaggatgggttggtttaccgtgacgcatttacaggtttgcaagcagtcgatgtaatttgtgctatcattagaacttcggacagaaatctggctttactatttggtagatcactagatgctcaaaaactatttcacgatgtggtttatgaacacagattaagagattctccgcacgaagtttacgaatttacagacaactcaaggttcacagggaccggttccacaaacgctcatgatccgctgatgctgctaccaaattcatcttctttcaattcagggaaccaaccttatcaaaattctggaatggttccatcaagttctacttcttctttaagtagtgaacaggcaactttgacgggttcaagactgcacatgaatcgttcactatctcaacaaaaaaacccagcagcgattcataatgtcaatggtgtcttcacattgctggcggaatgttattcccctacgtgtacaagagacgctttgtgttattcaatttcatgcccaaggcgtcttgaacaacaagcgagattaaatttgaaaccaaatggtggcctaaagcgtaatatctcgatggctttagatgatgatgatgaagaaaaaccatcttggacaagttctgtatccgaagaggattgggaaaacttacccaaaaatgaaatcaaaagacaagaagctatctatgaagtttatatcacagagaagaactttgtcaaatcattagaaatcacaagagacaccttcatgaaaactttggcagaaaccaatataatctctgcagatataaggaaaaactttatcaaacacgtctttgctcacataaatgacatttactcagtgaatagacgatttttaaaggctttgacagatagacaaaaaagtgcaccagtagttagaggtattggtgacatcgtactacgatttattcctttttttgagccatttgtttcgtacgttgcttcaagaccatatgccaaatacttaattgaaacacaaagatcggtcaatccttattttgccagatttgatgacgacatgatgagttcgtccctgagacatggtatcgactcgtttttatctcaaggtgtttcgagaccgggtaggtatatgttattagttaaagaaattatgaaatctactgacccagagaaggacaagggagattacgacgacttgagtaaagccatggatgcgctgagagatttcatgaaaagaattgaccaggcaagtggtgctgcacaagatagacatgatgtaaaattactgaaacaaaaaatcctcttcaaaaacgaatatgttaatttagggttgaatgacgaaaagagaaaaatcaaacatgaagggatactatcaagaaaggaactgtcaaagtcagacggtgtgattggggatattcaattttacctactagataatatgcttttattcttaaaggccaaagcggttaataaatggcaccaacacaaggtttttcaaaggcctatcccattgccattgttatttgcatgtccgggagaagatatgcctgcgttaaggaaatatattggagaccatcctgattgttctggaacggtgatccaaccagaatataacgcaaataaccctaagaacgcaataactttcctgtactacggggccaagcaaaggtaccaagtcacgctatacgctgcacaatatgctggattacaaacgcttctagaaaaaatcaaaaaggagcaggcaactattattagtacgaccgaaatgttcaatgtgacaaagatgagtgatagattctttgattacactaacaagatcaacagtgttacttcctgtgatggtggtagaaaattgttaatcgcgactaattctgggttatacatgagcaatattaaaagacagcagaataaagatgagaaacagaaaagctccgcatttttttcaactccgatccaattagtgcaaagaaataacattactcagattgcagtgttggaagagttcaaatcaataattctattgattgataaaaaattatacagttgtccgttgtcattgattgaagcagaaggtaatgggacatctttcttcaaaaagcaccataaggagttgatcaatcatgtgagtttcttcgcagagggcgactgtaacggtaagagattaatcgtgactgcacacagttcgtcacattcgattaaatatttcgagcatgaacatccattattggctgagaaaaatggtggtgggagcggcaataagaaaaatctgcgaaagaaaattaccgaggtcacttttgattccgagccagtctccatctcatttttgaaggccaacttatgtattggttgcaaaaagggtttccaaattgtcagcatttcgcagaatgctcacgaatccttattagatcccgccgatacatccttagagtttgcgctaagagatactttgaaaccaatggcaatttaccgtgtagggaacatgtttttgttgtgctatacagaattcgcctttttcgtcaataaccaaggttggagaaagaaagaatcgcatattatacactgggagggcgaacctcagaaattcgccatttggtacccgtacattctcgctttcgatagtaatttcattgagattcgaaagatcgagactggtgagttggtccgttgtgtccttgccgataaaatccgccttttacaaactagcacccaagaaattctctactgttatgaagactatcgaggatacgatactgttgcgtcattagacttttggggttga

SEQ ID NO: 1847 - DNA, 2682 bp, Saccharomyces pastorianus
atgagaacaatggaaacgcaggtgcagggtgccgacagggggctggtgttgcccccaatgaactcaacggtgtcgacggcgacggcggctaccacggtcacgaatacggacacagatacagatggagatgaggaggacgaggaggaggacgaggatgaggacgaggatgagccattggtggaggacggcggcgtcgaatgggtgcccgcgtacatgctgaccagggaaaagtcgcactacttgggccacttccttggggccaacaagatgctggaggccgtgaagtgcaagcattgcgacgtggtgattagacggcaggcgagcagcacgagcatggccgtggcgtgccaggaacatctgcggagcgtacacaggatagacccgaatgccaattactacggtgggtggtccaatgcagacgctggcgccacctccatgacaaggccgcctttgaagaaccaccagggcggagttagcaacactgcgacaagcagcattgtaaaccttctggaaatagacgaggaccttctaaagcggacgaaagagagagaaatggctttgcctcttgtgcaatcgctcgctatcattatcgcgtcggagaacttgcccctgtcgtttgtagacaactctgctgtgcgtctcttgatcaaccagaacgccaactcactaagcttcatcgatcacgatttgatcctgaacacaatcaggtccattgcgtacaatcttgaccgaatcatccaaaggacggcgttgcgtaacaactcagacttgtcgttgatcatcgacaagaattatttgttgctagacccgacagaaaggtccaatcaactgtcgaatagattgaaaaaccaactgtttgagatgcagaagatcaattttttttccttaagccattccatttggaataacataacctccatcttgagcattcaatactatgacgatttccattcccaagtgaagattttgcccctgatcatccaaaacctacacgaattcgacaacgatcctaaactgtccattccagcgcaattgttcaaaatatcacaggagttacctgggttgcagaacacggtaatctccatgactttgccaaggccccaactaatagatcttttgaacgtcatggacagccagccctttttccctaattcgtatacgaatgccaagaactattaccataactgtatcatttccattataaattcggcaatgctaccattatttggtacttttaaatccactgatatcaagtatccggtaccatcatctaccaaggaaccactgactcttttagactctttgatcgatttatcgaatatagacatttcaaacacaattttctcgaaaataaattctttcctagatgagttgcaatcaaatccgtggcaactagataaattccgctcactatgcgggaaattcggattcgaattcaagtgtcatagattcagaatatctcgttattctactgccacggtttcattgcaaaacttcttaaatctacgtcctataatagaagaataccaatccaccattcaaattgataaattcaacgaaatcgatttccaaataatagactatttattagccactttaaattctatcaatagaatactagagttctttacctcttccaaaaatttgaatttcacatacgttttgtttgccattatgtctattgaaaaacacttactatctactttgagtactctacaatttcaaaggttgattgcgccatttgaagcatttttgtcaaagatccaagaattcaaaacaattctattttcagatgacatgaatctcttggcgatgtttttgtgccctgcaattttatttgaaagagaagttctggagtattctttccatacaatttcactttctgaaatagtagacaaactttccacactaattttcactttgctgaaaagatttttgaatttgcaaacaataggtaatgtgaacaacgataataacccctctaataacaaccacatgaacaatcacaatggcgacaataacaacgtttcaagttcaaatacaccagcatcaagaataaatatagagtctaatagtggacgaagcttagcctcacccgcacaacagccacacgaaaacaacaacaataacaacaacaataacatgccattcaattccctcaatgatactcatcaactatcagactccaccatctcgagcgaaatagacacaatatttttgcaaaccatccaagaagatttatacgaatatttaagtacggtgaattctattgtacctatatcatatagatcatattgtgaacagagtagtttcgtgagagataatggtcgtttcaaaaagagaatcataactgaagattctatattaggcgagttagagcaaccaatgaacttcatcgaggagttactagacatacacgttcccgtatgtagtgcattttgggaccaatttttggataacgatgctggaccaataattagagtattattcaagatgatgcaatgtcagtcttcttcatccatcagggaagaatattcatttttgaatgacttcgttccaagagtacatcctgatttgactcaagaaatcattaagatcaaattatttaatgatcaattcgtggccagtaaagtggactacgatttagacactttgcaaactgcaagccaatatattccgtag

SEQ ID NO: 1848 - DNA, 1443 bp, Saccharomyces pastorianus
atgtcctccaatcgtgttctagacttgttcaagcccttcgagtccttcctgccggaagtgattgctccggagagaaaggtcccttacaaccagaagctcatctggacaggtgtttcgctgctgatctttttaatcctgggccagatcccgctgtacgggatcgtgtccagtgaaacctcggaccctctgtactggttgcgtgccatgctggcctccaaccgtggtacgctgctggagctgggtgtctcgcccatcatcacgtcgtcgatgatcttccagttcttgcagggcacccagctgttgcagatcaggctcgaaaacaagcaagacagagagttgttccagattgcccagaaggtgtgcgccatcattctgattttgggccaggcgctcgtggtcgtcatgacgggcaactacggtgcgccctctgaccttggactccccatctgtttgttgttgattttccaattgatgtttgcgtcgctgatcgtgatgttgttggacgagttgctgtccaagggctacggtctaggctccggtatctctcttttcaccgcgaccaacattgctgagcaaatcttctggagggcctttgcccccaccacggtcaactccggtcgtggcaaagaattcgaaggtgccgtgatcgcctttttccatcttttggttgtcaggaaggacaagaagagggcccttgtggaggccttttaccgttccaacctgcccaacatgttccaggtcttgatgaccgtggccatcttcctgtttgtgctgtacttgcagggcttccgctacgaactgcccatcaggtccaccaaggtgagaggtcaaatcggtacctacccaatcaagctgttctacacttccaacacccccatcatgttgcaaagcgccttgacctccaacattttcttgatctcgcaaatcctcttccaaaagtaccccaccaacgcgttcattcgtctgatcggtgtttggggcatcaggccgggcacccagggccctcaaatggccttgagcgggttggcatactacatccagccattgatgtccgtatccgatgccatcttggacccaattaagaccgttgtctacatcacttttgttttgggttcgtgtgcagtcttctccaagacctggatcgagatctccggtacctccccacgcgacatcgccaagcagttcaaagaccaaggcatggtcatcaacggcaagagagaaacctccatctacagggaattgaagaaaatcatccccaccgcggccgccttcggcggtgccaccattggtgctctgtccgttggttctgacctgctgggcactctgggttccggtgcgtccatcctgatggccaccaccaccatctacggctactacgaagcggctgccaaggaaggtgggttcaccaagaacctggttccagggttttctgatttgatgtga

SEQ ID NO: 1849 - DNA, 1221 bp, Saccharomyces pastorianus
atgtccttcgataaccagttgaccgacgaccaggagattgtgctcaagcagatttggactcatctcttccatctctggcaggtgcccgtggacggctcttccatctaccgtagtaactctgtccacaactcgccccccaagaagaagaaaacgtcttggttcagcaagctgcactcctccgacgagacacaggacggtggcgaagctgctgagacggccagcctctacgaaaagggcaaggtacacaaggcgctggccaacttggacccggaatcgaccatgaagcagttctggcacgatatcaagaacgagaccccggatgccacccttttgaagttcatcagggcccggaagtggaacgcagaaaagaccatctccatgctgggccacgacctgtactggcgcaaggacacgatcaacaacatcatcaacggcggcgagagggccgtctacgagcaaaaggagaccggtgtcatcaagaacctggaactgcaaaaggccaccgtccagggctacgacgtagacatgagaccgatcatcctggtgagacccaggctgcaccactcgtccgaccagaccgaacaggaactcgagaagttttctctgttggtcatcgagcagtccaagctgttctttaaagaaaaccacccggcctccaccaccatcctctttgacctgaacgggttctccatgtccaacatggactacgctccagtcaagttcctgatcacgtgcttcgaggctcactatccagagtcgctgggacacctgctcatccacaaggccccatggatcttcaaccccatctggaacatcatcaagaactggctggacccggtcgtcgcgtccaaaatcgtgttcaccaagaacatcgacgagctgcacaaattcatcgcccctcagtacatccctacctacctgggcggtgaaaacgacacagacctggaccactacacgccaccagatggctccctcgacgtccacctccaggataccgagacccgcgctaagatcgaaaaggaaagggacgacctggttcagcagttcctggaggccaccactcaatggatcgaacatcagcccgtggacgacccaacatacgtacaattacaggaaagaagatcgcaactctctgctgcactctgtaagaactactccaaattggacccgtacatcagatcgagatctgtttacgactgcaacggctctttgaaagtttga

SEQ ID NO: 1850 - DNA, 2688 bp, Saccharomyces pastorianus
atgatgcatcgatcttcaagacggtttttatccactcaaagaaaaggtcctggtcctggtgtgcagaagctgattgcaatcggcgagaaatggaaacagaagaccatccgtgggttccccaaacaagaaggccaagataaaggttcaaaatatatcttgtgccagtttccgtatccctccggaatgttacatataggacaccttcgagtgtatgttattagcgattccttaaatagattttacaggcaaagaggctacgacgtgatacatccaatggggtgggatgcttttggattacctgccgaaaatgctgctatcgaaaggggtatcaaccctgccatatggaccagagagaatatttcaaaaatgaaacgacaaatggaaagtatgctggccaattttgactgggaccgagaactagccacatgtgatcctgaatattataaattcactcagtggatttttttaaaactgttcgaaaatggcttggcttaccgcaaggaggctgaaattaattgggatcctgttgataagacggtcttggctaatgaacaagtagatgcccagggccgttcttggagatcaggagcaattgtagagaaaaagcaacttaagcaatggttcttgggaataacaaaatttgctcctaaattgagaaaacacttgagtcaattgaaggactggccttccaatgtgaaacaaatgcaaaataattggataggtgaatctctaggttcagaactgatctttaaagttaccgattccagatttgaagatttggtagtgtttacaacaagacctgaaaccttatttgcggtgcagtacgtggctctagcattggatcatccagtggtacagaagtattgtgagacgatacccgatttgaaagactttttgagcaaatgtaatatattgccagacgatacaaaagaaggattccatttgcctaatataagcgccgtcaaccccttgacgaaggaggaagttcccatttttgtagctccttatgttatcagtggctatggttctgcaccaagtgcggtgatgggttgtccaggccatgatagtcgagattttgaattttggaaacaaaattgtcccggacagcacattaaaacatgtgtaacacctttctttgacgatacttccaaattatctgaaaaagaaaaacaagaattaatcgaaactgttccatttacgtccactgatggtgttctgactaaagtaagtggcgagtactcaggagtctttactggggtggcaagaaagtcaataatggggaaactgcataccgaaaaattatccaaaaatgtcgttaggtataagatcagagattggttaataagtagacaaagatattggggtactccaatccctatcgtccactgcgatagttgtgggcctgttcctgttccagaaagtgacctgcctgtcaaactgcctgatattaaggaattgaatacgaaagggaacccgttatcaacaatcaaagagtttgtaaatgttgattgcccttcctgtggaaaccccgccaaaagagagacggatacaatggatacttttattgatagttcttggtattatttcagatatctggacccgaaaaatacatcaaaaccgtttgatcgcgaaatcgcaagcaagcatatgcccgtcgatatttacattggcggagtagaacacgccattttgcatttgttatattcaagatttatagccaaatttcttggatccatcaatgcatgggacgatcccactggaatgtttgagcctttcaaaaaactagtcacacagggaatggttcaaggtaaaacctatattgatcccgacactgggcggtttttgatgtctgatgagttggaatatatgaatgactcttcggacagtaattctgtaatcatcaaagcaaacggcaaagtaccgatggtatcttatgaaaaaatgtcaaaatcaaagcataacggtgctgatcctaacgaatgtatctcaaagcacggacccgatgctacaagagcacatatccttttccaaagtcccgttgcagacgctctcaattgggacgaatccaagattgtcggtattgaacgttggttgcaaaaggttcttgctttgactaaaaatattcttaaccttaaggagaatctgacaatcagtaaagagtacaagacaccaacagatctgaacgatgcggaggtaaaacttcacaatgatgtacaacgttacttgaagtcaataacggaatcctttgagattcatctttcattgaatactgtaatatcagactatatgaaattaaccaatattttagaggctgcattgaggaaaggtgaaataagaaatgaaatgatggtacagaatttacaaaaattggttaacagcatctaccctgtggtcccatcaatttcagaagaggcggcagaaatgattagctctcaaatggaatggaaccaataccagtggccagcagttgagcgcgctactgaatcccaatttaagaaatttcagattgttgtaaatggtagggtcaaatttatgtacacagcagataagaattttttcaaattgggtagatatgctgttattgaaactttaatgaagttaccagaaggtagaatgtatctaatgaataagaagatcaaaaaattcgttatgaagtataatgtggttagtttcttattccataaataa

SEQ ID NO: 1851 - DNA, 3348 bp, Saccharomyces pastorianus
atgacttcaacagtggttggtaataaaaggcctatagagcaggttgacgatgagttgctttcattgactgcccaacaggaaaacgaacagcaacagcaacagagaaagcgcagacgccaccagtttgctcctatgactcaattcagcaataatacgctggatgaagaagacagtggcatcaggagcaattccgagactacagtggcggataacgatgcctttttggaggaatcgccttctggatatattaaaaaagtaatcttaagaaactttatgtgccatgaacactttgaacttgagctaggttcccgattaaattttattgtcggtaacaacggtagtggtaaaagtgccatattgactgctattactattggtttgggagccaaggcaagtgagaccaatagaggcttgtctttaaaggacttgattcgagaaggctgctattctgccaaaattactcttcatctagacaatagcaagtatggtgcctatcaacaaggaacttttggtaatgaaattatagtagagagaacaatcaagagagatggacctgcctcttttagtttgaaatctgaaaacgggaaggagatcagcagtaagaaaaaagatattcaaactgtagtggactatttttctgttcctgtaagtaacccaatgtgttttttatcacaagatgcagcccggtctttcctaactgctagcacttctcaagataaatatagccattttatgaaagggactttactgcaagaaatcactgaaaatttggtttatgccagtgccattcatgatagtgcacaggaaaacatgggactgcatttagaaaatttgaagtctttgaaggccgaatatgaagatgctaagaaattgttacgagagttgaatcagacttcagacttaagcgagagaaaaatgcttttacaagcgaaatcattatggattgatattgcgcataacacggatgcctgcaaaaacttggaagatgagatcagtggtattcagcacaaaatcgatgaaatttctgagaaaattaacagcaggcaagaaaagattgaacgttacacatctgacggtgcaactgttgaaggagaaatcgattccaaggtcgtatatgttaatgaaaaggatagcgatcatcaaaatgcaaggcagctattaagggacgttaagagtaggtttgaaaaggaaaaaagtaatcaagctgaagcggaaagtaatattgatcaaggtaagaaaaaagtcaatgctttaaataaaacaattgctcatttggaagaggaactgacgaaagaaatggggggtgataaagatcagatgagaaaggaacttgaacaattagaaaaagataatgaaaaattgagagatgttaataattctctggttgttaatttacaagattcacagaacgaagaaaaagacattcagcatgaacgtgaatcagaattgagaatcgctgcgcgtagcattcaaaacaaaaaaatagagttacagaatattgccaaaggtaatgatactttcttaatgaacttcgatcgtaacatggatatgcttctgaggaccatagaacaaagaaaaaacgagtttcaaactcctccaatcgggccattgggttcctttgtaactatcaaaaaagatttcgagaagtgggcacgttctatccaaagagccatatcatcttccttgaattcatttgttgtgtcgaacgcaaaggataataggctattcagggacattataaggtcatgcggtataagaagcaatatccctattgttacctatcgtttaaatcgattcgattattcaagaggtaaggcacacggtaactatccaaccatagtggacgcgctggatttcacaaaaccagaaattgagtgcctattcgttgatttaagtaaaattgaaaaaatagtgttgatagctgataaaaatgaagctagaaatttcttacagagaactccggcaaatgttaatatggctttgtcgttgagagatagacgtagtggtttccaactttcaggtggctataggctagatacggttacgtatcaagataaaatcaggttaaaggttaattcatcatccgataatggggccagctatttgcaggacctgattgaacaagagaccaaagaaatacaacatatacgagatcgttatgaggagaaattgggtgttgtaaggttaaaaataaatgaaatagatgttcgactcagaaacacaaaaaatgaaatgagaaaaactaattcgagaatcacggaattgaaaatgaatgttgggaaagtagtcgatacaggtatactgaattcgaaaatcaatgagaggaaaaatcaagaacaagccatcgccggttacgaagctgctaaagaagaacttgggttgaagattgaacaaattgcacaagaagctcaacccatcaaagagcaatacgattctacaaaattagctctggtggaagcgcaggatgaattacagcaactaaaggaagacatcaacagtcgtcaatccaagatacaaaaattcaaagatgatattgtttattaccaagataaaaagaaatcttatcaggaaaatataaaaaaaattgaagccaatgtagcggtattaaatgaaggtatacaaaaacagattgaaaatgcatgtggattttgttcaaaggagcaactggaaggtgtcgacttaccggatactcaagatgaaatcaaacgtgaactggaaaaagtctcgaggatgatccaaaaggctgagaaaagcttagggttgtcacaggaagaggttattgagctatttgagaaatgtagaaataaatacaaagaaggtcaaaagaaatacgtggagatagacgaggcactaaacaggttgcataattccctaaaagctcgtgaccagaactacaaaaatgcagaaaagggaacatgctttgacgcagacatggatttccgtgcatccttgaaagttcgaaaattctctgggaacctttctttcatcaaagataccaagagcttagagatatatatcttaaccactaacgatgaaaaagcaaggaatgtagacactttatctggtggtgaaaagtccttttcccaaatggcattgttattggctacatggaaacctatgcgttctaggattattgcattggacgagttcgacgttttcatggatcaagtgaatagaaagattggtaccactctaatagtcaaaaagctaaaagatattgcaagaactcaaactattatcattactcctcaagacatcgggaaaattgctgatatcgacagttccggtgttagtatacacaaaatgagagatcctgaacgacaaaataactccaacttttataattaa

SEQ ID NO: 1852 - DNA, 2640 bp, Saccharomyces pastorianus
atggataagtcgattgccaaaggtctgagcgacaaactgtatgaaaaacggaaggctgctgccttggagttagaaaagttggttaaacaatgtgtcttggagggtgattatgatcgcattgacaagataatagacgaattgtgcagggactacgcatatgcattgcatcagcccatggccaggaatgcaggattaatggggttggccgcgaccgcaattgctctgggaataaacgatgttggccgctacttacgaaacatccttcctccagtgctagcgtgttttggtgatcagaatgatcaagtaaggttctatgcatgcgagagtttatataacattgcgaagattgccaagggtgaaattttggtttacttcaatgaaatcttcgatgtgctttgtaaaatcagtgctgatacagagaactcagtccgaggggcagctgaattactagatcgtttgatcaaagacattgttgcagaaagagcgtctaattatataagcattgtgaataatggttctcatggtttacttccagccataaaaacggacccgattagtggtgacgtttaccaagaggaatatgaacaagacaatcaactggcgttttccctaccgaagttcattcctttgctgactgagagaatctatgcaatcaatcctgatacccgtgtgttcttggtcgactggttgaaagtcttactcaatacacctggattagagctcatatcgtatttgccatcctttcttggggggttgttcactttcctaggtgactctcacaaagatgtaagaacagttactcatactcttatggactcactattacatgaagtcgatcgcatctcaaaattgcagactgaaataaaaattaatagactggagaggctgaagatacttgaagataaatacaataacaattccactccaactaaaaaagccgatggcgcactcattgctgaaaagaagaaaacattgatgactgcattgggcgggctatctaagccggtaagtatcgaaactgatggaagcgtatcaagcacaaatgaatcaaatgatgaaaggcaccaaaataaccaggaacagttattggatagcgaggcatctagccaagaaccacttcgtgatggcgaagaatacatacctggccaagacatcaatctaaattttccagaagtcattacagttttggtgaacaacctagcgtcttcagaggcagagattcaattgatcgcattgcactggatacaagtcattttatctatttcaccggacgtctttattccatttctctccaaaatactttctgttctgttaaaactattgagcgactcagatccacacattactgaaattgctcaacttgtcaacaatcaattactgtcactatgcagctcatatgcaagcaaagaaacggatggcaaaatcgcttatggtcccattgttaatagtctgacactgcagttttttgacagtaggattgacgccaagattgcctgtttggattggcttatcttgatttaccacaaggctccaaaccaaattttgaaacataatgatagcatgttcttaactttattgaagtccttatccaatagggacacggttttgattgagaaagctttaagccttttgcagagcttatgttcggactcgaatgacaattatttgcgccagtttctccaggatttattaaccctattcaagagagataccaaattggtgaaaactagggcaaactatatcatgagacaaatatcttcgcgcctatcaccagaacgtgtttataaagtaatgtctattatattggataattatagtgacattacatttgtgaaaatgatgattcagattttaagtacgaacctaataacatcgcccgaaatgtcctcattgaggaataaactcaggacttgcgaggatggcatgtttttcaacagcttattcaaatcttggtgtcctaaccctgtgtctgtgatatcgctatgctttgttgcggaaaactatgagctagcttactcggtaatacaaacatatgcgaattatgaattaaaattgaatgatttggtgcaattagatatcttgatacagttgttcgaatcaccagttttcacaagaatgagattgcaacttttagagcaacaaaagtatccatatttgcataaatgccttttcggtatactgatgatcataccgcaatcgaaggcatttgaaacattgaataggagactgaatagcctaaacatatggacatctcaatcatatgtgatgaacagttacgcaaaacaaagagataacactaacttctgcgattctaattcagatatctcacaaaggtccgtaagccaaagtaaactacacttccaagaactaatagatcatttcaaagccacttctgatgaagaagagtacccttctgatatgataaaactcgaccatggggctaataacaaatcacttctacttggaaatttcattgacggtatcgatgaagataaacaagaaatagtctctccaatgtcccctatgaatgaggcaattaacgaagaaatggaatctcccaatgatagtagttcggtaatattaaaggattctaatagtctaccatttaattcaaacatgtctgataaatcgaaaaaataa

SEQ ID NO: 1853 - DNA, 1311 bp, Saccharomyces pastorianus
atgagctccgctatttttacatgtaattgttgtgttatccagttcaaaaccagtgatttgcagaggtatcacatgaagactgaatggcatagatacaatttgaagagaagaattgccaaccttcaacctattggcgcggaacagtttgctgaaaaattgcaaatttctgaaaaggaacaagctgaaaaccaagtcgatgagttcggctttcccgttttgaaacctatcgttaatcaaagtagccaacatagtgcattatctgcgaaacagaaaaagccaatcaagtcgaaaagaggaaggaatgttggtgcaaacttgctgaagaaaaatgacaaggatgacgttgctaaagagaaaaaagctaggtccgtttctccttctggatcaatatcttcgcagttgtctaacctgaccgtaagaactgaaaatacaaacacagattacggtgaagatactgtttctgaatatggcttcacaagcgactctaattatgatgctactagtgatgaggatttagacgccgccgacagacccatagataacaaagaagctgaaaagatatctatcaccgaatgtatatattgcgggaaaaatagcaaggaagttgaaaggaatgttaaacacatgtttaacgaacacggtcttttcatacctgaaagatcctatttgattgatttaaatggtttattagaattcttaataaaaatgattgttatagaacataactgtttatgttgtaactttcacggctctggtttagaaagtataagagcgcacatgagttctaagcgccattgtaggctaccgtacgaaacaaaggaggagcgtcaattgttcgccccattttacgatttcacgtatgatgatcgttctatcgatgaggagactcagtgcggtacagcaggcataccagagccttctacggatcatgaggcaaaggactatgaggaagatgccgaagtggatactacgttgattctgagcgataacgatattaatgcaaattatactactgtttccattgacgaatcaggtttggaacttactttaccaacgggcgcaagactaggtcaccgtgcaggacagagatactacagacaaaatttaccctcccaatcaaatcccgatgagagcagaagaactgttaccgccgccgacaggaggatgattagtggtgtcactgaaaagcaatacaagaagggcatgaagaaaatgcaacaattggagaaaactgccataaatacgcagatccgccgtgatatcaaaagggtcaacttccaaacacactacagggacgaactgttgcaataa

SEQ ID NO: 1854 - DNA, 171 bp, Saccharomyces pastorianus
atggctcacgaaaacgtctggttctctcacccaagaagatacggtaaaggctcccgtcaatgtcgtgtctgttcttcccacattggtttaatcagaaagtacgacttgaacatctgtcgtcaatgcttcagagaaagagctaacgacattggtttcaacaaatacagataa

SEQ ID NO: 1855 - DNA, 681 bp, Saccharomyces pastorianus
atgcgtaccaacactctattgtcttccgtcatatctttggctttgttgtccaacgaagttttagcaactcctccagcctgtttgttggcttgtgttgctcaagttagcaaatcctcctccacatgtgacactttgaaccaagtttcttgtttctgtgaacacgaaaactccgccatcaagaagtgtttggactccatttgtccaaacaacgatgccgatgctgcttacaccgctttcaagagctcttgttccgaacaaaatgcttctttggatgactctagcagcagtgcttcctcttctgcttcctcatccagcaaagcttcatcctctagcaaggcctcctcctctagcaaggcctcctcctccgcctcctcctccgcctcctcttctatcaaggcctcttcttcatcatcttccgtcaaggcttcttcctctgaacaagcctcttctaccgaacaagtttcttcctccaaggcttcctctaccgaacaactttcctctagcaccggaaaggcttctaccactgctttctcatcttattccattgtgtctaaggtcccagttacttctggtaactcaacttctaccgccatcatctccactttctccgaaggttctggtaacgtcttagaagctggtaagtctgctttcattgctgctgttgccgctttgttgatttga

SEQ ID NO: 1856 - DNA, 840 bp, Saccharomyces pastorianus
atgcaggtcactttcaaaaggctttaccatcccactcttgctcggatgtccttcttgagtaaattcctcaagccaatgatgaaaacagcttcaccaaaggactaccaggtaaagcaattgattaaacccgtaggtttgacagatgcgccaaagcgtaatgtgaaatattcgcagggaaactcgctgaaggatatgttcgattcgcaaaagactaaccacagagtggaagaattgagcgctgaattcagcaagtccgggctttacgaagtacaagtcttccagaagactaaggggaaaatgttcttggcccctatttcatactggaaggacactaaggctttatattttcctcatctagttggtacttccgtggatggtacgaaagaccaaaatgttgaggatcttctgaggggtaaaaccagtatcgtgagattattcagcacagctgctggtgataagttgagtggttcttatttccaagaagcaaccagcgataacaaaaccactgactatttgatggatgctgatgctcgtttgggtctaaacaatcacaatgtgcaaatcatcgaagtgaacctcatagagaatgctgtgaaaagcgcccttgtaaaaacacttgctcgttggactaatcgtattccaaactggcgtcagccgttttatttcgagtgctccagagctcaatggccatttcacatcagagaagaactcttctgcaataatgtcttttctggctacgtctttttggtggaccaacacctgaaagttagatgggcagcctgtggggaggccactccatccgaaaaggaagcgttgtggaagtttgctaaaatcctctaa

SEQ ID NO: 1857 - DNA, 237 bp, Saccharomyces pastorianus
atgttgtgccaacaaatgatcagaaccacagccaagagaactagcaatattatgactagacccattatcatgaaaagatcagtacatttcaaggacggtgtctatgagaacattccattcaaagtcaaaggtagaaagacaccttacgctctttctcattttggatttttcgctgttggatttgctatcccatttattgcctgttatgttcagttgaaaaagtctggttctttttaa

SEQ ID NO: 1858 - DNA, 2079 bp, Saccharomyces pastorianus
atgaacaaattttggaatactaaaaggtttttgccggccaatgcagatggtttgagcggtatcttgaatgaaatatctcaaaatgatcaaatacttgtggttcaacctagctttctgcctatactcaatagtttgcttactttccaagaattgactcaatcgacgcctgtaaaaaagattgttcttctcgatgaccaactaagtgacgattcatctggtgcgctaggcaccattccacgaatggatctaatctttcttattgacgtcagaacatctctacaacttcccccaggattactcgataccgcagtaaagcataacctatcaccattgcatatagtatattgtgagtggaaaacctcttttccgaaatatactaagaatttggagcaatggcagatggacgaacgtacctcagaaattacaaagccacatttccctaatgtcattgaattacaattgaaggaaatatcgaacgagtattttctttatccttgggaacttttgccgtttccacagatcgatgacaatgttttattgagtcattctctttataacatggaaaatgtaaatatgtatactcccaagttacgttctttgcaaaacgccacagagtcgatattagttgataatatggtgaattgcttgcgaagtttggtctttgaaaccgatagtatcataactaatgtggtgtctataggtaatctgtcaaagaaatttagtcaccttctgaagaaacgaattgacaaacaacaaactgaaaatgacttgttcataaaaggtacactttatggtgaacgaactaattgcggattagagatggacatgattgtcctggaaagaaatattgatcctataaccccattgctgacccaacttacgtatgcaggattattagatgatctatatgagttcaattcgggattgaaggttaaagaaaaggacataaatttaagttacaaagaagacgcaatatggaatgatctgaagtttttgaattttggatccgttgggccccagctaaacagactagcaaaggaattgcaaacccaatacgatacaaggcacaaggccgagagtgtacatgaaattaaggagtttgttgattctttaggttcattgcaacaaaggcaaacatttttgaaaattcatacgaccttatcatctgacgttttgaaagtagtggagactgaggaatatggttccttcaataagatcttggagttagaattagaaattctgatgggaaacacgctcaataaagatattgaagacattgtaatggaattacagtacgagtatgaagtcgatcaaaagaagattctgagattaatttgtttattatctctttgtaagaattcacttcgagaaaaggattatgaagatttgaagacctctatgattgactcttgggggattgaaaaatgttttcagctggaatccttggctgagttaggattcttcaccagcaaaactggaaaagcagatttgcataccgctccaagcaagcttacaaggttacaaaaagaataccggtatatttcacaatggctcaatacggtgcctttggaagacgaacatgctacaggtaaaactaccactgaaaaagaagagttcatagaagctacctttgcttatagtggtgtaataccattaaccatgaggctggttcaaatgttatatgatagatccgtattattccataattattcttctcaacaacctttcattctatcaagagagcccaaaatttctcagacggaagatctgattgaacaactatatggagattcacaaacaattgaagagagtaagtggatccctgaaaccgtttctaaaaagatcaatgcaagcatcaagaataacaagagacagtattcaatagacagctttaagggaacctctcgtgccgctgaagatattgcgcttgtagtgttcctaggcggtgtaacaatgggtgaaatagccacactaaaacatctgcaaaaacggctaggtaaaaaaggcattaacaagaggtttatcatcattgctgatggcctgacgaacggcgatagaatcatgaactccatatcttaa

SEQ ID NO: 1859 - DNA, 2343 bp, Saccharomyces pastorianus
atggctcccaaatctggttcgtctagttcaaaaaaaaagtcattcgccggctctagtactgctgacccaaaaatagtaaaatttaaacttccgactgaattcattactagaccgcacccctcaagagaacatggaaaggaaacgtgcactgcgtatgttcacccgaacgtactatccgcactagagataacaccaggatctttttgcaccgtctgtaaagttggtgaaaatggaatcttggtaacagctaaagcaggtgatgaaggaacacatcctgtcaatgtcatcactctttccaattccatacgatcagttggaaatataattctcggtgaccgtctagagataaaaaaggctcaagtgcaaccaccttatgccacgaaagttgcgatagggtctctacaagggtgtgatattttgaaatgcatcgaggagaaagtaattcaaaaattattcgatgattgcggaattataatgcctggaatgatctttcacaacgtaaagacacaaacagatgatgaaagtattgatattattattgtagatgcaagtgacgattcactccccgacgtccaccaaatagatcttaactcagacgtagtatatggtatgctggaggaccaaatttatctttccccacctgttatatttcgaaaaggttcgacggatatcacttttacaaaagaaatgcaagcaaatcggaaatataatcttcctgagccaatatcttacacagcagtaggtggtctacacaaggaaattgaatcactgaaaagtgctatagacatacctcttcatcaaccaacattgtttagtagttttggtgtttctccacctcgaggcatactactccatggccctccaggtactggtaaaacgatgttgctaagggtagttgctaatacttctaatgcacacgtcttgactattaatggcccttcgattgtctccaaatatcttggagagaccgaagccgcattaagagacatctttaatgaagctagaaaatatcaaccttcgattattttcattgacgaaatcgattccatagctccaaatagagcaaacgatgactctggtgaagttgaaagtagagttgtggctacactgttaacgctcatggatggaatgggcgctgcgggcagattggtagtaattgctgccacaaatagacctaactccgttgacccagctttgagaaggcctggtaggtttgatcaagaagttgaaattggtataccagatgtcgaagctagatttgacattttgactaagcagttttcaaggatgtctccagatcgtcattccttggagtcagaagggataaagctcattgcctctaaaacgcatggttatgttggtgctgatttaaccgctctgtgtagggagtccgttatgaaaacgattcaacggggcttaggaacggatgccaatgttgataagttttctttaaaggttacactaaaggatgtagaatgtgcaatgatagacattagacctagtgcgatgagagaaatatttttggaaatgccgaaagtctactggtctgacattggtggccaagaagagctgaaaacaaaaatgaaagaaatgatacaattgcctttagaagcatctgaaacttttaacaggttaggaattactgcgccaaagggtgtcttactttatgggccaccgggatgttccaagactttgactgcaaaggctctagctacagaatccggtatcaacttcttagctgtgaaaggtcctgaagtcttcaacaagtatgtaggtgaatctgaaagagctataagagagatatttcgcaaagcacgctctgcagcacctagtattattttttttgatgaaattgatgccttgtctcctgatagagacggagggtctacatctgcggctagtcaagtcttgacgtctttacttaatgaaattgacggtgttgaagagttaaagggtgttgtcattgttgcggcaacaaataggcctgatgagatagattctgctcttttaagacctggcagactagatagacacatttatgttggcccaccggacgtaaatgctcgtttagagatcctgaagaagtgcacgaagaaatttaatatcgaagaatccggaattgatctgcaagagctggcatgtcgcacagagggatattcgggggccgaagtcgtattgctctgccaagaatctggactgtctgctatcatggaagatttggatgtcacaaaggtggaattacgccattttgaaaaagcatttaaaggaatttcaagaggaatcactccagaaatgctttcatattatgaaggatttgctctcagaagtggttcatcctcttaa

SEQ ID NO: 1860 - DNA, 2100 bp, Saccharomyces pastorianus
atgaccgatatcacacccgtggaaaacgatgtggacgtcaacggtaatgtcaatggcgacgtttccagtactttaaagaggcctatagatcaaatttcaaataaagatgagggcgagaacggtgggcctcttaacggtctagcagaggacaagacccctatcaatgatggaacacataccaaaaagcccaagctgaacggagatatctcttcatctgcttctacgcaggccgcggaaaacggctttgtagaaagtcccgcgtcggcggctaatgagaatgatacatataacgccaccgaagtcagagcagaagaagagtctcaacaggtattgaagagggagaacgaagaaggacacgggggcaagcagaaaagtgctactgctaatgacggttcgaagttgggcctttccgaggaagctccaaaggagcctgctcctgcccctcctccagagccggatatgaacaatctgccccaaaacccaattccaaaacatcaacagaagcacgcgttgttagctatcaaggctgtcaagcggttaaaggacgctaggccttttctgcagccagttgatccagtaaaattggatattcccttttactttaattacattaagaggcccatggacttatcgactatagagaggaagttgaatctcggtgcctatgaagttccggaagaaatcactgaagacttcaacgttatggtaagtaacagtgtaaggttcaatggccctaacgcaggtatttctcaaatggcaagaaacatacaggcctcttttgaaaaacacatgctgaatatgccagctaaagatgctccacctgtgataaccaaagggcgcgggtctagtgctcaggaagacgccccaatagttatcagacgggcccaaactcacaacggaagaccaaagagaactatacatcctccaaaatccaaagacatatatccttatgaatcgaagaagcccaagtccaagaaactacagcaagctatgaagttttgccagactattctcaaggaattaacagcaaagaaacatgcttcgtataattacccctttctggaaccggtggatccagtttctttgaatttgcccacatatttcgactatgtcaaagagcccatggacttgagcacaatttccaagaaattgaatgattgggagtaccaaactatggaagattttgaaagagacgtgaggttagtgtttaagaactgttacacattcaacccagacgggacaattgtaaacatgatggggcatcgtctagaggaagttttcaactccaagtgggtcgaccgacctaacttggatgactacgattctgatgaagattcaagaaatcaatgcgactacgatgactacgagtctgaatattctgaatctgatatcgacgaaaccataataacaaaccccgctattcaatacttagaggaacagttggccagaatgaaagtagaattgcaacagttgaaaaaacacgaattagagaaaataagaaaagaaaggcggctggcacgcggatctaaaaaacgcggtaaaagatcaaagggaaggacaggttcaaagagcggttcctccaaaggtagaagagataagaaaaataagttaaagacggtagtaacctatgatatgaagcgtatcattactgaaaggatcaatgacctaccgacttctaaactggaaagagcaattgacataatcaaaaagtctatgcccaatatctctgaagatgacgaagtagaactagatcttgatactctggataatcatacaattttaacgctatacaactccttctttagacagtatgaaagttcgtccaacacgtccaacgggctagacggtgcctctggtataacccgagatacttcatctttatcgcctactagcgcaggtggtagaaaaagacgatctaaagcattgagccaagaagagcaaagtagacagatagagaaaataaaaaataagttggctattctcgacagtgcttctcctttgagtcaaaacggctcccctggccaagttcaaagcacaacacggaatgggttttcttcatcgtcggatgacgatgtcagtagtgaaagtgaagaagaatga

SEQ ID NO: 1861 - DNA, 858 bp, Saccharomyces pastorianus
atgaaaatcaatatatcccgcccattacaagttttacaatggtcttcatatatcctggccgcttttttcatacaattgctgatcattcttcctttatcaattttaatatatcacgatttctacctgcgactattacctgctgattcatccaatgtagtaccgcttaatactttcaatatcttgcagggaatacagtttggtacgaaattcttccagtcaatttctagcattccagtgggcactgatctgcctcaaacaacggataatggattaccacaaccaatccctatgcgtgacaatatagagtacaagctcgatttgaatttacaattctactgccaaaataagattgggcgtttgaatctagatagtatgttaatcgacgtttataaaggccccggtccagttttgaggagtccaggaagagtagacaacgaagatgaaaagatatttcatacctctaggcctatagtctgtctcacagtagacgattcattgtcaccccaagaaattgaacagctgggcccatctcgcctaaatgcctacaacgaagaatggctaaattcaattacaatcgaagacaaaatatcattagattcatcgtatgaaacagtttccattttcctgaaaacagaaacggcccaaacaagcttaattctacagccagagagtggagccactttcagaatgaattttgagcaaggcttaagaaacttgatgcttcggaaaagacttctatcatatgtcatcggcatttctgttttccattgcatcatatgcatgctatttttcctaacaggatgcactgcgtttgtatttgttcgcaagggtcagacgaaatccaagaaacaaagctga

SEQ ID NO: 1862 - DNA, 3438 bp, Saccharomyces pastorianus
atgagcggggtcagaaaggaatcgtcagaaccaaatgagattcttcgacaagaggttagaactagtactagttcgccctgtacaccatctgagatgtcgcctctgttcctgaacaagaacaccaagaaagcaatgcaatccatcgctccgatactagagggctttagcccaaaaacatcggctagcgaaaacatgtctctgaaactgcctcctcccgggattccagatgaccatagcgaggaaaaccttaatgtccatgacacactacaaagaaccataagcactgaatcagaaaatgggaataacgccaatccaaccagtacgtctggactaaagaaagcggatagtaacccgaagccagagacggattctgacggtctacccagcaattccaataatgccaatgaatccggtagtatagactctacctctaagaccgcatccccacaaatcccacaagcacctgttgacgttgaacagactcctgctgcaagcagttcagcacctacttcatccacctcttcccgcaagtcctccacaagtcaaccaaaaccaaaattgcccaagattgggaagattggggtctgtgcaatggatgcaaaagtcctttctaaaccaatgagacatattttgaaccgtttgatagaacatggtgaatttgagactgttatttttggagacaaagtgattctagatgagagaatcgagaattggccaacatgtgactttttaatatctttcttttcatcaggattccccttagacaaagctataaagtatgttaaattacgcaagccttttttcatcaatgacctgataatgcaaaaaatattatgggatagaagactatgcttacaagtactagaagcttacaaagttcccactccaccaagactcgaaatcagcagggatggaggtccccgagccaacgaagagttaagaatgaagttgcgcgaacacggtgtggaagtgaaagctgttgaagaaccggactggaaaatggtagatgacgatactttggaagttgatgggaaggtcatgaccaaaccctatgttgaaaagcccgtagatggtgaggaccacaatatttatatatattatcactctaagaatggtggaggtggtcgccgtttgtttcgtaaagttggcaataagtcttctgaatttgatcctgccttagttcatccacgtacagagggttcctatatctatgaagaatttatggatacggataattttgaagatgttaaggcctatactattggtgaaaacttctgccatgctgagactagaaaatcgcctgtagttgatggtatagtcagaagaaacactcacggcaaagaagttaggtatatcacagagttatcagacgaagaaaaatccattgctggaagagtatccaaagcgttttctcagatgatctgtggttttgatttgctgcgtgtttcaggtaaaagttacgtcattgatgtcaatgggttttcatttgtaaaagacaacaaagtctattatgattcgtgtgcaaatatattaagaaacactttcatcgaggccaagaaaaagatggatacggaaaaaaagaacttgccaatcattcgtgaagaaaaagagcaaaaatgggtgttcaaaggtttggttataattatccgtcatgctgacagaacaccaaagcaaaaattcaaacactcatttacttcgcctatttttatatcgttattgaaagggcacaaggaagaagttgttatcagaaacgtaaatgatctaaaaattgttctccaagccttaagaattgcattagatgaaaaggcaggaaatccagccaagattaaagtattggcaaatgctctagaaaagaaactagacttcccagggaccaagattcagttaaaacctgttttaaataaggagaatgaagtcgaaaaggtgcagtttattttgaagtggggtggtgagcccacacattctgctaaatatcaagccactgagcttggggagcaaatgaggcaggactttgatttattgaataagagcattttacagaatatcaagatattctcctcatccgagagacgtgttcttcatactgcacagtactggaccagagctctttttggtgcagatgaactaggtagtgacgaaatcagtatcagaaaggacctattggacgatagtaatgccgccaaggatctaatggatacggtgaaaaagaaattaaagcctttgttgagagaggggaaagaagctcctcctcaatttgcctggcccccaaagatgccagaaccgtacttagtcataaagcgagttgttgagttaatgaattaccataaaaaaatcatggataacaattttgctaaaaaggatgtcagcacaatgcaaacaagatggtgtacttctgaagaccccagtctattcaaggaaagatgggataaacttttcaaggagtttaacaacgtagaaaaagtagacccttctaaaatttctgaattgtatgatactatgaaatatgatgcccttcataacagacaatttttggaaaacatctttgatccggggcatccaaacgaatctatcgctgatgagttaggcactcattctttggttgatcgttatccaattaatattctcgccaaaaacaattttaagattgtagatagccatagtatgagtaagagcagtaatagcgtcggttctttgggttgggtcttagaaagtggaaaaacgtctagatccagaaaaaccaaatcctcatctcaatttgatgagccaagatttatgcagttgcgagaactgtataagttggctaaggtattatttgattttatttgccccaaagaatatggtattttggatgctgaaaaattggatattggtttattaacatcattacctttggctaaacaaatactaaatgatataggagatatgaagaatagagaaacaccagcttgtgttgcttatttcactaaagaatctcatatttacaccttgttgaatatcatatatgaatccggtattcctatgagaattgccagaaacgcgttaccggagcttgactatttatcccagatcacttttgagctttatgaaagtacagacgcttctggccaaaaatcgcactcaatcagactgaaaatgtctccaggatgtcatacccaagatcctttggatgtccagctggatgacagacattatattagctgtattccgaagatctccttaacaaaacacttagatatggactacgtgcaacagaagttgagaaacaagtttaccagagtcattatgccttcgaagtttacacccgtaaatattacgagcccaaatttgagtttccagaaacgcaagactagaagaaagtcgacatctgttgacaagtctaaacctcctgcttcttctgggtcctcatcatccacttctatcaacaaaacgccagaataa

SEQ ID NO: 1863 - DNA, 726 bp, Saccharomyces pastorianus
atgaacatgggtggtagtagtagcgctgctactaaaaaagcaacatgtaaaatatcgatgttgtggaattggtacacgattgatacctgctttattgctagatcctggagaaatgatacgaaggggaaatttgcgggttcttgtatcggttgttttgccctggtggtcgtcgcacaatggcttactcgtttttcaagacaatttgatgttgaactcttaagaagacagaaaataaagcatttggcaaactactcaccagaagagtacgttgtaaaatgtggcgatgaagatgccaagtctgatatggaggagctgcaagggttccataacgaagctagctggaaaacaaccttgatcgctctacaaaagagttttatctacagtttttacgtttggggcccaagaggattaaataatcctgaagatgatttattaaagaaagtcctatcatgttgttctttagtaactcccgtagaattgtaccccagctttttggatcatatggtaagagtaaccattttcgtcctacaatggggattgtcatatatcatcatgctgctgttcatgtattataacggctatattatcatcagttgtttgattggtgctatagttggtcgttttatattctgctacgaacctcttggttctatgggtggaggagaatcggctcaaagcactgttagttacgacaaagaaagcgatgaccgtaaatgctgcttgtaa

SEQ ID NO: 1864 - DNA, 825 bp, Saccharomyces pastorianus
atggatttagagaataagagcgctaggtttaaaaaaactggcaaaaaaatagcgtctgacaagtcgttcgaagaagtagttcaatccgatagagatgttctgaaaaaatcgaagtttctctcagatttatttcagagtttgcaaccatacatcaatgacatcaaaaaggtgcggtgtgtagcaatcggtaactttaaagaagactttcctgccacttaccaattcgctcttcttctagagattattgaccacattcatagtgagaattcaagagacattgttgtttccttatatgacccggtattcaccaaagaggaaacaatatacttgaaaactttgggagaaaggtgggtgatagaggaaaacttctcagaaagcaatacaagcaattatgggtccgtgttatatttccttccccatgctcctttagatttgactgaaaatatactatcgtcggagtgcccacacttatggctagcaaacaatatagtgtcacacactgacaggtatactaaggcccaactgtatgaaaaatatcctcgcttgggcaagctcgtacattacttgcaacctagcatcacaccggagaccaagaaacaagatagcatggatgattttacaacctttgttccaaaaaggaaaaggaaaaacagaaacaactcttccaagctcaaggtcaaactaccagaactagactatgagtctattgccacggagtttacatcttgccgaatactcacagattttgacgggggaaaatatttgaaagaacaaccttggatcaactccttctctgatttgacattatatgtcgttgaatactaa

SEQ ID NO: 1865 - DNA, 792 bp, Saccharomyces pastorianus
atgaggaattttttcacgttattttttgcagcattattttcgcttgcagcactcatattggccattgtggcttgcgcaggttcgacgaaaaactatagccctataaacaaaatatattgtgccgagttagatctgtcgcaaatacacgtatcgacggttttcccctcactagggtcagctacgctgtcgacgttgggcttgccctcgtatataaatattggtctgtggtcatactgtttggaggactcttcccacagcatccaatcctgctcttcccccagcggtatccaaaagttcaatctaacgggattgttgtatgacaacatcgttgacaacgaggctttgaagcttatagactccatagctgacgtagttctcccctcaaaactacaggacaagatgaaatactacaacgatttggtcaaatgcatgttcatcaccatcatcataggcattgtcctgagctttgtcaatttggtgttcagtatcctgcgttggatcatccatattaggccgctggtgtggggtggtgcttttttttcgttcttggcgttcgctgcgctaattatcagcataggttcgtgtctgggtacttattcgtatatcaagtacatcctgaaacacaactacagtgactacggtatttcgttgagcattggtaggacttaccaaggtttaatgtggggggcggttgttggagctctactgaatttcatcctatggtgtagtgtgagatctagaccaaacatgatctatgcgaatgcaccaattgaagagaaaccattgatttga

SEQ ID NO: 1866 - DNA, 4314 bp, Saccharomyces pastorianus
atggctaagaaaaataagagtagctcgaaaaattcgactcccgtgaatgatataccagtcgctactgggaagaagaagacaaaaggaaaaaaggcgcaagaaccagaaccagaagatgataaaaaaaccaagcagcaagttaatagggcaaaagtgacatcaacggcaagctggacaggtaaattgcctcacacgatattacacgagacatgtcaaaagcgaaaatggaatagggtagagtacgatatgaagaaaattggtgacaagggctttattgctattgccgttttgtcgtttaccgacccaaagacgaaagaaactttggttgcaagaatgaacgacccaacctatgataaggctgctggaaaaggccttgtcattccccaagaaactccagttgaagcgagacatatggcctccactatagcattatatcgcatcgcatataatacaaacctgcatatgatgctcccaccaaatcataagaaaacatggtatgaccttgacgatttccgtaagggaaatttgaagggcgacgaaaagcgtataaacaaactgtttgatctggatcccttcaggacaatggtggaagatagaaagcttaaacaacagcgtgagaaggaatatatggcacagaataatcaagcacagaaagagcacgtaacgcggactatcttgtctagccatagcgaggctccttcctccaagaaaaatttgaaagacagcaaatcaaagtcgcatagagattcacacaagccttcattagtaaggtttccaaaaaaagtttgggaaggcgcaatatttgttgatctcgatgagtcttctagacagctgatagaaacatcattgaaagtcaaaatagattggctaagtaaaaaaattacccataccaatgaagtgcccactgaagatagagaacagctcaaggaaaagctggtttctttacagtttaggccaaagcacatagaagaagctatgtcatacaaagatcccttatctttcttattattcaatttacctgaggatgacttgccgggattttttcataagaagaaaggggatacaaagaataaagtcgagatctcaactttacccctgtctactcgaatgattgttgagcgcttgacagaaattggcgtatcatcagatgaagcattgctagctttacaagaaaatgacatggacgaaaatgaggcagccggtttcttgacaatggaatacttgccatctctgaaaattaattcaaacgtgcctgtaggggaagctgaatctattgaatgttggaatcaagaactggagactctagaaagtatttacgaaggttgcgtgaaggacattaaagagaattctcattacacgttaaatttaattgaaaaatccaaaatcaaactgaaaatctacaggactaaaaattatccggcttctttgccgggaattatagtgtcaaccttcgatataaattacaaattacctgactatatcaagaagcaaacactgactaaactattgcattatctccaagaggctaatttattaggcgatatgttaatatatcatatatttgaatggctgaaagacaatattgctgcaattattgataatcctggtccgttaatttcagaatctgacttaaagggtgcaattagcaacagaagcatacctaaagataaggcaaacacaaataatactatgggctcaaagagatttgcaaagaataacatatctgacgttatgttaagtgctctaaaggaagaatataccaaaagaattagaagccctgaatacgaaaatatgcagttagttagagaacaattgcctgcttggaagaaacaaaaagtgattgtcgacctcatcaataataacgaagttgtactgatcactggtgaaacaggttcaggtaaatccactcaggtcgttcagtttgttctggattttttgcaaagtcagaaagaagattttagtaaaacaaaaattgtatgtacgcagcctagaaggatatccgccattgggcttgctgaacgtgtttccgatgaacgttgcgtgacttgtggtgacgagatcggttatgtgataagaggtgtcaacaaaactaaggcatctacaagaatcaagttcatgactacaggtgttcttgttagacttttacagaatgctagaactatgttagagaataccattgttgttattgatgaagttcatgaacgttccattgatacagatttgatagtgacactaatgaaaaaccttttgactaaagttcgtggtatgaggattgtcctaatgagtgccactgttaatgttgacttgttcaagaaattttttcccggattagcaacatgtcacatagaaggacgtacttttcctatcacagattatttcttagaagatattttggatgctttagatttcaaaattaaaagggaaaaagctttatcttatgatgatggcgatgatgatgaaagaaatgataatgaccagtacctaaggccaagggccgactctaagttttttacatcagggcaaataaactacgatctacttctacaagttgttaaacacgtggataaacgtttaaaggatactgacaacaatggatctgttattgttttcttacctggtgtaggtgagattaacaagtgctgtaagttgctatctgataaaaccaatgaagcaaattttgtaatattgcccttgcattccgctttaacccctgaggatcaaaagagagtgttcaggaagtatcacggaaagagaaaggttgttgtctctacgaacattgccgaaacttctattactatagatgactgtgttgccactattgacacaggtcgtgccaagtcaatgttctataacccaaaggataatactacaaaactagttgagtcatttatttcaaaagctgaagttaaacaacgtagaggtcgtgctggtagagttcgtgctggtttgtcgtacaaactattttctaagagtttgtatgaaaatgacatgattccaatgccaattccagagatcaagagaattccattagagtccctttacttatccgttaaagccatgggtataaaaaacgtcaaagtgtttttgagcacagcacttgatgcaccacctttgctagccttgcagaaggctgaaagaatgttaactactgtggggttagttgacgagttcgataactcgcttacacagttaggtcaattcatcagcttgatgcccgttatggatagtaagcatggtaagttactgatttatgggattctatttggatgcacagatatttgtgttttacttgtttcgatacttggcattggtgctttgccttttatcggaggttttgaaaacagagacaaaataaagaacctgctatccaaatatgaaaatcgtggggacttatttacggtgttggaaattgtcagaaattatttgaagattaaagacccaaccattaaaagaaagtacttgaaggatcatttactttcatataacaaaatgaatgagatcaaatcatcgatagctcagtattattctattttaaaagatgtaggatttctaccaatgaattacagagcaaatttatcccccgatctgaatagaaatgagaaaaactctgatatcctcagagctattctcactggtgcgttttatccacacgtggccagggtacaattgccagatgtgaaatatttgtcaacaagctctggtgctatcgaaaaagatccagaagccaaaatgattaaatactggattagaagtgaagaatatcaggataagttagaagagtttaaaacaaatgactcgcaagaaactcaaaagaaggtcgatttggaaaatttacccctgcctgcaactagagcattcattcatccaagttctgttttattttcaaccaactcagtgaatttggaagacgctaaactgctttctgaagtagaaggtccaatttccaagcagtcaaagatacccacagttgcaagatatccattcgtcttgtttaccacatcccaagtcactaataaactgtatttaagagatttgaccccaaccactacgttatcattattgttatttggaggagcgatctcttatgatgtgggcggaagtattcattcaccagggattgttgttgacaattggctcccaatcagaacctggtgcaaaaacgcagtgttgattaaggaattaagaacacaacttgatgaagctataagaaagaaactagagagccccgattatgctaaaaaatcacaatctgagaattctgatgctgatgaaacgctaaaaattgtcgagaaaatattaacttccgagcaatga

SEQ ID NO: 1867 - DNA, 1257 bp, Saccharomyces pastorianus
atgagtgaagcagatgttaaaaaatttgttaataatgctagaaaaaccctgaccgatgctcaacttttatgttcaaatgctaatcaaaggattgttaatatcaagaaaaagatatcatcctggcagttgagtatttctaagctcaatttcttgattgttggcctgagagagcaaggcaagtttctttatgtgactatactcaaggaaggtattgggaagaaattgattcagaaagaatggaatcaagttgtcctcgtggccctggttgatgagatgaagtactggcagaacaaaatcaatactaaagtagcaagattggatggtatagtcaatgagctaaatagaacgcaaaaggatgatacaaatcatcctaagttaggggattatatctcaagggagaacatcaacttattgaatgaaaaactaaaagaggtaccggtaattgaacgtcaaatagaaaatatcaagtttcaatacgagaacatggtcagaaaagttcacaaagaattgattgaagctaaattagctgacacaacacggaaattccaaagcgaattcggaataggtaagtccttggaaacagatgtggcagagcaatttagtaaggaattaacagatcttgaaagagacttggtagaaattttgaactctctgacacaacattttgacaaaactctgttattacaagaggagaacgcaggaaacaaagaacatgccgacttgtttaaagtggtggaagatgatgatcaagagttatttaacataactaaggcgttacatgaaataattgatgatgttgataagacaatatacaatctgaatcaatttctggaagaaaaaataaaacaaaaaacagaaatacatactgaggtctctgaaataataagcgattttaacagaaatttagagtatctggtaatctttaaagacatatcaaaccttattgataccttcaagaattcctgtacagaagatattcaaataacaacagaactttgtgaattttacgacagttttgaaaaaagctatggtaatttgatttctgaagcaaagagaaggaaagaagtggcaaataaaatgagaactatattggaagattgcgagatacagttacaggacttaaatgctcaagaccagaaagaacgacaaaattttattgcggataatgggaattaccttccagagacaatatggcccggtaaaattgacgatttctcttccttatacacttttgaatacaacgtcaaggatccttaa

SEQ ID NO: 1868 - DNA, 2139 bp, Saccharomyces pastorianus
atggcagattcggagtccgatagtggtgaggatttcttatttaaaagaagaaggattgatccctataatttcagcgatgaagaggaggaaaatgatgaatcaagcgcaagtaataccatggaatatgaaaacggtaccttcaatatgagtaataaaagcaatccagtggactcaaaactatcaaagagatatggtatcggtgccaagttactgtcgaaaatgggatatgtttccggaaaagggcttggtaaggatggttctggtatagcgacgccgatcgagactcaaagccgaccaatgcataatgctggcctaggaatgttttcagaaactgttgccagcaactatcgcagcgaagatgaggagcaattaagttccggagatgagatggcagaaggcgtaaagcaagtaaaattcaataagacttcgaccgagattttaggtgagccaccgtttcatgattctgtcgatataactatagtacgaacactaagagagctgaaaatagctggggtacaattacccgagaagataacaaaggaattgaaccctataagtgaaataccgaaatcgaaaaaggatgtatttttgaagacattacaagaactactgaatatagaaaaaagtttggaaactatttatgatcgtacctctcctttggaactacaaattaaagaattagatgagcaaatggcgctcctctctgatttagaaatcactttgaaggatgagagtagacacaatacactctttgacaaatttagtgcaatattaaaaatgtccgacgacgatcttatagacagattagcttctaatctattgagcaaagaactgctcatagagttggactgggatcctctagaaaacctaaacagtaaactcgacgaactaactttgattatagaattgctaacatatagaatggatacggcgtcgaagtttttaaacagaacacaaactgctatatttaaaataatatatcccaaacttgagaaattttggaaagaatttgatttaacaaaatcaaaaatcgataatacaattacattgttactggattttgagcaggtattgacttttattgaatgtaagaaacacattatggagcagtacatttatccgaaactgttattttcgctggacaattgggaacttcaagatgaagaagggcttgtttcaccaagaatctgggttttagactttatcgttctgattgatgataggacgagggaagtaattgtaacaaagatcgaagccaagtttttttcttactgccaaaattggtaccatagggaatcattttgtatatccagttctgatataatatttattagggagcttctgggcgaatcgaaatattatcaaattctaaacaaggaatttcttcccaaatttctagatgaattatgggaaagacataacgatcctatatttgaattagaagattggaaagtagaagatgatgttaatcgtgaagaaaaagaatcaggcttcttttatttcgtaaggaaattgagaaactatgcatattattttcatcctaagcaatatgaactgctgatacgaggaactttcaatagtataaacaaacttctttatcaatggcatatctattgttcggtagaagacttacacaggtccaaatggtggcttaattggctaatcaacgtgatgtttaaagaccgtttaccgacagaagtagagctgttagagattagaaagagttatgaaatattagtcatgtctgacagctttcatgttaatagatctaccctaaatgaagattttgatctaagaaaaagtttgcgaaacgtgacggaaatgcaagcaattggcaatgatagtaaaattgaacacgaacctacttatactatacagaacattccgcttacaaaagtctctagttcattcaaggacgtagtggaagactattgcctggaaaaaggttatctgattagtaaactaccaaacaggtatactcaattgccatatggccgggatcaagatagtgtggtccctttgtttgaaattcgaagcggaaagagaacagtagctgtggcaataaaggatgacgttctttggttagaagattccaacggaacgtttacgccaacttatttatgggagctaagtatataa

SEQ ID NO: 1869 - DNA, 3912 bp, Saccharomyces pastorianus
atgtatcgatataataaagggtctcctcttgagagaacaccgcagaaacgagttagccgccacgagaatcggcgtaacagtattgaattaccaaaactgccacctttgaacacaagaaactcctttttagatgattctgataacggaacagataacgtctcaattggctggacaccaatcagtgacaatcagcaatatccaagcccgatccctcaagcttttacttttgcgtctaaacatcatataagagggaacgttacaagttcgacagaatctacacccaaatcagctaaacatatgaaagaaaggcgaccaccaccgcttttacataccaatgaaacattactcttaggctcacccatggcctctcctggatcttggtccagagaaagaccacccagtaggttaccttttgtaggggatccagaagtacgagattacatagacgacacgtctaaccattccacaaccttaaaatcaccatttgtcaatgactttagttcactttctatgaaatctccaacagatagtatcaaatgccagaatcggttttctgacgaatttaatcctcggcatcatgaaagagagaaagctttgccccccattccttcctctaccacccttttgctatccccctttaacgacgaagattcagaatttttcaccaagccaccaccacctttatcaacctccagaaacattagcggacatagcagagtatcagagagtttagaaagtgtttactcggattcagattatacttttaataattcgaatgcaaggcaaagtagtttcaactccttactgggcgccaaaccgttggagctagcacccagcattactgccccaacacagccattttctatccaatcaatagacgaacacaaactttaccaatgtgacaatgttcacaaactatccggtatctacgagtggattctaaaagtctattttgaatggtttaacgaatgtgtgttcacgaaaatcgacctcttccaaatagtccagttactgttagagttccagatgcccaagaattttgatcaagatacaatagactctaatgtcgataatatcatggcttctcttattgcacaagaagcggtaagatttgatataatcaatgatgaagagatagccgtggtagtagctggcctggatgtcactggtgtcttcacagagttactaccgtgctattcgttcattgataacacctatgggcctaccaattcttcaatctgttattctaacgtctgtacatatggacaaatctcggattttagaaaggaaataaaaatttctgaaattataaataaatccgtcggactttggacggaatactggcatttgacacctgaagatttggcggaaatcaatccacgtgaagttcagcgacagagtttcatctttgacctgatcattttagaagagagatctttgaatatggctaccgcagccgtggaaatctatgggaaacggttcgacacgactttacttccagatgagcctgagttcaaatctttggcatttgatatctttgagcctctgatacagttacatactgaatttctgttgacaccaattttctggaagctgaaaacaagaggtaagtttattgatggtatcgggaaaatctattcaaaatggtgcgctgaagccaaggatatatatttggattatgcgaaggctatggcaaccgttcacgaaattataacatgggagaaaaaaaacaagacaagatttgttgcatggcttaaaaatatcgacaattctgttgaaattacaagatctaagatgtatcacgacgtgatttttttcggtgggtttttcaaatctttacagaatatgcccgtgactttacgttcaatactgaaaaatacagacccttctatggaggattatgaatatctcaaaatagtcattaaagatgtagaaaatttgaactttgaagtaaatcaagttcacggattggcgattggccacagaaaattagtgagattctcaaaacagttagtattgagcactaatagtagtaatgcagcaagttatgtaaacgttggaggtggttctaatactggtgaaggtgatgctattcaggacaagttagcccttggactaacttatcctgaaagaaaattgatactgtccggaacagtttacaaaaagagggaactatggctggatccaactcctgtgtatattgcattactggacaattgcttactaattacggaagaaataaataaaggcgaatctcaaagatataaacttatcgagagaccgatccccatagattacctaagtctcgagaaaagaagaattgcggaagacaatacactgcccacgaggagttactctcaaagagaacacaaatcacctatacattcgttttcgacacccattagttcaatgaggcctttactcagaagctctggaaatcatgtatcaacagcatacggagacaagaaaacgagtagcactgaaatttctaacgcgaacccaaatattaatgaattcacattcaaaatcagaaatactgctacaggcgaatcttttaaattctatacaactactgcagaggaacttagccaatgggtcggtgctatcatggagtcatttaagaaaaattctgaaaagcatgaggtgaatccgtttgagtttactgtgttaagttctgaatttggatattttgacaaggacgcgccagtaaatttacctgtagctccagaaggctctgaaatcgatgtagcattgaaaaggtatgcccaaaaaatagacgaggatccatgttcgtggagtaagactacaaggataatgtgttgtgaagatgtcaaatatgaaggtaaaatctacctactcgtagctactatcgacggtgtctttataaaatgtagagacgactataatcacggatttgtgaaaatattggagacgaatgatgtcaaaagaatggaagccagtattaaattggggcttttgttcgttttggatagcaaaagactgtgctactttagcatctcgaatctgctaagctcctatattaaagaagattctccggataaaagttgtattgtgggaatagtaatcaaagataaggtacgatttttcaaactcgctgatgatttcggtaattccaagcatctgttttttgagagaaaggggaaaatagttatattgacacccgagtttgatcaattaacaaacaaagtgaagtattttaaattctacaaggagtacaagcttcctagttcaagtaacaacattctaaacaatgaaatcgaagatattacgatattgaggaaaagttttgcagtttgtacgaagaaaacagtcatactttatcaagattcgttcgaagataacgggatagttttgccatcttttttgaacgacaaggagatgatggcacacttaaggcatccccacctgaataatctaccgttcaaaaacgtgatggactcgaagaaacgcacatctaaagaatcacttaccgaagaagccaaaaaggatattgctacttgtaaagctataccagtgaattttttccaaatctcgcaatccaaatttttcctgttggtatacgacgaagctgtagttaagataaactgctacggtgaaatgtcagattggagaaaggacattctactgttggatttttgttgcactggcgcaagttttcatgagaaccatttgattctcgttggcgacaatttaatacaaatatacgacctgaaaaatattcatcaaaacctgggcgaactagctcctatccaaataatcaaaggcaaaaagataaagctagctagttcagaaacaaaagaaaagacaatccttgtcttgagtcatccaaacatacttaacagacagctgttggttgcgtgtaaccccgtaaccatcctagatcacaaataa

SEQ ID NO: 1870 - DNA, 2013 bp, Saccharomyces pastorianus
atggtcgaactggatatgcagaagaaggcaggtggtggcagtgttagttctgaaatggacgctttgaacgctaccaataacaataataaaccaggagttccaaacactaagagaaatgttgcaagtagaaagaaatctgggaataaggtacccaatggaagagataacgcacataattatcatggacaaggtcgtaagcagaacaataagcagcacaaactaagagcgccttataaggagacttctactgatataaatgatcaagatatagatttatctatacaggaggaaattctcggtggtaacttcaaactaagaggcaggagaacgcaagtttcgattaaccatttattaaacttccaactgcctgaggtcgaaagagaaaggaacagttcttccactaataagaaaccgactagaagacgtgaagagcacgtgcacctacatggtgactcgttcgtcaacgtaaactatcgtcttttagtggatgatcgttttgactacccagaacaaagcaatgatcccaacattcctgtggatcaagaaaggattctcagagtcatagtaccaaagggtcagaactgttctatttgcctcagcgaagaaccggtagctccaaggatggttacctgtggtcacattttttgtctaagctgtcttttgaactttttttccatcgaagaaaccatcaaaaataaagaaactggatatacaaagaaaaagaaatataaagaatgccctctttgcggaagtattattggccctaagagagtaaaacctgttttgtatgaggatgaatttgatgtcgccaggctgcacaatagacctgaacccggtgccaccgtaaacctgcaattgatgtgcaagccgcacggttcgctattacctttaccagtagaactacacctggatccactaaaatgtggcgatttccctcctacaagtttaggatcgattaagcattacgcgcacatcatgaaatgtgatgtatcgttttctttggagctttatcaaagggatattgatgctatccaagagcaatacgagattgacaaggccatttataatgatagtggaaaattcgttaagcggtctgttgaaaacatcaatgaccagatctcgactttactagcagcaaccactgagtcaaacccagcttctaacgatatcaacgacggcttggcaaatttccatttcgatgatgatattttgagtaagtacgatgatacatctgcttatttcttttatcagactttggtggcatcatctacaaaatactatttgtctccattagatgtaaaaattctgctgactatttttcaccaatattccaaattcccagagaatatcgaaacaacaattgagaacatacattacgatacagtggttactgaacagttgattcgccgctacaagtacattggccatcttccaataggtactgagattgctcttgtagatttggactggcgtaaaatacagttcatccctagagaaatttatgaacagttcgctcatgaattaaaacaacgtcgaagaaagttcacgatgaaaaagcaaaaagaagacaaggaaaagaaactgtatgaaaaaaaactggagcaagaacatgctgagttttacaggaaggaaaatggaaacccgcttaagtttgaagattctgtacagatggctaccaattacgattccattatgaattcaccaatccccttaaattcattaggatattccgttctggggtcacaagaaaaggtttcctctgtcccttcaaagaaaaagccttcccatacggaaagaacaatttggggaacgtcaattgcagtgacagaagatgaaagggcttcaaaggaaaacaaggaatttcaagacatgttactgcagcggatgaggcaagaagacgttccggatgccacagattctaccgattctccacccactagtaatggcagaaaggccaagaagaaaaaggggaaggtcatgctattcagcagtaaccatcaagctctcggctag

SEQ ID NO: 1871 - DNA, 1929 bp, Saccharomyces pastorianus
atgagtgggaaatttgtacgtgcatctaagtatagacacgtttttggtcaggcagtcaaaaaggaattgcaatacgaaaaacttaaggttacgaataatgcttgggactctaacttgctgaaaaccaatggtaaatatattgcggtgaactggaacgcttccggaggcggtgcctttgctgttattccaattggagaagtgggcaaggccccagaccaagtgcctttattcagaggccacaccgcgcaagtcctggatacggattttgatccatttaatgatcgtagaattgcttccggttctgatgattctaagattggtatctgggatgtcccggaaaactacaagtttcgtgaccatgtagacgaaaatggggacccaattgatatcaagcctgtgaagtttttaactggtcatgcaagaaaagttggacatgttctttatcaccctgtcgccaagaatgtattggcatcttcttcaggtgactacactgtcaagctatgggatgtggaagctgggaaggacctgatcactttaaaacaccctgatatggtaacatccatgtcattttcgtacgatggtaatcacctagccacagtggcccgagataagaaattgagagtctggaatatcagagatgaaaaaattgtcagtgaagggcctgcacataccggtgcaaaaaaccaaagggtcgtctggttaggaaactctgacagattggctaccactggtttttctaaactgagtgatcgtcaaataggtatctgggatgccttcaatctcgaaaaaggagatctgggtgggttttataccgttgaccaatcatcaggtatcttaatgcctttttatgacgatggtaataagatactttacttggtaggtaaaggtgatggtaatattcgatattacgaattccaaaacgatgaactgtttgaattgtctgaattccagtcgacggaagcgcagagagggtttgctgtggttcctaagagaatggtaaatgtcaaagaaaacgaaatctttaggggttttaaaaccgtcgttgatcaacgcatcgaaccaatttcattcttcgttccaagaagagcagaagagttccaagaggatatctatccagacgcaccatcggataagccagctttaaccgccgatgagtggttttctggtaaatccgtggagggtccaatacttgttagcatgagatccatctatgatggttctgttccaagtttccacgaagctaaaaagcctgaagaggcatctacccaagcagaggatcccaaagttaaagaagcaaagtccgttaagaaagaggagaagccacttgaggaaatcaaaaaagaagagaagcaagaagctactaaatctcctacaccaccaagttctaccttctcatcttcccctacgattaaccatgtgttgaaagaggatacgtcgattaacaagctgctaaaaaagtcttctgatattgatgaagtcaatcgcgcagaagatccatccagagatacttccgggtgggaagaagctgatgatgagccagctcctgttaaaatcgaaactgttattaccccaactgaaactaaaaaggagaactcagttaaggtagaatctccaaaggtagcagaaccagcaccggtatcaattgccacagatagaaaccaagaagaaaagaccgcagagaatgaaaactctccggctccttcatcttcgactaccaccactattaccgctaccacggccagtaccaaggaatcttcttcagcagctaaggcttctaccaagtcgttaggcttaaagcaatctgttgaaaagttgtccacattggttctgcaattggaagatgtaattgataaactaatgaaagccaaccttgacaaggatgaacgtttgttgaaattggaacaaaggattagcgaattgtccaaatga

SEQ ID NO: 1872 - DNA, 6732 bp, Saccharomyces pastorianus
atgagttccataaatcctgataatgataacaaggatgttgcgtctaacaccaatgtacagctagctagtgtctatattaaggcacagtcttatattcctcagattgaacaggtttaccaaggtacaaatccaaatattcaagaggcaaaattattaggggaactgttgcaagttctagcagaagttcccaaaggtacccatttattttgcgatcccattctagagccaatatccattttctccttgactatcttctcatttaatgaagaagctaccgccacatggctgaaaaatcatttcgatccaattctctccgtctgtgacaaatgtatattgaattttgcaagaggtaagtgtaaaatgcttcaacattttgctattcagagacatgttccgcatgagcacgtcgctaaattcaatgatatagtttgccaatggagagtagaggcagtgtttcctattctaaggaatatttcggtcaacgataatacaggtatcaatattacgaaggaaatcgaaattgcgatgtatgaatgtctttgcaacccacatatgttgaggcttaacaaggacctcaaagccacctttgaggctattttcaaatttttctacaatacaaagcatcggttgctggacgttacaaacccttcaagtataaaaacatttatatcaggtgtcatatattgttggtgcgaaggctcgaaagaggaaaacgagtggtcacaagcctttttaatggatttgtactcaagagacttccatataaacgtgtctagtttgacaccggacattatcgaggaagtttatattcatatcttattcttacaaaatccagcaaactggacagaggtcgttgtttcccaattttggtcaagattattatcagtcttcaatttatttgacaaagacgtctttgtagagtatttccaagccccaaagaatgcggaatcgttgaaaaaatcattcaagttcccattagagccaatttataagatgtggtacaatcatttgagcaaatcttatcacgacaagcctttggactttctattgagagcactaacgatgttcttaaataaatttgggcccgaattttggtctaaaattgagcccttcactttccacagcattttggatataatattcaacagagattcattcccggtcaaattagttaggatccaagataatccaatagtcgaacaccaaacagaaatttactttcaactcactggctcagtgactgatttgctttcttggaccctgccattttatcatgcattaactccgtccaaacggatccaaatggttagaaaagtctcaatggcatttttacgagttatcgcaaattatccgtccttaaaatccattcccaaggcatgtttaatgaattcatcgactgccttgctgagagcggtacttgctattaaagagaatgaaagagcaatgctttataaaaacgatgaatttgagacagtgctattgactaagacagattccagagcattgcttaacaatcccttgattcaggatataataataagatctgcttcaaatcctaatgagttttacccagggctggggcctgcgtctgcatcagtggccacttccacaatgatggtgttggctgaatgtattgattttgatatactgttattatgccatcgaacgttcaagctttattcaggaaaaacaatcagtgaaattccaatttcgactaacgttttaaaaaacgttacaaataaaattgacctgagatcatttcatgacggtccattattggcaaaacaactgttaatttctttgaagaatatcaacggtcttctaatagtaccagcgaacacccccgtagccaaagcacacaacgcgttgaatcaaaagtttctccttttatcaacaagattaattgaaaaatttgcagatatcttgcctgatcaattgtcaaagattctttctgataaagatgcttcacaggggttctggtcctgtatattttcctctgataggcacctgtatcaagcggctacaaatatattatacaatacttttgatgttgaaggtagattagaagggattctagcaatcttgaataataatttgactgttaatttggggaatataaacgtgatgttacaaaggttgatcaattgtgaattttatgagccttgtccacgtgctgttcgtgtcctgatggatgtggtgagtgctttcgttgacccaatttctggtgtatttgctaattatcaaacgttgaaacgcgaaagcactgaaggagaatttttgaggttttgggaactatgctggtcatttttggatacaatttataacttcactctaaaatgggcttctaaatatgactattctgaactggaaaattttacaaaggatacattagacttgagtcgctcactggtggactcttttagagaattttcagatattcttcagggtcaagacaaaaatttattactcaacgtcctggaaaccttcaaaaatatgttatattggctaaggctaagtgacgaagtacttttggaatcttgtgtcaggttaattataagcacgtcggatttagcgcgtgaaaagcatgtaaaggttgaagattcattagtagagatgatggctaaatatgcctcaaaagcaaaaaaattctcgaataaattgacggaacaacaagcaactgagattctgcaaaaagcgaaaatattcaataaagcgcttaccgaacaagttgctacagaagctgaaagctacagaaaggaaaaggagctgtcgaggctgggaaaagtgatagacctcacggattcggcgtcagcatctccatccttaccaccttcttcgccttcagttgtttctggctcttctgcagaatcaagagctgactatttgcaaagaaaggctctatcttcttcaatcactggaagacctagggttgctcaacccaaaataacatcttttggcacgtttcagccatcgactaatgtcaatttgcagcgtacgaaaccagtcaagcctctatcaaaaatggaattggcaagaatgcaattattaaataacagggttattcatccgcctagtgcaccggctttccataccaagagcagaggtttgagtagtaaaaatgacagtagtagtgaggaaagtgacaacgatatagaaagcgctcgagagctttttgctgttgccaaggcaaagggtaagggaatacaaactgttgatataaatggaaaagtggtgaagaagcaaagtgcggcagaattagccaaacaagaacttgagtatatgagaaagagattaaatgttgatatgaatcctttgtatgagactatattacagtgggattatactagaaatagtgaatacccagatgatgagcctatagagaattattttgacgtaaaggattctttcaattctccggtggattaccaaaggactatgaggcctttattgcttttagaatcttggcaaggtctatgttcttcacgtgatagagaggattataaacctttcagtattatcgtaggaaatcggacagccgtttctgatttctatgatgtctatgcctctgtaaccaaacaggttttacaagattgcggtatatctgattccgatttaattgtaatggcgttcttgaccgattttagacaaggaaaaaggctaactagtgaagattttaaaagagcacaaaacacatgtttagcaaaggttagaacgctgaagaacaccaaaggtggaaacgttgatgtcacattgaggattcatagaaatcactccttcagtaaatttttaacattaaggtcagagatacattgtgtcaaggttatgcaaatgacaactgttgaaagagagtattcaacactagagggactggaatattacaacttggtcggccaaattctacatgctaaaccgtcacctcctgtaaacgttggtacagacgaaattgagatggttaagaaaagctataagcttaacacatcacaagccggcgctattgttaactcggtatcgaaggaaggtttctctttaattcaaggtccgccaggtaccggtaaaacaaagactatattgggtattattggctatttcctatccacaaagaatgcgccaccttcaaatgttatcaagacaccgatagaaaaccactcatcgagcactgagcaactcctaaaaaagcagaaaattctaatttgtgcacctagtaatgcagctgtagatgaaatctgccttagattgaaaggcggtgtatatgataagcagggccatcaattcaaacctcaattggtacgtgtagggaggtctgacgttgtgaacgttgcaatcaaggatttaactttggaagaacttgtggataaaaggataggtgaaaggaactatgagatcacaagcgatccggacttagaacgcaaattcaataacgcagtctcgaaaagaagggaattgagagataaattaaattctgaaagtggtaatccagaaagtccaatgtccactgaggacatcagcaaattacaacttaagattagagaattgagtaagattattaatgaacttggtcgtgacagagacgaaatgcgtgagaaaaattcagttaattataggaatagaggactcgatagaagaaatgcgcaagcccatattttggctgttagtgacatcatatgttctacattatctggttcggcccacgacgttcttgccaccttgggtattacctttgacacggtcattatagatgaagcgtgtcaatgtactgagctttctgctatcatccccctaagatatggagggaaacgttgtattatggttggtgatccaaaccagttaccaccaactgttctttcaggtgctgcaagtaacctcaaatataaccaatccctatttgttagaatggagaaaaatagctccccatatttattggatgttcaataccgtatgcatccttccattagtaagttcccctcatcagagttttaccagggtcggttaaaagacggccctggtatggatgttttgaataagaggccttggcatgagtgcaagccgttagctccatataagttttttgatattattagcgggagacaggagcaaaattctaagactatgtcttatactaatatggaggaagtacgtgttgctattgagttaattgattttcttttcaggaactttgataataaaattgattttacggggaaaattggtataatttcaccttatagagaacagatgcaaagaatgcgaagagaatttgctcgttattttggtggcatgatcaacaaatcaattgatttcaataccattgacggttttcaaggtcaagaaaaagaaatcattttaatatcgtgtgttcgtgccgatgacaccaaatctagtgttggttttctaaaggattttcgtcgtatgaatgtcgctttaaccagagccaagacaagcatttgggttttaggacatcaaaagtctttaactaaaagtaagttatggaagcatttaattgaagacgcaaaacgtagaaaatgtcttgactatgcttgctccggctttctagatcctagaaataatagagcccaaagccttttgaagaaatatagtgttcctgtactatcggaacaagaagacgattacaaattacctatggaatatataaccaaaggaactgccgacgcggaatctaataaagaagcaaagaagagaaagattgttgatgaaggtgatgaaacaaaaaaaattctaaagaaaaagaagaaggacaaggagaagaagaaagaaaagagcaaagataagaaaaagctaaagactgatgagaaaaagaaaaaagaaaaaaagggagaactgtccagtgcatcatctggtaccaagaaaaaatcttctatttttggtggtgcaagtgtagccaatatagtagtttctaaaggttcccttgacgtgaatggcagtacgaagacgacagctgcagtcgataaaaagaaaaagagcaggcatgtttgtttctcagatgatattagcattataccgagaagtgaggagcctgaagtaaaagtaaccagaagtctgtcttctgtactaaaggaaaagaaaacaactctaaaagaaacgaaaccgtcttcgccacctccagttagtgggagtgacggtgaagatgatgaagatgattatacaccttccatttccagttcattgatgaaagttgaaacgaagaataatagtaacagaataactcctaatgaacaagtttttagtgcgagtatatatgatgatccgcaaactatacaacctaaacagtctcagccctctcccacagtttcaagacatgcaaattcaaagacatatgcaacgagtaattcaccaggtattttaagtgcctccgattatggcgagcctgaccagaccggatcgaacgcatcacatagttggcaacctcagcataggggtaacgagaaccaatatccaacaacacctgtgggatctcatggatctcttgggtcattgtctgcacatccgcaagtgagtttccctactggtccagaaaacgcatgtagtatagattcttatccgcaacctcagcctcaacctcaacatcaacctcaacatcaacatcaacctcaacatcaacctcaacctccaacctcaatggttcctggtagtgtgcctgcaggtgtacgcaacagttctaggcgaaacacatcatctagccctttcattcccaaaaaaaggaaacctagatcataa

SEQ ID NO: 1873 - DNA, 1572 bp, Saccharomyces pastorianus
atggctgctgttagagactacaagactgccttggaattcgccaagagcttaccaagattagatggtttgtctgtccaggagttgatggactcccagattagaggtgggttgacctacaacgatttcttggtcttaccaggtttagtcaatttcccatcctctgaggttaccttgcaaaccaagttaaccaagagaatcacattgaacactccttttgtttcctctcctatggacactgttacagagtctgaaatggccatctttatggctctattgggtggtatcggtttcattcaccataactgtactcccgaggaccaagctgacatggttagaagagttaagaactacgaaaatgggttcattaacaaccctatagtaatttccccaaccaccacagttggcaaagccaaggctatgaaggaggaattcgggttttctggattccctgtcacagaagatggtaaaagaaacggtaagttgatgggtatcatcacttctcgtgatttccaattcattgaagacaactctctgcttgttcaagatgttatgactaaggaccctgttaccggctctcaaggtattacgttatctcaaggtaatgaaattttgaagaacatcaaaaagggtaagctattgatcgttgacgacaagggtcatttagtttccatgctttccagaacagatttgatgaagaaccaaaattacccattagcttccaagtctgccaccacaaagcaattgctatgtggtgctgctattggtaccatcgaagctgacaaggaaagattgactttattagtcgaagctggcttagatgttgttatcttggactcttctcaaggtaactctattttccaattgaacatgatcaaatggatcaaagaaactttcccagatttggaaatcattgctggtaatgttgcgaccagagaacaagctgccaacttgattgctgccggtgctgatggtttgagaattggtatgggttccggttccatttgtattactcaagaagttatggcttgtggtagaccacaaggtacagccgtttacaatgtttgtgaatttgctaacaaattcggcgttccatgtatggctgatggtggtgttcaaaacatcggtcacatcaccaaggctctggctcttggatcttctactgttatgatgggtggtatgttagccggtactaccgaatcaccaggtgaatatttctaccaagatggtaaaagattaaaggcttatcgtggtatgggttccattgatgccatgcaaaagaccggtaataagggtaatgcatccacttctcgttacttttctgaatcagacagtgtgttggttgcacaaggtgtctctggtgctgttgttgacaaaggttccatcaagaaatttattccatacttgttcaatggtttacaacattcttgtcaagacattggctctaaatctttgactttattgaaagaaaacgtccaaaaaggtgaagttagatttgaatttagaaccgcttctgctcaattagaaggtggtgtcaataatttacattcttacgaaaaacgtttacataactaa

SEQ ID NO: 1874 - DNA, 3891 bp, Saccharomyces pastorianus
atgggaaacaccgactcgaaatcaagttcgattctgctgaaccattgcattgccctggttcgaccggacgacgcagtcgcggccccggtctcgctttctccctccccgactccctcaccttctctctccagcaccagtgctgctgatcccttgagcgtgaacctggcgatcttcagactggaccccggtccggacctcgacgccctgctcagcggcaaaccgggcatcccgctcgacgttgacgccgtgttcaacgagttctaccttgatttcatctccatggacgtccaggtcttccgcatcaactccaacttcaaaaaaatcctgcacatcatctccagtctgaacccggtcaacttcaacaacctcatcgtgtttctatcgctgtacatcgtgctgtccgcggactgcccggccgccacccgctcagggctgcacacgtccaggctcatcaacgccatcaagacgctgtcgattctcatgcccatctactacgacaggtctaggtccagcacgcaggaccagtgcgacgtgttctgggccacgcagcacgaggcagaggcagacgtaaagcccctccccttgcaaaacacccttctgggcgaaaagctgctgttggcgattttgaaactggctttccagacggacttcaccacggccacaaccgcccatgcggctcaactgtgggaaatcggcatcctgaccaactccaacaagtaccgctcgttgctgggcacgcacttgcaatggcacactttcgccaacaggctgcttcttttgcgcctgttggcagctctgttctcttcggacttgtatgcctccgccgcgcatacgggcaagcacgacgtcaacatgtttctggtctactggtgcacgcaactgcccaaggacaaaaccattcagttcacttcttcactgctcaactgcattatgcggttcgctctcaacaacaacaaggatttccacagcttgaaaaccaacttcttcaactccgacgccacagcaaacaactggcagaccctttacttccagttcgtccagtcgtgtctgcacgtcttgaacctctcgctgtcttataaggcccagaacaacatcgtcaccatcttcctcacgcaactgcagcgcgagtacgatttgaaattgattttgtccagtttcatcaaaatcttcaaataccccattgatctcgcaatagaacaagaatcgaatattttcaatttcaccaacaaccgcacgaccaatcatgtcgacaccaccagaaggagagccgcatccgccatctccaacgatggcgtatcgtctgcatattcttcaccgccgaattcttcctcgtctgctaatagcagcaaaccgcaaaaaaggacccaactacccaacatccaccccttgctcattcctatgacccttctcacaacaagtctgattgattgcaacaaatccttccaaaactatttcgccgataagtttgccaatcgattcatcatattcgccatctattacttgaagtattacgatttttcgtcttcgtcttccttctcgtgctctttatccgcaacaaactcaaattcttccacaggaaatggcccatccagtgatacgattgacgagcattctgtagccgaattgaacgaaaatagcatttctcaaatcctgctaccattgctcaaccatcttctattgattttgacttccaaaaagcttgttcttttcaaaatgttacaaacttttaacctgaattactacacgaacagtctgccaaacttttataaactcaccaacattaacggggacatcaataacttgacattcagagatttcactatcattcaattatcgaacttgattctggaaaacattaagttcaacttgcaaccaaacccgattttctatgagttgatctacaatctactacccatcaatgacgagattttgaccagttctctcaagaatgacgactcgcacaatgatttgatccttttatcagcaaaaaaaaaattcacacaatcaccaaacactacatccagccacataccttcatcaaagttatcctataatgctgcaatgtccttactttacattctttccaaatcatcaaataaagtttatctgaccacttatgcaacacctctgttcaagacaaaggaaataccatatatgatatcgccaggtttcaaaatggatttattatcactactattaaggtcaatcacaatcttcgtgaacttgtatttcgaggatgcagagaatttgctgtttgctatgtcaagacatcaatcgatctgtcaccagattaacgattccataaattccatttccaaggctttaaacatgaacccgaattcaaatttgcatgtcatgaacttgaaagaaatgggcttcaataggaaagtccaatggaaggatttctaccaattcgatgagattaccgatctacctcaagttaagctacactcattttcaaaccaacagcaacagtcacaacaacagaaccaaaatgacagtcagggtcataatcaaaacgaagaccaaggtcaagataatgaatctccagcaccctatttgcttttcgatccgtcttcgctaaacaatgaaacgttgagcacatctaaccattcaacacacccgaaccatgataagagctacgaagtcatcgctttcattgattataggtcggattccaatttgaacttacaacatcaactaaaatactggccacatagacctcaatggcctactcaattgacgtttacacacaaatgtaaaaatttcaagtacgaaaatttcgacgaagtttggtctggtatggtttatttgcaaaacttttcgcgattaatcaaacatgttttatcgaaaattcctgaaattccaagaatcaaatcggtgcagtattttgaaactttagcaaaattgtcagctttgaagtctgacatattgactacaattcgcccccaactaccactcgacatccaaagaatgacgacttttcaacctttatcaatgcatatcaatgacgatttattggtgtggttccatattatcacgtgggcaaacattttcacgcaaacgtcattcaaatatgaggaaagcccatcacccgagttaaggcactttgaatctctgttagacataaacattgacgaaagtgacaataataatactatttcaagactaacaaccgatcgtttggggtacatacggagatcgagaggccaatcatctgtaagcttagagagaacaatcagcgctggatcgggtgtaggagctccaacaactcctttgaatagaacaaagagtaacggaagtggcactttaatcaatcatatcttgcaaaacacaactcaaaaccatttccatcatttaagatcatcttcatcttcgtcctctattgctttagagagaactatttctaacagttccgtgacaagaaacaggccaaataattctcaacatgctgtttctgaaaccgataacaacaatagcagcaataataaaaatattaacaacaataataacaatggtggattctccttcttcaaatggaaatggggaggcaatagcaataacggtaacaacaatgattcaagcagtggtcaagcaaatgcaaattcgagcacaccaaacaccgctgataacttaaatagttatatgctggatgaagaaatcagcgcgggtgtagtgaataatataatcgagagtaacatttgggttggaactgatatccgactctttagggttggagacttcaaaaaggaatcgttttcatttctggaaatgacgtcttcctttttcaagaaatttaagttcacaaacagcgataatgataattacaataataacgaaattgatgataatgcacagttgagatatacttctagagggttgtacagatag

SEQ ID NO: 1875 - DNA, 396 bp, Saccharomyces pastorianus
atggatgcgcaactggagtgggctagcagccttgttccgaaaagacagttccaacagcagcagcagcagcagcagaacaacaaccagcaagaccttcagaaggaccaactgatgaccgtaggcatgcggatcagacagcgcgtcgaccagggctatgcctccagcacgccgggcacctcgcaggcgtcgctgcagcccgcggtcatcagggactactccagtgttattgttccgcagtttaccaggtcgccgctgccctccgcgcactcgctgccccccatgctgatcaaccagagaaccatgtccaccgaggcgtcctcgctcgagaagtgggacgtcccggagcctgccgcggagaacgaaacaatggtcaacgggtccaagagaagactttga

SEQ ID NO: 1876 - DNA, 273 bp, Saccharomyces pastorianus
atggagacgcccttggacctattgaaactgaacctcgacgagcgggtgtacatcaagctgcgcggggcccggacgctggtggggacgctgcaggcgttcgactcgcactgcaacatcgtgctgagcgacgcagtagagacgatataccaactgaacaacgacgaactgagcgagtctgaaagacggtgcgagatggtgtttgtcaggggggacacggtgaccttgatcagcacgcccaacgacgaggacggcgagggcgcggtggagatataa

SEQ ID NO: 1877 - DNA, 960 bp, Saccharomyces pastorianus
atgtggaagagatcgttccattcgcaaggcgggcccctccgtgccagaacgagattcaccaagcccaagcccaagcagcctgtgctgcctcgcgataaaataagaccgcccactcaattgacccatcattcccgcagcctgcagatcacagagccgattccgccaaccgcctctaacctgcactgccccgacgaccatccgctctggcagttcttctccaacaggaagttcatcaggaccaccgacgacttgccgcccgccggccacgtcaggccctggtccatccctgagctgagacacaagtccttcaacgacctgcactccctctggtacaactgcctcagggagcagaacgtgcttgcccgcgagaaccacctcttgaagaacgtcgtcggctcctcgcacgacgagttcaacaagctctcgcagtccatcagaaccactatgtggcagatcagacacgtcctcaacgaaagagacctggcccactccgcctctcgggccttcttccaggacgaatcgcaaagacaaaagtttctggacaccctaaccaacgaccactttctgaataaggacgtcccggacgacgaggtcgccgccatgctcacacgcttccagctcgccgtgttcgggatctcagagaccatccaggacaacaccgtcgacaccacctttattgaaggaatcaagtttctcgcgaacctcaaactgcgccggttcaaggactcggaagacctgatatcggagctgtctcaggaccccatcacagacgtgggcgagtccttcgtcttgttcacctccgatttcgaacagcgtgctgtccacgaagcatgtgtcgccatcaaggacctgagacagtccccggaaaacaaagtccccaaactgaatgaactatccaccgttagaaaatacttgaaacaattaattcgtgcaaattccatggaacaaactactgcatga

SEQ ID NO: 1878 - DNA, 2130 bp, Saccharomyces pastorianus
atgctggaagagcaattgtatttactggcatgtgtttttgcgtcgaaagccgattcgcataacatcaggaaattggctgccaggttgggttcaaaatcggagtacctgcagatcatttgcgtgttgtggccagaattggatgatcccaaacacctttcgtttctatgtaaacaagaactggtggagagaaacgcagaagaggctgagttatctagcgaagatgtgataataaaattattggaaggggatagtcgtttaattccattgattgaaatggacaacgctaccatatcagctagatatcgcgaattgaaagagtttgtaatcaataaactcaacagcaaacccttagaagatgttgaagattggttgagggagagaatcatgatctgtaatgaaatgcttcccgaatcaccgttatactattctgagttgtgggaaaccgcggatccaggagtgatatcttcaaagtttactgaatggattgatggtgtaattaaaccattagaccaccttgataaacgactacacgttatattcaaaatcaacgaatggaatgaaatgcatgataacgaccaattcaatttaatctttgaaggcatcgaaagtgtacaaggtaataacaagatgaccgaaatcattgaacatgaattgattccaactttgttttatgggaaaaaatgggaaacttttatcagtgaatttttaaataaacagcaattctcgttaaagtctgataccaattataaactgtttttaaaaacatattttagtcttgaagagcgattgaaaggtaacagtgaggcgatgagaaatttacaaagcaagatggtggatatattattcaacaacagtgaaaatttattcaatttatccaacttactccacaagttcaacgagttacgggatctactgaggatattcccggatgatattgcaatagaagacgagaaaaacgttacagttttagaaatgaaacagtttatggaattttttaccaattgctccaccaagtattccttccaggaaatctttgccataacacaagaagaagaatcggcccaactggctcattttacctcattatgccatgaagaatttgataaatccagtgagattcccagtttcttacaatccatgtacgaaacggttttgaaagctgaaagcaatgataaaatatttactaggattagcatggatgacaaaatatacagtatagtggaaattttcttacaaatgaatgagtttaactacattgaaatggtcataacaaagttcgactacgatgaaaatgcgcacttgtacaaacttctagtgaagttcttctggcattttttcaataatgcctcgaatgggctacgcaaagaaccagagatgaagaaatcttcacaaacattgcaaataatccaaaggcacatggtgcaacaggcgggggcgaatctaacaaggatggaagtattactcgaactggcagacaagctatcacactactccataaatttaaacaaaacgcatggcggcacaagagatgcagcattcaaaccaagcaatattttggagtataaagattgtcccctggacataatttccaacctattggaattgaaccctcgcctgtataaggatctgcccaccacgagaggcttgctttccgggatctacgacagtttgtctattagtgacgagggccaaacggtgaagatagaagtggatttgatgatactgcatattgactatgcgcttgtcaatctggattttgacgtagcatacgaaatgggcgagcgagtgtttgaactgtgtcgtgaacgtgggcaacagatgatgaaagcgctgggcgaagagcactggttgacgctgtaccaaatggggaagtttatcgatccaaattgggtggacaacgagatccccacggagataatcattttgcaaatgggcatcttgggcaagctgctggagatttgccctctggaggaagtggagattgtcacgtcacaatggagcacgttggagctagagttgagcgcacgtgacttggtgagggataagtatgcattggaggcacaaagcggtagcaagagtagtgttggcggtattgccagggagatcttccataacgtgacaagtttctga

SEQ ID NO: 1879 - DNA, 768 bp, Saccharomyces pastorianus
atggctgtcggaaagaataagagactatccaagggtaagaaaggtcaaaagaagagagtcgttgacccatttaccagaaaggaatggttcgatattaaagctccatccacttttgaaaacagaaatgttggtaagactttagttaacaagtccactggtttgaagagtgcttccgatgccttaaaaggtagagttgtcgaagtttgtttggctgacttgcaaggttctgaagaccactctttcagaaagatcaaattaagagttgacgaagttcaaggtaagaatctgttgaccaacttccacggtatggatttcaccactgataaattgagatctatggtcagaaaatggcaaactttgatcgaagctaacgttactgttaagacttccgatgattacgttttgagaatctttgctattgccttcaccagaaagcaagctaaccaagttaagagacactcttacgctcaatcttcccacatcagatctatcagaaaggttatttctgaaattttgaccaaggaagttcaaggttctactttggcccaattgacctccaagttgattccagaagttatcaacaaggaaattgaaaatgctaccaaggaaattttccctctacaaaacattcacgttagaaaggtcaagttgttgaaacaaccaaagttcgatgttggtgctttgatggctttgcacggtgaaggttctggtgaagaaaagggtaagaaggttaccggtttcaaggacgaagtcttggaaactgtgtaa

SEQ ID NO: 1880 - DNA, 1038 bp, Saccharomyces pastorianus
atggaaggcgtatatttcaatattgataatgggtttattgaagctgtagtgagaggctacagaaatgggttgttatctaataatcaatacattaacttaacacaatgtgacacgttggaagatctaaaattacaattatcgtcgactgattatggtaattttctttcctccgtctcttcagagtctttgactacgacgttaattcaagaatacgcatccagcaagttgtaccaggaattcaactacataagagaccaatctagtgggcccacgaagaagttcatggactacatcacttacggttacatgatcgacaacgtggctttaatgatcaccggtactattcacgaccgtgataagggtgagattttacaacgttgtcatccattagggtggtttgatactttgcccactttgagtgttgcaaccgatcttgaatccctatatgaaaccgtgttggtggatactccattagctccttatttcaaaaactgttttgatactgctgaggaattagatgacatgaacattgaagttatcagaaataaactgtacaaggcatatttggaagatttctacaattttgtcactgaaaagatcccagagcctgctaaagaatctatgcaagtcctactaggtttcgaagccgatagaagaagtatcaatattgctcttaactctttgcaaagttcagatattgatcctgatttgaagcgtgacttattgcctaacattggtaaactataccctcttgctacattccatttggcacaagctcaagattttgaaggagttagagctgctttgggtaacgtttacgagtatagggggtttttggaagccggtaacttggaagatcatttctaccaattagaaatggaattatgtagagacgcattcactcaacagtttgccatcagcaccgtttgggcctggatgaaatccaaagaacaagaagttagaaacatcacttggatcgcggaatgtattgctcaaaaccaaagagaaagaattaacaattatatttcagtctattaa

SEQ ID NO: 1881 - DNA, 1197 bp, Saccharomyces pastorianus
atgtctgatatgctcccattggctacatacagcctgaatgttgaaccatacaccccaaccccggctctaaactttgaaatgccggttaccgttagaattacaatggccgccatcgaccctgaaccttttgacgacgacaagaaaccatctactttaagaattatcaagagaaatcctgagctttctgagcatgaacatggtgagggatgcaaccacgatcacggccatgacgatgaagaagatgaaagtgacagcgaagaagaagtaccaaagaaagccgtcaaagcaaagaaaggtaaaaaggctgagcaaagcgaatccgaagaagaatccgaagaagattctggagacgaaagtgaaatggacaacgagttcgaagagtgcgttcttctaactttatctccaaaaggtcaatatcaacaagctttggatattaccattgctccagaggaagatgttcaattcgtcgttaccggttcgtacactatctctttgactggtaactacgttaaacatccattcgatacacctttagaagacaactcttctgattccgatgacgacgaagaggactactacagtgaagaaaaatcctcaaatggagaggaagaaaaagacgacgaagagttgagttctggtgacgatgaacttgatgatttggtagatgctagtgacatcgaaagccgtcttgaggagttagttgaaaaggacgaaaaaaagaaaaacaataaaaaggatatcaagagaaaacacgaagaagaagaagaagaatctgctaaacctgttgaaaagaagcaaacaacaaagaaagccaaaaaggccgaatccaagaaagagcctgaagaaggcaagcaaaagccaaagacaaaccttttagaaggcggtattatcatcgaagaccgtgtcacaggtaagggtccacatgccaagaaaagtaccagagttggaatgagatatgttggtaagttgaaaaacggtaaggtctttgacaagaacacaaagggcaaaccatttgttttcaaattgggtcatggcgaagtcatcaaaggatgggatatcggtgtcgctggtatggctgtcggtggtgagcgtagaattgtcattccagccgcatatgcctatggtacacaagctttgccaggcatcccagctaactctgaactaacatttgacgttaagttggtgtccatgaaatag

SEQ ID NO: 1882 - DNA, 2667 bp, Saccharomyces pastorianus
atggaagaaagatcagattctatagcgacctcacaatcaggaagtgaaatgagtcacagtgaagccaagaacagggttgaaacgaataccaggaagagaaagtttgcttgtgtggaatgcagacagcagaaatcaaaatgcgatgcgcacgaaagagcaccagagccatgtactaaatgtgctaaaaagaatgtcccatgcatcttaaagagagattttagaagaacttacaaaagagcaagaaatgaggctatcgaaaaaagatttaaagagcttactagaactttaacgaacttaacttcggatgaaattttgaagagaattgaggaagagcaagagattgttttggataatagcaactttacgaaagaaaaagtaaaacagctgaggaaaagtgcctttgagtccacagatattgaatcaaaaacttttagaacattccggggagacccgattgcttataatgccagaaaacatatagattcttctcccttgacactcttaagctcgtcaacgaattttgatactgcgcagtccataaacgtcatgacagaagaacaactaaaatgcttgcctaaaagtctaggcgacatctatttgtcaagcagcgatattgctgagctatttcaagaatttgctacgaaatatcatcagtttttaccggtagtcgacctggctaaaggagctgaacggatctataacttatctccatgtttattttgggtcatcttgcttattggattgaggcgaaaatttggagctacggacttaatgaccaggttgtctgtattggtaaaatctgtgttatcagaaattaccatatctccgatcattcgatatactccttcagataaagacgaacccgttctaaacgtagcatctgtgtactcagtgcaagcattccttctatacactttttggcctccgttaacttcttcgttaagcgccgatacttcgtggaataccataggaacagcaatgtttcaagcacttcgagtaggcctaaattgtgcaggtttttcgaaagaatatgcatctgcaaattcggaattggtcaacgagcaaatacgaacttggatttgctgtaatatagtctcccaaacagttgcatcatcatttgggtttccagcttatgtttcctttgattatttagtaataagttctaccagagtgcctagttcaaaaagccaggtggatatacccaatgaactaaggcaaatggcccaaatcgctagatttgagaatcaaattgtaaacaccatgaactccaccccagcgagtgcgacggggatggtaagtcaagaggagaaacagcccttgttgcatgtgcttaatcaacagctaggccaattagagatcagtcttgaagaaaataacctagatgatatacggaaatttttgttactagtagcgaaagttcacttattaacatattatttcactgatataacgtctcaggatgcggggaaattcaatgctaatatctatgagggatcgtattccgttatggaactcgatacaagttttgagacaaagcgtggattagtcaaggtctataacgctgccgtaaaatttcttatacacgctaataggatgtgggaacaggacccgaccatcatcaagtattttccaggtttattcgtcttgaatatatggcaatctgcctgtatcattagtaaactcatacattcatcactgcattcgatgttggatattatttcgggcaaaaaggcttataacaatgcgatttcattaacgtttaatgcctcggttttgaaatatgatatggcatatagatcatccggaataatgcgaagtatatggagtttatttgcgaatatgtacgatgcatggaaaaatgatcaaagggaaggtgagaaaaaactggaggatgatttcaatttaggaatcaccataaaatctaggatgtcggtaaatgtcttttttgactgcttatacattttaaaggagaaatgtggtatggccaaattagaaagagacaccaagatttctacagcatacaacgttgatgatgaggaggaagatgaggaggaagaagaagaagaagaagaaggggacgaggaggaggaggaggcactaactggaagtatcctggagggtatggacaatcaacagttaagaacgagaaaattcactaatgtacggcatccagaaaagaaggcgagaagaataattgaaaccattccgttggatccgaacccaatcaatgcaggttctactagtagcggaagctccttaacaactccaaatagccaagtagcaaacactatatcatatagaggtatccttaacaaaatgtccccaagagagcagttgaatcacgcaaacttagattccggtgctatcacagatatgaagcaaaacgaaattaataatgaacatttaccaatagcgaccgctgttggacacttagcgagtcaaccgcctcatccaataacacagattcaagaaaatgttcaacagatggcgcagaccaactcttctctattagaaacgcatgctgtgactcagacgaaccctgtttcaagtggagataaagaatcccctaattccattatggcgaattgggacaactgggaatctgacatggtttggagagatgttgacattttaatgaatgagtttgctttcaatcctaaggtttga

SEQ ID NO: 1883 - DNA, 2103 bp, Saccharomyces pastorianus
atggcaagcaaaaatagaaccctgcatgaactatcatcaaaaaatttcagtagaactcctaatggtttgatttttactaacgatttaaagacgatgtactcaatttttctaatttgtttagaactgaaagagaagaaacacagcaacgacactaaatcatttttatttactccgtttagtaaacatttccctttcactttttcatatcaagaagccattcaggcaatgggacaattagaactgaaagtggatatgaacacaacttgtataaatgtctcgtacaacattaaaccgagcttggcattccatctcctcacgttatttatgtcatcgaaactgttgcatacgccgcaggatagaactcgtaatgagccaaaggaaaaagttcttttccaaccaacaccaaagggggttgctattttacagaagtatgttagggatattggattgaagagaattcctgatatactattatcatcgttcaactctatggaacttttcaccttcgagagaagttccgttacagattcaatcattcatagcgattacttaatgcatattctattcatcaaaatgatgggtgttaagcccaatgtttggtctccaaccaaacccaatgatcctttgccttgtttatctttgttgttggaatacgccaacaatgatgatacatttacatttgaaaaatcaaagccagaacaaggttggcaaagtcagattgggaatgtagatattaataactcagaaagggtatcaccattagcgcatcggttctttacaaatccagattccgagtcacatattcaatactatgtttccgacactggaattaggctttttgaaaataaagccttcggaacttccaaaaagattactattaagtacagttttacaacaaaagctatatggcagtgggttatggattgtaccgaaattatgcatgtaaaggaagctgtttcgttggcagcactattcttgaaaatggggctaattgttcctgttcttttaccaccctcacgtaccgataaaaaaaaatttcagattagcagatcttcatttttcactctgtctaagttagggtgggatctggtttgttggaaaggttacaaaagtaacaatattcgagcacccaatggtgatatcattgatctagatatctctttaacaagtcatgtatccgccggtgatgaaaaaaggacgctagaggagaacgatggttttgctcaggaactgcttatttcttcaagcaatcacagccttaataaattggactatgttttgaatgatccaggtatgagatatttattcaggcgtcatttagaaagggaattttgtgtagaaaatttggacgtttttattgaaatcaagagatttttgaaaaaaatgacaattttgaagagactaatagattctaagcgcggtaataaaaaaataaacattggtacttcaaaaaataatgttgtaaagactattgattcagctttgatgaaacaagccaacgaatgccttgaaatggcctatcatatttactcgtcatatatcatgatcgggtcgccatatcaattgaacatccaccataacttgcgtcaaagcattactgacattatgttgcatccccaatccccgctattagaacgttttcctactagcttggatgattcattgcttgaatccaccgaatctaactcttcttcagtcggttccacagatggtcacacgttacaagaactgcctgaagtaatactgaagccttcaaaaacttcctggaatgaagatagtttatttcaaaagcaaacaccctaccaaatatcaaaagaacttaaaccggccccattaaatctagcagatgctcactgtaatgaaacatcactagaacagtcaaatatcatcctgagatatagtagcgacgacgccgaagattataacggaacacataactcattaccagcaactttgaaaatccttagaaaattatacccactttttgaaagcgtcagtaatgaaatgtataagttaatgaacaacgactccttccaaaaatttactaaatctgacgtgtacaaagaagctaatagcttaatagagattcaagaaaagtgctaa

SEQ ID NO: 1884 - DNA, 924 bp, Saccharomyces pastorianus
atgacaaaggatatcagaacgggcgatttagtgttatgcaaagttggctcatttccaccgtggccggctgtagtgtttccgcaaaggctactccgaaacgatgtatataggaaaagaaaatctaattgcgttgctgtttgtttcttcaacgatccaacgtactattgggagcaaccaggcagattaaagcagctggatcaagataccattcacaattttatatcggaacataataagaatgcaaaccaaagagaactggttaatgcctacaaggaagcaaagaaatttgacgatttcaacgtatttttgcaagagaagtttgatgaagaaaatagattgaaggatttcaaggcgtttgagaagagtgaaggctccagaattgttgctggcgaagatccttttataggtcggacaaaagtagttaataaaagaaagaaaacttccatatctcccagaaacgatcctgaaagcaaggaagatttgcagcagctaaagaaagaagaaacgaaatccaacatccaactacccaaaaagaggagacatacagatgatacagaaaccaagccaggtgccagcgacaagaagaaagtcaaattagactattccaggaaaattgagatttcactactatttcgccgtaggattcaaagaaacttaattcagagagaaacgcctccgtctgcgggagatataaaagaaacgcatgagttactaaataggatttatgaaaactcagatactaagagaccatttttcgatttagaggcactgcgcgaaagtaaattacacaaactactgaaagcaattgttaatgatcctaatttagaggaatttcaccccagttgtaaagagattttgttgacctgggctgacctaatcacggaactgaaaaaagaaaaatcacaagcattatcaacaccttaa

SEQ ID NO: 1885 - DNA, 960 bp, Saccharomyces pastorianus
atgctagaatctgtgcagagactatggaaggacttttttgggacaggaaatgatggcaggaaacgtgaatatggatcgctcaatgaaataagaagaagatctgcattaaagagtaaacgaaagcatatacggtccacgggaaaaagcctgttaaagagaccgagaaaggcaccagttagaaatgatcaggaaattcttaatagtggaagaaggaggactcctaagcggaggctttctaggattttccagacaatcaaagatgttttttctaatgatcatgagaatatgaataagatgcaaaatatttgtggggacatgacaagaattttgaagaagccttctcaaggacggccttcgtatttggatactgatgcggcaaaatcgaggattttgaggagtgatgctttcaaaagaaaattatcagagttaaaatataataagcaacgaattggtgagttgagaaatataagtgctgatgcatcatgtggaaatgatgcgaatcaatcactctatttagatagagaaatgcttttacaacggcaaatcaagaaaagagatgagaaaataagatctctggaaattaaactacaatcattacaggatgaattaaattactcgaatgagaaatataggattttggaaaatctactagattcttcaaacatcgatccatcatacacaaaatctagaagggccatttcgaatctagtaaaggaaaatgatcagattaaacctttaaagattgacctttcaccgtctccaatacgaagaacgaattcgctattcacttcaagccccatgaaaacatacacaagagacaaaaagataccagaaatgcaaccactacatgaaagcatatcccctgattccccaacaccacctcatcgctcaagagaaactgaaaaggcggatgaaacactttcgccaatctcggtagatttttcgagttatttatcgtaa

SEQ ID NO: 1886 - DNA, 1185 bp, Saccharomyces pastorianus
atggtttccacagagttcaaagtggccctaggctgcatagcaactcgtttggctgtaatgtgcctttttccctctttgcagcaacaattggacaaatctgtagaattttcaacgccagtaacttcatttaggtcgttacaagaaggtatatatctattgcggaataacattcaagtgtataaccacggagtggtccatcatccccccattctagttttattcctctctcttttcgactccgacaaattaatctctatcatatacgcttcacttgatgggttgattgcgtatcagttgacgaagatgacaaaggtttttaagaatctaaaagtacaaagctggctaccaggtcttctctatgccgtaaatcccttggttctattgtcctgcgtcagccgttcatcaatcatattcacaaatttcgccatttcttcgtcattatattgcatattaaccgaaggcaatgtcattctatcctcggttatgatatctgttgcgggatacttgtcattttaccctcttctacttttgattccgctattgggtatgctcaagagctggagacaaagaatgttctccgtcatcgtttccatattatctttactaattctgctattgtttagctataatatgctaggtggagaaagttggtcatttttgacacaagtttatggatctataataagttttcaaaaggttttccccaacctgggtttatggtggtactttttcattgaaatgtttgacactttcataccgtttttcaaagctgtgttcaatatcttcatagcagctttcataacaccatttactttacgctaccataagcagccattctacgcatttattttatgtatcggatggattgttttaactaagccatatccatcccttggtgatgctgggtttttcttcagtttcttacctttttttactccattattcggttatttaaggtacccaatcatatcagcattattgtttctacacgctattgtattagctccaattttctatcacctatgggttgttttaggttcaggaaatagcaattttttctatgcaatttccctagtatatgctctggctttagcgtctatcttggttgatttgaactgggcaatgttgagaattgaatatgataatggtgtaccaaatttcaaattaaaagtaacacaaatttaa

SEQ ID NO: 1887 - DNA, 1695 bp, Saccharomyces pastorianus
atgagattagggaacgctattgccacgctgtgcctaacggccttcacatccgcaaccaccaacaatagctatacaagcaacgatcaaacactaaatgccttcaatgacactcacttttgtaagctggatagaaatgataatgtcagtcccagctgtaatgtgactttcaatgaactaaacaccataaatcaaaacatcagagatgatctatcgggtctattgaaatctgattttttcaagtatttccgactagatttgtacaaacaatgttcgttttgggacgccaatgatggattgtgcttaaatcgtgcttgctccgttgatgtggtagaagactgggataaactgcctgaatactggcaacccgagatcttgggtagttttaataacgatacgatgatagaggcggataacgatgatgatgaatgtaaatttctagatcaactatgtcaaactggtaaaaaacttgcagatattgaggatactatcaattattgtgacataaatgacttcaacgggaagaacgccgttctgattgatttaacagcgaacccggaaagatttacaggttatggtggtaagcaggccggtcaaatttggtctaccatctatcaagataattgtttcacgctcggtgaaaccggtgaatcattggtcaaagacgcattttacagacttgtatcagggttccatgcctctattggtacccatttatcaaaggaatacctaaacacaaagactggtaaatgggagcctaatttagatttattcatggcaaggatcggaaactttcctgacagagtaacaaacatgtatttcaattacgctgttgtggccaaagctctttggaagatccaaccatacttaccagaattttcattttgtgacttggttaataaagagattaagaacaaaatggataacgtcatttcacaattggacacaaatatcttcaatgaggatttggtttttgctaatgatctaagtttaactttaaaggacgaattcagatcccgtttcaaaaatgtcacaaaaattatggattgtgtgcagtgtgatagatgcagactgtggggtaaaatccaaactactggttacgctactgcccttaagattttgttcgaaatcaatgatgctgatgaatttaccaaacaagacatcgttggaaaattaaccaaatatgaattgattgccctattacaaacattcggcagactatcagagtccattgaatctgttaatttgttcgaaaaaatgtacgggaaaagattaaacggttctgaaaacagactaacttctttcttccagaataactttttcagcatcttgaagaaagctggcaaatccattcgttatacaatcgaaaacatcaacacaactaaagaagaaaaagaaaaagttgataattcacaatcacatgcatttgacgatttgaggatgcccaaacaaaaaaaaagtgtgccaaaagcagccgccggcgtaggaagtaaatggaaaaatgcttgggaaactgaaaccagtaacgttttagaagcattcaaatttatttatagaagttatttggatttgcccagaaatgtctggagactaacattgggaaaggcttataaattttggaataagtttattggtgttgccgattatgttaaagaagacgttgaggaggcaaatacccataaactaaatatacaatga

SEQ ID NO: 1888 - DNA, 1566 bp, Saccharomyces pastorianus
atgaaacagtttaggttggttaatgcggtttccgcatcatgcatgattattggcctcgtgatggccaattcggactcgatgttcagtaagtggacacaggacgacctggtcgactacttgcacgacaacaagaagggtctggagaagtacgccacagagtcgattgaggatttgaagaaggaagcgtcccaggtgtgggacaaacatgcgcagcccaagccatggtggcaggtgtggtctagtgacagcagcgttggcagcaacagcaactccggatggttcggcaactccgggtcttcggtgtcggactggattttcgacacttggtctacagacagtctgcgcacctttttgaagaagaacggcgtggacgtggatgacgccaaggcgtccaaggactcgctagtgaagaccgccaaggcgtccaaggactcgctagtgaagaccgccaaggagaactttgccaaaatatccaagtcgctgaagtcatctggttactatccttccagctcgtacttcgacagctggtccactgaggacctgcaaagctggttgagtgacaacggtattgactacgacaaggccgttcaaaacaagaacgaactggtccagaaagtcaaggaaaacatctataaaacctctgaaaaggccgaacagcagcgtctgggcgtgcttgaaagtctcgacctggctcaccagcaaatcttagatactacgggccaaatcaaagacacagtgttcgacaaatggtcgagtgaccagttgtacaactggctggaaaaccacaaggttaaacttgacaagaacatgtccaagaaacacgactatttggtcagaatggccaaggaaaacaccgacaacttgaaggacgacatatattggtacctagattacatgaagagagaatcttctccattcttggccaagactccagaatacgtcggttccgtttgggactcctccaaaaactatctttcgaacctctattccaagttcagaggtaagactgacaacttggtcaacgacaccttcttggtggacatcgactcatggtcaaaggacaagttaaagatgtttctagatgctcgcggtatcaagcactcaatgctgtccaccgaaaaccaattgagagaacaggtgaagcaatcaagaaatgaaaaactgaagattataccaacggactaccagaaatactttgacaacagtaactggtccttgaacgacatcaaaagctggtttgctgataagaaggacgacttccaagattctcaagcctactccacaatcatgcaagatttcgacaaggtctccaagaacacaaacgacgcaaaggaccagatttctcaaacttggtcaaacacattccagagctggtctcaagaagatctactgcaatatttgaaatcttttggtgttcccgtcaagcaaacctccacaaaggatgacttgatcaacttggccaagcaaaacacccaatggttattcggtaccgttcaagaaccagtttataagagatatttccacaatgttaaaaactggtcaaagagcttactaagaatcaattag

SEQ ID NO: 1889 - DNA, 1746 bp, Saccharomyces pastorianus
atgaattcgttagcttctaacacaccgctgaatggcactcccgtgaacgaggcggccgtcggcagcaccgagccggtgaacatgtttgagacgatggtggccaatccgattaaagtgtctcggttgcagtccaatggggtgttgacgggccctgcggccaacaccaagtcgatccactactcgttggcgaacttcaacgttttccagtcgctacccaaggaaaccgccaggggcgtggacgacttgatgcggatggagatggcgctgctgagcgggattccggaggagattaagtggtctttgaagaaatacctgacgtacagcaacaaggctccgtacatgattagcctaaggacgttgccggacctgttggggcttttcaagacgttcatacttcctctggagggcattgtggaggggctcaaccagtcttccatatgcgattccggcgcgatggactctttgcagatgggcttgaacgggctgctgatcataagaaacttggcccaggacactgactcggtgcaggtgctggtcaaagatgcggagatcaagtcgttcatcctcttcgtcttgaaaaagtttcagtgcgtcgccacaggcgatagcaagtggcaactgtacgaggggaatgcgacgttcttcaacgaattgacccattacactttggacttgatggaagccatctcttcttatattgctccggccatgaaggacgaccattatttccaaacgttggtgtccatcttgaactacacgaaggatagatatatggttatctccatattgaggtctctctcgaggctgttagtcaggtccaaagccaatgaggagagtgcggccgataatttggaccataagactctgtctttgatcgtgtcctttttattggtggagtgcgacagtgagttgatcattgcttcgttggatttcctctatcaatacattttgcccgggtcccaaagaatcacggaattattcaacagtaaagagtgctctttggtacttgaggctacgctgcccaacctgctgtcatacaatatccccacccctgactacaactctttgcaaaagcacaagatcaagttggagaaaagattaaaacctcctgcacccaaggagccgcccaatctgtcagacgaactgttccaacaactgttcagactgaacgagccactgaggtctaccacttggttgaggtgttgctttgagcccgtacaagaagcagaatttacacaaatatcactttggaggtcgtacgaatccaaatttggccaacctgtgcgtgaatccggacgcaaattactgcctgccgtggaatttatcaaaaacgtttctaacgctttccataacgccgctgccatcgtgatcgctgacccaatgaccggtaagaaaagattcgtcatcaagggcattcaaccaagattcaaagctttgaacattgcagacggagaaaaagaatcgcaagtacccatttcggcgcttaagtccaaatttttgaatgagactaaagaaattacacccgcaagacaaaacaatttacctggcataaaatttcctcagggactatcagatgtcgctaaagttgcgtgtacattcttgtgtcttctgtccaacgacacagacgatggtgtcggttccacattttgtcaacgcatcagaccattagtcctacacaaactggcagatattccacctttaacgttggcattgtctgaatatacggaaaatacgtcgggactgtga

SEQ ID NO: 1890 - DNA, 939 bp, Saccharomyces pastorianus
atgtcaaaggaaacagaagatcagaagaatgttctagacgagccgatccatgggatctacatccctgccgcgctatacctggtcggtgtcgccatcactacgtacatgtccggtgaattaaaaatcttgtggagtttaccagttctctttataatcatgttcactagggcatacacagcttacaaaagaagaagatcgctgtatccaaacaagtggacgtccttagaattggaagaccaaacccttatctccaagaacactgccctataccgcttcaaattgaagacaagattggagagcttggatatccctgctggccaccacgttgccgtgcgtgtccccatcgatggtaaagatgagatcagatactacaacccaatcagttctaagttggaagacgggcacttggacttggtggtcaaaacttacgttgatggtaaagtatctaggtatttcgctggtttaagtactggcgataccgtggacttcatggggccaataggcacgttgaactacgaaccaaattcctccagacatttgggaattgtggctggtggctcaggtatcaccccagtcctacagatcttaaatgaagtcgtcaccgttccggaagatttgaccaaagtctcgctcttgtacgccaatgagaccgaaaacgatattctattgaaggaagagctagacgagatggccgaaaaatacccacacttgcaaatccactacgtggtacactacccaaccgacacatggaccggagatgtcggttacatcactaaggaccagatgagcgagtacttgccggaatattcggatgacaacaggctcttgatctgtggacccgatgaaatgaacaagttggccttgcaatatgccagggaactaggctggaaagtcaattcgacgaaaagttccggggacgatcaagtcttcgtcttttaa

SEQ ID NO: 1891 - DNA, 930 bp, Saccharomyces pastorianus
atgtcatcgaataacaggaaaaagctgcttctgatgggccggtccggctccggtaagtcttcaatgagatcgatcatctttagtaattactctgcctttgacactagaagactgggtgctaccatcgatgtggagcactcgcacttgaggtttctcggtaacatgacgctgaacctgtgggattgtggtggacaggatgtgttcatggaaaactatttcaccaagcaaaaggaccacattttccagatggtgcaggtgctgatccatgtgtttgacgtggagtccaccgaggtactcaaagatatcgagatatttgcgaaggcgttgaagcagttgaggaagtactcgccggacgccaagattttcgtgctactgcacaaaatggacttggtacaactagataaaagagaggaactgtttcaaatcatgatgaagaacctgagcgagacatcgtcggagttcggcttcccgaacctgataggctttccgacctcgatttgggacgagagtctgtacaaggcgtggtcgcagattgtgtgttcgctgatacctaacatgtccaaccatcaaaccaatttgaagaagttcaaagagatcatgaacgccatggaaatcattctttttgaaaggacgactttccttgtgatttgttccagtaatggcgagaacagcaaccatgacgacggctcgaacaacggtactgtgctgctggaccccaagagattcgaaaagatctccaacataatgaaaaacttcaagcaaagttgtacgaaattgaagagcgggtttaagacgctgatactaaacaacaatatctacgtcagcgagctgtcctccaatatggtctgtttcatagtattgaaagatatgaacattccacaagaactggtgttagagaacatcaaaaaggctaaagagttcttccagtga

SEQ ID NO: 1892 - DNA, 1542 bp, Saccharomyces pastorianus
atgctatcgaagaaactgtatagtaacaggaaactgctatcgtccacgaacacgctcataagatttgcgtccacgaagtccacgggcgtggaaaactccgaggccggccctacgtctttcaagactatgaaggtaattgaccctcaaaacagcgacaaaccaaacgtgctggtactgggttccggctggggggccatttcttttctgaagcatatcgacaccaaaaaatacaatgtgtctatcatctctcccaggagttattttctattcacgccattgttgccttccactcccgtggggacggtcgacgaaaagtcgatcatcgaaccaattgtgaattttgctctcaagaaaaaggggaacgtcacctactatgaagcagaagcgacttccatcaaccctgacagaaacactgtcactataaagtcattgtccactgttagccaattgtcccagcccgaatcacatttagggctgcgccaggcagagccagcagaaatcaagtacgactatttgattagcgcggtgggtgcagaacccaatacttttggtattcctggggtcactgaatatggccactttttgaaggaaattcccaactcgctagaaatcaggaagagttttgccgccaacttggaaaaggctaatttgttacctaagggcgaccctgaaagaaaacggttattgtccattgtcgtggtgggtggtgggcccactggtgtggaagtcgccggtgaactgcaggattatgttctccaggacctaaggaagtttttgcccgcattggctgaagaagtccaaatccatttggtcgaggctctacctatcgttttaaacatgttcgagaaaaagctttcgtcgtatgcgcaatcccatttggaaaacacctcgatcaaagttcatctaagaaccgctgtggccaaagtggaggcaaaacagctactcgcaaagaccaaacacgaagacggtaaagtcaccgaagagactatcccatacggtactttaatctgggccacaggtaataaggcaagacccgtggtcaccgaccttttccaaaaaatccccgaacagaactcttcaaagagaggcttggcggtgaataactttttgcaagtgaaaggtagcaataacattttcgccatcggtgataacgcctttgccggattgcccccaaccgctcaagtggcgcatcaagaggccgagtacctagctaagagtttcgataaaatggcgcaaataccaaatttccaaaaaagtctattttcgagaaaagacaaggtcgatctgctattcgaagaaaaccacttcaagcctttcaagtacaacgatttgggtgccctggcatatcttggttctgaaagggccatcgctaccatccgttctggtaagagaacattctataccggcggggggttgatgaccttctatttatggagaatcttatacttgtcgatgattttgtctgctagatcgagattcaaggtgtttttcgactggatcaagttagcattcttcaaaagagacttctttaaaggattatag

SEQ ID NO: 1893 - DNA, 1065 bp, Saccharomyces pastorianus
atgagccaaagtccatcggtgtcgccaagaaggactcttaacaacaaatcatcgtacatcagcagcaatggtggactgattctgccccctgcgaagctggacctgaaccagcaaccggcgctgaatttccagcagaaggcgacttttgacttgaaccaacagttcttctactatccggactcgcctacgaagaaaccacggccaaggttcaacggcggcttgcaaaccagcaaggacagtaatgaaaactattatactaacaacggcaacaacaggtcgtccagatatccaaataccaccaacactgctaatgtcaattctaacccgcatccgcatcagcagtcggtgtctcacataaactccaaatctcttagattccaccaaactaaggagacagacagcatacaggatatctcgttcccttccagaacgtgcacggccaaaaggtatttcaccaggccaatagatctgtacgggatcagaaacaattgtagcgccgtcacgcctgggttgatgaattccccaacgaagtcaaaggcaaacttcaacattaagaagtctattttgcccaggtgcgtgatcaccacatataaattaccgtcaccagtatacgaaacaatagacgatatatcgaaaaaaatcataatcttgcagatttcgctgaattttgagaaaagctatcattttttgcagccgattcagctgtctactaataaaaagacacgggtatcgaaatcactcgaagaattatgcagagagctattgctaccaccaactaaaccgcagcaccaactccaaagcaacatcaagtctatgaagaatcctccgaatatcaataccaagcagagaaccagtaccaccgccggtacaaacgccaatgagagctttgaattgagttttgacgggaaagcgatggacagatctgatatatttcgaatggtggactcatttagcatcgccatctcagatgatgatgacgatgacgacgaggattcctttcagcagagaaacaggaacagcagaatcttacctgctgagatactgagtaacgggcctttgaaatga

SEQ ID NO: 1894 - DNA, 3387 bp, Saccharomyces pastorianus
atgtcaaactcaaattctagaaaacctagcgcaaatcatgcataccgtcaacagcatgattataacgggatgaacgccatggtaggaaatccaatgttgtaccatcctgtggacttcatgaacggtgccggccaatatggccccactcaacacccggcatattacacgaactcgccgttgccaaatgttccaccgacgcccttcgatactgcttacggtgctagtcttttgccatcccatttgttaatggggtcgccgtttgtttcctcgcctaatatgcaaggtggctataaccctggtagatcatcaaaattcaataggaaggcttattcgagacccatttcgagccaaaacagctataacgctaacaacagtaataactacaacaacaacaacaataacaacaacaacaacaacaacaacaataatggaatgatgactccttcaagctattatagaaacgggagaactctattttcgaggaaagacaacaattcaggagatgttactcacaataattctaagggatatgacaccaggaacagcagtggaagaagaggctcttccagaatcaacatttttgatgagatagacccagaaaccctattacagaagccctttcgcattgattataagattctacccgctggtgacgatgcttataggactcgatcgctgcttattgaaaacgtagatagtgctgctgatctacactctttagtcaagaactttgtcaaatctaatgctctggaaagtgcatatatagttgacaacaatgaggctggtaactcagaagaagaaaagactaagagtctatctattttgataagtttcttgactaggggcgattgtttgaacttttataataacattttacaaagactatcagagtttaagacctttttgaaatccaaatcattgaatctgaaatttgtctgcctaaattacgattccaaatcctttccaacacctgtcgaagatggagagttatcaaaaagtgaagatcaagctgctactgtcaataattcgatgatgatgatcagtgcttcgttgcatcacaatgtcgagaataaagatgctacaaggtccatcataattgaatttaaaagtcctttagaaaaagccgaattattcaaggagaaactgcaatttctagataggtcaaagaacaaaagatatatcttagaatccattgagatagtgaacactgatgtaccatcgaatcaatttcctggaaactatgctgtgttgacctttttaaacatcttcatggcaattgaagtcctcgactacttgaagaaatactctaaaaaactaggcatctccaaatgtttctatgtttctctaacaccattgatggtcagttcaggcaggtcttcagttgccagtatttacgaaagcaaattgagttcgcatcgtttatcaaccccatcggttgccactggcaacaacaatgatatcaacaacaacaacaataatggcagtattggatcttccgtttacggaaactctaatataagtttaaccagtctttcatcatccgtctctttgaatgaagagattgacgtgttgacgacgaaactccaaggaatagaccttgatggaactacattagaagtcaattgtcatgattatcctacaccagttatcaatgaacattctgcccatttgagtaatattaaaatttcaaaaacagtagataattccagacaattcccaccagacattccttcgcccttgcctctaaatgaacacatgtttatggctgattccaatcaatcgaatggaacaatagtatcccaacaattaataactggtccttctccgcaatctccgaatctacaaatcaaccaacgagtactatccaacccgataactcaaagcttggagcaaaatttcaatgtttcaaccaaagtggcttcgtccatggggtcagacatcggtaacagaacgatttatataggaaacattaatccaagatcaagggcagaagatatctgcaacgttgtccgcggggggatacttcaaaatattaaatatttagcagagaagaggatttgttttgtcactttcattgaggcgtcgtccgctgtacaattctatgcgaattcatttattgatccaatagtattacatggaaatatgttgagagtagggtgggggcattattccggtccattaccaaagtcaatctcactagctgtaacgattggggctagtagaaatgtttatgtaagtttgccagaatttgcattcaaagagaaattcattcacgacccccaatacaaacaactgcatgaaacattagcgttaccagacgcggagcaattaagagaggatttcagtacctatggtgatattgaacagattaattatctaagcgatagccattgctgttggataaattttatgaacatattgtctgcgattagtctcgttgaagaaatgaacaaagaacctacgggacatgatgatagtagtgaagtgataccgaaaacggcaaccgaagaaaagttcgatggccgttataaagggcttttgataaactatggtaaggatcgttgtggcaatataaataaaaatctggtagctggtaaaaattcaagattttacaaaaaagttaaaaggccgagctacaatatacatctaagtaaactagaagaaagaaggagacaaaacgaaaacgataaaaaggaatcctttgataaagtcctgaatttggaatccctaggtataagtctcgatccacacaagggtgccgacattgatgaaactgagactgaagacactacaggggccaaggctgaagttgaggtagaggctagaaatggaaaccaagccgcggggcccggcgggttaggtcttggagtggtaaactcagacgtaaaacacgcactttcagatgaaaccgattacgacgaattgttcaacaagtcatcaagatcttccgattcgtcgtcggacatagaggtcataatgcattctccgagtgatcctgaatatgccttaaaatcgcagactttaagaagttcgagtcaaacggttataaacagtaagagaccggcaaaggtggaaaacgatgatggtttggtgggactttcacaatttaatcatagatcatcgctaaagcaagctccaccaagggccccctcaacgttgtcctataatcattcgaaaaatagccaagtgccgattcaagacgctggaaataatgcagacgtaacggacaacaagacgaggaaaagaggctctttcccaaggcatagaacgataccaggatcggatgttatggcccaatacctcgcacaagttcaacactcgacgtttatgtatgcagctaatattctaggggcctctgcggaagataacgcgtatcctgatgaatag

SEQ ID NO: 1895 - DNA, 732 bp, Saccharomyces pastorianus
atggcaaaaactttggcacaaggaaggaagcctggtagcggcagaaagccaggaaaaggcaagacgttaagagagggaagaaagccgggcagtggtagaaggaggaggcaagatattggaggtagagacgccgatgcgtcccaacaggatcaggaatcgcgtcccatcagttccagggatatggaggctgtagacgcattgagagagttgacgcatagcccgtcttctcacccagctcataacccaacaacagcaccgccgcatgtggcagcagcggccccattgcctccatctatggattacagccagcagtcattgatggatcagcagtatcaataccaataccagcagcagcagcagcagcagcagcagagggtggacgtggtccctcctaagccgttcatcactcacaagatcttgttgtcttcaacagggcaacctgccggccaaatgaattcaaacccaaatgcaaaccataaccataaccataattcaaacagcggtaacgtcaacatgaacatgaacatgaactttaacattaatggaaacaatcaagactccctgtcttcttttctaatgggaccctacaactacttgcaacggccattcattgtgaaaccataccttgatctgtctgcaagcacagcgccaccgaaccaagcacaaccacaaccgcaagcaacccacatcacaaagagtacggaaactacggagaaaaacacaacaatatga

SEQ ID NO: 1896 - DNA, 888 bp, Saccharomyces pastorianus
atggactccctagaggctagactacagtttattcaggtgctgaaaaacttgcaaaaaacattacacaagacaagggactccaccacatcgtcatcgacaagtacaccaccgtcatcgcaaccgaaattgaacaatgaccccatacagttctatttaagaaactacagacatcattatgaagacttccaccagtgtctgttcgatactaccttgaagatggacccattggacagattgaatgtggtgatatactacattagaataataaaaaacttgtatccccactacaattccagtaccaatatcgccaaagtgttgaatgaagtgttactaatggacgtggatctggtttttgagctgtgcctgccctgcaacgactggaaatccctcacaaacctgaccagctgcaaggagctattcctcgacttgtcaaggctaatcaagttcgacaccaccatcgtgtccacgtcatcagaggccacaaacccggacgcaactacctggtacagcgtcaagactgagaggaccgttcaagactacaaacactcgttgcagcgaacagaaacactgctaaaagacagggacttgaaaaagctggctttcttccaacagtttgatgccgatgctatcaccatcaacccagaattacaaacactgccaacaaacacaaacattgtattgcacaggatggagtcagacagagaatcacacaagagatcaaaggaaacgagctggtacattgaaaggcctaccaacgacatcctagacgaaaccgagtttgaaacgttgtggtcgcattttgaaactgctgatcccgggttcgacaaagtcgactataaaaatatcaagacgttgaatgaaatcgctaaggcgtcatacatgtactaa

SEQ ID NO: 1897 - DNA, 2748 bp, Saccharomyces pastorianus
atgactttcacattctccacttcatcaaggaaaaatgggagaccacctttaaaatctgtttccacagaagacaatattcatttgttaagaaagcaacgccaacaacaagcatcaaggaactctacagagacttcacataatccaaatagtaacctctcagcactcgccattggtaatcgggaagatgaagtacgcagcgcttcaactaccaacttggaccgtttgcgacaggagcaagaagaaaacctattagaaatggactgtaccaaatcaacactgcttcatagagcaaacatgttggtggacgtcctaccatcttttgaaatgtataatgccttgcacagacatattcctcaagggaacgtcgatccggataggcatgattttccaccttcttatcaagaagtacgtacacaaagaatgactatactacccaccactgataattctgtggaaagatcaccattaacagcggtactagaacctgaaaatacatgtaatagtagcactactcattcacttaccaacctacatcctttacaaacgcagcatcttacactaaataccacaggccaaccacgccattctttgtcagagactaatgttagccaaataccatttgaagatgatctaaacgactcagataatatttttatagataaattatacacattacccaaaatgaccactcccgttgaagttgatataagaataacgaaaacagcatcaatacctcacgagcgtcctgaggaacaatccatattgaaagaatatacttccggtgatattattcatggttattgtttgattgaaaatcgatctcctcaacctttgaaatttgaaatgttttacgttaccttagaagcatatatatcagtaattgatcgccaaaaggggaaaagaactttaaagagatttttaagaatggtcgacttgagcgcatcttggtcctatacaaacattgccccaagtacaggtataaatattgttccaggagaaagagattttgatgatgccattattggactttcaaatagtagagaactgaagccaaatacaaaatacaagaaatttttcatgttcaagttgcccacacaattgttagatgtgacatgtaaacaagagcaattttctcactgtctcttaccgccaagttttggaattgacaaatataaaaataattgcaagtattccggcataaaggttaatagcgtccttggctgtggacatctaggtacaaagggctcgcccattttaacgttggatatggcagatgataatctatccgtaaattataccattgatgccaaaattgttggtaaagataaaagaacttccaaattgaatattatgaaggagagagaatacaacttaagagtcatgcctttcccttttgccggtgttactaatgaacaaagtgaaaagacatgtttgagacaactaaaggatttggaaaggttgatcgaggatagatttgaagctttaaacaagattttcaaaaagctggatttagatgaggcaatttcgaatttagatatccatgatacagatatcagcgggactttggacggcaatgaagagttggattcggatgaattactaaggcgcaagatggatcaattacacattaataatagaatagacgatgccgccaacctatcaccatcatatgactccaaaaatatgattccaaaggagaatttagttgagactgagttacgttataaatttaagaacaaaaacaaatcaaactcaagcttattttctcatttcttaagttcctcagaaacaggctcatcggcagccccacatacatataattctgggttaattgtcttatcagttaaaaaaccacaatctgcattgccttattggtcaccatcgttgttgaggaaaactaatagatttgaagccaagagtgaacaagaaaaagaaaactggcaaaggttaatgaatttgcttccagagggagtgaagaaaccactaactaaattggatgtaaacttgacttgcatccaatcgaataacagtgctgaacataaaccgcctgagataagctctgtaacgacagaatttgtagttattacagccaaatccgataactctattcctattaaattcagtacagaattgttaatgaacgagaataggctaaatgaattgaagacaaaattctcggcactccagaaaaaagttcaggaatatcgtaaaaaatttgaagaaaacaatgtgaagctaaatgaactttacaacagaaatagagatcagattattccaagagaattattattcacgaactttgtatctgaccaattaaacaatgatgttgacagtttagctggcttaaaagttaatgttattgatctgcatgacattttcaagaagcagattcacacttttaaagaggaaaatgaagatatcatttccaaaaagggaggcagcaattcttctttagcaacatccaacaacaatttcttacaggcgacattcagtaacggcgcatccacggctactaaatttacccagcagattgtgcatacatgggaaaaagttaagcctctacagtacaagagagatgtaacggttaatttgaagttaaatcccaacatcaaagaaactttagtacctaattttgaaacttgtttgtgttgtaggttttattgcatccgtgtgaatatcaaatttgaaaaccatttaggttccatgaaagtagatattcctgtcgacgtgaagaaattacgaatctaa

SEQ ID NO: 1898 - DNA, 924 bp, Saccharomyces pastorianus
atgttgctgtcttcacggatcgttcgaagctcactggtcactgccccaccaaggctgtctaggtttttcacccaagcgcacaaggtgtgcaaggaagaagaccccattgcccctccatcgcccacaactcaacaaacagaaccgaagtacacgcatttcggctcgaagactgttttgaagtccaacaagcagaagctggttggtgatgttttctcttccgtagccaatcgctatgatttgatgaacgacgtcatgtcgttgggtatccatagattatggaaagatcatttcatcaacaaattggacccggggaaaagaccaaactctaccacacccttgaacttcattgacgtggctggtggttccggtgatattgccttcggattactcgaccatgctgagtcgaaattcggggacaccgaatctacaatggatattgtagatatcaacgctgacatgcttaaagaaggtgaaaagagagccatggagcaaaaaaaatacttcaaagacccccgtgttaattttttggtttccaacggtgaagttctcgaagaaatcgagtctaattccaaggacatctacactgtttcctttggtatcagaaacttcactgacattcaaaagggtttgaacactgcctatagagttttgaaaccaggcggtatcttttattgtttggagttttctaagatcgaaaatccgttaatggacttggcttatcaacaatgggctaaagtcttgcctgtcatgggatccatgattgctaatgattacgactcttatcagtacttagtggagtctattgaaagatttccagaccaagagacgttcaaatccatgattgagaaagcagggttcaaatctgctggttacgaaagtttaacttttggtgtatgcgctatccattggggtattaaagtttga

SEQ ID NO: 1899 - DNA, 2895 bp, Saccharomyces pastorianus
atgatactaatggaaaatgtacaaagagaccgtgtacaggacgagcatgggcatgataccatagaaaatatcaacaattgcaaagataataacaataatattcaagtaaggcggatgaggaagacacagctgtccaagaaggagttcctcgagaagaggaaatcagacgtgttgattgctgctaaatctttggacacggaaatccagaacgttaaaaatttgaaacgattgtccataggttcgatggatttggtcattgaccctgaattggagtttaaggtaagcggtagaaactcatattcctcagagtcctcaaaggaatcaatacaagaatcgctgcatgaactaaacactgtacaactggaaaaaaggcaaggggaagaacagggagaagaacaaggagaagaacaaggggaaggacaagaggatgaagatgacgagtatgaggatggtaatgctactaatgtggacgacagcattgatgtgactcaaacagagtatttgcatgatgaagagactttggagaaggaaaagacttccaggaatgcctcttcttcaacttcatattctgcgagagtaacatccagcaacagaaggttgagtggggttaaatcgtttgcacatgacgagattttggacgtggcagaagatcacaactcaagtacggccaatttaactcaaaacctattgtgggttcctgccaaccaacatccgaatgtcaaacccgaaaattatttagagctagtccaggatactttgcaaaacattcaaataaccacagatcaagatcctgatggaaaaaaatcggatctgggtaatagccatgtattttccaataggcagcgctcgggttctatagttagaagaccctctcacttgaaaacatcctataccaaattcgatgacgaaccttctgctgcggataggcagagacaggtccagggacacgatcaagcggagaaacgaatatcttcactcgaagccaaaaccataaggtctgtgtctttgaaggaaatcactgaagaattaaccaagatctccgataatgccggtttgacagattcagatgcgatcactctcgcaagaagcctgagcatgtccggttcattcactaatgagagccttcacttgggcaacaataaaatcgaaaatgacaatgagtttgcatcaaatatgttcaataagagcgggctgaccataccggagagatctttgagaagatctaaattcaacacgtataaaatcagatcagacaacagtgaacttccgccaacagcaaggcctaacaactcaatgaatgtaaaagcaaatgacgaccgtagaagtgcatcatcgcctgcatcctacatacaaccgcctcaagatcaagctccattgaacgatttccaagagattttcgaacattacagaagaacaagcactgattggggtactgaaaatacaaaatacgtcgatagcaccaactactattcagacgaagaagatttgacacatgcatccatttcccaagatagtagtttcttgtccacagatagctctaacaatagtgttttggtgaaaccaaataatgcaggctcaatgatttcagaaagattagatcaggatatagcttccagtgagaatgaagatgtaaacattaacgaaccaaaccatggctggtcatggttgaactccacgaatgaaaacttggctaataacgatagtgcctatgagcaagtgatagatgatgaagaagaaaatggagattgcgttggggatgaaaaaaccgattttgttaacttaagcgtatctagaagagcaaagtctactaaacgtgcctctgaaagaataaatcattccaagaataggcattcgccaatattccagatgcaatcggatgagtcgaagtcggtggtggttacatcttcagtcacttcactatctccgtcacattcatctgaatccgcagcatctgcggcagtggagaaagagcgaggcttgcctaatgacgacaaaccaagtgcgcataagaagcaatcgctagaaaagagacttgtcagactatttaaaaggaagcagcataataaaaattccaaatcggatgccaaggtaatcaagaaaaacgtcaaacaggaactaaaaaagaagacttcgcattcaagtttatctaaattcagaaaaagccccaaaaaaaaatctcgacaaatcgaagtggtacaagatcgcccttcatcacctgttgaaaccgcttcttccgaaagtttgaatacggcaattgaaattgaactcgttgtagaaagcccagctgattccatcattttttctggcggtaatactaatcacagttctgaatcggtcgtggaaaccataaatgagttagatggcgacgattcgttcgatatcagtggcggcgaaattaattatagcgtcgaggcgagtgctaatatgggtaaagacccagcaaccgaaccaaacgagaccgtcaatgaagaggaggaagttatcgtcccaactctcgcacctcaaatatctaccctacttccaaaaagactaaccttcgaagatattgttacaccagaatatccaaacgcaccgattaaattcacagatagcgcctttggtttcccactgccaatgataacaaactccacagtgatcatgtttgatcatcgactaggtattaacgtcgaaagagcgatctacagactcagccacttgaaactcagtgatccggggagagaactaagacaacaggttttgttgagtaacttcatgtactcttatttgaatttggtcaatcatactttgtacatggaacaaataggcagtgaaaatgcggtattcaatggtgattccgcgctggcaatgacagataagaatgactccgatggtacaattttgatcccggatatttaa

SEQ ID NO: 1900 - DNA, 3309 bp, Saccharomyces pastorianus
atggctctcatcgtggcatcgttgtttttgccgtaccaaccgcaattcgaactagacacctctctacccgagaactcacaggtggacccgtccctggtgaacgttcactccaagggaagcgaccagcagcaccgcgcgctatcgaacaaccactcgcaagagtcgttggtcgcgcccgctcctgagcagggcgtgcccccagcaatctccaggagcgccaccaggtcgcctatatctttcaatcgcgcctcgtccaccaacacggccaacctggacgatctcgtttcctcggacgtgtttctggagaatcttaccgccaacgccaccacgtcgcacacgcccacgagcaagacgatgctcaagccgcgcaacaacggctccgtggagcagttcttctcgtcctcctccaacgtcccctcggaccgcattgcgtcgcccatccaattccagcaggactccggctcgaggatcgcgtcgccaatccagcagcaggaccccacagccaacctgctgaagaacgtgaacaagtcgctgctagtgcactcgctgctgaacaacacctcgcagaccagcctcgacaagccgcacaatcacatcgtgactccgaagtcccgggcgggcaacaagtccgcctccgcggcttcctctctggtaaacaaggccaaacaggcgcccgcctcggcttcctcttcttcctcctccgctgctccgccctctatcaagcggatttccccgcatttagcggccgcagcggccgctgccgctgcgaagcaacggcccatcctggccaagcaaccgtccaacctcaagtactcggagctagcagacatctcgtccagtgagacgtcctcgcagcacaacgagtctgacccggaggagctcacgggcgtgcccgacgaggagtacgtctcggacctggaaatggatgacgccaagcaggattacaaggttccgaagttcggcggctattccaacaagtcacagctcaagaaatactcgcttttaaggtcgacgcaagagctgttcagccgtctgccttggtccattgttccctctatcaaagggaacggtgccatgaagaacgccatcaacacagccgtcttggagaacatcatcgcgcaccaccacgtcaagtgggtcgggaccgtgggcatccccacggacgaggtcccggagaacatccttggcaaaatctccgactcgctgagggacgattacgactcttattccgttctcacggacgacgtcacgttcaaagccgcatacaagaactactgtaaacaaatcttgtggcccactctgcactaccagatcccggacaacccgaactccaaggccttcgaggatcactcctggaagttctacaagcacatgaaccagcagttcgcggacgcgatcgtgaagatatacaaggagggtgacaccatctgggtccatgactaccatctgatgctggtcccgcagatgattagagacgtcttgccctccgccaagatcgggttcacgctgcacgtctcgttccccagtagcgaggtgttcaggtgtctggcccagagggagaagatcttggagggactcactggtgcggatttcgttgggttccagaccaaagaatacgcgagacacttcttgcagacgtccaaccgattgctgatggcggatgtggtgcatgacgaagagttgaagtacaacggccgggtcgtgtccgtgaagttcactcccgtcggcatagacgccttcgacctccaatcgcaactgaaggacgaacacgtcattcaatggcgccacctgatccgtgaaagatggcagaacaagaaactgattgtttgtcgtgaccagttcgacagaatcaggggcatccataaaaaactgctggcgtacgaaaaattcttggcggacaacccacagtacgtggagcagctgaccatgatccagatctgtatcggcaacagcaaagacgtcgaactggagcgccagatcatgctcgtcgtagacagaatcaactcgctgtccacgaacatcagcatttcgcagcctgtagtgttcttgcatcaggacctggacttctctcagtacctcgcattgagttcggaagccgacctgttcgtggtcagctccctgagggaaggtatgaatttgacctgccacgaatacattgtctgctccgaggacaagaattccgcgctgttgctgtctgaattcaccggcagcgcctcgctgttgaacgatggcgctatattaatcaatccatgggatacaaagaactttgcttcgtctatccgcaaaggtttggagatgccatttgatgaaagaagaccgcagtggaagaaactaatgaaggacatcatcaacaatgactccaccaactggatcaagtcctctctgcaagatatccacttttcgtggaagttcaaccaagagggttccaagatcttcaaattgaacacgaaaaacctgtcagatgattatcagtcttccaagaaacgcatgttcgtctttaacatcgctgaacctccgacttcgagaatgatttccatactgaacgatatgacgtcgaagggcaacatcgtgtacatcatgaactcgtttccaaaggcgattctagaaaacctctacagtcgtgtgcaaaaccttgggctgatcgcagaaaacggtgcctacgtaagtctgaatggtgtgtggtacaacatcgtggaccaaatcgactggcgtaacgacgtggccaagatcctgaaggacaaagtggaaagattgcccggttcatactataagatcaacgactcgatgatcaagttccacaccgagaacgcagaggaccaagaccgtgttgccagcgtcattggtgaagccatcacgcacatcaacaccgttttcgaccacaggggtatccacgcttatgtttacaaaaacgtcgtctcggtacagcaaactggtctttccttgtctgcagcccaattccttttcaggttctacaactccgcctcggatccactagacacaagttcgggccagatcacgaatatccattcgccatcacattcgcaatcggactccctagatcaagaacaacaagcaccaccagcttcccccacggtgtcgctaaaccacattgattttgcatgtgtatccggttcgtcgtctcccgtgttggaaccattgttcaagctggtcaatgacgaagctagcgatggtcaagtgaaggtcggccatgccatcgtttacggcgatgccacttccacttatgccaaggaacacgtaaatgggctaaacgaacttttcacgattttttctagaatcatcgaaaattga

SEQ ID NO: 1901 - DNA, 2649 bp, Saccharomyces pastorianus
atggggattttcagcaaacatggtgctaagaagctgggaagagcaaaaacgttcactggatgttggacgtgcagaggaagaaaggttaagtgtgatcttcggcgtcctcactgccaaagatgtgagaagtccaatttaccctgcggtgggtacgatatcaaactccggtggtcaaaacctattcagtttgatccgtacggtgttccaattccacaaagctcttcagcgacaacgacgaacctatcaggtagtgtcgatgaaccacaataccaacgacggaatatcgattttgtacggtacgaagaggagtatgtgtttcacgaagacatggatgacgagttgaccgtgttacatacacctcccatagagagaataagtgaggacaaaacatggatcctgaagaaattcggagtctttaaaggaacagacaaggttgacaaacagtacgccccaaggaaaaagcgcaacaggaggaaagtcgctaaaaatctggaaaattctggttcaaactcctcgtcttcatcaccatcgtcttcgacaccatcctcattaacgcaagcaaagcaaactgaagaaaagccaaagaatagagggcaaatcggaacaggcttaccttctgccactgacgcagtatcaccgacaccaaatctcgtagattacgactggaataacctgaacataacaggttacgaatggatctcaagcgagcttagagatgatgcgttactgtcagcggtgaccctccaaggacatcatttaggccattttcaaccgctcgaagtttcgttagaggaaaatcctagaattttgggcgaagaacaacagatgggctccaaggaacacagccgtgggattgatcctgggaacctaaatgcagtaacgtcgcctgagaaggaaacttcagcaaatgataaactataccaccagaacttaaaactactgtttcaaaaaaatccttccaacagcgaagagcctgatcctcaggcattgatcgatgatatatttgtaaacatagaaccaagatctctaccggcatctgatttgaacgaagtcgccttagctccccccaatgacgactcgcgcatgcccaaatccatgctggaagtcacattcctttcatatgacttaccatccgaattgatagacattgtacccagatcagatcttactgtgcatggtttggcgaggttccttttgaaccactatttcaatgacgtggcagataaaatgactgtggtagtgctcgaaaaaaatccatggaaaactttatattttcctagagccttgatggctttgggtgatttatcaggactgggtcagtcctccaactcgagaaatgcgcttttaaatgctctgttggctgtctcatgttttcatttacaaagcaagtacccaaagaattctaaattacaaaagtacttcctaagccttggtatcgagttgagaaaccaagcttcaaactttttaagactatgcttaaacacaaagtcaagtatacctgaaaaatataaagatgttctgactgcaatcttatctatgaactctatcgatgtcgtatgggggacaatggcagattgccaacaccatttagccatttgcgaggattttgttgaatcgagaatgaaattaagacccaatatttctgaaaaggcaaagaccctacatcggattttttcgtttttaaaattaatacaagacagtactgccttagatcgggtcagggccaaggaaattgttatattaccaagtgaagaagatgatcaatacaaaccattagacacgtctacagctgctgtgactgctgatgcgacgaacattgacgttatgcaagaaggtttatttagagaagctctcaacgaaaacgacggtaaaatacacatagagttcatcaaggatcccgctacaaacacttcggctgagtccaccccacagtctaatacgcctcctattttcactaatatagctacagaaacttactataataaatccaacatttctaagctgataccaaagggcgatgagaagataatcggtacggattctctttatggtttaccaaactctttgatattgctattttcagattgtgtacggatagtgaggcataatgagtactataatttaacgtacttacctgtaccaagaaaatttaatgaattgtcactaaatttcgaaaaacgactattaaaatggaagtcggagtggaagttttatgaagatacccctgaggggaaaagcttcatcaatccaacggtggaagcaataaaccaccatacaatgagcttttacttcagtttaattatttattatttcaccatggcaagaagtttaaattgccaatttctgcaaaattatgtggctaaagtattggatcacctaaacgccatggaagagttggtgaacaaaaagaaggtgaagatcgttccccttatttggcaagggtttatggcaggttgcgcttgtaccgatgaagacaggcagcaagagtttagaagatgggcagcaaagttggctgaaagtgggatgggttcctattggggagctagacaagtgatgctggaggtttggagacgacggaaggacgacgaaccaggcgacaattggtactctatttataaagattgggaaatgaacctgatgttatcatga

SEQ ID NO: 1902 - DNA, 1365 bp, Saccharomyces pastorianus
atgacggaggacaagaagagcgaaatattgaaggaatttgaccctttgaaccaattggatcctccaacgatagccgaaacggataaggatgtggtgtcaaagaagaatgataacgcacaaatgaccgtcgaagcaaacgcggatgtctctgcgcgggacatgggcgaggatgagccattctatgacttccagctgtttgctaagcaacttcaatccccaggggctgatcctctagcaaagtatacaaaatcgtttctaagaaattttatggctcaaaggcttttatggacggtcactgaagaaattaaactcatcaacgatttcaagggttttatttacaacaagtttacgctatatgaacctttcaaaaatcttgatagccctaaaatcagaaacgccaaagaaggtatggaaaagctaattatgggaaagctttatttccgctgtttttcgccaagcctttctgaaactctgcagaagccattagacgatgagcacatgaaagatttgaacgacgacaagaaattattggaaaagactaagcattatagatttataagccccaacatgctagatatccctaacaccatgcccgatgccaagttgaataaatttgtgcatttagcaagttcggaattgggtaagataaacagattcaaatctcctagggataagatggtttgtgttttaaatgcgagtaaagttatatttggcttactaaaacatactaagttagaacaaaacggtgccgatagctttatacccgtattaatatactgtattttaaaggggcaagtgcgatatctggtctccaatgtgaactacattgaaagatttagatcgccagaatttatgcggggtgaagaagaatactatttgagcagccttcaagctgcagtaaactttgttatcaatttaaccgaatcttctttaaccattgaaaatcacgaatgtttcgagaaagaataccaagataatttgagagaagtagcaagggaaaaaaatgaagaggataagcaaagaaaactggaagtgccagatgaatcacaaatgaatggcactttactaaagcccttggatgaggtgactaatattgtaatttccaaattcagtggattattctcacctaccgaagaacgaacacaagaagaagtgttgaaacctaaacaaagcggtaaagaaccaaacgaagaggaagtttctctcctaatccagaagatcgaagagaacgaacggaaggacacactaatgactttacagaacatgtttcccgatatggatccaagcctgatagaagatgtttgtattgcgaagaaatctcgtataggaccttgtgttgacgctttactttctttatctgaataa

SEQ ID NO: 1903 - DNA, 636 bp, Saccharomyces pastorianus
atgaataatactgacccaacttcattcaaaagtatattggcaggtgtggccaagctaagaaaagagaagggcggtactgatgatacagggtctcagtcgcaggataaagagaccataccgccttctcaacaactacaaccgcaagagtccagatctattggtcaaaaccaggtcataaacgctttcaatcagcaaaagcccaaagaatgggccgattcagaaactacaaatgatgtcaatcgaaaaaggccctttaagagtgctggtccgggaaaaactgtgttagtcaacaccactcaaaaggaaaatccactcctgaaccacttgaaaagcactaattggaaatacgtatcttctacgggagttagtaagatatactacgattatatggtgcgcggaagaagtgtgctgtttttaactttaacatatcataaactatatgtggattacatttctaggcggatgcagcccttatctaagaatgaaaataatatactaatatttatagtagacgacaacaaccctgaggacactttgaatgacatcacgaaattgtgcatgttcaatggattcactttacttttagcatttaactttgaacaagccgccaagtacatcgaatatctgaatttatga

SEQ ID NO: 1904 - DNA, 2703 bp, Saccharomyces pastorianus
atggcaaagaagaagtctaaaagtagatccaagagttctagaagagctttagatgctttgcagctggccgagagagagattaatggtgaatttgacaattccagcgacaatgacaaaagaaatgacgctcgccgtaacggtactgttgtcaacttattgaaaagggcaaagggtggcgccgacagtgaagatgaagatgttgggtctgagtcatttgaagatgaagagttaaactccgacgaagctctgggatctgaggatgattatgacgttttgaactctaaattctcacaaactattcgtgataagaaaagcgaaaacggtgcttacgaggaggaagaagacgaaggtgggtacacttctattgacgaggaagacttgatgccattatctcaagtgtgggacatggataacaagaccgcgcaaagcaatgattttgataatgatgatgaagatgcttctccgcaattaaagttgcaagacaacgatgccagctctgaatcaagtagttcaggagaaagtgaatccgaagaggacgaagatgatgaagaccccttcgatgaaatctcggaagatgaagaagatgtggagttaaatacaattacttctaagcttattgatgaaacaaaaagtaaagttccaaaaagactggattcgtatggtactggcgaagctaacgagtttgttttgccttctgtaagcgcaaccagtggatcttctgggaagttaagtttggctgatatgatgaacgccgtggatgatagacaagtcattgaaaacgtgaatttgctaaagggtaaatcttccacttatgacgtccccttgccacaacgtatacaacaaaggcacgatcgtaaagccgcgtatgaaatctctaagcaagaagtgagtaagtggaatgatatcgtccaacaaaacagaagggcagaccatttaagtttcccattgaataaacccactgagcataatcaagcctcagctttcactagaactcaagatgtcgcacaaacagagttacaagagaaggttgaccaagtcttaaaggagagtaacttggtcaatccagaaaagaactccacttttgaagagttaagcactgcgaagatgacatctgaggaaatgagaaagaggaccaccgaaatgaggttgatgagagagttaatgttcagagaagagagaaaggctaggagattaaagaaaataaaatcgaaaacataccgtaaaatcaaaaagaaagaattgatgagaaatagagaaatggccgatatttccagtgaggaagataacgaagaccaggatgtcgctagagccaaggaaagaatgacgttgaaacacaagaccaattctaaatgggccaaagatatgatcaaacatggtatgacaaatgacgctgaaaccagagaagaaatggaagaaatgttaagacaaggtgaacgtctaaagacaaagatcttggatagaaatcctgacgacgataatgatgatcgtgtgcaaaccttgagtgatattgaaaatgaagaagaaaacaaagacgctgcacaattgaagggtaaggtgggcaagaccggggttatgaatatggcctttatgaagaatgcagaagctagagaaagagacgctaacgaagaagctttacgtaaattgagggctgttgaaaatggtggtgacattgaactttttgaaagtgacaaagaagaaacaaatggagaaaatattcaactaattaaaggtagaagaatatacacacctggtacattggattctaataaagagatggacgaactaaatgcccataccagaggagagcacgagattgacgaatctagaagtttggaaaacaggttaaaggccaagaacggtaaacaagcgaaagtctttaagactaatgcagaaggtgcaatgatcgtggaggaacctagtgatgaagaacccgttcaagatagtcaacccccacaggaagacgtcgaggcaaagaatgctaacccatggttagttgatgaaagtgatgacgaaagtgccatcagaaagcaatcctctaaagtcaccattgttgacaaagacagttccaaaaacgcaaaatccatgaataaaatgaataaatctgaattgaagcaaaaatcaaaaaagaaaggtggtaaatcgaacggcgatgaagatcttttgctaacagcagacgattccacaagattaaagatagtggatccatatggtggctcggatggcgaacaaggtggcaatgaatttatgtttaaacagcaggaggtcattgctgaagcgtttgctggggatgatgttgtagcggagttcgaagaagaaaagaagcgtgtcatagatgatgaagacgacaaagaagtggataccacgttgccgggctggggtgaatgggctggtgtaggctctaaaccaaaaaataagagacggaaatttatcaagaaagttaagggggttgtgaataaagacaaaagaaaggacaagagtctgcaaaatgtgattataaatgaaaaggtaaacaagaaaaacctgaaatatcaatcatctgcagtaccattcccattcgaaaacagagaacaatatgagagatccttacgtatgccgattggccaagaatggacatctagagcatctcatcaagagcttattaaaccaagaattatgactaaaccaggtcaagtcattgacccattaaaggcaccatttaaataa

SEQ ID NO: 1905 - DNA, 939 bp, Saccharomyces pastorianus
atgtcattaatagaaacatgtgtatcgttcgctttggcaaacccgctttattggttttgcactggactgctgctgaactgtgtgatcacaccattatatctttggaaaacacaagatagcagaatcgtaggcctatctttacttcattttgcagtgctttatgctatagcgtttataaccgtccgcacagaaagatccctttataaggataaatgggtagcgcttcccttggttaagaaagcccgtatttctcgtaatactagtttgtactgcttcaaactaaaatatccttttgaaacgttgcatattcctatgggataccatttggcagcaagggtaacaattaatggtgaacgattagtaagatactacaccccagtaaatgtccctaatacggaaggtttactagagttagtagtaaagacatacaaacacggtgtcgtttccaaatattttgacaaattgaaaatcggccagtatgtagaattcaaggggcctttaggtgaactcgaatatgatcaagattctgcgacagaattaggaatcatcgcaggagggtctggtatcactcccgtattacaagttttacaagaaattattccatcgccagaagatctaacgcatatttctttgatatacgcaaatgagacagaggacgacattcttttgaaatcacaactagaccacatggctaaagaatacccacatttcaaagttcattatgtggttcataagccgaacggcctatggaatggtgatatcgggtacgtgactttggaagaaatgaaaagatatttacccaaacaagcagaggatcaccgtttattgatttgcggaccaccaaagatgaatgaaatggttttgagctacgcaaaggagttgggctggagtaacggatttcacaaaggcaacggcagtgacaaagtttttgtcttttaa

SEQ ID NO: 1906 - DNA, 1581 bp, Saccharomyces pastorianus
atgtctgctatcccgtttaaaaggaactatgtgttcaagaattgggccggtatttactctgcaaaaccggaacgttattttcaaccgacttccatcgatgaagttgtcgagctggtgaaaaatgccaggctagctgaaaaaacattagtcactgttgcttcaggacattcccctagcaacatgtgtgttaccgatgaatggcttgttaatttggacaaattgaacacggtgcagaagtttgtggaataccctgacctgcactatgccgatgttactgtagatgctggtatgaggctttatcaattgaatgagtttcttggtgcgaagggttactccatccagaacttgggctctatctcagagcaaagtgtagctggtataatatccactggtagtcatggctcttcgccctaccatggtttgatatcatctcagtttgttaatttgactatcgttaatggtaaaggtgaagtgaagtttttggattccgagaacgattcagaggtcttcaaagccgctttgctttcagtcggtaaaattggtattattgtctccgctactgtaagagttattcctggtttcaatattaagtctactcaagaagtgattacttttgaagatcttttgaaacaatgggatactttatggacctcatctgaatttattagagtttggtggtatccttatactagaaaatgtgttttatggagagggaacaaaactgaaagtgcccaaaacgggcccgccaaatcttggtggggcactaaacttggcagatttttctacgaaaccctattatggatctccactaaggtttatgcaccattaacccctttcgtggaaaaattcgtttttaataggcaatacggtaaattggaaaagagttctactggagatgtcaacgtaacagattctatcagcggatttaatatggattgtttattttcacaatttgtggatgagtgggggtgccctatggataatggtttagaagtactacgttcattggaccattctatcgcccaagctgccattagcaaagagttttatgttcatgtccccatggaagttcgttgctcaaataccacgctaccttccgaacccctaaatacatccaagagaacaaataccagtcctggtgcagtctacggtaatgtttgccgtccattcttagacaacactccatctcattgtagatatgctccattggacaatgtcaccaatagtcagttgacattgtatataaatgctaccatttataggccttttggctgcaacaccccaatccataaatggttcacccttttcgaaaacactatgatggtagctggcggtaagccacattgggctaagaacttcctaggttcaaccactctagctgctggtccagtgaaaaaggatgctgactacgacgatttcgaaatgagaggaatggcaatgaaggtcgaagagtggtatggcgaggatctaaagaaattcagaaaaataagaaaagaccaagatcctgataacgtattcttggcaaacaaagaatgggctatcataaacggtatcatagatcctagtgagctttccaactag

SEQ ID NO: 1907 - DNA, 1950 bp, Saccharomyces pastorianus
atggtcttggcacaagtggctaccaaactgggacagcctataccgttggacacgcaacatgcagtgtccgtgtgctttcccacatggaagtccgtgattttgtatgaggaaaaggactccaaagttttaggggccctgaagtccggataccccaggttctggattcacccgtcaattcaaaagctgcgtgatatcttgatcgagaagtacgctaaggaaaacgagacctgtctttgctttccctcctatagagttgctaagcggtgcagagagtatataagaagcaagagcgcgcatcgcaatggcaaggtaaggatcttgcagttggccaccgcgaagcccattaacgaagagcagaagacgtggaaaagagagtgtaagatcgcggtggtgttcgtggacagtgcgtatgaaagcatactgagacaatactggcagttcacaggcgaaataatctccagccggttagccgagtatgttttgcacgagttgtttgtggtggagaagaagcccagtcccgcggaggaaaaggaatacatagagactcgttacggcaggaacttgaattttgcttttgcggatcgggccaaagagttgaccaagaagcggatcgccacgaaagtcatcgataaggatgagcatgacgaggaggaaaactatcactttttctctggcaaccctgacgaacagaatttccaggcaacgttcctggattcgtcgctcaacgaggctaatcacggggaggaccagggcagcggtattggcagcgaagaagacttcaacagcgagtcttacaatggtcttgtttccacaattcctccagaacccatcgaaatgagcacaatagacgaagagcaatccgtagaggaagatgcaggaaggtgtgccttaagggtttgccccgagagagacgttttcttgtttccgagcggtatggcggccatcttcactggacatagattactgttgcaatgggactcactgcggttgaacagagccagaaacgggaatgatcttacctcgtcggctcccaataagaaaacagtgatatttgggtttccttatgcggacacacttcatgtcttgcaagaatttaacgaaacgtacttcttgggggacggggacggttcttcgatgaatgaactaacgaagattttacattccggcgaacagatcctggctgttttcatagagaccccatcgaaccctctgttgaaaatgggcaatttagtagaactgaagagactctccgaattatttggatttttcattatcatcgatgaaacagttggcgggatagtcaacatagacggtctgccgtttgccgacatcgtgtgcagttccttgaccaagacgttcagcggggactctaacgtgatgggtggatcgatggttctaaacccacaaagccgggtgtacgactttgccactcgctttatgcaattggaagatgaatacgaagatttgttatggtgtgaagacgccatctatctggagagaaactccagggatttcatcgccaggaccatccgtatcaactataataccgaatacctcttggataagataataaagccgcacgtagggaaagatgcgctattcaagaaaatatactaccctaacttaacctccaaggagacactaactaactacgacatggtaagatgtaagaaagaaggcgggtacggcggcttattttcattgacgttccatgacgaagaccacgctgaggccttctacgacaacttgcaactaaataagggcccctcgctaggcacaaatttcaccctggtattcccctatactcttatgacatattaccatgaaatggccatggctgaaaagttcggtgtggagagaaatcttcttagaatcagcgtaggtctagagaaccaattgaccttggggaagatcttccaaaaggcaatcgaccaaacgctggcaatatga

SEQ ID NO: 1908 - DNA, 180 bp, Saccharomyces pastorianus
atgttgaaaagatttcccacccctgtccttaaagtgtattggcccttcttcgtggctggtgccgccgtctattacggtatgagtaaagctgctgatctctcttctaacacgaaggaatttatcaacgatccaagaaacccaagattcgccaaaggtgggaagtttgtggaagttgattga

SEQ ID NO: 1909 - DNA, 1272 bp, Saccharomyces pastorianus
atgactgaaccggtctcgagtaatactaataacgctctggtgcaaaaattgacaggtccgcagctttttgacaagattggccgtcctactaggattgttgcgccaatggtagatcaatctgatttagcatggcgtattttgtcaaggagatacggtgccactttggcgtacactcctatgttacatgcgaaattattcgcgacctcgaagaaatatagggaagataattggtgctccctagatggttctgaagtggatagacctttggttgtacaattttgtgccaacgatccggagtacctgttggctgcggctaaatttgtggaagataaatgtgatgctgtagatttgaatttgggctgtcctcaaggtatagccaagaagggacactatgggtcgtttttgatggaagagtgggaattggtacatggtttaattaacaccttgcatgagaatttgaaagtgccagtcaccgccaaaattcgtatatttgatgaccgtgagaagagtttaagctatgccaagatggtattagacgcaggtgctcagtttttaacagtacatgggagagtaagagatcaaaagggccaaaagacaggtttagcaaactggcaaaccatcaagtatctaagagatgaactgcccaaagaaactgtgttttttgccaacggaaatatcctatatcctgaagatatctcacgctgtatggaaaacattggcgcagatgcagttatgagtgccgaagggaatctttataatcctggtgttttcaacgtagaccacactcaggacaaggacaaggttttcccacgtgtggataaaatcatcagggaatattttcaaatagtcaaggattgccaagaatccaaagcctcgaaaacagcgatgaagtctcattttttcaagattctaagacctctcttaccgcaccacacggatatcagatctgatcttgcaaccatgaatgcaaaggccacctgggaagaatgggaggaaaaaatagtgatacctgtggaaaaagtggtggaagaaatatatcaacaaccagatatcgaggacaaggatgaaataactatcggcgagatgcaggcttggggcggttcgtacagaaccgtgccatactggagatgtcagccatattttaggcctgttaacggtatcactggtgataaaagagttatgcaaggcctgacagatgcagacatgaacaagaaacgtaaagctgatgtaccgctagaatcttctggtaaaacgaaggaagcaaaagcatag

SEQ ID NO: 1910 - DNA, 549 bp, Saccharomyces pastorianus
atgtttaaacgttcagtcattcaacaatctcgcctagtctccaactctgcttccagattgggcaagaaggtgttcttcgatccagctgtcaatggtacgaagatcggtagaattgaattcgaattatatgataatgtggttccgaagacagctgaaaatttcagagccttgtgtaccggcgagaagggctggggttacaaaggtgttcctttccacagaattatcccagatttcatgctccaaggtggtgacactgatttgactaacggatttgggggcaaatctatttacggttccaagtttgctgacgagaattttatcaagaagcacgacaaggcaggcttgctatcaatggcaaacgctggtccaaacacgaacgggtcccagttcttcattactactgttccttgttcatggttggatggaaagcacgttgtttttggtgaagtgaccaaaggtatggatatcgtgaaaactattgaatcctacggtactgcttctggtaagccaagagctgacattgtcattgaagacgccggtgagttatga

SEQ ID NO: 1911 - DNA, 480 bp, Saccharomyces pastorianus
atggggatatattcattttggatctttgatagacattgtaactgcatatttgatagagaatggacactggcatccaatagtgcaagtggtacaataaattccaagcaaactgaagaagatgcaaaactactattcggcatgatattctcgttacgctctattacacaaaaactatccaagggctctgtcaagaatgacgtaaggagtatatcgactgggaagtatagagttcacacatattgtacagcttcaagactatggtttgtattattatccgatttcaagcagcagtcttatacacaggtcttgcagtatatatatagtcacatttatgtcaaatatgtgagcaacaacctgttatcgccatatgattttgctgaaaatgaaagcgaaatgagaggtcaaggtacaaggaaaattactaacagaaactttatttctgtcttggaatcatttttagcaccaatggtcaatcaatga

SEQ ID NO: 1912 - DNA, 1578 bp, Saccharomyces pastorianus
atggaattagtactaaataacctcatttctgataagttatcaaaggaagaaaaagaatctggtctcgattttttgcagggcatcctgcagtctgatacaaaggattatgaaacttatttttcatctagggcagctcctggtagcattacagaagacatagcagaaatcgatgcagaattatctgcgcttgacagaaagataaggaaatccttgctggaaaataagtctcaagtcatcaaggatattctcggaaatgatgatagagttcaattggatgagatgtccaagtctttggaagaattgtgggagctggatacaagtatcagtaaaaacacagaggatgataccacgaataaagatcaacaaactaatgaagtggtttcccttgacgactttttagagcacaacaacgaacataatgatacgaataatgatggtgacaatccggcaagaaagaagaaagaagatgaatttcataaagcattgaacaggctaagaaacagactttcgactaaaggagatgacaaggacgagattcgatctgatacattggtcattgtacttgaaaacttggatagtatcacagacttgatggaactgccatttttggcgcgtacgtgtattagaacgggacactatcaagaagctgtcatgctatacactcacactatatcattgaggtcaaggttccccggttcaaccattgtagatgaaatatgtgaaaatgttttaaatgaaataagtactaccatgttaactggcctagtcaaattactgtccactaatgtatcagtcaattcattaaaaaagatattaaagtatctgaattccattcctccattcgatggcgagaccaataaagcactactaagtatcttcttagccataagatacaaattcattaccgatgagatagcatcatactccttggacatcgagtcttccaatgaatcattaattgaaatgatgatcaagagaaaaatcgaggttctcagggaacacgtatatatgtcgttaaatgttttcatcaaaacctttatgtatgatacaagtgatttggaaattccgttcccaatagaactcggaacttctgcattacaaccatacggaagtgagaaggatgagaaggatgaggaggaagttgaagtcaaagttgtagaaaaggcagaagggcaacttgaggaggttaaagtacaagaacaagaggaggagagggagagggagacagaagaggaaggaaagagcggggctatggcggctccagatgagtccagcgcgaataccccatcatttagaaaggaaagcaaaataccaacgaacgcgctcatgctgcagttcgtcgataagtgtgttacatacatattaaacgatctcactcgcggatcaagcgacgtcaaactaagcgactcagtttgtctgcaactagtgtactgttcattccgcctctctgacctaaacagaaactatcaccaccttttcttaaacaggattaacgaaacaagtctgtttaccaccgagcagctcgcccaagcgatcgataagagagcagaattggcctctaaatacgtatactcctaa

SEQ ID NO: 1913 - DNA, 1665 bp, Saccharomyces pastorianus
atgagtaccgattttgatagaatttatttgaaccagtccaaattcagtggtagattccgtattgctgactctgggttaggatggaaagttagcactagcggaggttccgcagccaaccaagcaagaaaaccattcctattaccagccacagaattgtctaccatccaatggagcaggggctgtagaggctacgaactgaagataagtacgaaaaatcaaggtgttattcaactagatgggttctctcaggatgattataacctgatcaagaacgactttcaccgtcgtttcaatattcaagtcgagcaaagggaacattcattgcgtggttggaattggggtaagactgatttggctagaaatgaaatggtctttgccttaaatgggaaaccaacttttgaaattccttacgccagaataaataatacaaacttgacttctaagaacgaagtggggatagagttcaatatccaggatgaagagtatcaaccggctggtgatgaactggtggagatgagattctacgttccaggtgtaattcaaacaaacgtagacgaaaatatgaccaaaaaggaagatccaagcgatggagtcatgcccaagaaagaggatggtgacgaaggagaagacgcggaaaaagcagtggaggagaaaagcatggctgaagcgttttacgaagagttaaaggagaaggccgatattggcgaagtcgctggtgacgcaattgtctcattccaagatgtctttttcaccactccaagaggccgttacgatattgatatctacaaacactctatcaggcttagaggtaaaacttatgaatataagttacagcatcgtcaaatccaaagaattgtttcattaccaaaagcagacgacattcatcacttgctagtcttggccattgaaccgcctttacgtcaaggtcaaaccacatacccctttcttgttttacaatttcaaaaggacgaggaaactgaagttcaattaaatttggaagatgaagattatgaagaaaactacaaagataaattaaagaagcagtatgatgccaaaactcatatagtaataagtcatgtacttaagggtttgactgaccgtagggttatcgttcctggagagtacaaatccaagtatgaccagtgtgctgtttcatgttcctttaaggcgaacgaaggttatttatacccattggataacgcgttcttcttcctaaccaaaccaacattgtacataccattcagtgatgtaagtatggttaatatttcaagagcaggacaaacctctacatcgtcaaggacatttgatttggaagtagtattgcgctcgaacaggggttccacaacttttgccaacattagcaaggaagagcaacaattattggagcatttcctaaagtctaagaatttgagagtgaagaatgaagacagagacgtgcaagaaagactacaaaccgccttgggttcagacagtgacgaggaagatattaatatgggatccgctggtgaagacgacgaatctgtagatgaagatttccaagccagctccgataatgacggtgaagaagttgcggaagagttcgattcagatgcagcattaagtgatgcagaagaaggtagtgacaatgatgaagaaagaccttccaaaaagcctaaagtagagtag

SEQ ID NO: 1914 - DNA, 1395 bp, Saccharomyces pastorianus
atggctgtgactcagtttgaagaagatttgggattattaaaagatatgtacccggagctggatatgaagttggagagagggagtaacagtactgaatttccgcacctactaagtgataagttgccgttcaagatatccctattaaacgatataaggattaagttcggcgagcaagatttgctactatcaaatttgtctaatgaatgtctagagtttacaatatattaccgtcgatatccagacattcgacagtgtgttattatggacgtcaaatcattgtggatgtcagtggacgaaaagaagatgctgatcgataaagtgttagaacttgtagaagagactgtagacacgaaagcggagtttgaggattcgtttacatcaattctaattctgatcttcggattctttatagatgacacagctagaatactgtttcctggtaatgtaaaaaaatgtgtgacccaggaacagtatgaaatattcaaggagataagtgaaaaagctacccttgaaaaaataagtaggtctaactaccactgctgcatttgtatggagatggaaaagggtatcagaatgataaaattaccatgccagaataaagatgcagatcactttctttgcaggaaatgtgctaagtcttattttactgcaatgattgaagaaggccgaatattaagcgtgagatgtccagaatgtgaatatacggaactaaaattggataattttaaaaactatgcaaagatgataaaaattctatttacgcctttgattccagcttcctttttaagaaagctcattgacacagaactatgtgaaagatatgagagactttttcataaccaggcagctacaaaactttcaaagcattgtccgtacgcttgcgttacatgccgaaggtgtgaccaatggtgcataaaggaggaccttgacgatactatggttcagtgtcaaaaatgccattttgtattttgttttgattgcttgcatgcctggcatggttataacaataaatgcggtaagaaagttacaatctcaagatgcattatcgaagagtatataaacgatactgatacttcgatcgaaagaaaacgtgaactggaagttaaatatggaaggagagtgttagaattggaagccaatgactatattgctgacgagatgttgaatttggccattgaagaggaaggctcgaacttacaaaggtgccctaagtgtagagtggttgtggagaggagtgaaggctgcaataaaatgaaatgcggagtgtgtggaacattattctgttttatttgtggagacttgctttatcccgatgacccctacgaacatttcagagaaagattttcaggttgttacggacgattatttgagggtatgcccggtgcagaaacttga

SEQ ID NO: 1915 - DNA, 1110 bp, Saccharomyces pastorianus
atgtttttccccaaacgattgattgtatgggcggtccttttggttttaagcttatcccaatttttactctatttgccaactacgacatgtacaacaagtaaagggcttcgactatgtgccccacagtttactataactgtcattgggggatcaaacacggctaatgagtttattgcaagtgtaagagagtttttaagattgatttcatacctaacgattgacatgggttggtcaaatgagttaaccgatccaagcgtatatgaggatgaaaatttagtagacacgtttcaacctgataaagtctttgagcttaattattttgggttttgtaagcggagtaatagaagtaaaatctactgtacttcaaatgagaattacgggatggacgtacttgaagtactggtccgggatgttggaatccaattgggtaatatttctacaacacgatcgaatgaaacaaagaagtttggtgactctctggtgttaacgtaccggttggcactgacatctattcgagatttcctgaaacatgacaaacatagcgggaacgctctgtcaaaggccttgattggctcacctgatcctaatgcaaaggatcaatcgccaacaaaaaattacttgaagggggttaatctggcatatatattaatggtgtttaacggcatggtgttctaccttgccgtcttagagattatagtcggattcctcagtatctgcgtcgtgtcagcctttggaggtgctctcagcgttggaaagcgccatcgcttgtttcctatccttttgaagttttcaagctcaatattagtaactctctctaccctgacgttattatgtaacgtcatatatttgattgcactgaaaactttggaacccgatgacgtatccgtggtagaactggaccgttctctcccgcatactacaggttgggaattgctgcaagttaacgtgggaagcgggttcatcgtggggcttgccagatacgctattcagtgggtactactgctacttgcatttcttgcggcaaaccattacaaggccaagtccaagaagtctgataagtgcacagaggacgagtctatccccacttctcccgattccatggagaaatga

SEQ ID NO: 1916 - DNA, 2778 bp, Saccharomyces pastorianus
atggcaaaaacactaaaggatctccaaggctgggagatcataacaactgatgagcaagggaatataatcgatggaggccagaaaagatcccgccgaaggggtgctcgaactgaaaatttcctaaagagaatttctgatggaaccaaaattggccgtggtgatagtgttgttatgcataatgaggcagcagggacatactctgtttatatgatccaggagttaaggcttaatacattgaataacgtagtcgaattgtgggctctcacctatttgagatggttcgaagtcaacccattagctcattacagacaatttaatcctgttgtcaacatactaaatcgtcccctgagctactataacaagaagttttctgaaagtgcaaataaaaatgaactatatttaactgcggaattagccgaattgcagctttcaaattttatcagggttgcccatatcgtagatgagactaaatggaatgaaatgaaggatggtatcgatacagaaaaagactttatggttcgttatatctgtgagccgaccggtgataagtttgtaaatattaatatcgaggatattaacgcttatgtaaataagctggaaccgaaggaggcccaagagtatttgaaagacctgacattgccatcgaaaagaagagaaaccaagacagggtcaccaagaagaaagaaaagcaaaacttctcgagctgctcaaaactcagatgatcaaacaggggaagcaaatacaaatgataaagataatagcgataatgataaagaactttctgataatcaaagttcgtcggataaagaggataatgttcagagtaatgaagatatgagtagctatgaggtatcagcggacgaacttgaagaagaggaagaggaagaggaggaagaggaggaagaagaggaggaggaagatgaagaagaagaagggaattctcgtaggaagtcatcaaggcaaagtaaggtaaagttaatcgacgatgatgcggacgttttggcacaacaagcgccgaaaaagagaggccgtaaacctaaggatcccaacaagccacgtcaaatgttactgatatcttcgtgccgtgcgaataacactccagtgattaggaaattcacaaaaaaaaatgtcgctagagctaaaaaaaagtatacccccttttcgaaaagattcaaatctattgcagcgattcctgatttaaccacactaccggaattttatgaaagctcatcaaaattaacagcatcgagctttgaaaataaactaaaaactacccaaaaacatcaaattgtggagacaattttttccaaagtcaagaaacagttaaactcctcgtatgtcaaagaaaaaatattagaatcgacaaatttccaagattacttgccagctagggaaaatgaatttgcctccatttatttaagtgcatacagcgcaattgaatccgactctgctaccactatatatgtagctggtacccccggtgtgggcaaaactttgaccgtaagggaggttgtgaaagagttgatttcgtcctctgcacaacaagaattaccggactttctttatgtggagataaatggattaaaaatggtaaagcctacagattgttacgaaactttatggaacaaagtctctggtgaaaggttgacatgggcggcatcaatggaatcattagaattttatttcaaaagggtacccaaggataagaaaaaaacgatcgtggtcttactggatgagcttgatgcaatggtgacaaaatcccaagatattatgtataatttcttcaattggactacttacgaaaacgctaagcttattgtggtcgcagtggctaatacaatggatttacctgaacgtcagctaggtaataaggttacatcgagaattggattcaccagaattatgttcactgggtatactcacgaagagttaaagaatattattgatttaaggcttaagggactaaacgattcatttttttatgtcgatataaagactggtaatgcaatattaatggattcagtcggcaatgacgccacagtagaacaaacattacctgaaaatgtaaaaaaaattcgtttaagaatgagtcccgatgccattgaaatcgcttcgagaaaagtagcaagtgtcagcggtgacgcaagaagagccctaaaagtttgtaagagggcagcggaaatcgcagaaaaacattacatggctaaacatggttacggttacgatggtaaaatggttgttgaggatgaagattatagtcaaatgcatgatggtgaagacgaagatcttgtcgcaaacgacaaagccaacaaagatgatgacgatgaagacgacgatgaagtacagacagttcacataacgcacgtcatgaaagctttgaacgagacattgaactctcatgcgattacatttatgacaagactctcattcacggcaaagctatttatttacgcattactaaacttgatgaaaaaaaatggatcccaagaacaagagctgggtgacattgtcgatgagatcaagctacttattgaagttaatggtaacaacaagtttgttctggaaataacaaaaacgctgttccaacagggaagcgaaaatatatctgaacaactgagaattatatcatgggatttcattctcaatcaactgcttgacgcaggcatcttgttcaaacaaaccatgcagaacgatagaatatgttgtgttaagctgaacatatcagtagaagaagcgaagagagccatgaaggaagatgagactttgagaagtttatag

SEQ ID NO: 1917 - DNA, 738 bp, Saccharomyces pastorianus
atgtctacaccaagcaccggaggaaatggttctatccctgcagtacggaatcaggtagaggttcaagtgggactagtaggggatgcgcaggtcgggaagacgtcgttgatggtgaagtatgttcaaaatatatacgataaagaatacacgcagacgctaggtgtgaactttctaaaaagaaaagttagcatacgctcaaccgatattatattttccataatggatctgggaggacagagggagttcattaacatgcttccaattgcgacggtggggtcctctgtgatcatcttcttgtttgatttgacgcgtccggaaacgctgagctcgataaaggagtggtatagacaggcgtatgggctgaatgactcggcaatccccattttagtgggcacgaagtacgatttactcatagatttagacccagagtatcaagaacaaatctcgagaacgagtatgaaatacgcacaggtcatgaatgcaccgctggtgttttgttctacagccaagtctataaacattcaaaaaattttcaaaattgcattggccaagatctttaatctgacgttgaccatcccggaaattaacgaaatcggtgatccacttttagtatataagcacctaggtagccagcaacgtcgacatcatagtagtagccaggatagaaagagtaataacatgagaaactcctcttcttcatcctcctcgaaggcaccttcgcccggtgtcaactcatga

SEQ ID NO: 1918 - DNA, 768 bp, Saccharomyces pastorianus
atggctgttggtaagaataagagactatccagaggtaagaagggtttgaagaagagggtcgtagacccatttaccagaaaggattggttcgacatcaaagccccatccacttttgaaaacagaaatgttggtaagactttagttaacaagtccactggtttgaagaatgcttccgatgccttgaagggtagagttgtcgaagtttgtttggctgacttgcaaggttctgaagaccactctttcagaaaggtcaagttgagagttgatgaagttcaaggtaagaacttgttgaccaacttccacggtatggacttcaccaccgacaaattgagatccatggtcagaaaatggcaaactttgatcgaagctaacgttactgttaagacttccgatgattacgttttgagaatctttgctattgccttcaccagaaagcaagctaaccaagttaagagacactcttacgctcaatcttctcacatcagatctatcagaaaggtcatttctgaaatcttgaccagagaagtccaaaactccactttggcccaattgacttccaagttgattccagaagttatcaacaaggaaatcgaaaacgctaccaaggacatctttccactacaaaacatccatgttagaaaggtcaagttattgaaacaaccaaagttcgacgttggtgctttgatggctttgcatggtgaaggttccggtgaagaaaagggtaagaaggtttctggtttcaaggatgaagtcttggaaactgtgtaa

SEQ ID NO: 1919 - DNA, 1131 bp, Saccharomyces pastorianus
atgtgttataaatttggcaaacttgccgttgataaaagtgagctttgtttggcgaatgtgttacaaggtggccaatcttttcggtggatctgggatgagaagttaaatcagtacagcaccacaatgaaaataggtaggcaagaagattattcagtggtaattttaagacaaaaagaagataaggggcttttagaatatgctgctgttggcgaccatggggaccaggacgctttaaagtcacattttatgaaatattttaggttggatgtctcattgaaacatttatttgataatgtatggataccaaatgacaaaatgtttgcaaagctgtccccacaaggtattcgtattttggcccaagaaccatgggaaacgctgatttcctttatttgttcgagtaacaataacatttcgagaatcactaaaatgtgcaacagcctttgctctaattttgggaacttaatcacgaaactagatggcgtcacgtattattcctttcctacaagtgaagagctagctacaagggcaactgagactggcctacgtgatttgggctttggatatagagctaaatatattatcgaaactgctagaaaactagcaaaggacaaagtcgactctggtattgcaagcgatactgagtatctacaaaagttgtgcgaagatgctgattatgaagacgttagagagcatctcatgtcctacaatggtgtgggccccaaagttgccgattgcgtttgcctaatgggccttcacatggatggtattgtacctgttgacgtccatgtaagtagaatcgctaagagagattaccagatatctgcgaataagaaccgtattaaagaactgagagcaaagtacaatgttttaccaattacgagaaaaaaaattaatccggagcttgattatataaggctgatgcttttagagaaatggggatcgcatgctggttgggcacaaggtgtcttgttttccaaagaggttggaggtaccagtggtagtactacaagtggtgaaataaagaaaagaaaatgggattctttagaagagactgagcaaacaatcacaaaacaagtgaaattgaaagtagaattgagtgaaattcacattaaggaggcgaaaatcgattag

SEQ ID NO: 1920 - DNA, 321 bp, Saccharomyces pastorianus
atgcaaaattctcaagactacttctacgcccaacgcagcaactcacaacagcagggacaagctccttccactctgcgcaccgtgaccatggcagaattcagaagagtgcctttgccacccatggccgaggcgcccatgctgtcttcccagaactccaccagcagctctgcttctgcttctgcctcgtcactggaaatgtgggagaaggacttggaggagagactcagctccatcgaccatgacatgaacaacaacaaatttggctccggtgagctgaaatccatgttccaccagggcaaggtcgaggacatggacttctaa

SEQ ID NO: 1921 - DNA, 1776 bp, Saccharomyces pastorianus
atgctaaaaatcaaacctctattgagaatctcgagagtccccgaggcggccaccctcagaacctccaggactagattaaacacggctcgctcttacagttctgccgtgggcaagtctaagtcgttccagcaacattcaggaaaacgcacacagtcatggactactttgagcgttgggaccatcttagccgctgcaggttcaatggcgtatttgaactggtctaacgaccagataggcaacgacccaaaactagacatgaacaagcagaaaatttcgcctgcagaagttgctaaacacaactctgctgacgattgctgggtcgtgatcaacggttatgtgtatgatctgacgcggttcatacctaaccatccaggtggctcggacgtgataaagtacaatgctgggagagacgtcactgccattttcgagccattacatgccccaaacgtcatcgataaatacattgcccctgagaagaagctgggaccactacaggggtccatgccaccagaactggtttgcccgccttatgctcccggtgagaccaaagaagacattgctaggaaagagcaactgaaatcactactacccccactgaataacattattaatctttatgatttcgagtacttggcctctcaaactctaactaagcaagcttgggcttactactcctccggtgccaatgatgaagtctcgcacagggaaaatcataatgcgtaccataggattttcttcaagccaaagattcttgttgacgtaagcaaagtggacctctccacggacatgctgggctctcatgtggacgtcccattttatgtgtctgcaacagccctgtgtaaactggggaacccactagaaggtgaaaaggacattgcaagaggttgtggccaaggcataacgaaagtcccacaaatgatctccactttggcgtcatgctcacccgaagaaatcataagtgcggcgccatctgatgagcagattcaatggtatcagctgtacgttaactctgatagaaagatcactgacgacttggttaagaatgttgaaaaattgggcgtgaaggcactgtttgtcacagtagatgcgccaagtttgggccagagagagaaggatatgaagttgaaattctctaattcaaaggctggcccaaaggcaatgaagaaaacagatgtagaggaatctaaaggtgcctcaagagcgttgtccaagtttattgacccctctttgacgtggaaggatattgaagagttgaaatcaaagacaaacctacccattgtcatcaagggtgttcaacgcaccgaagatgtcattaaagcagctgaggttggtgtgagtggtgtggtgctatccaaccacggtggtagacaattagatttttcgagagcccccatcgaagttttggctgaagccatgccagctctggaagaacgtaaattgaaagataaactggaagtgtacatagacggcggtgttcgccgtggtacagatattttgaaggcgctctgtctgggcgctaaaggtgttggcttgggtagaccattcctttacgccaactcatgctatggtcgtgacggtgttgaaaaagcgattgaaattttgcgtgatgaagtcgaaatgtccatgagactcctaggtgttgccagtattgcagaattgaagcctgagctgttagacctgtcgacattgaaggcaagaacggtggcagtgcccaacgatgtcttatataatgaagtttacgagagccccactttaacagattttaacgacgcatga

SEQ ID NO: 1922 - DNA, 558 bp, Saccharomyces pastorianus
atgctatcatactatgaacataatactgcgttccaaacaaacaattgcagttccggcaacaatgccgccgccacatataatggcaacgccaataatgattcaatcgtaaataaaaggaataacgaccacttcgagtttgacacacacactttttaccaaaggcccaagagaagcaagcgagataccgcaagcacgaggcctccctcaaatgccgcggctgtccataacaataatactactactcataataatattcaatatcagaaaaatatcgaaataacacccttgacgcccgtcaacacgcctcacagcacgaacgcctctctactcaacgagtctgaattttactcggaaacggaagaatacatggtccacggttatttcggtaacagtagtcatggaataacaggcgcggcttccagcggaaatactagctccacacaacaccagtgtcacatcctgcccgctcaacatataattgcatcacaactacctagtaacaccatgaatacgttaactgacaacaatattgctaacgactacatggacatcgactag

SEQ ID NO: 1923 - DNA, 912 bp, Saccharomyces pastorianus
atggttaaggttttgaatatagcgctgcgtttgttggtattgctgtttttggcaggtaacaccctgctgttaattcttatgattatatctggtgctacggaccactatcccgtgaacaggttctactggatacagggaaacaccacgggcattcctaatgcgggagccgagacccgttggaccttctggggcgcctgtctgcaggacaccgatggctcagacacctgctcgagcaatctggcccctgcctaccccatctcgcctgtagacaacttcaacacgcacgtcaacgttcctcatcagtttatttcgaaaagagacgccttctactacctgactaggttttccttttgtttcttctggatcgcgttggctttcgtgggtgtgtctttcgtcctttacattctgacttggtgctccaagatgctatcgaacatggtcgtcgtcctcatgtccttcggggttgttttcaacaccgccgcagttgtcctgcaaacagctgcctcagtaatggcaaaaaacgccttccacgacggtgaccgtagcgccaagctgggtgcctccatgatgggtatggcatgggcaagtgtctttttatgtatcgtggagtttgtctcgcttgccgttttctttgtcaaatcaagactcgcttccgactactccatcgataatacaagatacaggacatcctccaaatggaaccccttccgcagagaaaaggagcaagctaccgatcccatcctgactaccgctcccgatgacgttcaacaaaatgcaagcatagtggggccctcttctaataccaatgcggtcactgcgactgctgctacggaaaaccagccgcaacctaaaggtatcaacttctttactataagaaagtctcacgagcgtccggacgatatctctgtctag

SEQ ID NO: 1924 - DNA, 1308 bp, Saccharomyces pastorianus
atggactataacaagagatcttccgtctctacagtacccaatgcagcccccataagagtcggattcattggcctcaacgctaccaaagggtgggcgatcaaaactcattatcccgccatactgcagctatcgtcccaatttcaaattactgccttatacaacccaaagatagagacctccattgccactatccaacaactgaaacttagcaatgccacggccttccccactttagaatcatttgcatcttctgccaccgtggacatgatagtgataaccatccaggtggccagccattatgaggttctaatgcccctgttgaaatactcccaaaataatccgaatctcaagtatcttttcgtagaatgggcccttgcatgttctctggatcaagcagaatcgatttataaggcagctgccgaacgtgcactacaaactattatttctttacaaggccgtaaatcaccatacatcttgagagccaaagaactaatttctgaaggttacattggcgacatcaactccatagaaattgcaggaaacggcggttggtatggctatgaaagacccatcaaatcgcccaactatatttatgaaatgggcaatggtgtagatctggtaaccaccacatttggccacaccattgaccttttgcagtacatgacgagctcgtatttttctagaataaacgcaatgatgttcaataatataccggagcaagagttaatagacgaatatggtaaccgattaggtcagcgagttccgaagaccgtacccgatcacctattatttcaaggcactttattaaacggtaatgtacctgtatcgtgtagtttcaaaggtggtaaacctaccaaaaaatttaccaaaaatttagtcatagacattcatggtaccaagggcgacttgaaacttgaaggcgatgccggcttcgcagaaatttcaaatctggtactttattatagtggtactagggcaaacgacctgccgctagctaacggccagcaagctccaataaatccgggctacgattccggcaaagagattatggaagtttatcatttacgaaactataatgctgttataggtaatattcatcgactgtaccaatctatctctgatttccattacaatacaaagaaaatccccgcactgccctcacagtttgtaatgcaaggcttcgaatttgaagggttcccgactttaatggatgccctgatactacaccggttaattgaaagcgcttatagaagtaatatgttgggcactacgttaaatgttagtaatatctcgcgctatcctttatga

SEQ ID NO: 1925 - DNA, 1887 bp, Saccharomyces pastorianus
atgacagatgaaacaaacttcacaatagaagtgatcgagcctagggcagatgcccttcgaggtctagactccctgttcctacaagataatgcagcactagtgcagacttatcgcaacatggactggtcagatatttcctcattaactcaaatggtagacgttatagagcaaacagtagtgaaatatggtgatccaaatgattcaattaaattggccttggaaactatcctttggcaaatattaagaaaatatcctttattgtttggattttggaaaaggttcaccacaatagagtaccagttgtttggccttaagaaatcgattgaagttctcgccacttcggtcaaatggttcccaacttcactagagttgtggtgcgattatttgaatgtcttatgtgtgaataatcccaacgagaaggactttatcagaaacaactttcatatcgccaaagaccttatcggtgaacaatttctgtcacatccattttgggataagtttatagaatttgaggttaggcaggagaattgggagaacgttcaaacaatatacgagtacattattgagattcctttgcaccagtacgcaagattctttacatcctataaaaagcttcttaatgaaaggaatttcaaaccgaagagagatattgatacagtattgagaaggacacaaacaatcgtaaatgagatatggcagtttgagtcgaagatcaaacagcccttttttaacttaggccaagttctgcaagatgatttgaagaattggtctcagtatctgaattttgtgacgaacccttccaaatccctggacaaaaaattcataatgtccatttttgacaggtgtttaattccttgtgtttataatgaaaaagtgtggctcatgtacattaacttgctaacaagggaagattcatacgagataacagtggggatttatcaaaaagcaagcaaggtattaccgttagacttcaaaactttgaggtacgattttatcaaatatttgaagaaaaactaccgattaaataacgttctattcagcaagatattcaatgaaacggtatcgcattttttaaatatttggcccaatgatatttcgcttatgacggaatacatttgtatgtggaagagacactctttcaagaactctttagatcaaccgccaagagaaattctagagaaacaaacttcgtttgctaaaattttagagacttcaatcaccaattatttgaccaagcaaactgaccccagagtacatttacaaacgttgataaatgataaaaacttaagtatagtagtggtagaactgataaagaccacatggttagtacttaaaaataacatgcaaacgagaaagtatttcaacttttaccaaaaaaattctctcatcaaggactcagtgccgttttggttaacttattacaaattcgagaagagtaatgtaaattttactagactgaataaatttatcaaggagctgggcgtagaaatatatttaccgacaacgataatgaacgatatcctgacagactacaaaacattttacttaatgcattcaaatattgttgcatatgaaacttcaactttggattcaaacgatttcgatcctattttatatcctgaaatgaaaatctcgaatccacaatacgaaccagtcgcgggagtaaagccgaatgccgaatggtataaaagaacagaatggaaagaagctggtcacgtcgggataatgatagaaagaccacagatatcgaacagtataattgagtgcaattcaagaaatttagttcaaaagcctattacgttaccaaattttagaaacctggagaaaataaaccaggttaaaattaatgatttatatacagaagaatttttaaaggaaaggaaatga

SEQ ID NO: 1926 - DNA, 1542 bp, Saccharomyces pastorianus
atgtttgaagtccctataactttgactaataagaagtttgctcaaagaaggaagttgaaatatcaatacataaatcacctctctagaagatttgacagaatcaccaagaaaattaatactacagacagcttgcccacacccgaaaattccgcagctgaaaacaatgacgaagactatgaagatgatgaagaagaacgaaattatgaaagtgatgttggtgaaagctcggtacggcagcagacgaaaagaagaagagaaagacattggaaaagtgtgattggggagctctattctagtacagaaactgaatccgactctcaagaggaggacgttcaagaaggtgatcaagtcgaacatgagactagaccaaaggaagaagatactgatgaggaaagaaaattttggaaaaaatacgaaaagcccgaaaaaagttttgaagtttggcaaacggtgtcttcacaaaacagaagccccattaataaacaaataataacttatcataatttcaaaaaaattgaaaagaattccttaaggaaaatggaaattccgcttttgcattgtacgaaggaaaataaactctattttcagctcttagccaaaggtttagaacctttacaaagcccaacatctgcagcgagaaactaccaaacaagacatataataacattgaccaatcttctgcatttgaatgtatcaagacataactggcctcttgcatataaaatatttgccacattgataagaattccgaacgtacggatcaagtctatttggggtattggcgttaagatactagataactcgccaaattcgtcaagtagtcttgactttctaaaatggatgtgtcaagtttattcatccaagtcaagattcgttcaaaacgtcaactaccgttccgttgtcccccctttccaaactggttctagaacacatacatcaaaatttgccattacctacttatggtcctctttaattaattgtcaaaaagcgatagaatcgtcaaacgttaccgataatcaatatgaagtggaaaatagccgactagaagaattgatagacaagatatcagaatgggtattgatccctccatttatggaagacgccgaggtttattttatctatgcatcttgccatttactaaaagccgatattttatccaggcaatttgtcaatgataacagaaacagcgacctagttgggctgaataaggacataaatatcaatcaagtgataaagcatatacattatgttaaggtatttttacaaacatgtttggaaaaaggcggatttacaatcccaagtagattgattgaaaatcaattaaaaagctttgagtcaagattgtacggggaagcacacgatatacgtgagagagaaatggtagatgattatggtaacacggacaacagttcagcggataattcattcggggacgtgtatgaaactaatgcagagtttctagatacacaattaatggatttaccaccgatagaaaatgagatggccgagaatcattacagcgatgaagactcaagcgagtga

SEQ ID NO: 1927 - DNA, 2013 bp, Saccharomyces pastorianus
atgaaaatctgtaacttgggagctttagcaaacccgaaacatcttcccataatatcaaggagagcaatgcactcagcaactgtcaactactcctctcaacaggttcaatttcccatggagacaaacaatggggaacactattgggcggaaaagccaaataaattttaccaggagaaaagaccgaatttccagggcgctacttttgctaaacaacaagatttaccgtcattacctgtgccagagttaaattccacccttgataagtatttacagacaattcgtccattttgcaacgacgtggagacctttgaaagacagcagttgttatgtaaggacttcttggagaatatggggcctgttttacaaaatcggttaatggagtactctagtgataagagaaattggatgtccaagttttgggacgatcaatcgtacttgcaatataacgatccaattattccgtacgtttcttatttctactctcacaaaccactacccaatcatttatccaaaatcgataacgatcctttagttaaagccactgcaatcatatcaacagtagttaaatttattgaagctattaaagacgaatctttacctgcagaaactatcaaaggcacaccgttctgtatgaatagtttttcattgatgttcaataattcaagattacctggtaacccacaggataaccaagatacaaacattttctactcaatttatgaaaacaattttataactgttgctcataaaggtagattttacaaattagtgacccacgatggtgataaaaaaccgctttcggaaaacgaaatttggaaacaactgtattctgtagttttccaaggatcacagcccggacccaagctaggaggtgttggttctttaacttctctgcctcgtgatcaatggcgtgaggtttatgtagacttggtgaaagaccctatttctcaagattcattagaaacaattcacaaatcttcctttatgctatgtttggatcttgatcaatctcctgttactttagaggaaaaatccaggaactgctggcacggtgatggtattaatagattttacgataaatctttacagtttctagtcactggtaatggttcatcaggtttcttagctgaacattcgaaaatggatggtacgccaactttattcatgaataacttcgtttgtcagcagttaaagaaattaaatgcaaatgaatttttggaaaaagtgtttacaccatcaggcaaagcaacatttaaacctatggaattaccgttcacgatcactccacaaatcaacaaggccattgaatctgctcaatttcaatttaaggaaacgatgaatgagcatgatttacgtgtctggcactacaacaaatttggtaaaacttttataaagaatcacggtatgtcacctgatgcatttattcaacaggttattcaattggctgttttcaaatacctaaaacgtccgctacccacctatgaggctgcgtctacaagaaaatatttcaaaggtcgtactgaaactggtagatctgtatcaactgcttcttcagaatttgtttctaagtggcagaacggaaatatctctgacgctgaaaaggttcaggctttgagacgtgctgccaaggaacattctcactatttaaaaaatgctgcaaatggcaatggggttgaccgtcatttttttggtttgaaaaacatgatcaactctaatgacaaccaagtcccaccccttttcaaagattcattatttaatttctcttcaacttggttgatctccacatcgcagctatcatcagaatacttcgatggttatggctggtctcaagtatatgacaacgggtttgggttagcatacatgcttaacaacgactggttgcatattaatatcgtgaacaaaccagccaagagtgggttaagcgttaataaattacattattatttatcccaagctgcagatgaaatttgcgaggctttggaaaaagaaaacaaactaaaagcaaagttatga

SEQ ID NO: 1928 - DNA, 843 bp, Saccharomyces pastorianus
atgaaaacactagttgaagagattgataaaaggacatataatcccaattcgtatttcacatcgttggaccctcaagcacgtcgatatacttctaaaaaaattaacaagcatggcacaacatctacgtccaggcccgtaaaacgcataaactattcgctagccgatttagaggctaagctctacacttccaggccggacggtgatgctaataatatcagtggacaggatgatcgaaaaggtaagaattcgaactcatttgaggaaagatatacaccgcaggagcttctccagtcgaacaggaggtttatggaactgaatacagagaacctgtcagatttgcccaatgtgccaactttattgagtgatctgaccagcgtaccacgagatagaatcgaatcgaccacgaaaccaatctcccagacttcagacggtctctccgcattggttggtggtgcatcttttgggaaagagcactccaagtacggtcatggttgggtactgaagccggagactttaagggaggttcaattatcttataagtctacaaaactacctaaaccgaagagaaaaaatactaatcgtattgtagcattaaagaaagttttgagttcaaagagaaatttgcattcgtttctggattcagcccttctaaacatgatggacaggaatgttatttatcataacgtttataataagaggtatttcaaagtcttgcccctgattaccacatgctctatatgcggaggttatgacagtatttcgagttgtgttaattgcggtagtaagatttgttctataagctgttttaaactgcataatgaaactaggtgcagaaatagatag

SEQ ID NO: 1929 - DNA, 1326 bp, Saccharomyces pastorianus
atgaataagactctcttctttgcatttctgttcggatggtatttctgttcgataacactctccatatataacagatggatgtttgatccgaaggacggattaggtattggataccctgtcttggtgacgtcgttccaccaaactatcctatggttactgtccgggatgtatatcaaggttagacatacaccagtgaggaatataatgagacgagataataaagtcaactggagttttttcctaaaatttttagttcctacagcaattgcttctgcaggtgatgtggggctcagtaatgtttcgtttaagtatgttccattgacggtttatactattatcaaatcttccagtattgcctttgttcttttatttggttgcatcttcaaactggagagattccattggaaattggctattgtggtaactatcatgttcggaggtgtggcattaatggtttttaaaccaatggacccaaagagtgctgaaaatgaccaggccttgataattttcggcagtttccttgtcttggcaagcagttgtctttccggattgagatgggtttatacgcagttggtattaaggaataatccacttcaaaccgacgtggtagccgtagaagaatctaatgataccctcttcgcggtaaacgaggaaaatgcggatgatgaacctattgttaatcccgctaataacaagatgctagaaaactcaagagggggcaagccacacccaatccatacgatataccagttggctccgataatggcaataactctgttacttacatccttactcgtggaaagaccatttcctggcatatttcattctagcttatttaaatttaacgtcggaaatggcagtggtgatacagaaacaagtattgtgtccatcgcaaagggctttgtcttaatgattttgccaggctttgcagtctttttgttaacaatttgtgagttcagtattctagaacaaacacccgtattgactgtatctattgctggtatcgtaaaggaagttttgacaattatatttggtatgattattctttccgaaaggttaagcggggtttataattggttaggtatgctgatcattatgatggatgtttgctactataattatttcaggtataaacaagactcaatacagaagtatagactaacttcagctgaagatagcgacaaagaattagaggggcttcaaaccttcgaacacttaggaagcaaaaaaagtgcaccttattctattactgttgacttaacaaaccaagagtatgagcttgatatgattgctcaaaacgctagccattcatcccagcaggtctga

SEQ ID NO: 1930 - DNA, 1410 bp, Saccharomyces pastorianus
atgaacgataccatggacatggacgaaaagaagcccgtttttgggaataattccgaggatatacaaaccaagttggacaagaagctgggccctgagtatatttccaaaagaattgggttcgggactagcaggatcgcttacattgagggttggagggtgattaatttggcgaaccagatctttgggtataatggctggtccacggaagtgaaaagcgtgattgttgattttttggacgaacgccagggaaagtttagtataggttgcacagcgatcgttcgtgtcacattaaccagtgggacttacagggaggatattgggtacggtactgtggagaatgaaaggaggaagcccgcagctttcgaacgggctaagaaatctgctgtcacagatgccttgaaaaggtctttgagagggtttgggaatgctttggggaactgtctttatgataaggatttcctggcaaagattgataaggtcaagttcgacccgccagattttgatgaaaataatttgtttaggcccactgatgaaatcagtgaaagctcaagatcgaatactttgcacgaaaatcatgaacaacaacaatacccgaataaaagaagacaattgactaaagccacaaccgctagtgtggactcaaagagtaatctggtgaagctagaaaacaacgccgacaagggcgggcctatgatggatccaccaacgggcaccaccaataataatagcaatcatcctaaaccctctgacgcatccaaacaagatcaagatgatttactggatgactctcttatgttcagtgatgatttccaagacgacgatctgatagatatgggtaatacgaacaataatgtattaccaaccgacgcagatccgctgttggctaagcaaagctccaatccaaactctaattcagaggcggataaaattacatttgtcactgctaaggcggcaacctctgttcagaatgaaaatcatattggtgatgagaacatttttgacccaaaatatcaggctcagtccatcagacacaccatcgatcagactacgtccaaacacgttccagcaagtgcaataaaggataaagcgatgaatagttcgagggattctgtttatgaaaagtttgcgccaaaaggaaaacaaataaacatgaagaacaatgacaaagaactaggcgcaaatgtgcgagaaccaagtggaaatcaagtaccgcaagaaattgcccagaataaatcaaatactgtcaccgctgcgcctgctaccaccactgctccacggtttgcgccaccttcaaaggtagtacatcccaacgggagtggcgcagtagctgcgcttccgccgcaaagatctacgagaagagaagttggcagaccgaaggttattccattacatgcacgcaagcctagttga

SEQ ID NO: 1931 - DNA, 480 bp, Saccharomyces pastorianus
atgtcgcgtataccttctagtttcgacttcacccaaagggatttggatgaaatgacctttggtgaaaggattgtttatcattgtaaaaagcaaccattggtacccattggatgtctactgacgactggtgcggtcattctagcagcccaaaatgtccgtcttggtaataaatggaaggcccagtattacttccgctggcgtgtgggtctacaagcagctacattggtcgcgctagttgcgggttcgttcatctatgggacttctagtaaggaactgaaggcgaaggaggaaaaattgaaggaaaaggccaaaatgagagagaagttgtggattcaagaactggagagaagagaagaggaaaccgaggctagaaggaaaagagccgaattggcaagaaagaaaactttcgagaacgagaatgaaattaaaggcttggaaaaggagctaagtgacctgaaaaacaagcttgggaagaaatga

SEQ ID NO: 1932 - DNA, 1152 bp, Saccharomyces pastorianus
atgatacatgaaacaaaaatgctgccttcattatccacacttctatcgggcaccgagatttcgtctactcccgtgtcaccaagcttcatcaatccaagaacaaactttcatctggatgaccgcggggccataaagctgcctccgctaaacaccactataagtcgtccaagatctgtggaaagtgccttgagacacacagtcactgcgcagaacaaaaccatcaagccctctggtgacaatctgctcaagcacacgcaatcagactctgccttgtcgtcccaactgactagttcacaagaaaccgtcgatgaatcgcaagaaagcctgccattgactccgctaaacaacaaaaagagaaattatccagtttcttcaaagaaaaacgatatattaacaccgctctctgcagtaaagtcgatcataatcccatcctcctcccaagataaaagacgtgcgtttgcgttcatcacacattctcaagagaccttccccaagaaggaacccaagatcgataatgctcctctagcgcgccgaaagagaagaagaacttcgttccaggaattgtcaatccttcaggctgaatttgagaaatgtccagccccaacaaaggagaaaaggattgaattggctgaccgttgccatatgactgaaaaagccattcaaatatggtttcaaaacaaaagacaagcggtcaaaaggcaaagaatcgccacttctaaatcaaccactataatacagacaatatcgccgccatccccacctctggatgtccatgccacaccattggtatccagggttagggttgaggtactccatgatgaagagtcgtcgtcgtcatgttcttcgccattggaaagcacgccaccaagaccccgtcattctttaaataggcgctcatctacacccaacacgaaaagaagccaggctttaactttccacttgaacccacagaagaaaacactgactccggtgaaaacgtctcccaatagcagagttaacaaattgatcaatagtgtagaccattctccatccaaaatcaaacgctacgtaaataactcttcttcttcccccaaaaggaaaagaaagttcgggttcaaaattgtcgatcaacaaccgctaagagaccttgatccaaatgcattccatggttga

SEQ ID NO: 1933 - DNA, 564 bp, Saccharomyces pastorianus
atgtccatagcaagttacgcccaagagttaaagctagccctacatcaatatccaaactttccaagtgagggtattctatttgaagatttcttgcctatcttcagaaatccaggccttttcaagaaactagtggatgctttcaagctgcatttggaagaagcgttcccagaaactaaaatcgactacatcattggtctggaatcccgtgggttcttgtttggcccaactctagccatggctttaggtgtcggtttcgttccagttagaaaggcaggtaaactgcctggtgagtgtgcccaggcctcgtacgaaaaggaatacggtactgacgttttcgaaatgcagaaaaacgcaattccagtaggttccaacgttgttatcgtcgatgacatcatcgccactggtggctccgcagttgctgctggtgaattggttgaccaaattggtgctaacattttggaatacgacttcgtcatggaattggatttcttgaagggtagagataagttgaatgccccagtgttcactctattgaacgctcaacaggaggctttgaagaaatga

SEQ ID NO: 1934 - DNA, 2025 bp, Saccharomyces pastorianus
atggtcacgactccatacacatcttccccaagaagtagtctgaaatcctcaaccacttcgctgcgctccatacgaacgcagtctgaccgtttgggccccaacgagctagagcataagccaactaaatcctggtccttatggggtaatagcgaagaaggagggccaggtccttccaaagaaactcaaggggagggaacccgtgatagtggctgtcaggtagctgcttctgttgtaaagaagggcaacagcttgcacgggaaccaacactcgacgatcataaaagaaactggcaaggttgaggaaggtgagaacaacaagaataacaacgaagtaaccaacgaaacaaatgcgaaagcaagaactactgcaaaaactagaacgtggccattcttttggggccaaagcaaaaaggatccagagccaacgcacaacattcctactgatggggatgctagcaccttatcacgtctagcaaatagcttaaatcctgctcctctaaccaacacttatataccattcaaaccggacgccatactgattaaggaggaaaatgtcaaaacaactaaaaagttgactgatgatataggaaatcaatttcccaacattgtggtaccgagttttgatattttgcctaaacaaacaatatggaacgccattacatcaaccgttcaaaagtggaagaccgaatactgggatagcagacctctacaaaaacaagattcgtcaagggtacgaaaggaggaagaaggggctcaacacccacaggatcagttgaaagaggaaacgaattcagcggcaaaagaggcaaaagatgatgagcttcaccagcataccagagaaactttgtatagagtagacccatggaagaaaatcaatcttttatcggattaccaatccagacctattagagtccttattgtcggtgttcatgggttctttccaacaaaaatcatcagaccgtttattggtgagccgacaggtacgtccaccaagtttgttacagaagctgaggaaatagtgaaagactatttttcccagcacaatgtacctattgaaataaataagattgctctagaaagagaaggggagatctttgacagagtagattttttctatgaagttatgaaacattggagcaaagaaattaataattcggacttcatttattttgtaagtcattcccaaggttgtccagttaccattatgcttttggccaagctgataaaaaatggtataataaaccttgataattcccagtttttcaatgatgaaattcagttttgctcgtcgaaaaaagtcatatcgatcttggctatggcaggaatcaataatggtccattctatggggccgatcaaactttattcgttcgtgcttaccaaaccatcgagaaagactccttgagagagctatttgaatttcagaagttcgattctaagcaatcgcaaagtctcatagaggggctaagaacaattatatcgagtaatgtgaaaattacattcgtggggtctattaatgatcaactggtacccctgtattcatccatatgtcttttcgcgaatcatcctaatatatttcgagcaatttttatagataaaggttcacagacaccagcattcatcactcggatagttaagatagccggttctttattggacttgggttataacgatcatggaattattaaggaaataagcggatctctggcgggcaccttaacaggaggtggtcattccaccatttataacgagaaacaagtctaccacttgggtatcaaatttgcattagaaacaaccgatttgtcagaaatatctcccgttgaatactcaccatataaactgtctgaattaggagctaatccgtatcgattgccatggtgtatgagaggattaatgtacgaatccaataagcatttcgataatgaagaaattaaaatgttattcaaggagtttgaagaatgggaaccggaaaccaaacaattgaaagatataaaaaacagacttaacggtttgaaatatcgactttga

SEQ ID NO: 1935 - DNA, 999 bp, Saccharomyces pastorianus
atgaagtggtacagcgcgagctttattctttggattgttcttatattccaaaagcttcaaatttgttcagcaactgtatccaatagtatagatgatattctacaattgcaagatgagaacggtgtgatatcggtgacagctgaaaactactcaatgctaagccgtgcctttccagattattataatgtcttgtacatcaccatgagaggtacgaatagtaagggcatgggttgtgaattatgctatgattttgagagaagttatcatacagttgccaatgctattcacttgcaggcaccacaatctttgagtttgttttttacagtagacgtcaatgaagtaccacaattggtcagggacttgcagttaaagaacgttcctcaccttgtggtataccctcctgcagaacccagcaaacaagctgattttgaatggaaaacgtcacctttttatcagtacgctttggttccagataatgcaaaggattctttgaaatttggtgatttcttagccaaaatccttaacatctcgataactgttcaccaagacttcaacgtccaggaattcgtctattattttgtcgcatgtatggcactttttattttcgttaagaaggtgattcttccaaaaataactaataaatggaaattcttctgtatgatattatcattcggtttgctttttccaagtatcactggttacaaattcacagaaatgaatagaattccctttattgcgcgtgatgagaagaatcgcataatgtactttagtggcggttcaggatggcaatttggtatagaaatcttttctgtatcgtcaatgtatatcgtgatgtcctcattatgtgtactgttaatttgcctgcccatgacttcacgtataagcgaaaagatgaggggactactggcgccattcttagcctgtgttttgttctatttcttttcgtatttcattagttgctatttggtcaagaatccagaatatccaattattttttga

SEQ ID NO: 1936 - DNA, 1182 bp, Saccharomyces pastorianus
atggtgtcaaaggatcaaacgtcttttaacaaaagatggacgttgggtctcctgatgttgggcttagtcattgttttatgggttctatcgtctttcctgataagcttgatcttcgaggacgactcctacaggaagccgttcttcatcacgtatatcaataccgccgcctttatcttttatctgttccctactgcaaaggcgatcatggggaactacaaggccacaggacacgcaaacgtccatcgcgagttgatcatggaggaggaaggcgctgatggcgatgatagcctcacagtcaacgcgaacagccccttactgacgaaccttgaagcaggtacgcagccaactcagaagccgaggctcacgctctatgaaacaattaaactaagcgccgagttctgtatactttggttcacagccaacctcgtgaccaatgcttcgctagcattcacatcagtggcatctcagacgattctttccacgacctcttcgttcttcactctctttataggtgccatctgccatgtcgaatcactgagcaaatccaaaatactggggtctttcatttcatttatcggtatagtcatagtcacgaaatcagactctcgtcatcgctacaagactggtattgcggatgtcagcggcgatgagaacgacgccgtacggcttttactgggcaacttgttagcgcttgcgggtgctgttctttacggtgtctacagtacgttgttgaaaagagaagttggggacgagtctcgtgtcaacatgaagattttctttggctttgtcggcctctttaacctgctctttctatggccatcacttatcgtgctggattttttcgggtgggaaccgttcgagctgcccaaagaccctaaagttatcataatcatccttgtcaactgtctcatcacatttgtcagcgatttctgttgggcaaaggctatgctgctgaccagtcccttgactgtcaccgtcggattgagtataaccataccattggcaatgtttggtgacgtactattcaagcacaaaaccatgtctgtagtttatttattcggtgctaccctcattctgggttcatttttcatcattaacaagagctcagaagaagaacattttgaaaactcggtaacagcaagcacttatgaggcaatggaacaaccagtgacaaataactga

SEQ ID NO: 1937 - DNA, 1041 bp, Saccharomyces pastorianus
atgaatgaaccacaaggtcctctggacatcattcccaaagtgaactatccgcccatactcactatagccaactacttctctacaaagcaaatgattgaccaagtcatcagtgaagaccaagactacgtgacgtggaaactgcaaagcttgagaactggtggcgtaccaatggacagccaattaaacaaatacccgaaatacaaatacaagaaagccaagataagccagcaagatgcggactccatcaataaggttccagaaaatctaatcttcccacaggacatcttgcaaacgcaagcgaaaaataacaatcgcgaaaacgccaacggcatcgatgatagcgacgaaaggctctcacaggacgaacagttcaaacttttggtgaccaatctagataaagatcaaaccaatcgcttcgaggttttccatagaacatccttaaacaaaacccaggtgaaaaaactggccggcacagttactaaccaaaccataagtgaaaacattcgtgtcctcttgcaagccataggaaagatatatgccggtgagataattgaactggccatggcagtgaaaaataaatggctgacaagccaaatgtgcatagagtttgacaagaggactaaaataggctataagttgaaaaagtacctgaaaaaattgacttttgctatcatagagaaccagcaatacaaacaagactaccaatccgatagtgtgcccgaagacgagcccgatgtttactttgacgatgaggaagtggacaagcatgaaaccacattgggtaactcgttgttgcagtccaaatccctacagcagtcagaccaccattcccaggacttgaagctacaacttattgaacaatacaacaagctcgttattcagttcaataagctggacgtgagcatcgaaaaatacaacaacagccccatcctgcccgagcacatccgtgaagcgtggaggctgtaccgtctacagtctgacactctgcccaatgcctactggaggacccaaggcgaagggcagggctctatgttcaggtag

SEQ ID NO: 1938 - DNA, 1791 bp, Saccharomyces pastorianus
atgccagcagtcagtcacgagggtaacgagtttcacctctcgcatacggaggaggacaaattgaacgagttccaggtcatcacggatttccccccagatgacttgccggacgtggtgaagctgttaaggaaccacggttggcagctggagcccgcattgagcaggtatttcgacggggaatggagggatggctccgaggacgggatgggagagcccactgccacagccacgcccattcccacgcccatggcagaggagttggcgtggactccgcccgtgttgggtcccaggcctctatcatttacagctgcattgcccgtagtcagaccattgccagcgagcttccgtcatgattttagaaccattgggctgaacggacgctccaataccgtatggtccatgttcgagtccttcagttacaacggtaacccctttctttttgttttgctgctgatcccgcggattatcaacaggctatcagccaccatattcacgtttctttgcactctgttgtctttgcattcgattggcagtgaaggcaatgcaggcaagcccaggatcgccaaagtccctaaagcgcccacaagagaaacgcaaatccccatttctgaaatactgggcgacactaaggacgccgacgaattttgccagttaaaaagcttcgatccggatgtttcctttaatgaggtactacgcattgcgaaggaggagttcaagttcgtactgctcgtcctagtgggcaatacgtgcgacgacgaccacgacggcgacactaccgccacggatgttaactccaagctactattgaaaaaaattctgctgaacaaaaagactttacagtacctgcacaagatcgatgatgacttggtgatatacctgaagtgcgtccaggagctggaaccttggttaattgctcagcaattggaggtcagaaacaccccggagatctttctcattgccaacgtctccaacaagatttcccattcagagactgtgcccttgcaaaggctctctattcttggcaaactgaagattaactcgctaaacaagtttctgcagtcgttgaccaatgtggtggaaagatacagcccagagttgattgttaacagaactgaaatgaatgagctacgcgtgtcaagagaaatcaaaaaattacaagaggacgcgtatatgaaatcattagaaatggacagactcaaagccctggagaaggaaaaaagcttgaagctggtccaagatttgaaattggacgcaactagccaccaactaaactggctgaaggcctgcattgacgaactccagcctttagatacaacagcaaagcagacgactctgcagttcagaacctccagcggcaaaaggttcgttaagaagtttccctccatgaccacgctttaccaaatctaccaatccatcgggtgtcacatgtacctcgaagtgtactctagtgaccccgcacaatgggccagcgccctccaggaaaagatcagccagttggccgcagacgctgccgtgctctgcttcaaggacgagcagcccgatacaagcaccgcagctaccattgaagggcttggcgacatcatcagtaacgagcttgcttccttcgatcttgaacagggcaaactccaattcgacttcgaactggtgtcgccctaccccaagtacaccgtgcatcccgacgaaaagctttcggtggaccgggtgcctcaactatggcccaacggcagtcttctagttgaagctctcgttgaagaagaagatgatgatgatgatgctgacgacgacgaataa

SEQ ID NO: 1939 - DNA, 636 bp, Saccharomyces pastorianus
atgcaggtgttacaatttttgttggcggctttggtctccttggtggtggccgtacagggtttgcatttcgacattgcagcatctacaagcccagagttggtttgtattcgtgatttcgtcaccgaaggccaattggttgtcgtggacatccactccgatggttctgttggggatgggcagaaactgaaccttttcgttcgtgattctgttggaaacgagtaccgcagaaagagggacttcgctggtgaagtccgtgttgccttcactgccccatcctccacagcatttgacgtttgtttggaaaacgaggctcaataccgtggccgttctttgagcagggctattgaactagacatcgagagtggtgccgaagctcgtgattggaacaggatcagcgctaatgaaaaattgaagcctatagaagtcgagctacgtagagtggaagaaatcaccgacgaaatcgttgacgaattggcctacttgaaaaacagagaagaaagattaagggacactaatgaatccactaacagaagagtaagaaatttctccatcttggttatcattgtcttggcatcgctaggtgcttggcaactcaattatttgaaaaactacttcaaaacaaaacatatcatctaa

SEQ ID NO: 1940 - DNA, 534 bp, Saccharomyces pastorianus
atgagcaagtccagtagtgttagctataaaagagtagagctgttcgaaaacccgaaagtacccagcgaagtggaagacgaaatactggaaaaatatgcggaatctagtttggatcacgatatgactgttaatgaactaccgatatttttccaggacttacaactggaacccacaatttgcaaacttgtgaggaacgaagaagttgtcattgagggcactgaggtgatagattttgcgaaactgatacgatgtacatgccaattactgatactaatgaataacctaacagtgatagatgatatgtggtcgatgctaattaggagttgcggcagagatgtcgatttcccccaagtagcgttgagagatcacgtaataagtgtaaaagacctacagaaaatttccaatctcatcgggactgaccagagcgaagggaccattgaaatgattagctctgcgactgacgggaagaggcttttcatgacgtatttagactttgcttgtgtattgggcaaattaggatacttgaagatgtaa

SEQ ID NO: 1941 - DNA, 108 bp, Saccharomyces pastorianus
atgctacgctccattcttatcgtcttacgaagcatgcgttttatgcgaagactggtgaagaatctccatctcttgcttccgataacttattcgcttccttttatatag

SEQ ID NO: 1942 - DNA, 1920 bp, Saccharomyces pastorianus
atgagtgtttccgctgccaagaggtcgttggacctcgtttcttcaaattcgctagcgcaatccgacgattcggtgtctcgccatgacgagatggagaatgaccacacacatgatgatatgcatgataatgatgacagcgatcaaccaaggaggaagggcagtaagacgagcaagaagcaagatttagacccagaaaccaagttgaagagaactgctcagaatagagctgcccagagagcctttagagagcggaaggagcgaaagatgaaggagttggagaagaaggtgcacagtttagagagtattcagcaagaaaatgaagtggaggccactttcttaagggaccagctggtcacgcttgttggcgaactgaaaaaatatagaccagaaacaagaaacgactcaaaagtccttgaatatcttgcaaggcgagatcctaatttacactcaccaaatttcaacactaaaaataacagcgagtcaattgtaacccctaacgatgatatacagaaaaacgtcaaacaaaaaatgaatttcaattttcagtatccgcttgataatgatgataatgacgctaaaaatatggaaaagcaattaccgtcgccaaatgatccgaaccattcagcccgcgtgcccatagcgcaaacgcaaaagaaattaagcgatgcgacagattcctcatcggctaccttggactccttctcaaataataacgatgctctgaatattaccccaaactcctcttcttcgatcgattggctagataatgtgatgtatacgaatagacttgcaacaggcggtgaccagaaaaatgcgagtaatgaaagcaagagtaaacccaaaggcgttgacagtaacatgttttccaatgattttaactttgagaatcagttcgatgaacaagtttcggaattttgttcgaaaatgaaccaagcttgtggtacgaagcagtgcccgattcccaaaaaaccagtagttcaattagacaaagaggtttttacttcgtcttccgtattaagtgcaaattctccggttttaacaaatacttgggattctcattccaatgttgccaccaacacccctgctattactactaatggaagttcgttttcaagctttggtcagccagggttcgatctcactactaatctttatgctatcaatgataatcacactgacaacagtgacaacaataaaactaataattacaacgacatacttccattcatatccgaatcccccttcgatatgaatcaagtgactaattttttcagtccaggatcaaacaacaccactaacgcaaatattactaataatcataacccaagtctccagcaaagtactaaagacgacataccttttatcaacacaagtctggctttcccagacgataatccaactaatattcaattacagcctttgtcacaatcacaacatcagaacaagttcgattatgacatgttcttcagggattcttcaaaggaaggtaacaatttatttgaagaattcttagaagatgatgatgatgataatgatgatgacgataatgatggtgaagccgtgaatgcatcggatgatgaatcaaaccttatcaagaacaaattaattaacgaagaaccacaactgcaaaatcaatgtcccctatcaacaccaaaaaatggaagtggagctctaaagaaccaaaatggcagtaatagagaggacgttaacgaaaacgatagcgatgttgttccatcgaaggaaggatctttactaaggtgttcggaaatttgggatagaataacgacacatccaaaatactctgatattgacgtggacggtttatgttctgaactgatggcaaaggcaaagtgttccgaaagaggggtcgtcatcaatgcagaagacgttcagcaggctttaaataagcatatgaactaa

SEQ ID NO: 1943 - DNA, 2328 bp, Saccharomyces pastorianus
atgcaaaagtctgttagagttggtgactattttgataatgatgataatggtttatggtcgtggtatctaacgaatctaagattgggtgatttcgaggaactcataggtaatcaactaaagtatactttattaaaaagatttctaaatagtcatttttatggcgataacaacacttcgattagaccaaacaagaagattttattggtttccatacctgagaatgttcatgaagatatttccatattagaaatttttcttaaagattacttccatctagaaaagttagaacatattcaaatttcaaaattgactcactctcattgttataatcatgaaaaccactacttattaacggactatcttaacaatttccaagatccctcttttttagaatttgcaagtacgagttggcaagttcaaaaaaatccgaagtcttcgaataataacaataataacagacatttaatacatgcttccacagcatcttcatcaaagccatcaaatgcgcaattaaaaacaaacactttagataatcaattgttagatacaaatacacagaattcaatgactgcacgaaccaatacaaacacaaagactttaacatatacagatacggctgattcaagtctcacgccagctgaatgtaacaacaaagacgataacaatatgccccagaataatgaaaatgaaaatgaaaatgaagaagaggatgcaggggacgacgcagccagttcaatagtactgaacttttcccatccacggacactagcgtcaaaggcaaataaagtaccaaaaattttcccatcgtatactaatgaggattataacccatcgcattccgagatagtatcgatagatagttttgctggcgaagacgtatcatcaacatatcccggacaagatctgagtttaaccacggcaaggcgtgaggataaagacgatgaagaccagaactcaaatggctccgatgatgaaagctttgaagaaacaagctcgagtgtagaaagttctgttagctacaccaactgcagtagtagcagtgacagcagcattgttcgctatcattttagcaccggtagtcgtggtagtttgggacgtggagatgttgatcataccaatgctacctatatttctgaattatcaagcataaccagctcaatagaaaacgtaactaattccactactccagaggaagaagaccatttggttggagataattatgaagctcaagattatttatcgggagaggaagatgaggaggaggttgatgatgatgaggatatctcttcttcagactactctgtattatccattctaccatcgatctcaatctgcgattcgttaggatactttaggctagtcttgcaatctattttaatccaaaatccagatacgaaggagattttcaccgcaattagacaatcaaataatgaacctacagtggcaagcgttactgatgattggctattgtacgattcaaaattttcgatgaataatttacaaattttaacacttcaagacttgctcgatatcaagagatcattccccaagattctgctctatacaatggttatcgtaacagattcaggtccacaacaaatagaagaagagcataaaaatttaactcaacaacacaacgatgtagatgtaacgaaggaagaacctctaaattcagaattatcattatctaacgacccacaacaatatttcccaactacattcgatgacgactatgacgaatacatcgatgatgacgatagtggtgacgatgcttcattgtcagaacagtcaggtccacaaatgtatttgccaactagaatggcatctaacgtcactacagcccatcgttctataagaactgttaatagtatcggagagtgggcgttcaatagacacaattctgtcactaagattaataaaagtaacagtaacgaatcagataatctaaaggaatacggggataaaatttcagcggttgatccatatccaatgacccaattgtcaaactctaacacagttacgtcaaattttagtcatttgttaaagaataaaaattcttacaaacgtaaccctaaaggtaacaatgaaatcaattctaggaacgaactaaaaaaaatcaaaagttccattaatgctatgagtgcagtggaaagatccaaaagtttaccattacccactttattaaagtctttaagtggtatagacaatcataccaatggtaataataaggatacaaaacgttggaaatttaagatgaccaggtttaggaataataaaagcaatggctctacagatatggataaatctcaacgttgtgccatcatgtaa

SEQ ID NO: 1944 - DNA, 627 bp, Saccharomyces pastorianus
atgtcttctagaaaaaagaatattctgaaagtgatcatcttaggtgactctggcgtcgggaagacctccttaatgcatcgttatgtcaatgataagtattctcaacagtataaagcaacaattggagcagattttttaacaaaggaagtgacagttgatggtgataaagtggccactatgcaagtttgggatactgctggacaggaacgtttccaatcactgggtgttgccttctatagaggcgcagattgttgcgttttagtctacgatgtgaccaatgccagctcgtttgaaaacatcaagtcttggcgggatgaatttttagtgcatgccaatgtaaattcaccagaaacatttccatttgtcatactgggaaacaaaattgatgctgaggaatccaaaaaagttgtatcagaaaagtctgctcaagaacttgccaagtcattgggagatattcctttgttcttgaccagtgccaaaaacgccattaacgtggataccgcctttgaagaaattgcaagaagcgccctacaacaaaatcaagctgacacagaagcttttgaagatgactataatgatgccattaatatccgcctcgatggagagaataattcttgtagctgttaa

SEQ ID NO: 1945 - DNA, 2118 bp, Saccharomyces pastorianus
atgtcgttgggtcctcttaaagctatcaatgacaaacaattgaatacccgttctaaactagttcacaccccaattaaagggaatgctccagacctcgcaggcaaagaaaatcacttaaagcaaacaaagaggctggatccaaataatgacaatcatcaccaaccagcacaaaaaaagaagagagagaagttatctgcactatgcaaaaccccaccttcactaattaaaacaagaggtaaggactaccatagaggtcattttcttggtgaaggtggctttgctcgttgtttccaaatcaaagatgactctggtgaaatattcgctgccaaaacagttgctaaagcttcaataaaatcggaaaagacaaggaagaaacttttatcagagattcaaattcataaaagtatggctcatcctaatatcgttcaattcgttgattgttttgaagatgatagcaatgtttatattttattggaaatatgccccaatgggtcattaatggaactattgaagagaagaaaagttttaacagaaccagaagttagatttttcaccacacaaatatgtggtgcaatcaaatatatgcattcacgaagagttatacatagagatttaaagcttggtaatatcttcttcgattcaaattacaatttaaagatcggtgatttcggtttagcagctgtgttggcaaacgaaagtgaacgtaaatatactatatgtggtacacctaactacattgctccagaagtgctaatggggaaacattccggacattcatttgaagtagatatctggtctttaggtgttatgctttatgctttgttgattggtaagcctccattccaagcaagagacgtaaacactatttatgaaaggattaaatgtcgtgatttttcttttcccaaagataagccaatttcagacgaaggtaaaattttaataagagatattttatctttagatccaatagaaaggccctctttgacagaaatcatggattacgtatggtttagaggaacttttccaccatccataccttcaacagttatgtccgaggcatcgaatttcgacaatattccagaagagcaatcactaattaatttcaaagactgtatggaaaaatctctattattggaagccatgagtagcgataaaagccaacgtcaaaagagggactatatatcgtcaatcaaatctagtattgacaaattagaagaatatcaacaaaatagaccatttttacctcactccttatcccctggcgggaccaaacaaaaatataaagaagttgttgatatagaagctcaaagaagattgaatgatttggcccgtgaagcaagaatacgcagagcacaacaagccgttctaagaaaagagttaatagccacatcgactaatgtgattaaatcagaaatctcgctaagaatactagccagtgagtgccatcttaccttaaatggtattgtagaggcagaagctcaatacaaaatgggaggtcttccgaaatcaagactgcccaaaatcaaacatccaatgatagttaccaaatgggttgactactccaacaaacacggtttttcttatcagttatcaacggaggatattggcgtcttattcaataacggtacgacagtcctccgattggcagatgcggaagaattctggtatatcagttatgatgatagagaaggttgggtagcaagccactatttactgagtgaaaaaccacgcgagctaagcagacatttagaagtagtcgatttctttgccaaatacatgaaggctaatttaagtcgtgtttccacttttggtagagaagaatatcataaagacgacgtgtttttgagaagatatacaaggtacaaaccgttcgtcatgtttgaattaagtgatggtacttttcaatttaactttaaagatcatcacaaaatggcaatttccgatggagggaaattagtcacctacatctctccatctcatgagagcactacatatcctttggttgaagtgttgaaatatggtgaaattccaggatatcccgaaagtaattttagagaaaagttaacattaataaaggaaggtttgaagcaaaaatctacaattgttaccgtagactga

SEQ ID NO: 1946 - DNA, 465 bp, Saccharomyces pastorianus
atggcgcgttcaagaggatcatctagatctatgtctagaccaagacaaacccaaaccagatccgcctccacgatggcggccccagctcacccacaacagcaaccaaatgcttactcacaccctcctgctacgagttcgcagacaaagcaaccaggtatgtttgcgcaaatggcctctactgccgccggtgttgccgttggtagtaccatcggccacactctaggtgccggtattacggggatgttttccggatccggatccgaaaccgctcctgttgagcaacaacaacaaaacatgagcaacgcctcaggtcagacccagatggaccaacagatgggaagaacctgcgagttagacgcaagaaactttacacgttgtttggatgaaaataatggaaactttcaaatttgtgatttttacttgcagcaactaaaagcctgccaggaagctgcacgtcagtattaa

SEQ ID NO: 1947 - DNA, 612 bp, Saccharomyces pastorianus
atgtcgttgtctttgttcagcaagtttgttttacagaaatcaccaggcagaccgacgctggggctaggacggttcgtatctttgccgtatacttcattgcttaaacggcccgatgctcccagtttatatgcacatagatatgtacatagtacacaaacgaaaagccatttaaactttatattaaacaataatgatatgatttctttccaaaaatttacagtgaaaatactaaaggagcagtgcaaatcaagggggttaaagttatctggtcgcaagtccgatctattacaaagacttatcacatatgattcccgttcacatatgagaagtaacgcaaaaccacaaaatgaaccccccaggagtctatttgtagacaaaccaataaaagttaatagtacattgctcagtgaaaaaatccctaaaataattgacaaaaagcatttctccatgcagaaagtatctaatgtccagtctccttgcgaagttcatcaacattttcaggatgcaaacttacaattaagagataggatttttttaataggatttgttatggtatcgtgtctttggtggaacctcgaagctcaggaatctaaacctaccattgatcactaa

SEQ ID NO: 1948 - DNA, 1536 bp, Saccharomyces pastorianus
atggacaactacgaagatgctgacccctggaatgccaactcgaatgcgtggaaaaaggacgatgattccattgcccctaccacgaatggtgatcctgctttcagaaggatctccagtgagtttaacaccttgaatttgtcaacatctctagacacaaacgacgaagatgacggatttttgccggctaatgatgtactagaagaaagcatatgggatgataatagtcatgctctaaatggagccggcacaaaccaaacatccacgataagcgctaatgaaacggttataaaccagaatgatcccgagcatttagatcgagacgataccgacaatgacctattcgattggaccagcaagatcagaaagacgtatagacctttgaatgccgatattattatcattgaagagatccctgagagggagggtttactatttaagcacgctaactatttagtaaaacatttaatcactctaccaagtagctcgccttctgaagatcgtactgtagtaagaagatattccgattttctttggctgagagaaattttactaaaaagatatccttttagaatgattcctgagctgcctccaaaaagaattggatcacaaaacgcagaccagatttttttgaagaaaagaagaataggactgtcaagatttatcaatttagtaatgaagcatcctaaattaaataatgatgatttagtgttaacatttttaaccgtacgcactgacttaacaagttggagaaaacaagcaacttacgacacttcaaatgaatttactgataaaaagatatcttcagaattcatgaaaatgtggaaaaaagagtttgccgaacaatggaatcaagcggcatcttgcattgatacctcgatggaattatggtacagaatcacactgctcttagaaagacacgaaaaaaggacaatgcaaatggttcacgaaagaaacttttttgagacactagtagataactttagcgaagtaactccaaagctgtatccagtgcagcaaaacagtaccatattgggtattaataatagctttggtataattaaaaaacatctagaaactacgagcgacatctgcaaacaagaaatggaagaagtatcagggatgttgtcccctaaattcagaatctttactgacatcttactttctttgagaagtttgtttgaaagatataaaattatggccgcaaataacgtagttcaattacaaagacatgttgaagtaaacaaagagaagttagaatcaatgaaaggaaagccagatcttagcggagcagaatatgatagagtaagaaagattatacagaaagacagaagaagcataatagagcaatctaatagagcctggctgattaggcagtgtattttggaggaatttacgatcttccaagaaactcaattcttgataacacgtgccttccaagactgggcgaaattgaattctaactatgccggtcttaaactcaatgagtgggaaaagttagttaaaaacactttggatatgcctatttctcgtgagtaa

SEQ ID NO: 1949 - DNA, 1170 bp, Saccharomyces pastorianus
atggtcaattcgccgaaaagaccatctgatggcactgaagaaccagcatcgaatagacctaaatataatcaatccgttcctgagacaaaacctgcatttaatctatctccaggtaaaactagtaatttaccgaatagttccccatcacctactcgaacaaagccatctacagattcatctgccccacgcaataacgtaatgggtagaatggaggattcatcacttccaaaaaatacaccacctaccactaatttgaaaatggaaagtaatacagatacgaaaaaaacatcatcaagccctgttggtttagccttaccaaagaaagatgacaagaagaaaaacaaagctacgggtaaagcagattctaaggacagtactggcaaatctgctctctcagggcaaaatgctcagcaacactcggatccaaataaaatgcaagatgttcttttttctgcaggtgtcgacatcagagaggaagaagctcttttaaattcatctattagcgcctctaaatctcaagtacaaataaataacgtaagggttcctaaacacttaccatttctccaccccgaacaagtttctacctatatgaggaaagttggaaaagaacagaactttaacttaacctttacaaaaaatccagaaattctgaacatgatgtcaagcgcgtgcgaaaactatatgaaagatattctaacaaacgccattgtgatctcccgacatagaagaaaggctgtgaagataaactctggtagaagaagtgaggtttctatggctctgagagcagttgcactaatccaaaagaaagaagaagaaaggcgtgtaaaaaaaagaattgcgttgggccttgaaaaggaggattatgagaataagattgactcggaagaaactttacacagagcgtcaaatgtcacagccgggctaagagcaggcagtaaaaaacaatatggatggctaacttcgtcagtgaataaaccgacatctctaggagcgaaatcatcgggtaaagtggcctctgatattgctgctagaggggaaagcgggttgaaggttagggaagctagagaagaacctggaattgtgatgagggatttactatttgctctggaaaacagaaaaaatggtgtccagactatcatctctaaaggttatgctaaaatcagggactaa

SEQ ID NO: 1950 - DNA, 540 bp, Saccharomyces pastorianus
atggttaaagtatacgttcacgacaacaagagcggcatcgattaccgcgaatctcacaattccggcacggagttttccctagatgagctagcgaaattgggagtgatctataaatattgtgcaaccgaagccgacgtgaacgagattgcaaaagagagacaatacagaaacagagacgtggtcgatattcaccaaggctctttcaagaacgaagcggatttcaacgaaaaactagccatgttttacaaagagcatttgcacgaagacgaagaaattaggtactgtctggaaggcactgggtattttgacgtcagagatgcttccacacctgaaaactgggtcaggtgccgggtagagccgggagatttactaattcttccgccgggtatctaccaccgtttcacgttgacgagtactaatcatatcaaggctttgaggctgttcaaagacgaacccaagtggcaggcgattaacaggtctacccaggcagacgctttgcccgttcgcaagcactatgtatcccgaattaatcagtactaa

SEQ ID NO: 1951 - DNA, 3843 bp, Saccharomyces pastorianus
atgagtgaagccaaagaagaagctagaaacgccaccgttaaagtgaccgttaaacttccaaaagaggatagccactctaacaataccaaacacgccaagaaggcttcaatttccaagaacaatgacatatcctttgaaattagcagaaaatctaaaattcaaacaattttggatgtattggctatgattcctagctccaaatacttaacaaacgttagtttaagagcaattgaagatggctcacagctaagtgaggaagtttctataaaggatatcgtaggtgaaaaaagcgacataaaacttcagttagtgatgaagccatatagtgcaagagaagctttgaaacatgtaattacagttcgcgacttcatagggtttgcccaagagacctcagatggtttgtctgaatttgccatttccaccggctcaaacttttcttctctaccgctaggtccaattaaggaagcatctaagcaagaagagaagaaagatgaaggaaatccagagggaaaaaaaagtacctttaaaaatgtttctgaaaacgaaaagcttgagttcaacacaatggtccatgaagttttctccagttttaagagttcttcagttaacgaacttctaacctctgaatccaacatcatcaccccgtgtgttagatctttgagttttgcagcttataatcctgtacctccattttatagaaccaaaggccatctattctatctgcaaattgtcactttagaaggtgaaaacttctatatcactgcaattccatcaggtttctacgtcaatggatctaattcaacaaaattcgatccttctccaaaggaaaataccgaggagaacgtcaacccatccttggttcactacagtttgtttgatttgatttcatctcgttcaaaaaaattcgtttctcatgttcaagcgtttgaaaagagattatcaactttggattccacaagctacgtgagaccaaacaatacgtttttacacaaaccgtggttcgtttcttctttaccagcgaatagcccggattatctaagattacaaacacctgccttggacactaccccagaaaggaactttaacgatgaattccaagctattaaagatttggcaacatcaactttacaggaccgtattgaaatggaaagattattcgccaaggtcgttcacgaattctctgttaccgcagcaaagggagcaatgtcgattttctatagcgacttcattgcaatgaacccagaatctccaattcaagatcaaatcttcttgaaagacaacatattttattcctttgtttctgatgttagtggcaattttaaaggtaagggtggcgatgaagctgctatcgctgcttctaaccaggatttgaagacaatcaatattttgaaccgtctacatatgcatgaagttcgttacctattaacaaccgtcgttgaatttgccggcagaagaatcttagctcaaactccagtacctggactattagctaccatgggtaacaaaattgtcaaagacgtcgaaactggtgaggaagttaccgaggattttgtcaatgatatcaacgtcaaatacggccttgatgaaggtttagaaaaatttgtttatgatgctgacttcgaagctgtcttggaaaaaaaatttgtcaaggccttccatttgaaaaagcacaaggtcgatgacaccgaattggtgttttcctctcaattaaagggtatcgtcggattcgacaagagacgctacattttggatttagccaacacataccccttggatattaactttgccagagaaaattttgacgaattcaaagcagatgatgtcaacaaccgttatccacacagacaaacattgttacgtccggaactagttgaaaaatggtggaatgaaaagattgagaaagaaggtattgaatttgaaaaagcctatgatgaaaacagattcagttacaaccctgatgcttaccaaatcgaaggtgttgaggaccctaccgttgatgaaatatcaacgtatttacaaaaggatgttatccctagcgtcattcaggattatttatccggtaatttgagcaccccttacaatggcgagcatttagccgacactttacataaaaatggtgtcaatattcgttatttgggtaaaatcattgaactttctcaaaaagaattagagtctcaaactgccaaatacgaagagaacttgaaaactgttgaacaagacaacaaagaatatgaagaatgggaaaagtcttatttgcaaaagattgaagccatgattaaggaaagacaggcaaagatcaacaagttagtacaggaaggtaaggatgttcctaaggaactaactgaagacctgaaattgaacgatgaagaaatcaaaaagccaactgatgggaaacctgtcgtcgttgcctatgatgaattattgccattgataaaaatcgccgaattagaaattgtttcgcgttctttgaaacacgttttgaaggacttaagtaaagatgtcccaatcgtattggtcccatctttagttgcttacgtcttcaatatgttggtcggtaccaactacaatgctaatccaaagccagaacctgtcgatgagttttatccagtcgataagtattcatttgctgaatggactcgttccgaattgttggaatctatttctaaacaagctgctttacgattccgtcatcatttaccatctggttggattgaaacttatatggaaaatccctttgccttaatcagaagcgtttcttacaaatttggtgttcaattactgaacaaggaatactttttcactaaagaacaattggaaagctacaagcaaagtttagacaagaaaattagaaacaaatacgttgaaccagtagccaccttcagtttaaacgacctgactatcatcccacgtgttaagttatcagagtatacttcttcagtcagtgaggaattttgggctcaaggtgcctcaatgataaacgaagacaaacaaactgctttgactttgcttgctcaatccattacagtcttagaagatgttaataacattttacaccctactgttgctgaaaaatacttatcgttatctgccatctacaataagttagcactatacccagaagccattgccttttgtcgtaaagcatgtaccatttatgaaagagttagcggtatcgattcttttgaaatgatgagagctttaactaatttggccgttctggaattttctaacgaaagtccgtataacgctgctgttatttataacaggctcgctgagattctaaaagtttatcaattacccaagattcatcatccagctccaacaagtattttcaaccatttagaacaactagctctgggtgttcaagatactaaattggccattgaagttttgggacaactaagttcatatgttgttgaactagaaggcaaggaatcattagcatatggttatactgaatcacgcctgggaaatttgtttgctgcgttaaaggatttccatcgtgctctagaacacatcactgtaactcaggggatctttaccaaacagttaggtatgaatcatacacattcagcacaatcaagacaatgggtcaatggtttgaactcattgatagtggatttgaaacaaaaaaaacaattagcacaggaccaaacgtcagcagctggaccaaagcctgctaacacagccactcagaagaaaaacaatcgtcaaaagaaagatgatgtcaaacctgaactagccgacaagtctgtggatgagttgttaacatttattgaaggcgactcttctaactctgcaaataacaaaagcaagaataagaagaagcacggtaagaaatag

SEQ ID NO: 1952 - DNA, 1560 bp, Saccharomyces pastorianus
atggtcgctataatacctcatgcttccttcattacaactgatctagtccggaaaacaaagggaagccaaataccatccaaggagggtcgtaagatcaatatgaggactcatgaagctgacctgagggagaatgctcgagaacttgagtggttttatccgaattttgttcagatagttatactgttcggcactttttattatggtattgaaaggcttcagccgtggtctacagatgtcactggcacgtcttataaaaaaatctttgtaaacgcttttgtggtggggttgataatgattggggtggtcttaatcaaatattggcaacacggctccagaagcatacccaagttcgacaccgtttacagtttttatttgcctttcatgatttcattattgtttgatacaccctctacaacgataaacaccatattgatcctttcggtaatgaattcctataaatgggacgttcaatttttggtgatattttcgcagttcagcctcatatatttcaattttgagactggtgacagattagaaaaaattattggcgttataataaactctttactgtcgtcgattctgaaacatatcgggcaattgaaaagtttggataatattgactctaatctttttagtatcctattgacgaacatactatatgtttctgaagcgaattccatacattttaggattttgaagggcattatcctcgccctgatgactacaatctcgaccaattatattctcaaaaaaatattacacgttaagccatttatgcagtcaatattgttcgctgttgggcttcctgttctttcaaagacattcattcatctagaagatggacaagatccgttatcatggctggtagggtatgtcgtagaatctaccactcgtcaaaagattttgtttgcttggttctctatactactgctatccgtaccaagtattttgatcgaaaaggacagtctatcgttaaatacctcccgaaaagtgtggcacttcattatattcttacttatagtgccatcattccaaatagattcaaattttgtgaaaattgcattgtctggaacaataccagtcttcttatcagttgaatatataaggtttcaaaacctaccgcctctaggatctctaattgaactacaacttagaaggtttgccgatgccagagaccatagtgggcccctgatcatatcctatctttatttattatttggaatatcgatacctttgttggtgaatgactcgcccatgggattaataggtttgggaattggcgattctctggcatctattatcggtaaaagatatggtcaaattcgttggcgaggtacccaaaagactatagagggaactcttgcgttcaccataacaagttttattgtttgtttggtattactttactttgataaagcaaccgtgttcagtcatttaaccgttttacaattgctttgtgtttgtacattaagcggggtattggaaggaaatagtgtgctaaatgataatattttgatacctgcatttatgatgatttgtgaaaaattgtttactctttga

SEQ ID NO: 1953 - DNA, 1557 bp, Saccharomyces pastorianus
atgccttctgaaaactccgtctcgatctataagctggatcaattggagtatcaatatcactacttgacgaactcattagagaaatttgaaccaagatatccaaaaactgcaaaactatacaattgtataggtagaaaaaacaagaaaaaagtggacaagctattgggctctttagaattaaaaactttaactgaagaactaggcgaaagttactcaaaactactaaataataagattcattactacgagacgcatctgtcaaaatgtataaaagagcaagtccaaaaactgtctcaaaagacttcaagtagaccgaaaaattctgaaaaaaaaaagacagcaactatagatttggagaaaatgcttgattcaaagatttcattagatgatttggcgctatacatgacgaggttcaagctgattaaaattttgaatcaaaggatcaaacaaaaaagcaaaaaaactgaagatgacacaaatgctaaaacatggttagataacaatgactacactgattacatcaacgataaaacaagtaaatggaacccaagtcatatttggaatgaagtcatcacaaaactaccaagctgtgaaaagtcaaatgcattaatcggtcaaaacaaaactattcaggatttaatcgaatccttcgatttgagtatttgtttcatttttggatttgacgtgagtgttatgaaagctaagaagtatgaagcagacgagaaaccactcaaatctactccactgcctaccgagattgagtataatgacgatgatgaaaacaacgccaacgataagacttcctatgtgactaaggaaagaaataaaagcaatatggaagtgacgtcagatgacgaagacctgttggtaaagcaatacgagggcatgctaggtaattcagatgaagaagaagaaggtagtggatacttgaatcctaatatcaattacgatgaagtgacagacgaagaacctagtggagaatcatccgatgaagagggtgattacgaacaagatagcggtgatgaagaaaatcaaccgaagaggaagaaggccaaggtacataacttgcctgaactgatggctggttattatagtggggatgatagtgaagaagaaagcagtgacaataatttgaacgagaatgataaagggaagaaaaagaacggtaaaacatccgatgatcgtacggctagagaacaaatgtcaaacgagccaaagaggaaaaacagacgtggtcaaagggcaagaagaaaaatctgggagaaaaaatacggctctgaggctaagcatgtgcaaaaagaattagagaaagaaatggaagagaggaaacaaagacaaattgattacgaagctagagtcgctaaacgtgaagctcaagcggaactatacgcttctagggaaaaagaacgcgaacgtgggcgtactgaagtgacctacaagaaagaaaaagaaccaactgccactggggaagagcatccttcttgggttgctaagagactagccgaagaaaagttacaaaaagctaaatttgaaggtaaaaagattaaatttgattga

SEQ ID NO: 1954 - DNA, 1617 bp, Saccharomyces pastorianus
atgagctctgtcgctgaaaacataatacatcaggccactaataattctacattacaccaattggctaagggtgggtcctccttcggtgtcactaaagccttcaacgtcctggatgcacttaagtcaatgtcatatttgaaaatctttgccactttgatctgtattcttttggtttgggaccaagtagcatatcaaattaaaaagggctccattgctggtccaaagttcaagttctggcccattattggtccatttttggaatccttggatccaaaatttgaagaatataaggcaaagtgggcatctggtccactttcatgtgtctctattttccacaaattcgtcgttatcgcatccactagagatttggcaagaaagatcttacaatcctccaagtttgttaaaccatgtgttgttgatgttgctgtgaaaatcttaagaccttgtaactgggtctttttggatggtaaggcccacactgactatagaaaatcattgaatggtcttttcactaaacaagctttggcccaatacttaccttcattagaagtaatcatggataaatatatggaaaaatttgttcgtttatcaaaggagaagaattatgaacctcaagtctttttccatgaaatgagagagattctttgcgccttatcattaaactctttctgtggtaactacatcactgaggatcaagtcagaaagattgccgatgattactatttagtcacagcagctttagaattagtcaactttccaattatcatccctttcagtaagacatggtacggtaagaaaaccgctgacatggctatgaagatttttgaaaactgtgctcaaatggcaaaggaccatattgccgctggtggtgaaccagtttgtgttatggatgcttggtgtaaattgatgcatgatgcaaagaacagtaacgatgatgatgccagaatatttcacagagaattcaccaacaaagaaatttcagaagctgttttcactttcctatttgcctctcaagatgcctcctcctctttggcttgttggttgttccaaattgtagctgatcgtccagatgttttagaaaagattagagaagaacaattggctgttcgtaacaacgatatgtctactgaattgactttggacgtgattgaaaaaatgaaatacactaacatggtcatcaaggaaactctacgttacagaccccctgtcttaatggttccatacgttgttaagaaaaatttcccagtttcttccaattacactgcaccaaaaggcgctatgttgattccaaccttgtaccctgctttacatgaccctgaagtttacgaaaatccagatgactttattcctgaaagatgggaagaaggctcaaaggctagtgaagcaaagaagaattggttggttttcggttgtggttcacacgtttgtttaggtcagacttatgtcatgatcactttcgctgccttattgggtaaatttgctctatccaccgatttccatcacaaagtaactccattaagtgaaaagatcaaggttttcgccaccattttccctaaagatgacttattgttgactttcaaaaagagagacccaattactggtgaagttttcgaataa

SEQ ID NO: 1955 - DNA, 1242 bp, Saccharomyces pastorianus
atgatcgtttttaatgggaataagtatgcgtgtgcatcgtgtatcagggggcaccgctcttccacgtgtaggcattcccacaggatgttgattaaagtgagaacgagaggaagaccatctcccatggctataagggatgccatcttggtggactcaacttccgagagtacagaatatgagaacgggtcgcaagttgaaggtaactgttgtagtggaatgaatcagcagccgatactgtttgtacgggcctctgctgttagaaaggcaagaatgataaacggtaaactacatatactaatggaggaaggttgtactgctcatgagcctaaagacatcagcacgtttactgatgacggtaataggtatataacggaaatggagtttctcaggaaacattctccaagggctccggcaataggaacagtctcccccgtatctaacaggtcgtcttcttcgaacgagaagaaagagagtagtcttgttcagcaggagcctatacgaaatgtatcaaactgctgtaagaaaatcaaagctgataattttgctttaaatgacaagataccgcctggtgatatttttaccccgtacggttccttagaaactgcatctactttccacgatattctacaagaaaattataccactactggtgcgtcacatgataactcggaaacactcactccgcggagcacaacaactgtatctgcgccccactcaaatgacctggcttcaaaagtcgaagttctgactcataagggcgtcttcttaagtacacaatgttcttgtgaagacgaaagctgtccatgtgtcaactgcctcatccatagaagcgaagaggaactaaactcgtatattgaacagagcggtgttcctttgaccaatataggtgaagctcaaattactgataagatgatggattatctggatgattgtaaatgctccaacaaggagtgcatatgtcctccggacaattgcacttgcgatggctgctttgcccacgctgcaagtattattccgtttgaaaaattcttcttttacggtattttaaatacaaggttaacaagaaaaactcaaataaaattcaaaggaaaattggtaccgtcaaaattctggtgggatttcctaaaactgcaagtccctttaatgacagatgctcaattggaattactcgatattcacgcgtggtttcaaaaactcgtctccaattacgcacctcatctaagcgatgccaacaattcatga

SEQ ID NO: 1956 - DNA, 498 bp, Saccharomyces pastorianus
atgtctaaaacagcccagaaacgtctgctcaaggagctacagcagctgatcaaagattccccaccgggcatagtggcgggtcccaaatcggaaaataacatcttcgtttgggattgtctcattcaagggcccccagatacgccatacgccgatggtattttcagtaccaaactggaattccccaaggactatcctttgtctccgcccaaactaacgttcacgccaagcattctacacccaaatatttacccaaacggtgaagtgtgcatatccattctgcactcccctggtgatgaccccaacatgtatgaactggctgaagaaagatggtctcctgtacagagcgtggaaaagattttgttaagcgtcatgagcatgttgagtgagcccaacatcgaaagtggtgccaacatcgacgcttgcattctttggagagacaatagacccgaattcgagagacaggtgaagttgtccattttgaagtctctggggttttga

SEQ ID NO: 1957 - DNA, 1206 bp, Saccharomyces pastorianus
atgagtttttattcgaatttgccatccgctggtcaacctgatcaaggatcccgaaccggtggtcgagatagggtggggctagagccattgtacccaactattttcgaaatagtatcgtcgcaagaaatcgattccttgctgcccacatcgatacggtatctgttaacaaaccactttgtggcgaactttcccaacaagtacactttacaattgaacaactactttcccgaatggtttcaagttgcaaaagggtttgttgaatggtatcatttaaagacatataattctacatttattgaccgcttttacggactgcaacttttcaactcaagagacaagaacttggctctgacgcaatgtttaaatccacaaagtgaaagttcatggccgcagggtctgcaactaacccagttgcaaaaaaaagtgaccttcctggagaagattattgtcccctacattacatccaagctcgatgagatttttgaaaaagcatcaatcagcggtatactgggtggtaatagtaatgatggtggaaatacatgggtcaaaagagtatttttgaaactgtacccttatatcaagaaactctttgcgctatccaatttacttatcaagctattgtttctaactaaaaaaacaggagctgtttcgttgttgcagtacttgtgtaacatagagtataccaccatgaaaccactttcaccagcactatctagcttcaaagagacaaaggggtccgatagtagattacagagaacaaacatgtcgtcagccgtggcacttttacaaaataaattatcggtcatactccggattttatctttcacgggttcgcaattcttcccaacttttatattcgtattgagagtttatcaatggtggaccacgcaggacatgactacaagattgaagaaaaaactgaatgacctagataaagatattccaagaccacctgtctcgtcaagtggtgaccaaaccaacgatgaaaatgaagccactgagttatgccctgtctgtgaaaaatccatacagaatccatgcgtattggaaactggatatgtggcatgttacccatgcgccatgagctatttggttaataatgagggccattgtcccgttacaaataagaaattgctgggttgtacgttcaataaagaaatgaataaatgggaagttatgacgggtatcagaaagctactgatttga

SEQ ID NO: 1958 - DNA, 1101 bp, Saccharomyces pastorianus
atggcttcaataacagaacggtataacgatattgttgacatatactctactaaattagaacattcatccttgaggcaagattcgcaagaatatcagaatttactactttccacaatcaagaaattattagacttgaaaacagcagtttatgataggctcgcgttattcagtgccaatgaaaccatagaggatgtttctacgacttcaatcaagtttctagcaattgattactatttggggctcttaatatcaagaagacaatctaatgattcaattatggctcaaaggcaaagtatgaagttactttatttaaataaaagtgttgaatcttttgtcaaatttttaactactttacaagattataagcttctggatcctttgattagtaaaagattagaaaattttaaggtccattataaaccacaactaaacgagttatatgcacaacctaagaacgacaaagatttatctggagcacaattgaaaaggcaggaaaaaattgagttatttcaacgcaataaagaaattggtgcaaagttataccatttagaatcacaactaaaaggcgatgatgaagaccttgatcatgatgaattactaagagaactatatctagtaaggctacaccaatttagtctgaacacattcaataacattgagcaaaatttatttgaatgtgaagtgctatccaatttcctcaaaaacgcaccacgtcaaactgagtcaccagggattcaagagcagaaggaattacatcgtaatgattctacgggcttcaccgacaaactggagaccataaacaagcctttgatagacaagaagggccaagttttaaggaacttcacgcttgttgacaagagacaacagcttcaacaagaagtgcgtgggtacgggcagtatggacccacaatgtcagtggaagaatttttggataaagagtttgaagacggtagagttcttcaaggtggcgaagaaccggaagaagtccgtgatgaagaagacatggactggcaagataaggaaacctataaagctcgtgactgggatgagtttaaggaaagccatgctaaaggtagtggtaatacaatgaacagaggatag

SEQ ID NO: 1959 - DNA, 1569 bp, Saccharomyces pastorianus
atggctgttaaccagacgcatgttcatccacattatacgttgcctggtgtaatgcattatttgcaaacagagttcaccaaaaatgaaagagatagaatcacatgggaactggaaaggtcggaaatgaaggcaaggattgccaagttggagggcgagaacagagatttgaagtaccaattgaacaacgtgcagtcgaaagctgcttttgttaaggacgaaggcgaaaaaagatctgtgtctgattcgctgttgaaatccaagttggctgttcaagaaaacgtcaaggagattatctatttgctgaagagccccaatgtggtcaatcagctggattcattgcatagcaaagactctgattcccatttgcacgatttggagaggctgaacataaatagctgcaaggagggcagtttcaacacaaatggaatggaccttttgaatagtgctctctctgataccaaacctaaacaggaaatttcaaccggatcatcctctactaaagtagaatctctgtttgctgttgccaaaaagcatgaagataaaggtgcagtatctaaaattcaatccgatttgccgagaattgatatcatcagctcttacggtgatcatatggctctttacgatgcagataccaaatcgttggaaatccacaaagtggatgccagcttgggtaccaagtctgtaaaaggaatggttatggagcaatgtggtgatattgtgaaaattttctgggtttcacccttaaaatttcttgccatcgataagagttttcacttgaaattattttcagtttctaatgcatctttggtttcggatttggatctgatgcaaggtttagacgaacctctttcatttggcgacgtcatcaatatagattttaagagtaaatttttattgatagccgctaacagcaaaccacatgttcatatttgggaactaaacaatatagacgctattggcgacgtcccaattgacataaaggaaacatacgtcataagacatgatgatgatgatgacgaagacggtgacggagacactactaatattttggattgcatattgggcataacagaaaaatctttaatcttgctgtcttcgaatccatatcaactggtcatacacaatttcgaaggtgtactgctacaaaaaattgatttgaagattgatgcgatattatcgtgtaagccgattggggaaaggtgtcatttgtttttgaatgagaaaacttctaaactattgattcaattaaacaatgaaacattgttggtttactcttttgatcaaaaaaaaatcatatcaaaagaaaaattggctccagcctcaacattgccaatgcagatcgacctgaacgacagcataatcaccatatcctatggtaatggagacttcggatttaaaaatttagaaaacctggaaccgttgattgatgaagttttcatagcgaatatcaacttgacagagaaagaagaacatgtaatattctcttcaaatctaatagtgagttctactccggtgctaattaccaggaataaaaataacgaaatcctcttacacaaaataaaaatctag

SEQ ID NO: 1960 - DNA, 1143 bp, Saccharomyces pastorianus
atgaacgactttaacccagaaatggggaaattcgccaccactgaagacctgccccaggacaataggagtatggaagatatagaaacgttgcctaatttgccctgcagccgtagtggtactccgaataaggggaaagatctggcgcccaacaagatggaaactccaagaatactcaatatgagcatggtaccagattacttgcaaaaagagaatctctccccagaactttcgtctgccactgtgtctgcagggtcatcgcctgtaaacgtagcccataaggagtaccttccaataggaatcgctggatcgagtaacataaagggctccaagtatgagatccagttgcagcaacagcaaatggttgacttcgctgaaaatgatatacgttcaccgtcttctagtatagcgagctttaaattagatatcatgaaaacactagagcttcccattcccaagagaagagatatcaaggggaaccatctatccaaattactgcttgccaaatctcccctaacaattaacacatattgccaattttatgaccccaacacgaagtccatatgcaaccaagaaatgatttggaaaaataagaatagtagagagaaacatggttcaaggaagtatcagaggcatttgagcaaaatccataacgccgaactgacaacagaaaacttcactcagctttttgaccataattctccactattccaaaaatactataattaccagtccatgctgatgaatgatctactcgctgaacctgagacaaagcccaaggagaaaaaaagaaagcaaacagaggatagcacaagaaatgattcagacaccaggcagaatcccaactactaccaagagcaacagcataacatcccggaacttcagtcgaaaatagccatgaacgacttgatagaacttctcattgatctgaacattccgttctctgtattagattacccaccagtgcgagattggcttaataagtattcaataattacaacagactctctaccagacgaggaattctttaaaacagactcaagcgtgcacgaattcgaacagaacagcgacggaaccactaacggtggtaattacaacaataacagcaatcccaataatcatgaccataaccaatacactcactaa

SEQ ID NO: 1961 - DNA, 2520 bp, Saccharomyces pastorianus
atgtctttaatttccgctgtagaagaaagagacatacctgttataggcaagaccctgtctggttcagggagtaggacttcgtcgataacttcgtcgaagaagaccctaaagcatgcttccaagactcaaaggaaaccgcgagtgtatcagacgactggcgaaccattgagcagagaggctctgtacaaggctaaactgaaatacggagtttaccaatccccggcgcaaagttactcaattggagtcaaagatgctcatgctgcctccgataaagctgccaacttagccaacgataatcaaactactgtggaggcatacaaacgtatgtttattgaccctgatgctactaaagctgcatccagagtcggagccaatgccactcgtagggattctgtcacttctgccacctccaaagcctcaaaggaatcgcaggttaagaggagagccaaagaatcatcaggggctgctgcatcgaaagcttattcgatgacagcggagtcccttagctcaggttcccaaaacggtaagtcttattctataacctcggccagttctgccttaagtggtgctaatagcatccaaactaataactcgactaacggtaatttcgttaactacaagcaaaaacctatgaatttgggaaaggtcatgaagggtgctgaaaagaaggctgaatctcgcatcaaagaaaggtgggaacctgaaaagggaaactttcattacggtatcaagaccgatgagcatggtagactaaaccagttcagtttttctaatgacatgatgagcaatatcatgtctaaagtggatgctccgagagcacaagatcttcaaaagacaaagagcgcccaagctgatcgagatgcctgctcgaagaggtatgctttaaatgccgctaatgctgtcaaggacatgcatcccggccaagatatcgataaaagtatcgctctaaaggcccaaaagagagatacctacttgaatcaattaacgtctcaacaagtgttggttatggcaagatccaacgtggacagacagttggaaattattgaaaagagcaatatgcacaaaaatctattcactaacacagactataacaaagccgctgtcgccgttgcccaatccaattaccaaaagaaaacggagttccataacaagattaacatgggcggtggtttattcttatcaccagaagacatcactaagatcgcctctgggctaatttctccagtacttggcgaggtcagtaagagagccgaagcacaacgtgctatggacgaagaaatcgctgaaagaaccgagtcttataaaaactccttgagtaaatgggaagccatggaacgctccatgaatttcaatgatactaaggtactaacaaacacagcaaataggcatcaaactgagaagaaaaccaccgaagaaaaagtcaaagccagctacgatactctagtggctagaatggatgcgaaagtcactgaaaaagaaactctacttgacgataccaagaccaaagaaattgattttaagaagcaaatgcaagaagagttaaaggatgaaaaagcccgcctggatcaagatttagaggaatggggtaaagactgtgaacaagatatcagtaatgcacgtaaagaacaagaggaactgttgaagccataccacgaagatttggaaaacgcggaaacagaacataatactttgcttgaagaacgtgatgctattaacgcagaaatttccagactacaaggtgctattgtcgatcataaaacgaagatttcgaactatgaaagtgaccttgacgcccaaaataacagaaacgttagagaagatgataaattggtggagttaggtcaaactaaggaatcactagaatctcatttgaatgataatgttatcattattgctaacaaggctaaagaacaagccgaattgtcaaccaaagaggctcgcttgaagcagttggaagtagactcattgatcaatgaacgtaagagcgaattgaatacaactgaaattgagctcaaaaaggaaaaactaaatttattggaggctatgaaagacgtcgcttctgcacgcggtgatgataatattgacgaagaaaaggttaagagtttgattggtatgacttctgaagaatatttggcacaaaacaaacatgtcaagaaaaacgttgaaattttgccaacccaacttgaagaagaagaagaaggaatagaaaacaatgaaactggaagcaaaagcttaactgctgacgaaggcccagtaaagaatatcgcagagccatctattgcagccggttctgaggctcaaacagattccgaaaagaaatccccagttaaggatgaactagccaacgatggtcaagcagccaaggctactaagaagacctccactttaaagaaggcaggagataagaaatccgcggaagttggccgtgatggattggaacatacattcagtgggttttcacaaggttcgtcgatcgaagaagaggaccatgatgtaattggtaatgaaaaagaaaagtag

SEQ ID NO: 1962 - DNA, 534 bp, Saccharomyces pastorianus
atgtttcaagcggaatcatcaagaagagttatacgcagtacgctaatagctttgtcatgggtacctgtattgttaacaataaataataatgtggtgcatattgcacagattagaggcacctcaatgcaacctacgttaaacccacatacagagacattggcgactgattgggtactgctttggaagctgggggtcaagaatccggctagtctatcaagagatgacgttattcttttcaaggccccgacaaaccctcgaaaagtttactgtaaaagggttaagggcttgccttttgataccatcgacacaaagttcccatatcctaagtcacaagtgaacctgccaaggggtcacgtatgggccgaaggagataatttatttcattcgattgatagcaacacattcggttccatttcaagtgggttggttatggggaaagtggtagcgattgtctggccaccgtccaggtgggggtcagatctcaaacttagtactggtagaaattgcatcgccagaagagctgttgcggagtaa

SEQ ID NO: 1963 - DNA, 2121 bp, Saccharomyces pastorianus
atgacgattgaacatgattttagtactgaagacattctattccctaccgaaagcatgaacactatgcatcatgcggacaatagttcttcaaacaacataaacaatgatatgaacccttattctttagatgtcaaaaacagtgtttttgatagtgtcgataccagtaacatacaaaaccaagaaactccattgacgatagggttccccccattatcctttgactctcccctaactgcaactgacacattatcctccactactgataataatctacacctgaagtccaatatcaacaagaactataacacgagtaacaacgtgaacgacaatgagaacgtcaacactagcaacacgaataccgctagttcaaaccagtacacgacgctcacatcgccatatcccatgagcgatcttttgtacaacatgaataactctttgcaatcaccgtcaccttcatcggtgcccccaaatccatccaataccaccgtaaacccgaagtcaaacaatgaaattaggccatcaccacaaatgtcaaacgggaatgaaaccctcatatcccctcgtgcccaacaacaaacttccattaacgatgaccacctgtcttttcccaatcctcctaatacaaatcttttcattgacacaaaccccaacaacttgaatgaaaaattacgaaaccaattaaactcaaacacaaattcatattccaactccacttccaactccaattccaattcaactggcaatttgaactccagttatttcaactcattaaacatagattcaatgctagatgattacgtatccagcgaactcctactgaatgatgatgaagataacgagttgtcacaacgaagatttagtgatgtcataactaatcagtttccggcaattacgaattctagaaactctatttctcactctttggacctatggaaccatccaaagataaattcgaataataaaaactcaagtacagataaaaaccttaataactccaactcaagttccaatgcaagtccaaatgctaccagcactaacacaaacacaaacacaaacacaggcaccactggaaacccaaacaacaatgacactgctatagacaatgaactgacgcagatcctcaatgaatataacatgaattttaatgataatttgggcacatcagatgctaataaaaataaatctgcttgtccagattcctttgatgctaataccatgacaaagataaacccaagccaacaactgcaacaacaaataaaccaatttcaacagcagcaattcacatcttcacataataacagtagcactaatatgaaatctttcaacagtgaccttaattcgaacagacaaagagcttctttacccataattgacgattcattgagttacgatttgatcaataaacaaaacgaagactccaaaaatatcgtactgccgaacactagttcatcttcgtcccaacaattcattaaaccatctatgattctctctgataatgcatctgtcattgccaaagtggcaaccacaggcttgggtaacgatatatcatttttgacagaacaggatgagcaaaatggcaatgataccccaaactttgatctatgcatgtctcaaatgaatatgaccccgtcatcgccgacctcatcatcttctgcctctcttgccacgaaccacttctatcatcattttccacaacaaaaccaccattctatgaactcgaaaattggatcttctattcgaagacgaaaatctgcggtgccgttaatgggcacagtgccgcttaccaaccaacaaaataatataagtagcagtagtgtcaatgcaaacggaaacggtgttggagtcacaaaggaaaggagaccaagttatagaaggaaatcaatgacgccatccaggagatcaagtgtcgtaatggaatcaacaaaggaacttgaagagaaaccgttccattgtcacatttgttccaagagtttcaaacggagtgaacatttaaagaggcatgtaagatcggttcattctaatgaacgtccatttgcatgccacatatgtgataagaaattcagtagaagcgacaatttgtcgcaacatatcaaaacccataaaaaacatggagacatctaa

SEQ ID NO: 1964 - DNA, 750 bp, Saccharomyces pastorianus
atgaccgtgaacaatacgtacgaagccacctatgcaattcccttgcattgtgagaattgcatcaacgacatcaagacatgtttgaaagatgtccccgggatcgattcgttgaattttgacatggaccagcaaatcatgagtgtggagagctcagtggccccctccaccatcatcaacactttgcaaagctgtggcaaggacgccatcataagaggtgccgggaagccaaactcgtccgctgtggccattttggagacgttccaaaactacactatcgatcagaaaaaggacactgccgtgagaggcctggcaagaatcgtccaagtcggggaagacaaaaccctttttgacatcactgtgaatggtgttcccgaagcaggccagtatcatgccagcatccatgagaacggggacatttccaagggtgtggagtccactgggaaagtctggcacaagttcgacgagcccatcaagtgtttcgacaaaagcgatctgggcaagaacctgtacagcgggaagaccttcttgagcgcccccttaccaacatggcagctcatcggtcgcagctttgttatctctaaggccctggaccacccagaaaacgagcgctcatccgccaatgactactcgtttctaggagtcatagccagaagtgcaggcgtgtgggaaaacaacaagcaggtgtgtgcatgcacgggaaagaccgtctgggaggagagaaaggacgccctagccaacaacatcaaatag

SEQ ID NO: 1965 - DNA, 915 bp, Saccharomyces pastorianus
atgtcatattacaacaggtataaaaacaagagaagaggcgatagtagtggtggtggaaatatgaataacaataacaacaataacagcaatggtggaatgccatctggcctttctgcctctgatgcaattttcgatttgggtaaaaacaaaagagttacagtgagacaattcagaaatataaacttaattgatatccgtgagtattatttggattcatccacaggtgaaatgaagcctgggaagaaaggtatctcgttgacggaagacctttacgacgaactgctaaagcacagattaaatatcgacgaagccttgagaaggctagggtccaagagaccaaaaacaaaaatggttaggctattatccgatgacgagtacgaagacgataacaataatgacagtaacgacaaggacaaaaacggaaacgataagaacagtcccagaaagaggagggacgataaatctaaatcatcgaatgaaattcacgattcagaaccacgttctaagaaaaagaagcctgctccacccactctgttgccacacgaagaaaacatgcaaaacgctgcaagagaagccaatgctaccttgattattccaggggcagccagcagaaaacagcaagaagaacgaaagcagaaggagaaggaagaggaggacgcaaatgcaaaggcaacggccgtagcaaaggcaaaggcaaaggcagaggcagaagcagaagcagaagcaaaggccaaaactaaggcaaacgagagtatgcctaagcctgcgcctgtacctacacttgagctcaagaaggaagacgctgcctccaatatagacgaggcgaaagatgcaaactccagcgatgaagaatttgcccagagcttggaggcggaaatgaacaaggccgacgatgacattagtgaagaagaataa

SEQ ID NO: 1966 - DNA, 846 bp, Saccharomyces pastorianus
atgtcggatatcgaagaaggtacccctaccaataacggccagcagaaggagagaagaaagatagaaatcaagtttattgagaataaaacaaggcgccatgtgactttttccaagaggaagcacggtatcatgaagaaggcgttcgagctgtctgtgctgacaggtacgcaggtgctgttgctggttgtctcagagacgggtttggtgtacactttcagtacgccaaagttcgagcctatagtcacccaacaagaaggcaggaatctcatccaagcctgtctaaatgcccctgatgatgaggaggaagacgatgaagaagacggcgacgatgacgatgaagaagatgatgatgatggtaatgatatgcagcgtcagcagcaccagcagcaccagcaaccgcagcaccagcaacaacaacaagtattgaatgctcaagcgaatagtttaggccacatgaatcaagatcaggtgccaccaggcgcactgaaacaggaagtaaaatctcaattgctaggtgccaatgctaatcagaccccgataatccaacagcaacaccatgctcagaatcctcaaacacaacagccacaacaacaacagcagcagcagcagcagcagcagcagcctcaaatggcgcagcatcctcaaccacaacaaggaataccccatccgcaacaatcgcagcagcagcagcaacagcaacatcagcaacagccacagcagcctctcaccggcattcaccagccccatcagcaggcttttgccaacgccgggtctccctacctgaacgccgaacaaaatgctgcgtaccagcagtacttccaggagccgcaacaaggccagtactaa

SEQ ID NO: 1967 - DNA, 1422 bp, Saccharomyces pastorianus
atgtctgaagtgatatttcagccaacggatatcgtccttgcaaaagttaagggcttttcagcatggcccgctatgatcatccctaatgaactcataccggataacattctaaagaataaaccagtgggtgtacacaagggcaagtctgccaatggcaaagaagcagaaattgaagagcaagaacagggcgacggcgacggcgaagaggagcaggaagaggttttcgatgatagtgaggctaatcctgaaaagtttataatatatacaccagtcctgaagtttcgtaaaaatgatacgttaaaaccagtatattgtgtcaaatttttctgcgatgattcatacatttgggtgaagcccatggatttgaaaattttgacaagtgaggaatgtcgtcaatggctaaacagtaaacagcgaaagaataagaaattaataccggcctatgagatggctatgaagggtaaggatgacattgatatttgggaattcgtggaatacgggtcttatggtaagccagatgaagaggaatacgtagaggaagaagaagaagaagaggaagagcgcaaaaaaactgcaaagaaacccactaggtcttctagtaggcaacgtcaaaaacgtgttcttaatacaaatgacgctgaagatggccagacaagcaagagaaaaagagtcactagatcaactagacagcaaaaggtggaggatatagaagaggaggaggaggaggaagaagatgatgaagaagaagaagaagaagaggttgtcagaaagaggccccagagaggcaaacccaagaaagctgtagcggcaaaagctaagccaaaaccaaagccaaaaccaaagaaagagaaacctaaaccacctaaggcgatcaagtaccattttgaagatgacgaagattggagcatagttggactgggtccacaagatttgtccattgaaaaaacaatggatccgattgcaaaaaaattatcacaaaagaaaaacttagacaagcatacagaaattaagctggatttggaagacaaactagcaggaatcaacaagctgttatgcgatgtcttatgttcagacattaaccaagtcgtttccatcaaagacgacttcgaaataatattagatgaattgcaaattgccctcaatacaagagggtccaaaaatgaattcataacaatcttccaatcagacaattccttactattgaactttagaatcttatttaacttgaaaaaagaggaactgggtaaatggaatttatgggatcgtttccaagaaattttcgagcatatttattcttatgaatttacgcctgatacgactgattggcaactggaacaagatacggaaatcgaagaagagcaacagatcaacgcaaatgcaaacgaacctgtgaaggaagaaggagctgaagtaggtgcataa

SEQ ID NO: 1968 - DNA, 615 bp, Saccharomyces pastorianus
atgaatagcgcaggcaacgatagttttgagtatcttcttcaattgactaaaacattaacaacagaatgccggtccaacaggcaagaaactgaccggatagaattattattaaaacgccttgccaaacaatcagggatatcttacgataaattgagcagaaatataattccagatcaatggaaagataatgaaactcaaacggtatcgactcccagcgaatcacaactgctcatttatgataatttcaagttgatatacgagattgaaaaacaagaatacttcaatgggaagattaatgcactgatcagcaatataaatgagcacttctcttatataaaaaactttattgacgaacaaaatgtaataagaggacgagatgtggccgtatttgcatcagataaacttgacgaaagaaatataaatttgcaacaaaattacaacctgctgaagacagaaaacgaggaaacaaaaaagaaattgcataccgttattgagcagttcgaaacgctactgaaagaaattgattgggagtctatacccacagactccagacactatactcgctttcaaaaacagttagaatatttgcaaaacgcataccaaatattaaaatag

SEQ ID NO: 1969 - DNA, 984 bp, Saccharomyces pastorianus
atggttaacggctgtgtacatttatggggtgagaacggcaagccatctttgatttcagctgaaagcgtcgcccttgtatggtttatcaaggcatgtcgttcagaacagacgaaggatttgattaagggactggaagtagtattctccaataatacagatttatcgccggacgggaaactaccagtgttgattttagatgatgggatgaaagttaccggctatgtgaacatcgttctatgcttaaagagaaatacacatactgccaaacatgaaaaaaacaaaaatgatgaagggtctttagtaattgttagtaaagaagaccgtcttttggagtatgcgttattgaattttattgactcagaaatagcaacactgaccgactaccagcttttcttaaacacaaaaaactacaatgagtataccaaaaaattattctcaaaactgttgtattttcctatgtggtataataccccattgcaactaagattgcaagcacgtgaaaattgccaagagatcataggctctataactctcgaggacgatgaagaatttatagaaagtaaagcactggagtctgcatcgcagttggctcaatcaaagactttcaagattacacatgagaataaagtgaagaataagcaagagctacagcaagttaagtataatctacaatttgataatagattacagaattgtatcaagcattggttggaggtccgcgagaaactagacgaatctatggtacttccttccgatattcttttccatgccaatatttacgtccaactaaatttgcctgatgggaatcgtatccgttcaaaattgaaacaaacgtttggagacgagtttatcaacaatacatcaaacaagatggaggaaattgctcagagttctgacgaagatctggggcaaagagatcctcacttcaaagaacaagggaatgttgtgatgtcattatacaatttagcctgtaaatacatataa

SEQ ID NO: 1970 - DNA, 1326 bp, Saccharomyces pastorianus
atgagaatatcaccagccttactacaacgctcgaaacagctcatagataagtacgcattgtatgtccctgagacaggtttcttccctaagggttttgaagtaggctgcattgcatccggagttaagaaaaatggtaacttggatctaggtgtcatcttgaacaccaacaaaccccgtccctccacagctgcagctgtcttcaccacgaacaaattcaaagcggctcctgttttaacctcaaaaaaggtcctcgaggctagcttgggtaagggcattaatgcgattgtggtcaattcaggctgtgccaactcagtcactggagatctcggtatgcaagatgctcagataatgactgacttggtcaacgagaagatcggtgagaaaaactcgactctggtcatgtctacaggtgtcattggacaacgattacaaatggacaagatcagtaatggtatcaataagattttcaacgaaaggaaatttggcagtgattttaactcttggttgagcgttgccaaatcaatctgtaccaccgataccttccctaaattagttacatctaaattcaaattgcccagtggtgccgagtataccttaacaggtatggccaaaggcgcaggtatgatttgccccaatatggccaccttactagggttcgtagttacagatctacctatcgaaaataaggcattacaaaaaatgctaacttttgctaccacccgttcatttaattgtgtttcagttgacggtgatatgagtactaacgataccatttgcatgctcgctaacggtgccgttgatactaaagaagtcaatgaaagctctgaagatttcgaacaagtgaaattgcaggtcactgaatttgcccaacgtttggcccagttagttgttcgtgatggtgaaggttcgacaaagttcgtcaccgtgaacgttaaaaacgcactgcatttcgaagacgctaagacaattgcagaatcaatttcgaactcgatgctggttaagactgcattatatggacaagacgctaattgggggagaatcctatgcgccattgggtatgctaagctgaatgatttgaagtcattggatatcgataagatcaacgttagttttatcgccactgataactcagaacctcgtgagctgaagcttgtttccaatggtgttccgcaactaaaaattgacgaagcaagagcctctgagatcttggctctgaatgatttagaagtatcggtcgacttgggcactggtaatgaagaggcccaattttggacttgtgatttatctcatgaatacgttaccattaatggtgattaccgttcgtaa

SEQ ID NO: 1971 - DNA, 720 bp, Saccharomyces pastorianus
atggtttgcatgatccatattgtggtttttttgctttcaatcacaaccgtctttgaagtattcccactgattaccgtgcccgtaacaaaacatctgtcgttatcatccttcaaaaaccattactacgggctatttggatggtgtgtgcgtggcaaaaaccaggagctgatgtgcacgaggaagaagataggctacgacagcacggatgtcgattcttcgggccatgtcttgtcactgccctccaactcgaaagtggttgtttcaaatttattagtggttcatccgatctcactggcattcacaagcacgctgctggtactaacagtgatcattatggtaacgcctttgggggattcgcctgagatgctgttgttcacggctcttttttcgctgccgacatttatgctatgtcttttatgcttcttggtggatattcttctttttatttccaagttagactggcccgggtggctaatgctagctgccacaatcagcgtggcgctttgctgttccatgctctgggtgatgagaagagttgtgtcagtcaaaaaatatgaatcacaacagtcaactgcgcacgtgcgatcaattgaacagtacccgatatcggacatttgctacagtaaacagggtactaatagctcagaattagagagcacgccgatgcatacagatatcctgctggctccagaagtcacatatagagggtttattgattaa

SEQ ID NO: 1972 - DNA, 1251 bp, Saccharomyces pastorianus
atggcaacggttaccgtgaagtacaactttcagcttttcaaatgcaaagtatcgtccaattccacgttaaatgacgttttacatcaatctttacagttcttccaggtgcccgcctcttccaacgagtggacgttgctacatttaagcaagcccgtgccattggacctgccatggagattgctgaatctaccaatgggcgtcaatttagaactatcgaaaaactccaactttcgggtggcaaagaacgataaccacaacggtacgccctcaaagactattaagatacgatttcagattccaggaagggattcaacaatcaaagaggtttcgctaaatgaaccaattgccccaattttgcgaagtgttagcggctttacagaaggtgatttcaaaattcaagtcttctcccagatcgtagattataaaactattgaaaatgacagtttaaccctggaaaatctaggaatccaagagtcttcctcgatcagactacttatccccggttcgttgtctggaaatgccgagaacaatattagcaacaccgctactccacttaagcaagctttgtccccaatgacaactccagcaacagtagccgagccaccctcccacgaacttcataaaccttccgtattcttgccttcaaacgaaccgctaacggttgaccaaatggaggaagaagaagactacgaattgaccgtggaacaagcgagaaggtatcagcaaatgctatctatgaaagccggtactttaggtggtcctatcctaacgaaaaggctcagagaacaagcagcccacggtctatcaaaaaaaaacaagtctgtcaccgagtgcctactaagaataaagtttcctgatagaagccacattgaaatagcatttaaaccagatgaagatatgcataccgtttatgacatcgtttcacaatccttgctcgatgacaaaataaacttcacattaaaccaatcacaccctttcaaacccttagccaacgatgatcagaagctactggaggacttggagttcggttctaaaacaatgttactttttgaaactgattcaacttccactggtccattcttaaaacctcatttgctgaaagatgcgcaaaaaatctcacatcaagcaaccgtgaccccgtcactagagactaccgatagttctaacacacagagtcactctgataatgttccaaagatcaagaagactttgaataaagtacctaagtggctgaagttgagtaaaaaatag

SEQ ID NO: 1973 - DNA, 504 bp, Saccharomyces pastorianus
atggcgttaagtttaggacagttcattaacgtgggcggtatggtgaaggatctgaaaagcttcaattttagcgtatatggtagatggtttggatatatcaacataattctatgtattgcgctcggcatagcgaatctattccatgtgagcggggtgatagcgttcgggatcatcagtataatccaggggctcgtgattcttttcattgaaataccatttttactgaaaatctgtccccttagcgataatttcgttgaatttatcaagagatttgaaacgaatggatggaggtgtattttctatctagcgatggcgatcatccaatacgtgtcgattgcggtgatggccacgagtttgatcgtggtggcggtggggttaacgatatcctcgatcagctatgcggtggcatataccaagcatcaagagttccagaatacgaatatcctcaagaaccccacagacgatgacttccctcacgaggctgtagtcagagagatgttatag

SEQ ID NO: 1974 - DNA, 606 bp, Saccharomyces pastorianus
atgagtaatcgtagcgtgaacagggatggcaccgatccgaaactaaacatcaggttctcagtacctcaacggataaatgtaactcaaccgacaacatcatcaccgctacatatgcccgtatcaagatcagcgaggaaaccccttgtgaggactaagataaaattggatcccggacacagtgccctggactggcattcactgacctccgacccagaaaattatcattccaagttcatttcgctacagcttattcagggcttactcgatgatcccatcttccaaagagataattccaagtttccaccgtctcagttgagggcgcaactactactccagaagattcctctatataaaatgatgccaccattgaggataaacagagaaatcgttaatagacattgccaaggtgaggatgaattttggtgtgttataaatggcaaagtgtatgatatttccggctatttgaagttccatccaggtggaccgaaaatcttattaaggcaccgtgatagcgatgacttgattacgttatttaataagtatcaccagtgggtgaattatgaaaaactattacaagtttgcttcattggtcttgtatgcgaatga

SEQ ID NO: 1975 - DNA, 669 bp, Saccharomyces pastorianus
atgggccagaaaagtagcaaagtgcaaataactaagacggatagggcaattttagaagtcaaacgatctaaggatgaaattcacaaatttaccagaaggacagacagcttgatacaagtagaaaaataccaattgaaagagttgatacgagctcatcctaaaaactacaaatcgaatattaaggtgcggttcctattgaaaagaattcattatcaagagcacctgttgcaacaagcttcagatcagctcattaatttggaaaacatgatatcaacactagaattcaaaatggtggaaacacagtttatcaatgggctgagaaacggtaatgaaatactgaaaaaattgaacaaagaatttagcaacgttgatgaactaatggacgatgtgcaggaccaaatagcataccaaaatgaaattaatgaaacactatctagaagtattgttggagcaaatgactatgaagatgagttagataaagaattagatgcactagaaatggaggtcaatacaaaggaaaagaaggacaaggtagaagcagccaatttgccgtcaacagaagggttgccatcgcggtctaaagaagaacaaactgaccataaagaaagggaagagcttattcaagataggaagggaaacagcaaggaacctgtagcattattgtcctag

SEQ ID NO: 1976 - DNA, 2217 bp, Saccharomyces pastorianus
atggtcgataccgtaccgcacattggttcgttagggagaagctcactttttgatacgggagatggagaggtggcttctagtgctgacacaattggtgtaaaccaagaagacattgacgcgtttgtatcgagtaatggcgaaacggttaaattgaagaagaagtctgcgaaattggccacgggaaatataagtttgtacaccaatcctgacactgtttggagatcagatgatacgtacggcatcaatatcaactacttactagacaggattgatgcatcgagcggagaccgttctaatagttccaagacatctaccatggctagcaaagtagataataactctctgtgggtggagaaatggcgtcccaaaaaattcttggacttagtggggaacgaaaagataaataggagaatattaggttggctaagacagtggacccccgctgtgtttaaagaacaattgcccaaattacccaatgaaaaggaggaaaatgaagcggaaccagatccgttgaaaagaccatataagaggattttgctactgcatggtccacccggaatagggaaaacatcagtggcgcacgttattgccaaacaatcaggcttttctgtctcagagataaatgcaagcgatgaaagggctggccctatggtgaaggagaaaattcataatcttttatttaatcatactttcaatgtcaacccggtatgtttagttgcagatgagattgatggaagcgctgaaggcggatttattagaatattagttgacattatccaaaacgacatgaaagctactaataaactattatttagtcaaccggataagaaaaacaagaagggtaaaagtagaaggtcagctctacttatacggcctataatttgtatttgcaataatttgtacgcaccttctttagaaaaactaaaaccgttttgtgagattgtttctgtgaaaagaccttctgataccacactacaagaaagactgaacctcatctgccataaagaaaacatgagcattcctctaaagacaatcaatgacttaattgatctggctcaaggtgatgtaaggaattgtataaacaatctacaatttttagcttcaagtatcgatggaaaaagcagtaataacctggatgaacccaactccaacaaaagcacatgggggtcatccaacaaagattcgccgatatcctggtttaaaatcgtaaaccaactctttagaagagatccacatcgcgaaattaaagatcaattttacgaattgttacatcaagtggagctcaatggtaactcagataaaatagtgcaagggtgctttaatatttttcctcacgtgaaatattctcataatggtataaggaaaccagcaaatatctcagattggctgtttttccacgacttgatgtacaaatcaatgtatgagcataatggcgagctgttgcgatactccgctcttgtacctttagtattcttccaaacattcggtgatattgcaaacaaagacgacattagaatgaaaaacagcgagtatgaacaaagagaattgaaaagagccaattcagatatagttgattcgattgtcagacacatctcggtagaatcaccattgatggccagctttacaaatagaaactctctggtatttcaaatacttccatacttggattctatgatctcttctaacttaaacaaagtgaaaaatttgaaattcaaacaaacgattattgaaacattagtccaggtgatgaaaagctttcaactaagtttgatggagaatcattcagacggatttgatgtaagaggtggtttggcaatcgatccgcctatcgacaaagttgtgttgctagatccaaaacatatcaatgaagtccaacataagaggccaaataatttgaatttcctcctggccaaaattgaggagaacaaagttaaaaagaggcatattgaccaagtaacaaatgagagattgcagtcgcaggaaattcatactaaaaaaaccaagacggcgccaaattcctcctccagtacaatcgacttctttaaaaatcagtaccgaataataaatcaagccccggaagcttctggggaaaggaaaaatgctggctcaggtaaacctgatgataacaccaaggaggttaaaatatgggtaaaatataaagaagggttttccaacgcagtaagaaagaatgtaacctggaatagcttatgggagtaa

SEQ ID NO: 1977 - DNA, 1128 bp, Saccharomyces pastorianus
atgctaagaacatcaacggtgttcacaagacgtgttcaaccaagtctacttgctagaaatatcctcagattgcaatccaccgcagcaattccccaaactcaaaagggtgtcattttttatgagaataacgggaaattacattacaaggacattccagtcccagaaccaaagccaaatgaaatcttgattaacgttaagtattccggtgtttgtcataccgatttacacgcatggcacggggattggccattgcccgtcaagctaccattagtgggtggtcatgaaggtgccggtgttgttgtcaaattaggttccaatgtcaaaggctggaaagttggcgatttggcaggtatcaagtggttgaacggctcttgtatgacttgtgaattttgtgagtctggccacgaatctaactgtccagacgctgacctgtctggttacacacatgacggttccttccagcaattcgctaccgctgatgctatacaagctgccaagatccaacaaggtactgacttagctgaagtggccccaatactatgtgccggtgttactgtatataaagcactaaaagaagcaaatttaaaagccggtgaatgggttgccatttctggtgctgcaggtgggttaggttctctagccgttcaatatgctacagcaatgggctacagagttttaggaattgatgcaggcgcagagaaagaaaagcttttcaagcaacttggaggtgaagtgtttattgattttaccaagactaaggatatggtctccgacatccaagaagctactaaaggtggccctcaaggtgtcatcaacgtttctgtttcggaagccgccatctctttatccacgcaatacgtgagaccaaccggtactgtcgtcttggttggtttgccagccaatgcctacgtcaagtccgaggtcttttctcatgttatcaagtcgatcaatatcaagggttcctatgttggtaacagagctgatacgagagaggccttagacttctttagcagaggcttgatcaaatcaccaattaaggttgttggattgtctgaattaccaatggtttatgatttgatggaaaagggtaagattttgggtagatacgttgtcgatactagtaaataa

SEQ ID NO: 1978 - DNA, 684 bp, Saccharomyces pastorianus
atgtcccccttaaaagtcgcagtcgttggtgccaacggtaaagttggccgtctgttgttaaatcagttaaagaatagtagcagtttctcaacacctttagccattgttagaacgcaggaacaggttgagcattttaaggacaaggtgggtgtcgatgcaatcttgacagatatagaaaatgcctccgtcaatgagattgctgatgccatcaagggttacgacgccgtggtatttagtgcaggcgcgggcggtaaaggtgttgaaagaatcttcactgtagacctagatggttgtatcaaggtggttgaagcctgtgaaagtgctggcgtcaagagatttgttgttgtttcggctcttaaggcagaagatagagatttttggtggaatttgaagggtctgcgtgcgtactacatcgcaaagagatcagctgaccgtgaagtaaggaggtctaaactggattacactatcttgcaaccaggttcactggaattaagcgaaggcacaggcttgttgcaacccttggacaaattagaagaaaaggcctctgctttttactctattaatagggaagatgtagcttcttttattacacaaagtttgctacatccagatgccactgtgggaaagactataccgttggcgaatggagatgaaccaatcggaaaattcattcaaagcttgtag

SEQ ID NO: 1979 - DNA, 684 bp, Saccharomyces pastorianus
atgtcccccctaagagtcgcagtcgttggtgccaatggtagagttggtcgcctgctgttaaaccagttgaaaaacagtagcagtttcgcaacaccattagcgattgtcagaaagcaggatcaagtcgattatttcaagaacgaagcgggtgttgatgcgagcttgacagatatagaaacttcctccgctagtgagattgctgccgccatcaagggttacgacgccgtggtctttagtgcaggcgcaggttacgatggcgttgagagaatcttcactgtagacctagacggctgtatcaaggtggtcgaagcttgtgaaaatgcgggtgtcaagagatttgttgttgtttcggctctcagagcagaggatagagatttttggtggaatttggagggtttgcgtgagtactacatcgcaaagagatcggccgatcgtgaaataagaagctccaagttagattacaccatcttgcaaccaggcacgctggagtcaaacgagggcaccggtttgttccgacccttggacaaattagacgaaaaggcctctggtctttactctatcaacaacgaagatgtggcttctttcatcacacaaactttgctacatccagatgtgactgtggggaagactatacctttggtcaacggtaatgaatcaattgaaagttttattcaaagtttgtaa

SEQ ID NO: 1980 - DNA, 1851 bp, Saccharomyces pastorianus
atgccatcgatcgacctacaggaaatcataccacctcaaccttcgacgcagcgtaattttaccacgcacttgtcatacgactctaccactaacgcaattgcctacccatgtggtaagtctgcctttgtgcgttgtttggatgacaagaccaaggagctacctgcggtgatccagtttacaggccatggctcttcagtggtgacaaccgtgaaattttctcctattaagggttctcagtatttatgctctggtgatgaatccgggaaagtgattgtctggggttgggcttttgacaaagaaaataactctgttgaagtaaatattaagtctaagttccaagtcctagctggtccgattagtgatatctcctgggactttgaaggtcggagactttgtgttgtaggggaaggtcgcgacaactttggtgttttcatatcctgggactctggtaattcccttggtgaaatctcaggtcactcacagcgcattaacgcctgtcatttgaaacaatctagacctatgagatccatgacagtcggagatgacgggtccgttgtattttaccaaggacctccattcaagtttgcttctagtgacagagtccatcacaaacaaggttccttcgtcagagacgtcgaattctcgccgggcaccggtgaatttgtggtcacggtaggatccgacaggaagatttcctgctttgatggtaaaacaggtgagtttgtgaaatatatagaggatgatcaagagccaatccaaggtggtatatttgcgttgtcttggcttgattcccaaaagtttgccactgtaggagctgacgctgccattagggtgtgggacgtaacaacttccaagtgcgttcaaagatggacattagacaaggaacaactggggaaccaacaagttggtgttgtcgcaacaggaaataaaaatgtcatctcactttcattggatggtacgttgaatttctatgaacttggaaacgataaaattttgaagagtattagcggtcataacaaaggtattaccgctttagcagtagatccactaatcagtggttcatacgatggtcgggtcgtggaatggtctaattcgggcccttccatgcatcaagatcacttcaatttggtggtatcattggacaacagtaaaccgcaagaatactcaagtatttcttgggacgatactttgaaagtcaatggtgtcactaaacatgactttgcgtcgcaaccaaaggttgctagcgtaaatgatgattgtttcacagcaatcatcacaaatgatgatgatttgttggtattgaattcgttcaccggagagatattaaagaccgtaaggttgaagtcaccaggttctgcagttagcttgagtcaaaatcatgttgcggttggtctggaagaaaccaatgtcattcaggtgttcaaattatcagacttggaggttaatttcgaattaaaaactcctctccgtgcaaagccttcctacgtatcgatttcaccatccgaaaagtacattgctgctggtgatgtaatgggaaagatattgctgtatgatttagaaacaagagatgttaaaacgtcgagatgggctttccataccagtaaaattaacgcaatttcatggagacctgccgctaacacaggtgaagacgaatgcgaggaagaccttgttgccactggctccctagataccaatattttcatctactctgtcaagagacccatgaagattattaagtcattgaacgcacataaggacggggtcaataatcttttgtgggagaccgagtctgatttggtcagcgcaggtgcagacgcttgtatcaagaagtggaaggtagaatttgaataa

SEQ ID NO: 1981 - DNA, 1446 bp, Saccharomyces pastorianus
atgtcctcgttcaacccagttagatttttgaatctaccggttagtattagaaaggaggtctactttcatttggacggaaatttttgcggagcacatccatgtcccatagatatattatacacatctaataatgtagaactaccggtaaaaccaaggtgcaagagatctaagagatctaagaaattgctgaaatacatgtatcctgtttttgcctcttatttaaatattttcgaatactcaccacaactaattgaaaaatggcttgaatatgcgttttggttacgttatgactgcttagtactggactgtttgaaagtaaaccatctttatggaggatcacttattggtccgttggagtggacgtaccttgacaatgagcttcgattggcttattttaataaggctagtatgctagaagtttggtatacttttaaagaatataagaaatgggtaatagaagttgctgcttatgacgaccttggcgtaactcacatagattacattcaattcaatattgaaaatttgacctcacagaaggtagataaatgtctatttttgttggaacaaaaagatttgttgacaacagtcagtgaattacaatttggacaagatgaagaagtaggaggagaagaagaagagcaaggagaagaagacgatgaagacgatgaagctgattctgatgaaactgcgaaatctaaagtgacaagtaagaaaagaacggcttcaaaaagcttgggtaatgacagtgtgagaaaaaatcgaaagcatttaacggatacgtccgttatcaggacaattaaaagcacagaactcatgaaaaatttgcgaaagatttctgtacgaggggaacaattatatgagttgctaataaatttccacgggttcagagataatccagggaaaacgattagttacatagtgaaacgcagaataaatgagatacagttatcacgaacggatcggatttccaggacaggattggcagattttacaagatgggataatttgcaaatccttgcattagatagaatggtttacgtagatttaaacaagatcgtctttcccaagaatcttaagtccttgacgatgaagcatataagtcagattaagtggtgggacatcgaggagaacataataaatgagttgaaaatggataaaaaaacgtttaaatcatcttatacaagggaaaagaataacagctttacaagatttttgagtcgtaaccagataaatataatggaacttgacaaaagcgaaattgaccaaatgacttttttccgttgtcaagcattagtttggcagtccgttggggctttaaaccacattagactagaaagtgtatcaaaagtttgtaacggtaacgttattgtaccaagagcattattctatagtaaacgaatagagatttttcaatgtaaagaaatctctgaagttatggtaatatag

SEQ ID NO: 1982 - DNA, 894 bp, Saccharomyces pastorianus
atgtctggagaaaatttcaagatcaagagtgggctcgcccaaatgctgaagggtggtgtcatcatggatgtcgttacgccagaacaggctaaaatagccgaaaaggcaggtgcatgtgcggtaatggctttggagtgcattccagcagatatgcgcaagtcagggaaggtttgccgtatgtccgaccctaaaatgattaaagacatcatgaatgccgtgtccattcccgtcatggcaaaagtaagaatcggtcattttgtggaagctcaaattattgaagctttagaagccgactatattgacgaaagtgaagtcttaactcctgctgattggactcatcacattgaaaagagcaaattcaaagttccatttgtatgtggtgcaaaggacttgggtgaagctttgagaagaattaatgaaggtgctgctatgattcgtaccaagggtgaagccgggactggtgatgtctctgaagcggtcaagcatattaccaggatcacagaacagataaaaacttatcaacagctgaaaggtgaagacgaaattgcaaaggctgctgaggaaatgagggtgccagtttccttgttgaaagatgttttagaaagaggtaaattgccggtggtgaatttcgcagctggcggtgtagctactccggcagatgctgcacttttgatgcagctaggctgtgacggtgtatttgtcggttcaggaatcttcaaatcatctaaccctgcaaagttggccactgccgtggttgaagctaccacccatttcgataatcccgccaaattactggaagtgtccagtgacttaggagagttgatgggcggtgtatctatcgaatccattaatcatgattcgaagggtgtgaggctttccgaagttggttggtaa

SEQ ID NO: 1983 - DNA, 1110 bp, Saccharomyces pastorianus
atgtatatgaatgtaagggtgggtagaagattcacttctaacgtaccgtcttttataccaagatataagtttcccaaatacaatatggctcttaccgattttaagggacatcaactcaaagctcttagaagatttgagagattggtaccccaaatgaacatgataatagaactacgtgatattcgggctccaatatcgacacgaaatgtaattttcgatcgcattgcaagaaaggaacacaatatgttgaagttagtggtatatactagaaaagatcttatgcctggcaacaaaacttatgtagataggttaatgcaatggcatgaggagctaggggaaaagtttgttttactagattgtcgggacaaaactgacgtcaagaacttattaaagattctagaatggcaaaattacgagctagaaaaagaaggtggctacttgcccatggggtaccgagcactgattactggtatgcccaatgttgggaagtctactttgataaacagtttaagagcgatctttcacgagcatgatcgagatagtacgggagggaaacacagaaaagtggcaagaactggtgctgaagctggtgttacaagaagcacaagtgaagtcattagagtagcttcgaggacggccgaatccaaaaatgaaatttatcttatagacaccccaggtatcggtgttcctggccgagtttcagatcataacagaatgcttggtctagcattatgtggtagtgttaagaacaatttaatagacccgatattccaggcagactatcttctatatctaatgaatttacagaacttctatgaaaggaaaaaggaactctatcccggaagcaatgattcacctacgaacgatatatatgaggtcttgcagagacttcaagtaaataagaaccagaacgagaaatcaatagctattgaatggactaataaatggagactacaaggaaaaggtatcatattcgaccctgaggcactgttgggtaacgatgagttttcgtataaaaagtatgtagatagccagttggaaaagctaggcgagctctcatacgaagggttatctgacagactaaggggaaaccccaatcaaatattttag

SEQ ID NO: 1984 - DNA, 894 bp, Saccharomyces pastorianus
atgcctgtcaaagaaactgatagagaggttgtcctaacccgtcctgatgacgaaactaccagcgtcaccattttgaagtacggtgctacagtttattcttggaagttgaaatctgaagaacaattgtggctgtctactgcagctaaactggatggctctaagcccgtaagaggtggtatacctttagtctttcctgtttttgggaaaaataccactgatgagtatctgagtaaattgccccaacatggtcttgcaagaaattccacttgggaattcttgggccaaactaagagtgacccaccaacggttcaatttggtttgaagcccgaaatcgccaatccggagttgaccaagttatggccaatggattttcttttgattttaaccgttgaattgggtgttgattctttaaaaaccgcaatagaagtggagaacacttccacttccaaggaactaaaattcaactggttgttccatacttatttcagaattgaagacatcgaaggaacgatggtctccaacttggctggtatgaaactttacgaccaactgttgaaggagtcatacttggataaacacccggtggtcactttccatcaagaaaccgatgtcatttatcagaatgtcagtcctgaacgtgccattcaaatcgtcgacaagggtgtgcaagttcatactttgaaaagatataatttgcctgatactgttgtttggaatccatgggttgagaagtctcaaggaatggctgatttcgaaccaaaaactggctacgaacaaatgatatgtattgaacctggtcacgttcatgatttcatcactttggctcctggtaagaaatggaacgctcatcaattgctttgcaaggatgaattgaactaccaagctatccaataa

SEQ ID NO: 1985 - DNA, 1869 bp, Saccharomyces pastorianus
atgagagattctaaccatcgatcactgacgctgaataaacctatagtaacgataacgtccaccgtgtatgaccgaagagcacttgacatcaactccagtatcccgctaataaattcactaaactacttaacgtacctaacttcgaattcatcaaaagttagagaaacggtagccaatgacggagccctggaaagattggtgtcaatattgagaaattgtcatttgagtttgtttgaattactggatttggatttagaagatttcagtgaacatgataacattaagaacctatggaaggagaaaaaacttgcgttatgtgcatggaaatggaccctaacctttcagtgtctagtgttaacaggcactagaggaacagaacaaattcgaaaaaaagtagtaatgtctggcgtcttatctgtgctggtcacagtgttggataattatttattatatcataaaaactatgacttcgtcaaagaccaaaccatgaatttcgactttaagggaataaccacagaaacgatgtacaagtttttgagaaaggacgaaaatgaaacgtatcaacaatatatagagttcatcacaggtcaggataaattgaaattatcaaatgataaaacttttttaaacgaacgattagtggcaccatctatgacaatcccgacggattttagtgatacctgggttgattttgcacatctagctagcaattttgatactcacactcaccacaaaaaaaatgacgacgatactgacatcgacaccgatcgaaacaatacaaatttcaatgcatatgaagaattcttctcccaaccggacgttaataaacctaccatctccacgccacgtgaattctttttaggaagaatcgtgcccaaacaagacgacgttatttggtctcttcaattgttagctttcgtttctaaatacacatacatgaagtctaccctacaaaatgttgaactggtggaatctttatcattcagaagcatggctactcgagtgaaacaacgaatttcggaggatgatgacatagaagaacaagaaagaaatgtcaccgtaaaattttccacactatacccctatctatcaaaaacttctaaaaataatcccgatcataaaaattcggattctagtaaagataatccattctttgaagagttgaaaaaactttcaaacaaatgtcagcaaaaggaacaagagcgaatgtccaatattcgctgtccggttttaaatttattcgaacgttatcgtgtgcccaaacccaatgataataatgttaataatacagacaaggaaagaattattttaagaaaaaagctatcggagaaatttgaaagaaattggaactatgagaaaatgaagaaaaaatcaactaacagcattaacgactttaaatcactatcaaacattgtaaacatatttcctttggtagaaaaatatactgtgaatacagaaaacacgcatgatattatctactggagttcagtcattatgagaaattcatgtcgaaagaatgagatcttaggcgtacgccaatgtgccaatttctcatgcggcaaatgggaagactttccaagacaatttgccaagtgccgtcgatgtaaaagaacgaaatattgctcaaggaaatgccaattaaaagcgtggggttatcatagatattggtgccatgaagttggatcaagtcatttaagatccactaacactaccacaggcgtcaatactccaaatgaaccgggctccttaaacactactgccacgacggcagctgacgtttcaaattctaccagcactttcgctccgaatatttctaccaccgtgcctgatgaaataggcaacgccgacgataacagtatacctgaataa

SEQ ID NO: 1986 - DNA, 1710 bp, Saccharomyces pastorianus
atgtcattccaaatcgagacagttcctaccaaaccttaccaagatcaaaagcccggtacctctgggttgcgtaagaagacaaaggtctttaaagatcaacctcattacaccgagaatttcattcagtcggtcctagatgctattcctgaaggctccaagggtgccactcttgttgtcggcggtgatggtcgttactacaatgatgttattcttcacaaaattgctgctattagtgctgccaacggggtcaaaaagctagttattggccaaaacggtctcttatctacaccagccgcttctcacattatgagaacttatgaggacaaatgcaccggcggtattatcttgactgcttcacacaacccaggtggtccagaaaatgatatgggtatcaagtacaatttatccaacgggggcccagctcctgagtctgtcacaaatgctatttgggaaatatccaaaaagttaactagctataaaactatcaaagatttcccagaactagacttgcagacgataggcaaggatacgaaatacggtccattattaatcgatattatcgacattacaaaagcctatgttgagttcttgaaggaaatctttgacttcgacctaatcaagaagtttatcgataaccagcgctctactaagaactggaagctactgttcgatagcatgaatggtgtcactggcccatacggaaaggctattttcgttgacgaattcggcttaccagccgatgaagtcctacaaaactggcatccttctccggactttggtggtatgcatccagatccaaacttgacttatgctagttcattagtgaaaagggttgatcgtgaaaagattgaatttggtgctgcctctgatggtgatggtgatagaaacatgatctacggttatggcccatcctttgtctctccaggtgactcagtggccattattgctgaatatgctgctgaaattccatattttgctaagcaaggtatttacggtttggcacgttcattccctacctcagcagctattgatcgtgtcgccaaggctcacggcctaaactgttatgaagttccaaccggttggaagtttttctgtgctttgttcgatgccaaaaagttatccatctgcggtgaagaatcttttggtacgggttctaatcatgtaagagaaaaagatggtgtttgggccgtcatggcgtggttgaacatcttggccatttacaacaagcaccacccagaaaaggaagcttccattaagactatacaagacgaattttgggctaaatacggtcgtactttcttcactcgttatgattttgagaaggtagagagtgaaaaagctaacaagattgttgaccaactggaagcttttgtctccaaatctggtgtgattaactcccccttcccaactgaagaatccgtgaatgttaccgactgtggtgatttttcgtacacagatttggacggttctgtgtccgaccatcaaggtttgtatgtcaagctatctaatggtgcaagattcgttctaagattgtctggtacaggttcttcgggcgctacgattagattgtacattgaaaagtattgcgatgataaatcacagtaccacaaaactgccgaagaatatttaaagccaattataaactcggtcattaaatttttgaacttcaaggaagtattgggaactgacgaaccaactgttcgtacctaa

SEQ ID NO: 1987 - DNA, 354 bp, Saccharomyces pastorianus
atgggtggattttgggacgcatttgcagtatacgacaagaaaaaacatggtgatccaagtttgtacggcgggaatcatatgaacatcggggagagtaagacacaagttatgttctcacaagaatatcgggcacccaagacggagcagcctatgccggagaacatgcagaatatgagacggtcttctatgtcttcggtggacagctccgatgtggaggccgtcaaggagggcagattacccgcagacatagaaataccaaaaaatgttgacatatctaacatgtctcaaggcgagtttctgaggctttataagagtttaaggaagggcgaacctgacaacaaggtcaacaggtaa

SEQ ID NO: 1988 - DNA, 2064 bp, Saccharomyces pastorianus
atgatcagacagtccacactcaagaacttcgctattaagcgttgcttccaacaaatggcataccgtaacacacctgctatgagatcagtcgccctcgcgcaacgcttttatagttcatcttcccgttattatagtgcgtctccattgccagcttccaatagaccggaaccagccccaagtttcaacgtcgagccagtggcacaggtgcccgagccttctaaactggccaagagactacgcactgagcctgacatggacacatcctttgtcggcttaactggtggtcaaatattcaatgaaatgatgtctagacataatgtcgacactgtatttggctatccaggtggtgctatcttgcctgtgtatgatgccatccacaacagtgacaaatttactttcgtcttaccaagacacgaacaaggtgctggccacatggccgaaggttatgccagagcctctggtaaaccaggtgttgtcttggtgacctccggtccaggtgctactaacgtcattactccaatggcagatgccttcgcagacggtattccaatggtcgtttttacagggcaagtgccaactagtgccatcggtaccgatgccttccaagaagccgatgttgtcggtatttccagatcctgtaccaagtggaatgtcatggcaaaaaccgtggaagaattgccattgcgtatcaacgaagcttttgaaattgccactagtggtagaccaggtcccgtcttggttgacttaccaaaggacgtcacagcggccattttaagaaacccaattccaacaaaaactactttgccatcaaatgcgctaaaccaattaactagtcgtacacaggatgagttcgttttgcaaaacatcaatagagcagcagatttgattaatttggcaaagaagcctgttttatacgtcggtgcaggtattttaaaccatgctgatggtccaagattactaaaagagttaagtgaccgtgcacaaatacccgttacaactactttgcaaggtttgggtgctttcgaccaagacgatccaaaatcccttgatatgttaggtatgcatggctgtgccactgctaacttggcggtacaaaatgcggatttgctaattgctgtaggtgctagattcgatgatcgtgtcaccttgaatatcgctaaatttgcaccagaggcccgtcgtgctgctgctgaaggcagaggtggtattatccattttgaagttagccccaaaaacataaacaaggtcgtggagactcaaatagcggtggaaggtgacgctactgggaatttggataaaatgatgccaaaaatctttccagtaaaggagagatcagagtggtttggtcaaataaacgaatggaagaagaaatacccatacgcttacatgatggaaactccaggatctaaaataaaaccacaaacagtcataacaaaactatccaagatcgccaacgacacaggaagacatgttatagtcacaaccggtgtcgggcaacatcaaatgtgggctgcccaacactggacatggaaaaccccacgtaccttcatcacatcaggtggtttaggtacaatgggttacggtcttccagccgccatcggcgctcaagtcgctaaaccagattctttggttattgacattgatggtgatgcatctttcaacatgaccttgaccgaattgagttctgccgtccaagctggtactccagtgaagatcttggttttgaacaatgaagaacaaggtatggttactcaatggcaatcactattttacgagaatcgttattctcacacacatcagttgaaccctgatttcataaaactagccgacgctatgggtctaaagggtttaagagtcaaaaagcaagaagaattagatgctaaattgaaagaatttgtttccacaaagggccctgtcttgcttgaagtggaagttgacaaaaaagttcctgttttgccaatggttccagcaggcaagggtctagatgagttcatatactttgatccagaggttgaaagacaacaaaatgaattacgtcacaagcgtaccaatggtaagcattga

SEQ ID NO: 1989 - DNA, 1086 bp, Saccharomyces pastorianus
atgtgcggccggtttgcccttgcttacgatagcggggatttgtttagattgttagaggaatggaatatacccgtgaatacacccaaggacacctcatcgaatgatcgacgttcacaagacgaggagatcactccaaatcaggctgttgacaatcacgacattttcgaagcttcttacaatattgcacccaccaaatactccgcagtataccgttccgataccaaagccattcaatttatgagatggggcctagttcccttttggaccaaagatgtttcgcagtttaagacgtatcgtaccttcaacgcccgtttagagaatctacaggaaagcaagatgtggatgagaccttgtgagaaaaaacggtgtgccgtactaatgagcggatattttgaatggaaaactgttggaaagaagaagaccccttattttatttcaagaagagatggtaagttgatgtttgtagcaggaatgtatgattacttggaaaaagaagatctgtatacatttaccatagttacagcaggaggacccgaagagttagaatggctgcatgaaagaatgccctgcgttctggaacctggcaccaagagttgggatgcttggatggatgtgactaagacggagtggagtactgaagagttgctaaagctattgaagccggagtacgatgaatcaaagttacaattttatcaagtcacagacgatgtggggaagactagcaacaccggagaacggttaattaaaccgatttttaaagaagatacagacatgtttagtgtgaagacagaaaaaaaaggcactgggtttaaaactgataatgaaggagagattaatgatgctaaagataatgctgaagcagtgaaaagcgaagataatcaagatggaaaggaatatttaaaatatgctaaaaaggaagagcacgagagaacaattccagcagacgaaacaagtataggcgatcgagtaaataaggaaaaaaagaataaatcatcaaaggacaagggaacaaaaaggaagagaaatatagtggatatgctaggaaatcaaaaaaattttagaggcaagaaagaactgaagaagtga

SEQ ID NO: 1990 - DNA, 642 bp, Saccharomyces pastorianus
atgtcacaaaaggaaaacatgctcgagagtcctgccgaatttctgaaagaggtgagagaaagctttaatatacagcaggatattgatgccatgaaaagaatccgccacgatcttgatgtcataagagatgaaagtgaagcaagaattacttcagaaaactttaaagtatctgagtcgggcaaaaagctgaacacagagaggataaacatcgctaagttggaaggcgatttggaatatactaatgaagtaggcaatgagtttggcagcaaagaagagctggttagtctacttaaggatttggacgggctagaacgaaatatcgtttctcttcgtagtgagttggatgaaaagatgaaaatgtacattaaagatagcgaaattgtatctacggcagacggttccgaaataaatccaaagatgatcgaatccgagctggaagatcaaaataccatcactccagaggcaaacgaaaacattctaaaactaaaactgtacagatcgctaggggtaatattagatctagagaataatcaagtccttatcaataggaagaatgacggtaatatagacgttttacccttggatgacaacttgagtgactattataagaccaagtatatatgggaaagattaggggaatga

SEQ ID NO: 1991 - DNA, 582 bp, Saccharomyces pastorianus
atgaaagtgacagttcaaaaaataccctcttttttactcaggttcaataaaccgagtctacttgtgccaaaaatttcttctccattctttttgcacagtcaaatcttcagggataacacaagatatttctatgctggttgtgtatccaaattagaccttcggttgggcaatcgtgaagaggagcttttagtatcccagagaaaacaaagaccaatatccccacatctgaccatttacgagcctgaaatgagttggtacctctcttccttgcatcgtatatccggtgtcttattagctctcggattttacgctttcaccattactctgggtgttacgacactattggggatgcagacatcctttcaagacctaaataagtggtaccatgaaaagctacccaaatggtcccaatggctacttaaaggatcagcaggatacttgtttgcgttccactttggtaacggaattagacatctcgtctgggatatgggctacgagctaaccaatcccgcggttgtcaaaacaggatctgtcgttttagctggtacgctggtcttgggcacctatttactggcccaataa

SEQ ID NO: 1992 - DNA, 1893 bp, Saccharomyces pastorianus
atgaactcttcaaattcttctgacaatgtcttcatgagctcgtttagctatttgaatcaaacatcacagcgtataataccaggaaattctaccttcgcaaacactatcaacttcccgtataggctgggcctatcctttgtaggggctgtgagtttacaatacgatcaaaccgtcaagtctgaagaaatccctcctaccctaagatctgtttttgatacggtaggcttcttcttctgtccatatgccattttttgcttcataattgccattgttctcaacagattcgtggtgtactatgccgttctcacgaacggtgccagacgcactgtgccaacgtggttgatcaacgttttccacgtctcagcagtcgctgtgttagcctttgtatcattggggccactcatattgggtaaagattatagcatcttgggcagccctttgtttgccccagacaaaatactacagtatatattctacgcattcgcctattcttattgcgttgaaactatttttaccattatgcgtaactctagcccgctggagggtaccgactattctttgtttgaactatcgatccagttttatacaatgacgagaaatgacattacattaattggttcacccgatcacattatagattattcaatggctatttcaagcagaataataatccatctagtagaaatattcaggatcagaaattaccgcttgcttttcagtactatcctgaacctctgtcatatttattacttgggtataagagtcaagcaagatggatggaaaagccttccattttcagtaaaatttagacatttcccaaaaatattcgcgatctgcattatttgcatttctttgataatctttgaactatcatgcttaattaggtggaatccatttggaaagtctaacaatgcctgtgagcttttacagttttacccactcagtagaaactggaaaaagtatttgaattacacaggcgaagaagatttttcaggtatggccaccaagtttgccctgttattatgttctggaactgaactgatggaaaagggtatacggagagagcttcctgctgtgaacattccggataatgttaatgaaagattctatatcagcggctatttaaacgaacttacgcaatcaggcaaagatgacaaaacctctgactttttgaagcggggatcatcaatatcaaagccaaggttcttcttgatgctaccaaacttcatattatatataatgaagaagttggttggtcagttattctttgtcttcaaaaataaatggtttaccgacgaagacgacgacacctcttataaagagccattcaaagtgccgaatacagctgagaagaaccatgtgaataacgccaaaattgacagcagcgaccacggcgaagatttcgaattacttaacactaacaacgaggacctctctggagattacgaaccttctgaaattgagtcactctgggattccgatgacgagaatttggaagaagaaacccttatctgcaaagagacacatgacgccctgttggatttgttttctcctgaggaaactgaaactcctgtagattatgattggatcgtttcaactagtcatatccttcaacaaaaactactatcgaataaaacttcaacaagagcattcctctcaggttccacactaaatggaattagcgaaccgtccggtgaagactgtgactttgatctatcttgtgctgtgtgcaaagtcaatgagagaaatacaatactatggccttgtcgatgctttgccctgtgcgaagattgtagaatttctttaggtttacgtggatttagcacttgtgtgtgttgtaggggtaaagtccatggatactgtaaggttcatccaatttcaagccataggtaa

SEQ ID NO: 1993 - DNA, 1779 bp, Saccharomyces pastorianus
atggccaactacacaaaaactgcaatactatcagtctacgacaagacaggtctacttgatttggccagaggtctaatcgaaaagaacgttcgtatcctcgcttctggtggaactgctcgtatgattcgtgatgcaggcttccccattgaagacgtgtccgctatcacacacgccccagaaatgttgggcggtagagtgaagactttgcatccagccgttcacggtggtatccttgccagaaacatcgatagcgatgagaaagacttaaaggaacaacacatcgaaaaagtcgacttcgttgtctgtaacttgtatcctttcaaggaaactgttgccaaagtgggtgtgactattcccgaagctgtcgaggaaattgacattggtggtgtcactctattaagagctgcggccaagaaccacactagagtcactatattatccgatccaaaggactactccgaatttctgggtgagctatccaacaacggtgaaatttcccaagacttgaagaacagactagctttgaaagctttcgaacacacagctgattacgatgcagcaatttctgattttttcagaaagcaatactctgaagggcaagcccagatcactttacgttacggtgccaacccacatcaaaagccagctcaagcctacgtcagcgaacaagatagcttgcctttcaaagtgctatgtggctccccaggatacattaatttgttagatgctctaaactcatggccattagtcaaagagttatctgcttcgttgaatttgccagctgcagcctctttcaagcacgtttcaccagctggtgccgccgtaggtatcccattgtctgatgtggaaaagcaagtttattttgtcgctgacattgaaaatttgtctccattggcatgtgcctacgcaagagctcgtggtgctgatagaatgtcttcattcggtgactggatcgctctttccaatatagttgatgtaccaaccgccaagattatctcaagggaggtctccgacggtgtcattgcccctggttatgaacctgaagctttagccattttgtccaagaagaagggtggtaagtactgtgttctacagatcgatccaaactatgttgcaggctctgtcgaaagaagacaagtatacggtgttactttggaacaaaagagaaatgacgctataatcaatcaatctactttcaaagaaattgtttcccaaaacaaaaacctaaccgagcaggcggtaattgacttgacagttgctaccatcgctttgaaatatactcaatccaactcagtatgttacgcaagaaatggtatggttgtcggattgggtgctggtcaacaatccagaatccactgtacaagattggctggtgagaaggccgataattggtggttcagacaacatccaagagttttggaaatcaaatgggctaaaggtgtgaaaagaccagaaaaatcaaacgctattgatttattcgtaactggtcagattccaactgaagaaccagaaaaatctgaatatgaatctaagtttgaagaacttccaaaaccatttacttcagaagaaagaaaagattggtcgagtaaattaaccaatgtatcgctatcttcagatgcgtttttcccattccctgataacgtttacagagccgtcaaatctggtgtcaaatacattgctgctccatctggctcagtcatggacaaagtcgtcttttcagctgccgattcatttgatttggtttacgttgaaaatccaattcgtttgttccaccactag

SEQ ID NO: 1994 - DNA, 615 bp, Saccharomyces pastorianus
atgggtgcctacaaatatttggaagaattgcaaagaaagaagcaatctgatgttttgagattcttgcaaagagtcagagtctgggaatacagacaaaagaatgtcattcacagagccgctagaccaactagaccagacaaggctagaagattgggttacaaagctaagcaaggtttcgttatctaccgtgtcagagttagacgtggtaacagaaagagacctgttccaaagggtgctacttacggtaagccaactaaccaaggtgtcaatgaattgaaataccaaagatccttgagagctaccgctgaagaaagagttggtcgtcgtgctgctaacttgagagtcttgaactcctactgggttaaccaagattctacttacaagtacttcgaagttatcttggtcgaccctcaacacaaggctatcagaagagatgctcgttacaactggatctgtaacccagttcacaaacaccgtgaagccagaggtttgactgccactggtaagaaatccagaggtatcaacaagggtcacagattcaacaacaccaaggccggtagaagaaagacctggaagaagcataacactttgtccctatggagatacagaaaataa

SEQ ID NO: 1995 - DNA, 246 bp, Saccharomyces pastorianus
atggccagctcttcatccgtttcctcttcctctgtccagaccaacagtgctctagtcaacaacagtgccgtagctgcctcttctgtctctgccagtgctagtgccagcgccaactcctccggtaacagcactacctcttccaagaacgccgccccaggtatggttgccaacccagtctcctggaagtacggtgccgtcatggctgccatcgccgccggctctttcgtcctaggtgccggtatctaa

SEQ ID NO: 1996 - DNA, 2895 bp, Saccharomyces pastorianus
atggatgcaggtatttcagccatggctccacgaaacggccagccttctgcaagagcacaattaaggaataatttactgaatagcgatataggaaacattgacattcgagaagaaactcccatttcaggccaggaaaaaaatagcagtaacatcagcaaccagtccttccccatgccacaacaacagcaacagcaacaccagatcccccaacaatactatcgcaacaattccaatgaagctccgatgccagttccagtgcaatatccgcaaatgcctacgcaaatgcatccgcagcagcagcagcagcagcaatatgactttgggtactccgatccatcgacgaatggaataccagtaatacagcataattttcctaaaccaacaccaagcaataatcggaacagtactaataccagaaagtcatcctctctaactcaaagttcattttccaatttcttcaagcataaacatcaatttggtaagtccaagaaaaaaacaaaaggcggagctggagatggtgacgatgatgacgacgtgatcatggaagattctaccagtgcagacttaactttcaatgatatccagacgtttggccacaaaggtggcgacaagtacggatacggcggtgactctacacctatcatccccactttagtgactaaagatcgcgggaatatgactaatactgaatataggaagtacctcacgaatcaaagaaaaattgcaatgaacgccatggcaaagcaaacccaaaatgtcggggcagactcgttgccgcctagagcaatgtctttgcaaagtttcccgaacggtaatcctatggtgcaagctcccactccacatccgttattccaaccgaacaacacgatgaatcctaataactcaaggtcaaattcattaatgagtgggcctcctcgacaatttcagcagcagcagcagcaacaaagaggacctccgttgaatcaatataataaccgaccaggacaatttcagaatccttctcaaccggttatgcgtcctggccaacaaccacctcaacaaccgcgtgctatgtcattaaccaactcgccaagatactcgcctcaaaatgctagaccattcgtgcctcaacagcagataccgcaaagacagcaacaactccagcagcagataccgcaaagacaacaacaacaacaacaacaacagatgtctcagaattaccgtgcaatgtcattacaagctcaaaacttacctcaagggccgaaccgagggaacctaattgacggtgatcgtagagcaatacctgctaatcaatcaataggtccatcctcaatttcctcacgaaataattcagcttattcaataccaaatgtaaaaaacaaaccaccaaccgcatcttcttctttctctactacttctacttcctcctttgtagatggtacagcagtacctgatttggcaacccaaaagtcttcacctttacggaagcaaattaacaacaacctagcaattgaaaacaagggcaagctaaacgttttgcagttgtctgctcctcagcaagatgaactaaaggaaaaggaaagagaattagcagaaatggagaactccttacgtgaaagggagctattaatagcgcaaaaagaaagggcaaaaatcgaaactgagaccaaggaatcgaaggaaaccttgcgagaagaagatgatttaaacctaaggcctacaagtgcactagaaaccggcttaagggacctttcattggaaggtgaaaatgcggtggctaataggtcgtctttagtcaccttttcatccacattcagtgattctccctccaagcaaaaaatttttaatgccagaactggtatgtacaaattagaaaattctaccgatattaatgaatacgttacagctcaagaatttcctccacctggacaaaatgatgccaatacagataacgttgaagccaaaacaatggatgaaagcaggtcaggttacaatgatagcaacagaacttatttattgcaatctataccggaaagggacccaaaaagaaacatcccagtgggtactatcaagcagggtcaagccagtagccatgacaaaagactaagcaatgttaacatatctatgaatcaagaaaatattaacaatgacactttcctgtatagaaagaacgaccgcgatggtcacttatcggcggtttcctatatgtccggctcctctcgtagatcgtacatatcaaatacacagccattgaatattgaccccactccagaacctgataatttcatgcccaatatggacggttcacctttaaaaagaagcattgctccaattgccaaaatcaatgataatgatgatgatgatgatggtgatgcgaatgatgctcaagaagatttcagctttgataatactctggctaagtcgtatgaaccatcttatgctaaaagagaaattgcttctaccgcgttaaacggtagagaaagcggttctcagtccaagatgataactatatcaggagaacaattaaacttgataacggaaaacaaagaactgatgagcgaactgactcttgtctccacagaattagctgaatcgataaagagagaaactgaattggaggagaaaatacggttatacgaaactaataactcaacaccgaacttcgatgacacttcatgcgtatccttttctgattttgagaaggaactaaggaaaaaatctagtaaaattgtgcaattgattcagcaactaaacgatgagagattgaagagatttattgcggaggaacaactattactacaagaaaatggcatcaagcccagttctatagaattggtggcaaagatcgaaaacttgaacaaactcattgacgaaaaggattcagaaatcgaaatgcttaaaagccatctgcaatag

SEQ ID NO: 1997 - DNA, 1029 bp, Saccharomyces pastorianus
atgtctgggctagcgaaactgaagtcgtggctgtataagggttccctctttatatcattgatacttttgattgggttttcagtagtattgcctatagattccattgcacaggcttctaaatcagagaacaatgctttcaacacatttattgttgttggtgccttagttgtttttggtgttgtttgtatcgttattattattggaagagtgctatttcacaaaagctgtctaaaggatattccaagaagatatattccaatcacaccagctgatcttccgcatcttgcgagtcgagaagcagtattgaaaaacatggaaaggtctaaggaattaactattctgctaaaaaaaccaaaggatcctgttatccatgatggactggaacctccaaagcgatgtgattttccatcaaatgaaaaattatttccagaatacctaaattatgctgattgtataaaaagtctaacggatagattgaaataccatgggttgtttctgaacaacctagatgttaggatgaaactggaggacacttttgctgatgtggtgaattctcagtttgttaaccgcaatactaacaaggttcaattgcaaaaggctaaagattttattgacttgtatgaaacgataagattttcaggcaaagatgtcacaagagaccaatttatactgtttgttgagctgtgtctttattttggggaggtgtcactaacaagggatacgtcatttgcaaatttccagaattttaaatataatgccagttcaaataatggcggaacaaatgaatcgaaatattcaataaaccggttcgatgaaaacgaatacgctcaggaagatatgcattactttcctgaaccgcctacccatttggttagagagagtagcagaagcacagtggcacggcatatttcatctggtggagatttacctaattctgaagagcatcctttagaagacgattctgattgtaatgggcttaatgacaaacttgcagaagttcacagttatagaagcgtaattcgtcattaa

SEQ ID NO: 1998 - DNA, 1017 bp, Saccharomyces pastorianus
atggctggatcaatagaccaatcactcataacaagtacacaacaacttaaaggaaaaaaaaatggcgagaaagataagaataagtcctctgtcaacttgaaaaaagaccgcaaagagatgctatatggcatattaaacgaaagaaacataaggcaaattcagtttggtgtgagtaaaagattccctacgtggtatgggagcgcggtttattttgatccagaaacaaaaagattaggatgctctgagtccaggagtcaggttcactccggatccaacaaccaatactggctagataccctgtttgtttgtgaatactgttttaaatataccgacgatcagacagtgtttatagcacatgccgcagcttgtccatttcagaaacatgctccaggcaaaataaaatacaagagtcccgaatacacaatcagacgagtgaaaggatccaaatatcaactgttttgccaatgtctttgtctttttacgaagttatttttagacaacaaatccatgtactttaaagtagatcattacgagttttacgtagtttatgaaactggatcaacaaagccaatggggtttttttctaaggatttggtttcgtatcaacaaaacaacctagcatgcatattaacactgccaccatatcagagacgtggattaggctcattacttattgagttctcatataaattatctcaattagaaggcgttatatcagggccagaagtgccgttatcgcccttcggattgattgggtacctgaaatattggtcacgaatactctattggcatctcattgaaggagatctcgcacattttgataaagtgagcttggaagatctttctattgtgactggaatgagagtcagtgatattattctgactttgaagcacttaaactgtattggtgaaaataatcaaatttacttgcaatccttgaatacttggttcaagtcaaatggagccaaaggcaactggtttaagctgcaagatgaatacttgcttatagatgactag

SEQ ID NO: 1999 - DNA, 909 bp, Saccharomyces pastorianus
atgacgtatccaaaaagaatacccttaaatgcatggtctgatgccctgaaggcagccaaaccactaattattacttttgatgcgtacaatacgttgtacgctacaaaactgccggtaatggaacaatattgtatagttggacataaatacggtatcaaagccaaccctttgacgttaactaagaacttcccgcatgtcttcaagaaactaaaagaaaactatcctcagtatggaaaattttctaatattgggcctgaagaatggtggtccagtttgataaagaatgtttttgcaccaatcgaaattcccgatgagatggtgagtgaaatattgctgcggtttgagggttttgattcatattttgtttatccagatttgatcagtttcttgaagaatgtaaaggcaagataccctaatattattctaggaataataagcaatactgatccaatcttttacaaattactgaaaaacattgggttgtatgaaacattcgccgataatatttatttatcatatgagcttgacctggcaaaacctgataaggccatatttgaatatgcattcaacgatattatagataagcgtcctgatttgctgaaggtgtactctaaggaagaaatttgccagcactgtttccacatcggagatgaactaaaaaacgatcttgaaggtgcagaaggtgccggttggactggaattctgttggatagaaatgacaaatacggatatctatcggagtcacttgacaagactgtcagagatgagtataagctatcacttgacaaaatagataaccattctataaagacttgggaaacaagtagcaaacaaacagacactatacagttgaataaaaaaaaatatgttgtttcaaaccttgaggttttagaagagctatttccttaa

SEQ ID NO: 2000 - DNA, 1536 bp, Saccharomyces pastorianus
atgtcaaaaaggtctattgatattgatgagcaagagagagttgtctccgctaagactgattctcattcagtccctgctgttgctccatcaggagagcaagatgctcccatggacgagctggaagaacaattgagtgatgagttcgatagtgatggtgagatcattgaaattgatggagatgatgaaatcaatgacgaagacgacctcaaaaaaaggcaagaacaagctgaaactttagtgcagaaagaccaatctgaaggcaacgaagagaagatccaagaactatacttgccccacaagtctcgccccctaggtccggatgaagttctcgaggccgatcctactgtttatgaaatgctacataatgttaacatgccatggccatgtttgacattggatgtaattccggatacgttaggtactgaacgtagaaactatccgcagtctattttattaactacagcgactcaatcatcgagaaaaaaggaaaacgaattgatggttttagctctttccaacttaacaaaaactcttttaaaagatgataatgaagaagaagatgatgaagaaggagaagacgaagaagacgtggatccaataattgagaatgaaaacataccattaagagatacaactaatagactaaaagtttctccgtttgccgcttctaatcaagaggtattaactgccacaatgagtgaaaatggagatgtttatatatatgatttagccgcacaaagtaaagctttctctacaccaggttatcaaatcccaaagtccgctaaaagacctattcatactgtcaaaaatcatgggaatgttgaaggctatgggttagactggtcaccattgatcaagactggcgctttattatcaggtgattgctcaggtcaaatttatctcacacaaagacacacttccagatgggtgactgataaacaaccatttaccgtttcgaacaatgaatctatagaagacattcagtggtctcggacagaatccaccgtttttgcgacagctgcttgtgacggatatataaggatttgggacacaagatcaaagaaacataagccagccatctctgtcaaagcctctaataccgatgtaaatgttataagttggagtgacaaaattggctatttgcttgcaagcggtgatgataatggtacttggggagtctgggatttgagacagtttacaccaagcaatgccgacaccgttcaaccagtcgctcagtatgacttccataagggtgccattacttctattgcatttaacccattggatgaatctattgttgcggtgggttcagaagataacaccgtaaccttgtgggatttatctgtagaagctgatgatgaagaaattaagcaacaggcggctgaaacaaaggagctacaagacatcccaccccagttattatttgttcactggcaaagggaagttaaggatgttaaatggcacaagcaaattccaggttgtttggtaagtaccggtactgacggtttaaacgtctggaaaacaatcagtgtttaa

SEQ ID NO: 2001 - DNA, 714 bp, Saccharomyces pastorianus
atgtcattgaaagatagctatctagagctcgagtcaaaattaataaaaaaattacaagaattaccatatgttcatcagtttgtccacgatcgaataagcggtagaatcactctttttttaatggtagtcggtacgcttgcatttttcaacgaactttatataaccattgagatgagtcttttacaaaaaaatacatccgaggaactagagcgcggaagaatcgatgaaggtttaaagcttcacaggatgctagtcagtgatgaatatcacggtaaagagtacaaagacgaaaaaagcgggattatcattgaagagtttgaggaccgcgataagttttttgcgaagcctgtgtttgtttcagagctagatgtgaattgtaatgttattgtaggtggcaaagaaattttgtccactccattgaaattccatgtggagttttcaccagaagattacgaaaatgaaaaaagaccggaatttggaactagtctgcatgtgttaagactaagattgtatcattattttaaagattgtgaaatataccgtgatctgattagggataaaggtattgatgagacaagaaagttcacaatttccaacggtgttaaaatctacaaccacaaagatgaactactgccattgaatattgatgatattcagttgtgttttctgaagatcgatacgggaaatacgataaaatgtgagtttgtattatga

SEQ ID NO: 2002 - DNA, 1404 bp, Saccharomyces pastorianus
atgactatttctacgctgagcaacgatggtgccaaccgcagttctggtggcaacaccaagaaggacggggccgcggcgaaggagtgtacctactggaagaagtgcttcaccagggaggagtggaaggagcaggtggcgaagtactcgtccatgggcgagttgtacgcgaacaagaccattcactatccgctgaagatccagcctgacagcaccggcggtgccggtgctggtgctggttccggagccggggacgaggggttctctagcgtacagaccatgccgattgagcccacgctgccgcggcttctgctgaactactttgtctcgatggcctatgaggactcgagcatcaggatggccaaggagctcgggttcatacgcaacaataaggatattgcgctcttcaacgacctgtacaagatcaaagagcgcttccacatcaaacatctcatcaagctgggacacattaacaaggcgatggacgagataaactcgatattcgggctggaggtgctggaggagactttcaacgccacggaaagcgatgcgggcagcacgggaaacgagcagcagcagcagcagcagttcgatatagacggggacttgcatttcaaactgttgctgctgaacctgatcgagatgataagaagtcaccacgaacaaaagaatggtgccgaagactcgaacgatttcatcctcaatctcatccagtactcccaaaagaagctcgccataaaggcctcgtccagcatcaaaaaaatgcaggaactagaactggcaatgactctgctgcttttccctttatccgattccgtcgatagcagcagcatcaaactccccaagtcgttacagaatctgtactcgataaccttaagggccaagattgcaaacttggtcaatgagaaactgctcaaattcattcacccgaagatccagttcgagatccataacaacaactcgaagtttcccgatcttttaaactccgacaagaaaatcatcacgcagaacttcaccgtgtacaacaacaacctcatcaatggttcaaatggcacgaaaataaattacatctcttccaaccaacccattagcgacaaaatggcaagcagcgacacgaccgctaccagcaattcggtttggttaaaccaccaagacaccaaccatggaacaaacacaagcgcgaccaccttcaagaatttggaaaacaaaaactactggaaccaagcgtccgaattgttaaccgccagcgctgcttcgaacacaaagacaaagaacttgcagttcaacaactactcctcttctgaattcccctatgaaccaagattgacgcaaatattgaaactgtggtcctggtgcgaaaaccagcttcaccgcaaccaaataggcgtgcctaggatgaaaaattaa

SEQ ID NO: 2003 - DNA, 1710 bp, Saccharomyces pastorianus
atgcaggctcctaatgtttaccccttccctcaaccgcaattacaacagctgcccaggtttcagtacgctcccacgcaactcgtgcttgaccagtctgctccgcgggtagatcctctgcaagcgggagtagctgtaaatcccgcgttaccgatgcagcactataatattcacagcacgcgtagcagtgataacataaataactacgcgtattattaccatcatcccgataataacgataacactacgagtacgacgactcccactaataacatcaataataataacaaccctactcttcctgttactggcattccggtgcccaatagctctctttatagaaatacaaaccaatttccttctgctcctcagcgcttgcttagtattataccggaccctcatatggcacccaacatttctcattatcaaccaaataatattcgtcctcaaatgcgtgtctctattcctcataatattcattttcaacaaatacccacctataacaacactaataatagcaacgataaccctgtaggctcgaatgaaaatgagttgctggacaacatcaacgagcgttaccatcacgagctaaacaagatggcttcattttccaagaatttcgaaaacaatgaactcacaaccactcccagcaattcaaatatccaatccaccattgacgaactgacaaaactgaagtatctgtcgagttcttcccattttaagcagaacatcgccatacaaaattactattctcttcagaatcacatcgctactattgaaaaccgtttgactggcttgctcaatgatagacagcagcagcagcagcagcagcagcagcaacaacaacaacaacagcagcaacaacaacaacaacaacaacagatacccgaaaactctaactctacatcaccatctaataagataaaactaccttccctacaggaactaactaaatctatatccacccaacatcccacaaccacatatgtcaataaaagacatgcttcagattcagatacaaagctaacaactacccatcatccattataccatcgtcacacctttctctccgcctcgtcatcctcgccttctccctctgccggttcagtgcccctccagaagctacaggttccaagactggacgaaccaagtgacgcaaaaagtaacttatcatcgtctcccttcaatttgattacctacataccgagtactaccttgtctcccaccgtgcaaacacagttgaaaaacaatactacgtccagcaaaatcacaaagaagaaaaacaacagaggtagaccaagagctattcaaaggcagccaacgctcactacctctactcatttcataaacaactccggcactgccgccgctgtgactccaaacgctgcccccgcaactaataaccatgaaaaggaaaccagccccaaaaaaataatcgaattctgtttccactgtggagaaactgaaactccagaatggagaaaaggtccatacggtacaagaaccctttgtaatgcgtgcgggctattttacagaaaggttaccaagaaatttggttcgaaaagcagcaatttactactaaggtacagaagagccattgattcagccaacgatcgtagaattcctgatttcatcaccattccaaacagattcatccatgatatggataaggaccaaacgttagattctgaatataatacaatattacaatag

SEQ ID NO: 2004 - DNA, 2004 bp, Saccharomyces pastorianus
atgccaagaaggtctatagtacagataaagaggtccgaggtaaaacgaaagcgaagtggcgttgattatactgcaaataataagacccatcataagacacatcataaaaatacacatgcgtccaccaaaaggcaaaggactttgactgaattcaacattccaacttcctcgaacttgcccgttcgttcgagttcacgttcgtctccaagggtcggtcattccgcgtctaatacaagtatagagccgatagttattgatgataacgatcaaaacagtacttgttctgacagcactgagaaagttgaaattgtcttattcacagatgaggaagagaatctggtagagctggacgatgaaaaaataaaacccgagatagaccgtcaagcaagggatggaacagaagaccgaataagagtagaaatcgaggagcacataaatgttgaaatctctacaaatgtgattagatgtcctatttgctgtttgaatctttctcacctagagctgtacgagagagagacacactgcgaaatgtgcgtaggaagtgcacgtagtaaccagggatcacccaaaaggaatgttaagattccgatccctaaaccgtcatctgccataaaaccaaaaaaggactcaactccattaaagagaccagtcagggttaaacctagtttaccaagcttcaaaataatcaagttcagcaacgatcacaaagtagtcgttgatggtttcaactataaagctgacgaaactatctctcaatacttcttatcacatttccatgccgaccactacatgggtcttaaaaaatcatggaacaatccggatgagaatccaatcaaaaagactctttactgttctaagatcacagcaattttagtaaacttaaaatttaaaattcccatggacgagatccaaatcttaccaattaacaaacgattttggataacggacacaatctccgttattccattagacgctaatcattgccctggtgccacaataatgcttttccaagagttccctgcaaaatttcatgataagcctatcagacaagttttgcatacgggggatttccgaagcgatgctcaaatgattaagacagttcaggagtggttaatcgagacggcgaatgacacaatcgatcaagtttatttagatacaacgtatcttactatgggctacaattttcctccacagcagtctgtatgcaacaccgttgcacagttcactttgcaacttcttaagcaaggtaaaaacaagacgttcggtgattcacaaaggaacttgttccatttcagaaaaaaaatgtcactaacatctcaacgacacaaatttttgtttcttgtgggtacatacaccattgggaaagagaaattagccatcagaatttgtgaattactgaacacgaaattatttgtgatgccaagctcggttaaatttcaaatgatgcaaatcgttttgcaaaacaacgaaaacgagagcgacaaatgggacgaaaatttactcactggcgacatgagcgaatcgtttgttcacttggtacccattagagtgctgaagagtcaagaaacaattgaagcgtacttgaaaagtttgaaggagttggatgccaactgcttaaaggacgtcgatgacgtggttgggtttataccaacgggatggagtcataactttggcctaaaataccagcaaaataatgataatgataatgaaatggatggtaataccgaatattgtttggaattaatgaagcatgaaggagatgacgggaaggagtttgagatatccagtatattaaggcagtacaaaaaatacaacaagttccaagtcttcaatgtgccgtattccgagcacagtagttttgatgacttggtgaaatttggttgtaagttgaattggtccgagatgatacctactgtgaacttacataatttatggaaagtgaaatatatgacaaattggtttaaatgctgggaaaacatacgaaagatgcgggcggctaaatga

SEQ ID NO: 2005 - DNA, 1113 bp, Saccharomyces pastorianus
atgaacattcaaagtagcaatcctccgaatctcagcggtaacatagtgtctaaacaggtttactacgcccaccccccgccaacgatagatccgaacgatccggtgcagatatcttttcccactacagaggtagtagggcatggttcgtttggcgtggtatttgcaactattattcaagagacaagtgaaaaggttgccattaaaaaagtcttacaagataaacggttcaagaatagagaactagaaataatgaagatgcttagccatactaatataatagatttaaagtactttttctatgagagagattcccaagatgagatttatttgaacttgattttggagtacatgccgcaatccctgtatcaaagattacgccatttcgtccatcaacgtacgccgatgtcaagattagagataaaatactacatgttccaattattcaagtcgctgaactatttacatcattttgctaacgtttgtcatagagatattaagccgcaaaatctgttagtagaccctgaaacctggtctttaaaactgtgtgattttggcagtgcaaagcagttgaaacctacggaacccaacgtttcttatatttgttcacggtattacagagcaccggaactaatttttggcgccaccaactataccaaccaaatcgatatatggtcttctgggtgcgtgatggcggaattgttgctaggccaaccaatgttcccgggtgaaagcgggattgatcaattagtggaaattattaaaatcttaggcaccccatcaaagcaagaaatatgctctatgaacccaaactacatggaacataagttccctcaaattaaaccaataccattgtcgcgtgtttttaagaaagaggacgatcaaacagtggaatttttgactaacgttttaaaatacgatccttcggaaagattcaatgctttgcaatgtttatgtagcccatattttgatgaacttaaacttgatgatggtaaaattgaccaaataactaccgatttaaaattactggaatttgatgaacatattgaactaggtcatttatcgcctgatgagttatcttccgtaaaaagaaaactcttccccaagtccaaataa

SEQ ID NO: 2006 - DNA, 1464 bp, Saccharomyces pastorianus
atgggtaacgtaccagggaaacttgatcaagaagacggctataatgattctagaccgaattcatcgaataacgttacatcgctcagtaccgacaaacaatatgacgatgagatgtcttcccgggctaggacaagacacacaacgtctttggtcaataacattttgagtggcaacaatacccgttcaagagctagctcaaatatatctggtactagtagaagaaagacatcacgagaaaaggagctagctaaagaagcacacgccaagcaattggtcgtaaggtgtaatgaaaccgtggacggtggatttttagccccatttggttgctattcttttgaaaaattagactatgacacgaccgttattaaagacttaataaccaaaagaaaattagcacccttttacactcccctacaggatttcgatgaaagttggactagagacgagttaataaagataattgacggattgccattacacgatacgtttgatgaaaaattggaagagtttgaagatgtaccgataggtaatttgaggaagcctacatataatgatctaatagataaacctttgtccaaaaaggaacagaggagaatgcatgcgaaaatttttagagcaaggttatataaaaaaagaattctatggcaagaaaacgaaaatgagtcgtttctagagaaaaagttagagttgagacagcttggcgataatactaatagcgttggtgatggcaatagtagctgtctgaaaacaaattatcatctgccctcagatgatttaaagtatacgctttacaaaaatggatcagaatgtccgatttgttttctttatttccctgaacccttcaaccactctaaatgctgtcaacaacctatttgtaccgaatgtttcgtgcaaatcaagagagctgaacctcatttccctcatgatgaagtagaccctactaatccaccaacaaatgacagtgaaaaggaccctaatcttctaacttccgaaccagcaaattgtccttattgtgcaactgccgattttagcatcacttatcagcctcccacaaatcgtaaaactggactcggtggtatatcccctgatacttacgtgtatatggcctccaatacagagaaaacgaacggcaaccagttgccttcttcggtgatcacttcagatactattcgtccaagttgggaaactagactaaataaggaaaggtctagactggtaagaaggtccgccaacgctactgccatacatataagcaatagactgattgatccaaatcatagttcaagaagaagtacgggtcctagtggaacgcctattcaagaagaaagtacatcaaattcaagatcacctgaaccgacaataaatgaaatcgaagaccaaatggtcagagaggctatcagattaagtctcgaagaccaagataaccaaaaaaagtcaaagaataaatctattttacgaccatag

SEQ ID NO: 2007 - DNA, 1683 bp, Saccharomyces pastorianus
atgattaggcaatcattaatgaaaaccgtttgggctaactcctctaggtttagtctacatggcaagtcgggccttgtcgcctgcaccaaaagcagatcctttagcagtgctaggaatttgctacaggacaaaaaagttattctgcaaaaagttgcacccactaccagtgtggttgcgaagcagtcctttttcagaaggtcaggaaagttcactttgaagttgctgttgtattcagccttggctggtaccgcctacgtctcctattcgctttatagagaggccaatccctccgcacaaattcctcagtcggatactttccccaacgggtccaagaggaagacattgatcatcctgggctccggctggggatctgtgtctcttttaaaaaacctggacacctctttgtataatgtcattgttgtttcgccaagaaactatttccttttcactccgttattgccatctaccccagtgggtaccattgaattgaaatccatcgtcgagcccgtcagaaccatcgctagaagatctcatggtgaagtccattattacgaagccgaggcttacgacgttgaccctgaaaagaaaacaatcaaagtcaaatcttctgcgaagaacaacgactacgatttggatttgaaatacgattatttagttgtcggcgtgggtgctcaaccaaacacttttggtaccccaggtgtttacgaatattcttcctttttgaaggaaatctccgatgctcaagaaattagagtaaaaatcatgtctagtattgaaaaagccgcctctttgtctccaaacgatcctgagagatcaagattattgagctttgttgtcgttggtggtggccccaccggcgttgaatttgccgctgaactaagagattacgttgaccaagatttgaaaaagtggatgcccgaattgagtaaagaaatcaaagtcactttggtggaagctttgccaaatattttaaacatgttcgataagtatcttgttgattatgcccaagatttgttcaagcaggaaaaaattgacttgaagttgaaaacaatggttaagaaagtcgatgctaccactataaccgccaagactggtgaaaatgacgttgaaagtattccatatggtgtcttagtttgggctaccggtaatgctccaagagaagtcgctacgaacctaatgtccaaactggaggaacaagattccagacgtgggttactaatagacaaaaaactacatctattgggtgctcaagactctattttcgccatcggtgattgtacattccaccccggtttatttcctactgctcaagtcgcccatcaagagggtgaatacttagctcaatgtttcaagaagacttacaaaatcgaccaattaaactggaaaatagccaatactaacgacgattcagaagccgctagattgaagaatcaaataattaaaatcgactcccaaattgaagacttcaaatataaccacaagggtgccttggcctacattggttcagataaagccatcgctgatcttgctgttggtgaagccaaatacagattggctggttcattcactttcttattctggaagtcctcttatttagcaatgtgtttgtcctttagaaatagaatccttgtcgctatggattgggctaaagtttatttcttgggtagagattcatctgtctga

SEQ ID NO: 2008 - DNA, 1044 bp, Saccharomyces pastorianus
atgaaggctattaaattgacaggtcacgaacgtccattaacccaggtcaaattcaataaggaaggtgatttactattttcatgttcgaaagatagttcagccagtgtttggtactcgctaaacggtgagagattgggtactttggatggccataccggtactatctggtctatcgatgtcgaccgcttcaccaagtactgtgttacagggagtgctgattatagtatcaaattatgggatgtatctactggtcaaagtattgccacatggaaatcgcctgttcctgtgaagagagtagaattttccccatgcggtaacttcttcctggctattttggacaatgtcatgaaaaacccaggttccattaacatatacgaaatcgaaagggactccaccactcatgaaatgacaaaggtctctgaagaaccaatccataagatcaccacccatgaaggcttggacgctgccaccgtggcaggatggtccactgagggcaagtacatcattgcgggtcacaaagatggtaaggtcagtaaatacgatgtgactaacaactacgaatacgtggattccatcgacttgcacgaaaagtccatcagtgacatgcaattctcccccgacttaacatatttcatcacatcatccagagacaccagctcgttcttggtcgacgtgtccaccctacaagtcctgaagaaatacgaaacggattgtccattaaacaccgctgtcatcacaccactgaaggaatttatcattctcggcggtggtcaagaagccaaggatgtcaccaccaccggcgccaacgaaggtaagttcgaagccagattctaccacaagatcttcgaagaagagatcggcagagtgcaaggccatttcggtcccttgaacaccgtcgcagtcagtccacaaggcacaagttacgcctccggtggggaagatgggttcatacgtctacatcacttcgaaaaatcgtacttcgatttcaaatacgatgtagagaaggctgccgaggccaaggaacacatgcaagaagctaattga

SEQ ID NO: 2009 - DNA, 456 bp, Saccharomyces pastorianus
atggtttccgtcgctacatttttctttttcgtctacttactactatttgtagtgatcgggtttttctcctcattgttcataattcccttactaggcatatcatttgtatttgctatcggtgtggtatcgtttggcttctgcagcaatatgagtttcaaaatggcgcaacttgtatacattcgagcagatgccttcttgaaaaaagtactagatagaatggcttcacaaacacaacccacacaaccacaagagccacaagaaccacaagagctaccagcaacactaaggccagtaagcaatccaacgattccaagcccactgagacaaacagcacgtccctcaaagttcgtcactgaagaagatgtcatctttgaacccgttagcgctcaaagcgccattgctcgttctttagagaccaccgctaaaaaagcgggtaacaggttccagctgtcttga

SEQ ID NO: 2010 - DNA, 861 bp, Saccharomyces pastorianus
atgcaatttttcaaacagcttgtggttttcgtggcgtgcataacctttgccctcgcttacgtggctcaagatgttcatatttcattccccactactaagggcaagaatagcatgatgattggtaaaatcagccccgggctcggaaaggacgatgtcgctccaacatcaatcacagtagataacgctaatgaagtcattgaagtaaatttcgccattgactccagcgacaagcctttccaaaactctctattggttggcctacctgataacaacctagaaatggtttttgaacctgaaatcaagaataacggtaagttgtccatgtacaagtacaagatagatctagccacgttagattctgccttgttacaacaagctttcaagtcactggagccaatacaggcaactttgatcttagcatcctctacagccaaaccgaaagataatttgttccggagggttttccagctggacttggattttgaattcgatcattctgatctatctctcgctggcaagttcgacattcaacctgaaattcgtcacgtcttccacactgagccaaaaagagttgccaagccaatagcccgaattttcgttgtaattatcttcttcactattttgtcgttgctcgtcacctgggtgaattcttgcgctgctgcatttgataatatccccactggcgccaatgccctgtatttcttaggtttcgtcgcgactatcattgggtttgaaattatcttcgccagatattatttgggtacaagcattttcgaaaccttattttcctctttgtacttgggcgccccaggcttgttggcgtctaccaaatttctgagatattttggtcaaacaatctaa

SEQ ID NO: 2011 - DNA, 570 bp, Saccharomyces pastorianus
atgactgttggtgcactgcctatttggtcaaagactttctcttatgcaattagatcattatgcctactgcatataattcacacgtatgcgtacgagtttactgagacaaggggagagtctatgctgccaacgctatcagccacgaatgattatgtgcatgtcctgaagcatttccaaaacggcaaaggcataaagatgggggattgtgtagtggcgttgaagcccaccgaccctaatcatagaatatgtaagaggattaccggcatgcctggtgacatggtgctcgtcgaccccagcaccaaagtaaatcatatcggggatgtgttggttgatgaagagaggtttagtacttatattaaagtacccgagggccatgtttgggtaacaggagataatctttctcattcattagactcaagaacgtacaacgcattacccatgggtttgatcatggggaagattgtggcggctaataattttgataagccattctgggattcaagacgcaatatttgggggtttaaatggatcaacaacgccttcgtggatgcaagtggtgagagcaattga

SEQ ID NO: 2012 - DNA, 1098 bp, Saccharomyces pastorianus
atgtcggacgaagtggtgactaatcgagctgttacttacgctaacaatacaacacctgctacaattacgtcttcgaagctggatttaaaaacctgttataaaaataatgaacttgtgatcgaggtccatgctgctgctttgaacccgattgactttattactcaccagctctgcaactcttatatatttggaaactatccaaagacctactcaagggattacagtggcgtaatagttaaggtgggcaaaaatgttgataagtgttggaaagttggcgacaaggtgaacggtgtgtatggccatatctacggtaagcgcggttctttgtcccattttttaatacttgaccctgctaaaaatgtcgccatcactcatatggtagaggttcctaagggcgaaaacgacccttatgacgactttgtatatgcagccgcctggcccttaacttttgggactgcttattcggtcttgcacaattacaagaaaaaatggagccctgattcaaaggtcttggtcatcggcgcctcgacatccgtgtcatatgctttcgtccatattgcaaagaactactttaatatcggtactgtagctggtatttgtagcaaaaattccattgaacgcaacaagaagttaggttatgactacttggtgccatacgatgaaggaaccattgttgataacgtcaaggcattaagaaaaagcaaattggaaagcgaaaaatttgattttattttcgattcagttggcaatcatgattttttttctgttatgaaccgatttttgaaacctaaggcggatgattccttttacgttaccattgtagggaatgaaaaggccaattatgaaaatatatcttggaaaagttttatctccttgggaagcatatcagcagcccttaatccgttcaaaagtttcaactggcgttttgcttcgccaacgccctccaacaacttcattgaagttggtaatgaaatgattaaaaacggtacctataaaccacctattgattctgtttacgagttcgaaaaattccaagatgctattgacagaataaagtctaataaagcgaagggcaaagtcgtcattaaaatgaaatga

SEQ ID NO: 2013 - DNA, 1530 bp, Saccharomyces pastorianus
atgacagtccttcaaaatccagaaaacagtagccgatttactaatgtgtctgttattgcacctgaatcgcaagggcaacaacaaggacaacaacaacaagaacaacagcaacagccacaaccgcagcagcagcagctgctgctgcaaaagcaggtgcaggaccaatcgcagcaaccgcaaccgcagcagcaggaaccgcaaaaacagtcaacaggaacacttaagactttaaatggcttttcaagtgtacagcaaccaatattcacagcaaacacaccttctacgccctccgcagatttgagcgacaatccagcatggttcaataatccaaagaaaagggctataccaagctcgatactcaaaagatcaaccggccagtctttgagcccggtacgcgatactgcagatgcgtctgttacgttgtccaagcccaacgggttcaacaatgttacatttggctctaaaaaggacccacgtattcctaacaatgtctttcaaaatgacggcagtaacaacaccaccaacaacagtcacaatcacgatttaaatgctatagtttttgattccaatgaggctccacccaaagcttctctggcggattggcaaaaagaggatggcatacttgcgattgatagtgacaatatcgaagatcctaatttaactgccaacatgacacttgatcagaaactaacaactcctttttcacccttcaagcagacagaaaaaaaagctagattatttaacctgttcgacaaaactacaaaagtgccaccaaataatgagccactaaataacagattagatgatattacggttaataataatacagaagcttcaccggatgtagacaataatgcagttatcattttcggatatccagaatcgattgctaactctataattctccattttgctaactttggcgagatcttagaagacttcaaaataataagagacttcagaaaaccaaacttgaaaaataagccatctagtcaaacacacaccgcacaaaaacgtcccatatacactggcgatggttgggtaaaattgacttacgattctcaagtttctaaaaatcgcgccctgcaagagaatgggctcataatgaacggtacattgatcggctgtgtttcatatagtcgagctgctctcaagcaattagcgtctttaaacaattcggaaaacataacaggtgatattacaggtctagaaagtagtttaagttcaaatggcttcagcaactataaacaaacagaaggattcttcgaaaatgctaagacaacaacagctacttctagagctcgtaattcagaattcaaagtttccaaaaattctagttcttttaaaaattcacgtaaactagaaataaaggatggtaggtcattatttttgaggaatagagggaagattcatagtggcgtgttaagctctatcgaatccgacttgaaaaaacgggaacaggaaggtagacataagaaaggctggttaaataggttgaataattggttatttggatggaatgatctttaa

SEQ ID NO: 2014 - DNA, 765 bp, Saccharomyces pastorianus
atgctgagacatctgagtaaaaatttactggcaagcagccggcgtggtccgtatattaacgccagctcgatgaagcgattgcccctctcatccgcatcgcttctgaaagctcgatattcatccaccaagagcccgaccacgaagaccaataagccagctaaaatagatgcccctgggttcaagaaaatcttccttgttgctatcatcggtacattgatttttgtcaagacagtgcagtccctagaaaagaataaaccaaaaacatcgttatcggaagaagaattcgacaacgtcgttaatggattgaaaagacgtatggctattttcccacaaggtgacgttgatataaagttttctttattccccacggttgaggaaactaaaaaaacgttacggaaaacacaaagtaacgacacaagtgaaccacagtttgtagatccagtcagtgtcgtcgactactttagaactttgaaagatgacaggtatgaagctttattgaatgaatattataatgaatatgggccggatacgtatgttgacaatctaccggcaggtatgctagtcatgcttttaggtaggtatttgaaagaaaactgcaaggccggtgataaactgattgtggttaatttcccacattcaattaccgatgcaacaaaatttgaaaatgagatatctgtagttaccacaattcttgttccaaaggaacttgaagactcaaatatctgtaaatactatgaaactgtggggaaggcagacgtcatttga

SEQ ID NO: 2015 - DNA, 468 bp, Saccharomyces pastorianus
atgtcattagtcaagcttgcaaacacatgtgcccatctacagaattgctcgaaagtcagagtggctttaacatcgatcccatacacgaaattacagttacagtttgcatataacctttaccaacaagggtttttgtcgtctttgcaaaaggggtcaacgatgggcccagacaaagaatatgttgaagtaacaccggataacatatctaccagaagactttgggtaggattgaaatacagagacaacaaacccgtgcttagtaactgtcgcttgatttctaaaccgaattctagaatatatttaccgatggaagacatgaaaaagttgtgttcaggtgtaacaattagaaacatcaaacctttgcagccaggggaactgattcttgttcgcgctgagaatagtatcatggagattaatgaagccattgctaagaggttagacggagaagtattgtgtagagttaagtga

SEQ ID NO: 2016 - DNA, 4977 bp, Saccharomyces pastorianus
atgggaattactgatggacagagaagaaggtcttcatcgctacgaacgcaaatgttcaataaacatttgtatgacaaatatcgtgggaaaactgatgatgagatagaattggaagatattagtgaaaacaaggcaacttctaatagcgacaataatgacaaagatgacagggacgaggctaacggaaattatgctactgaagtggagtatgaagaagagggatacaacgaccaagatgcgtcctataacataattactagaatacttgacactatcctagatcgaaggagaacgttccattcaaaagacggtagacatattccaattatattagatcataacgcaatcgaatacaagcgagcctctactaaaaaagatggtcatctaatagatgaaagattcaataagccctactgtgacaatcaaataacatcgtcaagatacacgttttattctttctttccaagacagttatacgcgcaattttcaaagttagccaatacttattttttcattgtggcagtgctacaaatggtacctggatggtccacaactggtacttatactaccattattccattatgtgtgtttatgggtatatctatgacaagagaggcatgggacgattttagaaggcatcgtttagataaagaagagaataataaaccagtggatgtcttagccaaagatgagattcatggtgcgcaagatgtatacgcattaccaaatagtgttatgtcttcgactgcatacctcaccaaaccaaacgctgcggaaggtggcccacctgctttaaacgacgatcagaattcgacacaagggctctccttaggcactcacttcaataattttgaacttcttggaaacaagtacaatgttcacgtccaacaaaaaaaatgggaaaaacttcgtgtgggtgactttgtacttcttacccaggacgattggatacctgcagatttgcttttattgacgtgcgatggcgaaaataacgagtgttttgttgaaacgatggcgctagatggtgaaacaaacttgaaaagtaagcaacctcatccagaattaaacaaattgaccaaagccgcgtcaggtttagcgaatataaatgcccaagtaaccgtggaagatcctaatattgacttgtacaatttcgagggtaatttagaactaaagaactcgcataatgataccataatgaagtatccactaggccctgacaacgtgatttatcgtgggagcattttgaggaatactcaaaatgtcgttggtatggtcatttttagtggtgaagaaacaaaaattagaatgaatgctttaaaaaacccgagaacaaaggcgcctaagttacaaaggaaaatcaatgtaataattgtgtttatggtgtttgttgttgcaacaatatctttgttttcgtattttgggcacgtcttacgtaagagaaagtatatcgaccaaaatcaggcatggtatctatttcagacagatgctggtgtagcgcctacgataatgtcttttatcattatgtataatacgattattccgttgtccttatacgtgacaatggaaattatcaaggcagtccagagcaaaatgatggaatgggatatcgacatgtatcatgcagaaacaaacacaccatgtgaatctagaactgcgacaatcttggaagaattagggcaagtctcatatatctttagtgataaaacgggaacattaacagacaataaaatgatatttcgcaaattttctctgtgtggatcttcttggatgcataatgtagattccagtgactctgaagatgttgcggacgaaggcgttaaagataatccaagctatatgaggtcgccacccaaagctcataacggttctagcgtagatgtcgtttcgattgaagatcaaaatgttcttggccgactagggctttcgagagcatcgattgagacggggcctcggccgtctttagacgattttcctaaacctaggaattctgttgagtataaaggaaattcatcggctacttatacaggtcgtcccagcatgagagcactttttggcaaagaaactccagctgaagaaatgaataatcaggcttcaaatatttcactgcctgaggtttttgcggataatattaaaagctcgtttgatttaattcagtttattcagagacatccgaccgccctgttttctcagaaggccaaattttttattttatcactagccctttgtcatagttgtcttcctaaaaagacacataatgcgtccatggaagaagactctattgagtaccaatcttcgtccccagatgaactagcgcttgtaactgctgctagagacttaggttatattgtattaaatagaaatgcccaaattttgactattaaaacctttcccgatgggtttgagagggatgcaatattggaagactatgaaatcttagagtacattgatttcaattctcaaagaaaaagaatgtcagttcttgtacgtatgccaaatcaaccaaatcaagtacttttgatttgcaaaggggctgacaatgttattatggaacttttacatgatcatgaactagctgcgaagaaaatggcggatataagcatcaacactaaacaacgtaaagacgccgaagcagaactggttcttcaacaaagaaagtctctggaaagaatggtagatgaagaatctttggccaggaactctttgagaaattctttatccagtgcaccaaaggcaagtttatcattgcaggcagtgagaaggagtctttctattaaaaatagtagacgtcgtgatccggagaaacaaattgactccatcgatcagtttttggaaactgtgaaaaaatctgatcaggaaattggcagtgtcgtgaataaaagtagaaagtctcttcataagcaacaaattgagaaatatggtccccgaatttctatagatgagacactttctccgaagaataacctagtaatagattcaaggaatgaaggatcgcaatatgactatgatacagaactattggagtatataggcaatgacgagttgatcctaaatgaagaatatgtaattgaaagaacgttgcaggctattgacgagttttcaactgaaggtttaagaactttggtgtatggttacaaatggattgatattgggaactatgagaattggaataaacgctaccatcaagccaaaacttctttgactgatagaaaactgaaaatcgacgaaattggcgcagaaatcgagaacggtttaagtcttttgggtgtaaccgcaattgaagataagttacaagacggtgtatcggaggccatcgaaaagattagaagggcaggtataaaaatgtggatgttgacaggtgacaaaagagaaacggccataaatattgggtatttttgtatgttgattaaggattactctactgtagtaattctaactactacggatgataacattatctcaaaaatgaatgcagtttctcaagaagttgattccggaaatatcgcacactgtgtggttgtcattgatggtgcaacattggctatgtttgagggaaatccaacttacatgtcagttttcattgaactatgtaccaaaacagactcggtgatttgttgtcgtgcctcaccttctcagaaggctcttatggtttccaatataaggaacactgacccgaacttagtgacgctagccataggtgatggtgcaaatgatattgccatgatacagtcagctgatataggggttggaatagcgggtaaagagggcctgcaagcatctagagtatctgattactctattggacagttcaggttcattttaaaattattactagttcatggccgttacaactatattcgcacctccaaatttatgctgtgcacgttttacaaagagattaccttttactttacgcaactaatataccagagatatacgatgttttcaggttcgtcgttatatgaaccatggtcattgtctatgtttaatactcttttcacatcattgccggttttatgtattggtatgttcgaaaaggacctgaagccgatgactttactgaccgttccagaattatattcttatggacgtctttcgcaaggttttaatttattgatgttcatggaatgggttgttttggcgactgcaaattctttaattattacatttttgaatgtagtaatgtggggtatgggttccctctctgacaatactatgtatccgctagggcttatcaactttacggctattgttgtattgatcaacgttaaatcacaatttgttgaaatgcataatagaaattggttagctttcacttctgtcatcctgtcctgtggaggctggttagtgtggtgctgtgcactcccaattctgaacaaaactgaccaaatttatgacgtagcatacggattttataaccagtttggtaaagatattacattctggtgtactagcttggtgttggcgctattgcctatcactatggatatagtgtacaaaacgttcaaagtcatgatgtggccatctgattcggatatatttgcagaattggaacaaaaaaatgatattagaaagagattggaattaggcgcttacagtgaaatgagacagggatggacatgggataaagatcctagcactttggcgcgctacacggataaggttctttcaagatcgagaactaattcgcgtacaagtacgcttactaaaggcattaacccgatggagaatgtcagtatagactattcattgaaaaataatgtatgccgaaattccactaaaaacaactccaagcgatatgaagtattgcccagtggtaagctgatcaagcggccatccctaaaaccacagactagtaaagataaaatcggtgacaatataactactaaaatcacaaagaaactaaagcttccatcgagaaatgcgaaaaaagaggatgtaagacagattattcaagcaagattaaaggatttggagtga

SEQ ID NO: 2017 - DNA, 2130 bp, Saccharomyces pastorianus
atggcaagaagctctcgtccacctcttttacaggttcctggtttacagattttttcgaagctgaaatcagatgaagaggatggatttatgagctccagttcaactcttgatagagataccattgtggggatcagcgaaagcaaccatcaggaattttattctacatggcgaaagccatctcaactaagcaaccggagcgtactacatgaatactcaccaacagttatcggatcaaatggtcgcatcttcacacctttaagttttaaaattccagctaggcacttcaattgggatgatattatttcaaagattttcctgcaaccaccatttggtttgatacataaattcttcgaagaataccaatattcaatcattacttcccatttcctaaacgatctgaaccgttataggctatcattacatattaatcagtcaattatgaatttccgtgagggctcagttatactaaagaaggtcccgctcaattctggagcctttatggccacaaaatatggtaagttggcggtagtggaggaaaaaaagatgtactttaaacgaacttttgattatatttccgtgatgctcacctcttataaactcctcagacagctaaaaaaatgttgtaaagaaaaaagtgacccaagtttgaaaagagttgtaactccaatactcgccgcgatatatttatcattgcaacaagagtactttcgaaaccatttgatttgctataaaactttagtagaggtacaaaaaatgctaagatctctacagcaagttgatgtaatgattcacaaatatcatttacgatacaaagaaataaaaaattctagggtcacatctaaagtagctcttattccagacaccgaagggtactcatctatgatagaagaacttttaatattctcaagcgacgcgctattctataaactcaaaacggttatcggtgatattgtcatctcaagtgataccagcgagctttcgaaatactgtgaaatatatggtattgacgtatcaagtctttaccataatacaactctcacaattaaagatcttgatggtaaactttgccgactaaagatgttgaagaagttcatgctttgttgtttactctctttggatacgacagggagcaatagtctttcaaattcaagtatccaaaatgcattaaacaaaatttttcctgactacctggtgaaactacagcaaaaaaaaaaaactaacttaatagacacatttcagaacataaccaaccttttaaaagatttgcatccgctactttcggcagttttaatgtcattaaacgaccataaacatacattgtatcctctttcggaagaattattaccaaatgatggtggagaagaaagcgatttgtactcttgtccaaaaagtgatcaaacacttcaagcgttaaaccacttgaaagcgattgagaacgatatactggctatcaacgttcaaaacggaataacaaaaaatgataagaaaaccattcaaaacaaattggaagagctaatagccttctggaaagcctcgaacatatctacaaataatgatatcgagagtggaaaaaaggtaccagtaactaacatatccaaccatggttttcatctggatatcttcaaagggagaaaggtttcatcttcttctttatcggtacggaggcttaatttagaaaggaaagtcgagtttatagatgtcaatgaatcggaaaatgaatcgtttgaaaatgacacagaattagaaaacagcgaagattacgcttccgacgagagatcttatgaggctcgtgtagatttaaaccacccagtagactttactggaactttgacttgcaagaggacagacttcaaacaactctctgacaatgaactgagacgtaaactggatgaaagaattctaaaactagcccgggaaaaccgtgaaggcagggaaagactacgaactgcaaaatctttcgagctattaagaaatacccgatcttccattgaaacggaattaggctttcaagaatcgctaaaaaaaaaagtcgtcttagagagcgggtctctcagtaagtacaaattatcatcagaagaaactattccctttttatatgaactggagcaactaataggaaaaaattcataa

SEQ ID NO: 2018 - DNA, 2325 bp, Saccharomyces pastorianus
atgtctctcaaaataaaggcgttagatgcatcggtggtcaataaaattgcagccggtgaaattatcatatcgcctgtaaatgctcttaaagaaatgatggagaattcgatcgatgccaatgcgacaatgatcgatattctagtcaaggaagggggcatcaaagtgcttcaaattacagataatggctctggtatcgacaaggccgatctccctattttatgcgagcggttcacaacttccaaattgcaaaaattcgaagatttaagtcagatccaaacttatggattcagaggggaagctttagccagtatatctcatgtggcaagggtcacagtgacaaccaaggttaaggaagatagatgtgcatggagggttttgtattcagaagggaagatgttggaagcccccaagcctgtcgccggcaaagatggtaccactatcctggtcgaagatttattcttcaatattccatcgcgattaagggctttgaggtctcaaaacgacgaatactccaaaatattggatgttgttgggcgatatgctattcattcaaaagaaattggattttcttgtaaaaagtttggagatcctaattattctttagcagtcaaaccgtcctactctgtccaggataggattagaactgtattcagcaattctgtggcttctaacttgacacctttacatatcgacaagattaaagagttggacgtggagaacgttgatggaaaagtgtgtaatctgaatttcatatccaaaaagtcaatttctccaattttcttcatcaataataggttagtgacatgcgatcctctaagaagagctcttaacggcgtttattccagttatcttccaaaaggtaataggccctttatttatttgggagttctcatagatccagcttcggtggatgtcaacgttcatccaacaaagagagaagtacgtttcttgaatcaggatgaaataatagaaaggatcgccaatcagctacatattgaattgtctgccatagatacttcgcggacattcaaagcttcatcaatctcaacaagcaaaccaggatcattactctcatcgaatagtccgactgataatggagataagagaaggaccctccgacaagctcaggtggtagaaaattcgtattccacaaccaataatacattaggaaatgttaaaaggcaagaaaacaaactggttagaacagattcttcgcaagcgaaaatcacatcatttttatcctcaagtcaacagtttaacttcaatgaggcgtctgcaaaacggcaatcaagccagctcaaagtaaacgcgaggagctctctgattccagataaagaggaaattcgagaagaaggagtggctgatgaaatcgaacaattgcatgataccgttccaaacagcgatactgaattggaagatttgcctaggaagaaaccaaaagttagtgcagatcttacatcaaatatcaaagatagtaagagctccgtgcctccaatttcaaaggatgggtatagaatagtcaccaaagaacgggttaacgtaaaccttacaagtatcaaaaaattgcgtgaaaaggtagatgattcgttacatcgagaactaacagacatttttgcaaacttaaactacgttggagttgttgacgaggaaagaagattggcagcaattcagcacgatttgaagctatttttaatagactacgggtccgtgtgctatgaactattttatcaaattggattaacagacttcgcaaactttggtaagatcaatttgcagagtacagatgtgtcggatgacataaatctatatgaccttctatcggaatttgagggattggatgaagatacctcaaaagaaaaaataattagtagaatatgggatataaatggtatgttaaatgagtactattccatagagttggtaaatgacagtccagatggtagttttgaagctatcaaactgaaaactttacctttgcttttgaaaggctacattccgtctatggcgaaactaccattttttatttatcgcctaggtaaagaagtgaactgggacgatgaacaagaatgcctagatggaattttgagagaaatcgcattactatatataccggacatgattcctaaagtagatgcgtctgatgtaacgctatcagaagatgaaagggctcaatttgtagacaaaaaggaacacttatcttcactattagagcatatactctttccttgtatcaaaagaaggtttttggcgcctaggcatattctcaaggacgttgtcgaaatagcaaaccttcctggtttatacaaggttttcgaaagatgttga

SEQ ID NO: 2019 - DNA, 1827 bp, Saccharomyces pastorianus
atgttcaatcgtaccacccaattgaaatacaagcatccttgttcggtttgtacaaagcggaaggtcaaatgtgaccgtatggtaccatgtgggaactgtaggaagaggggacaggactccgaatgtatcaaatcctcaaaactaatagcgccctcatcttcaaaggaataccttcctgatctattattattttggcagagttatgagtactgggtaacaaacattggcctatttaaaatgaaaacaagagatctcactagagtaccgactactttggacacagatttcgaagaatgcgatttctggatggattatctcggaaaagatcaatcgtttcaattgatgaacttcgcaatggaaaatctgggtgttttatattttggatccataggagacatcagtgaactatacctcagagtagagcagtactgggataggagaagagatgatacatctagtgtggatagtcagtactgggatgcattaatatggtctgtatttaccatgtgcatttactatatgccagtccacaaactatcgaacgttttttctgcaaaccccctttctgagcattttggcactggtaaagagctgagttgggatgacggccttcagctagccatgttcaagaattttacacgttgcacactattacaactgaaaaaatgtgacttcatggcccatcctgatataagatttattcaaacatatctgattctagcaaccacaaactttccatacgaggagccattattggcgaattcgttattaacacagtgcgttcatacttttaaaaatttccatattgaagactttagaccgttacttaatgacgatcctgttgaaagcatagcaaaggtaaccttgggaagaatattttaccgattatgtggatgtgattacactcagtcggggccacgaaaaccaatcgaacttcacacggaagtatcttctctgctacaacatgcagcatacttacaggatttgcctactgtggatatatatagagaagaaaacagtatagaagtactgtattggaaaatcatgtccttagatagagatttagatcagtatctgaacaagacgttcaaaccacccctgaaaacattagaagccatcaggagggaacttgacattttccggtacaaagtagattcgttagaggaagactctagatcgaataatactaaatttgaaaaatttattgccactttccaaatatctactgtctcatggaagttattcaaaatgtacctaatatattacgactcctcagattcgctaccaaaaattatacattattctaaaataattatcagccttatagttaagaactttcaagagaaaagtgagttttttaataaacatccaatggtgttgccaaccgtcacaagagtggtatcctttatgtcgttttatcagatatttatagaatcaaatgccatccaagaacttttagtggactttactgaacttattgcaaatttgcctctgatattcggcctaaaattagataagctaggatatttgatcgataggttcaataaattgaaacaattatgggaaaaagtacgactatcagattcaggtgactcatttcatcatcccgtattcaaaattctacagaatgatgttaagataattgaattaaaaaacagtgaaatgtcttctctcataaagggacttgggtctttggtcccactgaacaggtttagaggagaatctctgctggaggaagacgacgaggaaagtaaagagtcgacagagtttagagatatcgtagaaggattccaatccgaatataatattaccaatgtactttcctaa

SEQ ID NO: 2020 - DNA, 1521 bp, Saccharomyces pastorianus
atgccgaagttatataccgatctcaaaatcccacaattgaaaatctctgttaaacaaccacttgggttgttcatcaacaacgaattttgcccttcatcagacggtaaaacaatcgaaactgtaaatccaagtaccggggaggttataacctctttccaagccgccagcgaaaaggatgttgataaggcggtcatagcagccagaaatgcttttgagaatgtctggtcaaagacatctgctgaacaacgtggcatatatctctcaaaactattgaaactcattgaagaagaacaggatacgttggctgctttggaaactatagactctggtaaacctttccattctaatgctaagcaagatatagccgaaatcatagaactcacaagatactatgcaggatcagtcgacaaattcaataggggcgaaactattccactgaattctgaaaagcttgcttacactttgaaggttccgttcggggtcgttgctcagattgttccatggaattatcctctagccatggcatctagaaaattgcaaggcgctctagccgcaggtaacactgttctgattaaaccagctgaaaatacttctttgtccctcctttatttcgctacattgatcaaaaaggctggcttcccaccaggtgtcgtaaatgttgtcccaggttatggttctatagtagggaaagctttaggaacacacatggacatagacaagatatctttcacaggaagcaccaaggttggtgggtccgtgttggaagcctccggccaatccaaccttaaggacgttacgttagaatgtggtggtaaatctcctgccctagtatttgaagacgctgaccttgacaaggctgttgactggatagcagctggtatattctacaattcaggacaagtctgtactgcaaactcaagagtctatgtccaaagttcaatttacgataagtttgtcaagaagttcaaggaaattgcaaagaaagactgggacgtgtcaggaaactttgatccctttgatgagaagtgtctcgttggtccagtcatatcaagtactcaatacgaccgtatcaaagaattcatcgaactcggtaaaaaagaagaaaaattgagcatgtttcaaactactgaattccccattgagcaaaccaaaggttactttatcccaccaacaatttttactgatgttccacaatcatcgaagctattgaagaatgaaatcttcggaccggtcgtggttgtcagtaagttcgaaaactacgatgatgctatgaaactagccaatgacacttgctacgggcttgcctctgctatctttactagagacgtgaagaaggcacacatgtttgctcgtgacatcaaggcaggaactgtttgggtcaactcatccaacgacgaagaggttaaggttccttttggtgggtttaaaatgagcggtattggtagagaatcaggcgaaagcggtgtcgacaactaccttcaaacgaaatctgtccatgttaatatttccttggataaataa

SEQ ID NO: 2021 - DNA, 204 bp, Saccharomyces pastorianus
atgaatacagatcaacaaaaagtaagcgaaatattccagagctcaaaggaaaaattgcaaggtgatgcaaaggtggtaagcgatgcttttaaagagatggctaataaggacaaaaacagcgacagcaatggcgacagcagtcacaaacccgattaccaggagcaatacaataaattaaaaggggccgtgaagagggaagagtag

SEQ ID NO: 2022 - DNA, 255 bp, Saccharomyces pastorianus
atgtctaacatgatgaataaattcgcagaaaaacttcaaggtaaagacgattcccagcagaaggataaaaatgccagaaacatgaagaccagatcttccaataaggaaagggatgatatggacatgaacatgaacatgggccaggatcaatctgaaggaaaaatgaaaatgggtcaagatcaatctgaagggaaaatgaatgccggtagaggaattgcaaatgactggaagacgtatgaaaatatgaaaaaatag

SEQ ID NO: 2023 - DNA, 4251 bp, Saccharomyces pastorianus
atgagtgaccatgattcagttacaaaaatatcgcatatccttaatgaaccgatcacagaaaacgtgatggtgcgagcaccaactagcgcaggctccacaatcaaagcagattcttcttctaaacaatcgaagtcaccagaaagcacggcatcttccaattctagtcaccatactaatccattcctctacacgcagttcaaatctcgtgctacagcaccatttgatcctgaatcaataaagggcgtgaaaataacaaccccaccagaggatattcctgccagagtgtttcacgaaaagaccggtttattctaccaaatatcttcatgctctatcccaacatttactgtggcaaagaaggaacttccagatccaataagattttacgaatcagtgcaagatttagggacaatctacggttgtgtcaaactaaaaattctacctgatattgaccgacccattgaaaagtttgctcaacttaatgtcaacatagatcgcttttggtttaaagccagaaaacaattttttgattcaaaggagttagaaagagcccaaataattgattttcatgcaaagctttataatttccatagtaaaattaaaaagaaaagttttctaacgagaatcccaagcattgacaaacgtactttgaatttatatagactgagaagttgtgttgacttaaggggagggttcgatgcagtttgcgagaagaaactatgggctcaaataggaagggaattaggatattcaggaagaattatgagctcactctcaacctccctaagatctgcttatgtgaaaatcttactggatttcgataaatatgaaaaagaacaacgcatgtgtaataacgaagaaaatgaaagaccattgtctcctaagtttcatcatacagatcaaaaaaaaagggatggggaagaaatttcacttaaagacgaatcttttcacaaaagagtcaaaatagatggtggtaacccaaaagtatttagagctgggtcaattaatcacgaatttaaaagaatgaaagacataaagcgcataaaggggtttccgacttattttgattcgctaactgaatataagttaggctttacagattttacaggggctactttaccagactatgacttcactttttgggagaatggtatggaaatatacgataaaagctcttttgaaacgagaacttctccagtgtataatttgagacaatattatgaaaaaagtcaggcagttttcaatgctatgatggcgagatataagagtgactacccaagtctattcgcaaaccaaacaacgctcccacaagtagaatttgaaaagttatttttccaattactctcgacgcactttatagattttgaaattgatacaggccttggtctaaccgcatcgatacgatcttcaggaaatgactcatttgatgacaagttcgccattaaaaccatactagatcattggaatctagacaacatccctctcagtgaactatcgcttttaaagcatcttgatttagatatggctgattttacgagaacaaattttgatgttggaatgttattctcttgcaggggttggtctgtttcagaccattttctaccttcaattgattataatcatctgggttccactaaattggtatatagtattgcaccaaaagatatggaaaaatttgaaggtctcatgactcaagcaaaaaaggagtgggatgcacatcaatcaagaccgcgttacttcacctcggatggagaatggacgggtttctcagaaactgacttctttaagtcattcttagaggcagaacaatcaaatgatcattttagcacagggaacgctgcaagaaatgtgacttcagaaaatgtgctattagcaaattctttaggtgatggtcttcaaagcgacttacaatttgaacctagtttcattacagctaacggcataaaactatataaaactacacaggagcaaggttcgtacattttcaagtttccaaaggccttcacatgttgtatcggatcaggtttctatttatcacaaaattcagtttttgcaccaatttcatggctggagtcgagcttcgaggcggccaaatggatatctaagatgcggatactccctggtttggacgtgaatcaactaatgattaatattttgctaaactcagataatgcggctttgaaagggacttgccaaaacctggtaagagattgtgttcgtgaagaagtggtgaaccgcagaaagttaagagagttatttagtacagttgacgtagtctacaataaattagattacatttcggatattagtttgaaaccaacaggactttcaaaaattgtcgtgacattaggcgcactgcatcgtgttttctctttgaaagagttccttgcgctgctagataaatcaaaaaacggtacttataatatatgtggtatcccaatatgtgatcaagctggtagtctcaacatttgtttgcacttgtattttgataaagcgagcctaaagatagctcttgatggcctggatattccctcggatttttatttggctgctctggatgaaaattttgaaatgaaatgggacgctttaatgacttccacttttaagaatagatccgttccattgaacatcatacaatatttgctttctcatactgatagtaacactgagtttaatcgatcgttacgttctaatttttatgatgccttatcccttatcgaagaatgcaagaaaattatcacaagttgcatggaatcctctcgtagcattggaaacattgattttggtattgggtttaatctgcgtcatttaccacttgaattctctaacagcatgatcaataagttgaaaagcttatataaaagtgttcagaaatgttccattgatttcccggaaaggctggaaataattaggctataccaaatatctaggcagttccctattgataataaagatatcatcgagggaaataacttggtcttgctcaaggaattatatcagaaatcattaaatattccattgaaggcttcttattggactaatttgaccaggaaaatttgtaggcttgaatggctgtcagtttatgaacgtgtatttattgaacggaatgatatcaaagacgaagattctgaaaattactcgcttccattgttgtattcctacttaaaattcggcctgaaatactgtagtgttgaagatatagataaaataggtcatgccaaagagctacttttgaaataccaagctatcatgcaaaaaattcgagtgttcctgaaaagggaagcgccttcaagaataccattgaccgatctagaaaatattctgttaggtatagaggtataccgcttacctatccaaagaaattttttcaatgagcttgattacatcatcagagaaatcgaacaagctaaaagaagcagcgatgtgagtattgtttatagtgccgacaatcttgataaaatagatgagcttattaggaagaacgatcctaagtttatggagtttgcagatcagtttaacagttcccgactggataagaggccacgaattggtgaaattcaagatcaaaagggaacaaaacaaaaactaaaagactacaaattatggactcgtcaattggcccgaatactgcataaaaataaacttgttgaactgctgcctttggcttacaaatgcttagacttggaatcggacaaatacattcctctggaggattgtgctagacttcaaacaaaatattgcttctgtagaaaagttgaagaaggcagtgccatggtcgaatgtgaaatttgtaaagagtggtaccatgtggattgtataaacaatggtaagtgggttctacctgacgatccaaatgttctatttgtctgtccaatatgcatgccatctaacgtttctatcaaggctactgaaagcgtgttgtatgaatttggtgagttaaaaagattattgataggttctttgaaattaaacacgattccaaaccctccaattttgaataatctgtttgatgtttttgcgttggccttaaacttcaaaaatcaaatggaagttgaactgttcaccaaaggatttataaataagttagtacctacgcacaagatcaagtactatctaagaaaggcggaaggctcggggtgtggctttactgacttgacaggtccgttgagacgatactgtcaagcgaaagatgcaaaggttataaaatcgctcaaagaaaatggaagaactgtaatcacaggatttccaaattag

SEQ ID NO: 2024 - DNA, 468 bp, Saccharomyces pastorianus
atgactccacttctacaagctgaagccaagatgaacacaagcctctatctcacggagagcaaccaacatcaacacgagttccaacttgtcagcccccagtcgctttattcttcctctgtgcccaacagtaataataactccggaatcttcagttataactccgccagcaatagcggtgtgtgctctaacgatgagtttgccaaccagcaagatggtatgaacaccataatgcataagaacaatatcagtaagactttcgaagacgatatcttttattgtccaagaagcttgctaactccagaagaacaagcggtataccaggaaattgacaagtattacatggaacaagccttattgacccaattacaaatccctccaacttattcctcttccactccgaaggaggagaagattgtcaagttcaatccctatacttcaaagagcttcagtcccgcttcctctaaataa

SEQ ID NO: 2025 - DNA, 891 bp, Saccharomyces pastorianus
atgagcaacgctaatccttacggaaataacaatccgtacgccgaaaactatgaaatgcaagaggagaactttaacaatgctcccacaggccacacagacggcagcgatgatttcgtcgggttcatgaacaagatcaacactatcaatgcaaacttatccaggtacgagaacatcatcaaccggattgatatgcagcacaaggacctgctgacccaggtgagcgaagaacaagaaatggaattgagacgctctttggatgactacatctcccaagccaccgacttgcagtaccaattgaaaacggatatcaaagacgcccagaaggacgggttgaaagactctaacaagcaggcccaagcggaaaattcaagacagaaattcttgaagctgattcaggattacaggattatcgattccaattacaaggaagaaagcaaagaacaagccaagagacaatacacaatcattcagccggaagccacagacgaagaggtggaagcagccatcaacgatgtcaacggccaacaaatcttttctcaagctctgctaaataccaataggcgtggtgaggccaagactgcgttggccgaagtgcaagctagacaccaagagttgctgaagttggagaggacaatggcagaactgacccaattattcaacgacatggaggaactggtcatcgaacaacaggagaacgtggatgtcatcgacaagaatgttgaagacgcccagcaggacgtagagcagggagtgggccacaccaacaaggccgtcaagagtgccagaaaagcaagaaagaacaagataagatgctacatcatctgcttcgtgatctttgccgttgtcgtggtggtcgttgtcgtcccctccgtcgtggaatcaagaaaataa

SEQ ID NO: 2026 - DNA, 2139 bp, Saccharomyces pastorianus
atggctggtgaaacttttgaatttcaagctgaaattactcagttgatgagtttaatcatcaacactgtttattctaacaaggaaattttcttgagagaactgatctccaatgcctctgatgctttggacaagatcagataccaagctttgtccaacccaaaggaattggaaactgaacctgaattattcattagaatcactccaagaccagaagaaaaagtcttggaaatcagggattccggtattggtatgaccaaggcggaattgatcaacaacttgggtaccatcgctaagtctggtaccaaggcctttatggaagctctttctgctggtgccgatgtctccatgatcggtcaattcggtgttggtttctactctttattcttggtcgctgatagagtccaagttatctctaagaacaacgaagatgaacaatacatttgggaatccaacgcaggtggttctttctctgttactttagacgaagtcaacgaaaagatcggtagaggtactgtcttgagattattcttgaaggatgaccaattggaatacttggaagaaaagaagattaaggaagtcatcaagagacactccgaattcgttgcttacccaatccaattgctagtcaccaaggaagttgaaaaggaagttccaatcccagaagaagaagaagaaaagaaagacgaagaaaagaaggatgaagaaaaaaaggatgaagatgacaagaaaccaaaattggaagaagtcgatgaagaagaagaggaaaagaagccaaagaccaagaaagtcaaggaagaagttcaagaattagaagaactaaacaagactaagcctctatggaccagaaacccatccgaaatcaccgaagaagaatacaatgccttctacaaatctatctccaacgactgggaagacccactatatgttaagcatttctccgttgaaggtcaattagaattcagagccatcttgtatattccaaagagagcaccatttgacttattcgaaagtaagaagaagaagaacaacatcaagttgtacgttcgtcgtgttttcatcaccgacgaagctgaagacttgattccagaatggatgtccttcgtcaagggtgttgttgactctgaagatttaccattgaacttgtccagagaaatgttacaacaaaacaagatcatgaaggttatcagaaagaacattgtcaagaaggtaattgaagccttcaacgaaattgctgaagactttgaacaattcgaaaagttctactctgccttcgctaaaaacatcaaattgggtgtccacgaagacactcaaaacagagctgccttggctaagttgctacgttacaactccaccaagtccgtcgacgaattaacttctttgaccgattacatcaccagaatgccagaacaccaaaagaacgtttactatatcacaggtgagtctctaaaggccgttgaaaaatccccattcttggacgctttgaaggctaagaactttgaagttttgttcttgactgatccaatcgatgaatacgctttcacccaattgaaggaattcgaaggtaagactttggtcgatatcaccaaggatttcgaactggaagaaactgacgaagaaaaagctgaaagagagaaggaagtcaaagaatacgaaccattgaccaaggccttgaaagaaatcttgggcgaacaagtcgaaaaggttgttgtctcttataaactagtggacgccccagctgccattagaaccggccaattcggttggtctgctaacatggaaagaattatgaaggctcaagccttgagagactcttccatgtcctcttacatgtcctccaagaagactttcgaaatctctccaagatctccaatcattaaggaattgaaaaagagagtcgacgaaggtggtgctcaagataagactgtcaaggatttgaccaacttattattcgaaaccgctttattgacttctggtttcagtttggaagaaccaacttctttcgcttcaagaatcaacagattgatctctttgggtttgaacatcgatgaagaagaagagactgaagctgctactgagactgctactgatgctccagtcgaagaagttccagctgacaccgaaatggaagaagttgattaa

SEQ ID NO: 2027 - DNA, 3105 bp, Saccharomyces pastorianus
atgtttagaacaaaagtggccgctattttacatagggctactgtcagaaccggtgcaagatgtgttcctctagtgagagccagaggctttcatcgtagctccattttgcttaaaccagccgttgctgacgtatcgtctacgcaatataagaagatttacaatccagacttgaagaatattgatagaccactggacacattccctagacgtcacttgggtccttctcccaatgatgtgaaaaaaatgctaaagacaatggactacgacgatttaaacgcatttgtagaagagcttgtcccacctaatattttgaagaagagatccttgaaactagaagctcctagtaagggatactgtgaacaagaaatgctgcagcatttggaagaaatcgccaataaaaactcctacaaagttaagaattttattggtaagggatactacggcacgattttgccgccagttattcaaagaaacctattggaaagcccagaatggtacacttcttatactccataccagcctgaaatatctcagggtagattggaagcattactaaacttccaaacagtagtttccgatttgactggtttgcctgtggcaaacgcctcattgttggatgaaggtaccgcggctggtgaagctatgctactgtcatttaatatttccagaaagaaaaagttaaaatatgtaattgataagaaattacatcagcaaacaaagagtgttcttcatacaagggccaaaccattcaatattgaacttatcgaaatcgactattccgataccaagaatgctgtggaagtcttgaagaaccctgatgtgtctggttgtttggtccaatatccagcaacagatggttcaatcttacctcctgatacaatgaagcaactctctgaagctttacactctcacaaatctttcttatccgtcgcctcagatttaatggctttaacactattaaaaccgccagcccaatacggtgctgacattgtcctgggttcttctcaaaggttcggtgttccaatgggttatggtggtcctcatgctgcctttttcgccgttattgataaactgaacagaaaaattcctggcagaattgttggtatctccaaggaccgcctaggtaatcctgccctacgtttagctttacaaactagagaacagcacattaaacgtgataaagcaacttcaaacatttgcaccgctcaagcccttttggctaatgttgcctcaagttactgtgtttatcacggccctaaaggtctgcaaaatatttccaggagaatattcaatttgacgtcgatcttagcaaatgccattaaaaatgggaattgtcctcaccaattgcttaacgaaacttggtttgatactttgaccataaaattgggcaacggtttatcttctgaacaattattggacaaagctctaaaagagttcaatattaatctattcgctgtcgataccactactgtttccttgtctcttgatgaagttactaccaaaagcgatattgaaaatctaatgaaagtatttgagattggtaattccgcagagtttctctcaaaggattattccaacagcttgccatcagaattccagcgtactgatgaaattttgaaaagcgaagtcttccataagcatcatagtgaaacagcaatgctaagatatttacataggttgcaatctcgtgatttgtctcttgctaattctatgattcccttaggttcctgtactatgaagttgaacagtactgtagaaatgatgcccatcacatggccccagtttgccaatattcatcctttccaaccatcgaaccaagttcaaggatacaaggaacttattagttctctggagaaggatttgtgcagcattacaggtttcgatggtatctctttacaaccaaattcaggtgctcaaggtgaatacactggtttgagagttattagatcatatctggaaagtaaaggtgaaaatcatcgtaacatttgtttgatccccgtatctgcccatggtacaaatccagcttctgccgctatggcaggtttgaaagtcgtacctgtcaactgtctacaagatggttctttggatttagtggatttaaagtccaaggctgaaaaatattcaaacgaattagcagctgtgatgattacttacccctccacgtacggcctatttgaaccaggtatccaagaagccattgatgctgttcattcgtttggcgggcaagtctacttggatggtgctaacatgaatgctcaagtcggtttaacttcacctggtgatctcggcgcagacgtctgccatttgaacctacacaagacgttttctattcctcacggtggtggtggtccagctggtgcccctatctgtgtcaaatcacacctaataccacatttacccaagcatgatgttgtagatatgatcactgaagttggtagcaaacattctatcgattcggtctcctctgctccatatggtaacgctttagtgttgccaatctcttatgcctacatcaaaatgatgggaaatgaatctttgccattttctagtgtcatttccatgttaaactcaaattatatgatgacgagattgaaggatcattataagattcttttcgtcaacgaattgagcactttaaaacattgtgctcatgaatttatcgtcgatttaagagactacaaagccaaaggtgtcgaagccattgatattgccaagagattgcaagattacggatttcatgctccaacgttagctttccctgttcctgggactttgatggtagaaccaacagaatcagaaaacttggaagaactggatagattctgtgatgctatgatatctataaggggagagattgatgcattagtgtctggccaaccaaagggacaaatcttaaagaatgcccctcattgtttggaagattttattacttcttctgattgggataccagaggttatacccgtgaagaagcggcttatccattgcctttcttgaagtacaacaagttctggccaactgttgctagattagatgatacacatggtgacatgaatttgatatgtacatgtccttctgtggaagaagttgcaagtgaaaataattaa

SEQ ID NO: 2028 - DNA, 777 bp, Saccharomyces pastorianus
atgcaacaacttctcagaccatttcagctgacaagaggatttactagtgctgtaaagaacttcaggcaatggagattaattgaaacaagaaacgttgcaaaacagccggactaccaagttggtgatgtcaagcctctgcacatgccaaaagagagaaagaagtttccagactataaatacggtgaatccaatatctttaaacaaagtaataaaggtttatatggtggatcttttattcaatatggtaacaatatttccgaaagtaaagccaaaacaagaaagaaatggttacccaatattgtgaaaaagggtttatggagtgaaactttgaatagaaagattagtatcaagatgactgccaaagtgctaaaaaccatcagcaaagaaggtgggattgataattatttgacaaaggagaaggccgcaagaattaaagaactaggacccacaggatggaagttgcgttatagagtcttgaaaagaaaagacgctatagagaactatccacataaggatgcccctattttagaaacggccgatggcaaaaatgtcaaagtatattatgatgaagtaattaacggcacgccaagaaagatatcagttggaagaaggaaactgttggcctttttatatcccttggaaaaactggaacacaagtctatcgggaaagatctagaccacaaaagatttgtggagctgtttgctaacgttccagttaaggatatcgtatcgaaattggaagagcatgactttgatttgtccacaatttccgtatag

SEQ ID NO: 2029 - DNA, 381 bp, Saccharomyces pastorianus
atgtctttgaactataccactcctcttgacgatgaggtcttcccgttgtcatttgccaaccaccaattgagcgagcacgtgtcgatgagccaggattactcactccgtctcacagacgaaaggaaaataaatacggccgactcttgcgcagtaccgagagacactgcgaagtgcgattttaatttgacttcgacgcaagacgaaacgctattctcattagagagtgctcaagaaagtaactacagataccaagcgttggctaatgtccaggactgccgcatggccgtttcgaccaggtctgctcagtcttgtgataaactgaccgatctttacgccaacgccgcccaacaaaattacaggctttggctttcctcattctaa

SEQ ID NO: 2030 - DNA, 3276 bp, Saccharomyces pastorianus
atgaacaagataagagacaagtttgtagactctactgtagaagaagaaagattacgcgagaaccgcgaccatgaaaagtactggtatcgttggggcccctacctcagtgagagaagctgggccacggtccgtgaagactactccttaaacggtgatgcttggtccaactttccctttgaacatgcaaatgcaagagtgttccggtggggtgaagatgggctattcggtgtttctgataacaagcaattggtctgtatgaacgtcgccctatggaacggtaaagatgagagactaaaggagcggctattcggcttaactggaccacaggggaaccatggtgaagacgtcaaggaactgtacttttacttggataacactcccactcattcatatatgaaagccttgtataagtatccttttaagaagccttttccttacgaggagctggtgcaaaagaacgctgagcggggatacgaagacaaagagttcgaagtttatgaaatagatgggttatatcatgacaatgagacagatgataacccttatttcgatgttttcttcgaaatggcaaaggatgacgaaaatgctggtgaactaaacttccggttgactattcataatcgaagtaaaattgactccggtgagctacacgtggctccccaaattttctatagaaacacctgggcttttgagggcactgggaaaaaggataaacctttgcttgagagggatccggaagctgcaaacttgataaatttgactcacaagaaatatggcaattgtcaaatggtcttccagccttctccaggtggattctcttctaacgcagacgaaggagaagaagaggatgacgacgaagaagtagaggatatcgatcccttgctgttgtttactgacaacgaatctaatttggtaaaattgtttaatgaagagaaaaacccttccgcctacacaaaggacgcctttgaagagtttcttgttaaggataaaagcgatgccgtaaatcctgaaaataaaggtacaaaggcgtgcgcggtctaccatttcaaaaatatcccgccaggtgagtacgttacggtgaggtataaattcacaaataatccagaaaactctatcttcaaagcacaagatctggccgtagtggatgaagatcagtttgattccgttttcgatatcagagaggaagaagctgataatttctattggagaatcacaccttcaccaatcagtgatgaactgaggagcgttcaaagacaagctttttcaggtttactctggaccaaacagttttacaatttcacctatgatgcttggttcaacggcgatgccaatatcaaaccacatcccccaccaaatagggctaatggtaggaataagaattggaagcatctttacatcgaagatatcttatccatgcctgataagtgggaatacccattttttgcttcgtgggacactgctttccattgtattcctttggctatgattgatccagaatttgccaagcgacaattggatttattaacaagggagtggtacatgcatcctaacggtcaaatacccgcatacgaatggaacttcaatgatgtcaaccccccagttcacgcatgggcggtatatcgtgtcttcaagatcgaaagaaacatgtataaccgtgaagatcgtacatttctggaacgtgtcttccaaaaacttttattaaatttcacttggtgggtcaacaggaaggatactgaagggaaaaacgtttttgaaggtggtttcttgggtcttgataatattggtgttttcaataggtcagagccattgcctactggaggtaccctagaacaagccgattccacaggttggatggccttttttagtttgcaaatgttaaatattgcattagaattggccaaagaaaacccagtatacgaagatattgcctctaaattttttgaacatttcatcctaatcagtgattctatgtcgtttgaatatgccacagacatcacgggggaaaaatgcaaagatgtcatgaaacagaacttgtggaatgagactgacaaattttattacgatgccatttcatggggcgatcacaaagaacagttaccaattagatctcttgtgggtttaattccgctatatgcttccatgactctcgaaccaagtatcataaaacaattcccaggcttcaagaagagggttgattggtttgtggacaaccgcccagaaatcttcgatagaaatattgcttccatgtctaaaaaaggtgttggtgaaagactattactatctctagttaccaaagagagattaaccgccatactaacacggttgttagacgagactgagtttttatcaccatatggtatcagatcactttctaagtaccatgaaaagcacccttttgaaatgaacgtaaatggtgtggagtatacggtcaaatatttaccaggtgaatccgactcaggtatgtttggtggtaattcgaattggagggggccgatatggttcccaaccagtttcttaattatggaatcattacagagattctacttgtactacggttctgattttaaggtcgagtgtccggtaggttcgggtgattatttaaatctagcagaagttgccgaagaacttgggtatcgtatgattcacttgtttgtaccagatgaaaatggcgagcgtgccgttcattatggtgatcactctaaattcttatccactgatccatatttcaaggattatgtaccattctttgaatacttcgatggtgactcaggaagaggccttggtgcttctcaccagtgtggttggactgctcttgtggctaaatggatcagtgatgtaggaatatcctgtgtgaggttgcctcgtactccaagatcatctgtagccaccactgcgtccacggaaagctctgaacaagaacataaaatgaaaagaatggcaagacgcaagagtgcaaaatccttagtaaactacactgccactattttggacttaactgaagaagaaaagcgccatcacagaataggaggaacccattctggattgacgccacaaagtagtatttcaagtgataaggcaaaaaaactcatggaggaaatgaatgatgaggaaggtattcatgaagttgtggtgcgagaagatcgtcatgaattcgaaacaaaattgataagcaagctaaaggttaaagtgaaaaatatgaaggtaagcgataagactaaagacgaagatattgatccaatggatccaatgtgtccgttgaataaagatttatcttga

SEQ ID NO: 2031 - DNA, 654 bp, Saccharomyces pastorianus
atgagctccttattaacatcttatgaatctgattttaaaacaacactagagcaagccaaagcgggcttatcagaagcgccctcgcagcagatatctcagaggaattccactttgaagcaggtggagcaacaacaagatgaactattcgacttgttagatcagatggatgtggaggtaaacaacagtataagcgatgcctcggaacgtgctacgtataaggcaaaattaagagaatggaaaaagacaatacaaattgatatcaagaggccactgcagtctcttgtggactcaggtgatcgtgatagactcttcggagaccttaatacatctaatcttgacgaagaccaaagacaacagctgttaagcaaccatgcgattttacaaaaatctggagataaattaaaggatgccaacaggatagcaaatgaaactgaaggaatagggtcccaaatcatgatggacctgaggtcacagagagagaccttagaaaacgcaaggcataccctgtttcaagcagattcatacgtcgataagagtataaaaacactaaaaacaatgaccagaagattggttgctaataaattcataagttatgccattattgctgtgctaatattattgatccttttggttttgttttcaaaatttaaataa

SEQ ID NO: 2032 - DNA, 1791 bp, Saccharomyces pastorianus
atgaacaattccagaatacccaaactttcctttcatagtggtcccaacggtactattcgtgaattttctaagaccaagaggcaaaaagtccagaaaagagacatggatacggtactggcgcctaataacaacaaactaaatatactacagggatctggactaggtatacgacgtagtttcacaaatgattcctccgtcatgcacaaaaaaaagttgaccttcgggggagaccccaaggtaattgagagagtgaagaacaatgagcgcagagtcagaaaagatatcgattcgttattaaatgccatttcagaaattgaaaaagaatccgttcgtgttcatagtagagaactacctacaatagcatcagagttagatgccaaagtcagagcatgcaaagaactgcaaaacgaaatcaataggctatcaacggagatggatctgaaggataatcaatgcgatttgcaacgaaaaaatatcgaattatcgtccaaaaatatcgtttctatgcatgccgtgaccgtacaagagtttgaaaacgacttagaagaagagatatcgaatgccaaaagggaatggacatataaattaatggaggtggaaaatctgaaaccagatgaaaagctaactgatgaaatgcgacagcttaaagcagaatttgaagaaatcagtagggaatggtatattttacaaaacgaaaatgacaaaaagcgtaaagaatatgaaaatgaattgcacaaggaacttgagttatacaagaaaactaagaacgatgctaaactcgagctagatcaagagcaagaaaggctcttgagggagctcgaagagttacagaacactaacgatagattacaagaaaacgtcaagggatgtgtcgatgaatttaatggactcgaacaaaggattaaagactcagaaacaaacttgcatgaaatggaacatgccgtcgttcccctgaggaaagaacttattctcacatcacaaactttgactcaagtgctggatgtgaaaaagcaaattgaaggaaaggcgaatagttggaagaagaagtatgacaatgaactagataaagtccaacaggaacaattcacacgacaaaacctggccacttcaatagaacaaatcaaagggtatgcgcgatgctttgcatacgccaatgagcgggaaatgcccgatgagttccatatcaactacgtggaccaaagcatttgccaggagggtggccacaaacgtgtacaagtgtttgatagaataatcctcgaagagattcataaggatcacaagcggttattcaatgagtgtgccccatttttaaagaaatatatcagcaaattggtcaattgcagtatcgttgtcgtatcccagcaacttgcagcacctattaagattacctttttggaacagctattcaaacagtacggcgagggatataacatgacattgagaactgtgcgtttcgacgggaacaccgaagacgaaagcgatgacgttaaactgaacgacctgtcatcaatcaaaaacctgtcacaagatgaagaatgcatgtgcgtcctaagtttagacaccagactgaagaactatgaaaagtctcattcgatgaatatatatatcggaaatatgaccgctttgcaactgagtaaaaggctcgacgagcctccctcagcgttttcacaggtgctcactaaaactaagcagtgttttattttcaagattaacgcatgcgaaaacatcgagaagacgctagccctagcgggaaatctaaagagaacaatacgattacctcagctagattga

SEQ ID NO: 2033 - DNA, 792 bp, Saccharomyces pastorianus
atgtggtccaaaaaatttaccttgagaaaactgatcttgggcagttgtctgttcatacaaaagattcgttgtgaagatagtgacagctctttatatggtacttggtcatccaaatctaaccaagtcttcacaggaccaggattttatgatcccatagacgaactattgatagagccttcattacctggtattagttactcattcaccgaagatggttggtacgaagaagccagttaccaggtcagtggaaatcctcgtgacccaacttgccccatggcctcgttgattttccagcatggtaaatatgtcatctcagataacggtactttagttctgaatcctactgaagttgacggcagacagctgttcagcgatccatgcaaagatgacggaatatcgacatattctagatacaaccaaaccgaaacgtttaaagaattttccgttggtatagatccttaccatggtatctacactttacaactatatcaatttgatggtactccaatgcaaccgttatacttggcctaccggccaccaatgatgttaccaacggagaccttgaatcctacagacaccgctacaagcagtggggcgtccaactctgacgacacttcagcatcttctaagaagaaaagatcactaagaagtctggtaaggagaagcctagaaaacagacacaagacaaatgccgttaagagatccaacgcatcatttttaacctcgaatgctatttggtatatttctgcaggtatgttgggtgttggttcattattatttttagcattttag

SEQ ID NO: 2034 - DNA, 672 bp, Saccharomyces pastorianus
atgaagtttttcccaatccttttattgatcggtgtggtaggctacactttgaacctgctgttcaccacctggttgccaacccactacatgttcgatccaaagactctgaaccaaatatgtaacacggtcatcgccaaacatgacaccactgccgaagacttttctactgaagtcctgctacaggacgtcagagacgcacttgcctctcactacggggacgaatacatcaacaagtacgttcgtgaagaatgggtcttcaacaatgctggtggtgccatgggccaaatgatcatcctgcatgcatctatctcagagtacttgatcttatttggcacggctgtcggcacagaaggtcattccggtgtccacttcgccaacgactacttcaccatcttacatggtacccaaactgccgctttgccatatgccaccgatgccgaaatttacactcccggtatgacccaccacttgcaaaagggatatgccaagcaatacagtatgcctggcggctccttcgctttagaattggctcaaggctggattccatgcatgttgccattcggattcttggatactttctccagtactctcgatttatacactctatacagaactgtctacttgactgccagagatatgggtaagaacttgttgcaaaacaaaaagttctaa

SEQ ID NO: 2035 - DNA, 1164 bp, Saccharomyces pastorianus
atgtccgcacccaccccattagcagaggcctcccaagtgcccactatcccggccctttctcccttgactgcaaagcaatccaaggggaatttcttttcatcaaacccaatatctagctttgtcgtggatacgtataaacaattgcattctcacagacaatctttggacttgatcaacccaggtacggtggaaaatctgaataaggaagtttcccgtgatgtgtttttatcccagtactttttcacaggattaagagctgatttgaacaaggcattttccatgaatcctgccttccaaacttcacacactttctccatcggttcccaagccttgcccaaatacgccttttctgcattgttcgctaatgacaacctatttgctcaaggtaacattgacaacgacttatctgtctctggtagattgaactatggttgggataagaaaaacatttctaaagtcaacttgcaaatatcagatggtcaaccaacaatgtgccaattggaacaagactaccaagcttccgacttctctgtaaatttaaaaactttgaacccttcgttctctgaaaagggcgaattcacaggtgtcgctgttgcctctttcctacaaagtgttactccccaactagctctaggtttagaaaccttatactctagaactgatggtagtgctccaggtgatgcaggtgtctcatacttgactcgttatgtttccaaaaagcaagattggatcttgtctggtcaactacaagccaatggtgctctgatcgcatcattatggagaaaggtcgcaccaaacgtcgaagcaggtatcgaaaccacattacaagcaggcatggtcccaattactgacccattaatgggaactccaatcggcatccagccaactgtcgaaggatctactaccattggtgccaagtatgaatatagacaatcagtatatcgtggtacattagactctaatggtaaagttgcatgtttcttggaaagaaaagtcttgccaactttgtctgttttgttttgcggtgaaatcgaccatttcaaaaacgataccaagattggctgtggcttacaattcgaaaccgctggtaaccaagaattactgatgttacaacaaggtttagatgccgatggtaatccattgcaagctcttcctcaattgtaa

SEQ ID NO: 2036 - DNA, 1242 bp, Saccharomyces pastorianus
atggctttggccaagggagaaacgaagaaaaatattctgaaatcgacggcaaagcaagaaaagaagcctcagtcgacatttcaaacattaaagcagtcacttaaacttagtaatagcaataagaaaataaaacaaagcacagctcaaccatcaaatgagacaagcaagcctgtcaaagtacgaaatcgcgatctatccatgaagaaatctggggtacaaaggaaaagaatatcaacacaaagattttcattgtttacatataataatgttcaggtaatgaattcatttgttccaattcacaacgattctcaatacaacagcactattgttcgaagaaactctcaagtttctacaaataatgcatctaaagctagcaaagggtccttcaatgacgcactgagtcaggatagtcagaatactatcaaattgaaaccaacctcattaatggcaaagggaccaattgaaatatatcagatatgtacagggtttggcaatttgaaagaaaatgttgaacttattcagaagtccagtaaggatagtagtcacgatggccatgtggtgaattatttatcaataggaaggcatggcgatattgttcatccagtgttacccaaactacaaataacaagattgaacgggacaggttacaaatattttattagcttttacaatccagaacgatactgggaaattgaatttctacctatagataatcagactcgatcagacttggagaataaggctaaagattttgaaaacatcattagtaagatctgtcaattttcacaaatcagcgaagaagataccattggaaacaatgagtccttgagcgataagtttgcgacctcgtctacatcgattgttaagtcacctaatattgaaataggtggcgacgatggtgatggtgaggatgagctaaattatttactggatgaggaagacgaacccaataagacaaagagcgtatatccggtgccattcgatagttattcgaatataagcacaaagctcgactatcccaacggttctaccgataccatgtcaagttctattaacgaggctttcaaaaatgcgatgagaagaaccgcgcctatattgaatactccagtggcttcgagtatgcatttgcagcagaaaaacaaaagatacagttcgtattcttttgttaattcttccgtacctctgtcagataggcataggaggtttgaaagaaggtatatatctagactgggcgatctttga

SEQ ID NO: 2037 - DNA, 2880 bp, Saccharomyces pastorianus
atgactgttactgctccttttgtgaatggtacttcttattgtaccgtcactgcctattccgttcaatcttataaagctgccataaatttttacgccaagtttttgtcattggaaaaccgtgcttctcctgatgaaagctccactttgttgtctaatgattctatttctttgaagattttgcttcgccctgatgaaaaaacgaagaaaaacgtcgatgcacacctaaaggaattgagtagtatcactaagactcaagactggagatctcatgccactcaatccttggtgttcaacacctccaacatcttggcggtcaaggactccctaaacgccatgaacgctcctcttcaaggctacccaacagaacttttcccaatgcaattatacactctcgacccattgggaaacgttgttggtgtcacatccaccaagaacgccgtctccaccaagccaaccccaccacctgccccagagtcctctgctagatctggcctctcatccaaggctcattcttacactgatttggcttaccgcatgaaaactaccgacacttacccatctttgccaaaggcctcgaacaaacctcaaaaggccattgctgtcatgacttccggtggtgatgccccaggtatgaactctaacgtcagagccattgtgcgttccgctatcttcaagggctgtcgtgcctttgtcgtcatggaaggttacgaaggtttggtccgtggtggtccagaatacatcaaggaattccactgggaagacgtccgtggttggtccgccgaaggtggtaccaacattggtactgcccgttgtatggaattcaagaagcgtgaaggtagacttttgggtgcccaacatttgattgaagccggtgtcgatgctttgatcgtttgtggtggtgacggttctttaaccggtgccgatctattcagatccgaatggccttcgttgatcgatgaactattgaaaacaaatagaatctccaacgaacaatacgaaagaatgaagcacttgaatatttgtggtaccgtcggttctatcgataacgatatgtccactaccgatgctaccattggtgcttattccgccttggacagaatctgtaaggccatcgattacgttgaagccactgctaactctcactcgagagctttcgttgtcgaagtcatgggtagaaactgtggttggttggccctattggctggtatcgccacatctgctgactacatctttattccagaaaagcctgccacttccagtgaatggcaagaccaaatgtgtgacatcgtctccaagcatagatcgagaggtaagagaactaccatcgttgttgttgctgaaggtgccatttctgctgatttgactcctatctctccaagtgacgttcataaagttcttgttgacagattaggtttagacacaagaatcaccactttaggtcatgttcaaagaggtggtaccgctgttgcttacgaccgtatcttggctactttacaaggtcttgaagccgtcaacgccgtcttggaatctagtccagacactccatcacctttgattgccgttaacgaaaataagattgttcgtaaaccattgatggaatctgtcaaattgacaaaagcagttgctgaagccatccaagccaaggatttcaagagagctatgtcattaagagacactgagttcattgaacatttgaacaatttcatggctattaactctgctgaccacaacgaaccaaagttaccaaaggacaagagattgaaaattgccattgttaacgtcggtgccccagccggtggtatcaactccgccgtttactccatggcaacctactgtatgtctcaaggtcacagaccatatgccatttataatggttggtccggtttggcaagacatgaaagtgtccgttctttgaactggaaagacatgctaggatggcaatcccgtggtggttctgaaattggtaccaacagagtcaccccagaggaagccgatctaggtatgattgcttactacttccaaaaataccaatttgacggtttgatcattgtcggtggtttcgaggcttttgaatccttacatcaattagaaagagcaagagaaagttatccagcctttagaatcccaatggtcttgatacccgctactttgtccaacaatgttccaggtaccgaatactctttgggttccgataccgctttgaatgccttgatggaatactgtgatgtcgttaaacaatccgcttcttccactagaggcagagcttttgtcgtcgactgtcaaggtggtaactctggttacttggcaacttacgcttctttggctgtgggtgctcaagtctcctatgttccagaagaaggtatctcattagaacaattatccgaagatattgaatacttggccaaatctttcgaaaaggctgaaggtagaggtagatttggtaaattgatcttgaagagtacaaacgcttccaaagctttatctgccaccaaattggctgacgttatcactgctgaagccgatggtagattcgacgctaaaccagcttacccaggtcatgtccaacaaggtggtttaccatccccaattgatagaacaagagccactagaatggccattaaggctgttggcttcatcgaagacaaccaagctgttattgctcaagctcgtgctgctgaagaaaatttcaacgctgatgacaaggtcatttccgacactgctgctgttgtctgtgtcaagggttctcacgtcgtttacaattccgttagacaattatacgactatgagactgaactttctatgagaatgccaaaggtcatccactggcaagctaccagactcatcgctgaccatttggttggtagaaagagagttgattaa

SEQ ID NO: 2038 - DNA, 1332 bp, Saccharomyces pastorianus
atgtcactaccattccttacttctgctcccggcaaagtcatcatttttggtgaacactctgctgtgtacggcaaaccagctgtcgctgccagtgtgtctgctttaagaacttacttgctaataagcgagtcatccacccccaacactattgaactggactttccggatattgctttcaaccataaatggtccatcgacgatttcgatgctatcatcaaggatcaaatgaactctcaaaaattgtctaaggctcaacaagctacaggtgaattgtctcaggagcttgttgatgtcttacagcccttgctagctgaactgtccaaatcattccactaccatgctgccttttgtttcttatacatgtttgtttgcttatgtccgcatgccaagaatattaagttctctttaaagtccactttgcctattggtgctggattgggctcaagcgcatccatttctgtggcattggccttagctatggcctacttgggcggtttaattgagtccagtgacttggaaaaactatccgagagcgataaacatttagtgaaccaatgggcattcacaggtgaaaagtgtatccatggtacgccttcaggaatagataacgctgtggccacttacggaaatgctttgctgtttgaaaaggactctcgcaagggaacgataaacacaaataacttcaaattcttggacgaattcccaactatcccaatgatattaatttataccagaattccaagatccaccaaggatctagtgactaacgtacgtgtactagtaaccgaaaagttccctgaagtaatgaaaccgctcttggatgctatgggcgaatgtgctctacaagggctggatatcatgactcaattgagcaaatgtacaggctctgatgaagatgcttcagaaaaaaacaacatcctatatgagcagctgttggaactaataagaataaatcacgggttgcttgtttctattggcgtttctcatcctggattagaaatcataaaaaatttaagtgatgatttaagaattggctcaacaaaattgacaggtgctggtggaggcggttgttctttgactttacttcgtagagatattactcaagagcaaaccgatagtttcaaaacaaaactacaaactgattttggttatgaaacatttgaaaccggtttaggtggtaccggttgctgtttactgagggcagaagatttgaataaagatcttaaaatcaaaaaccgaatcattcaactttttgaagccaaggataccactaaacaacaaatcgatgatttgttgttaccaggaagtgcaaacttgccatggacttcataa

SEQ ID NO: 2039 - DNA, 1428 bp, Saccharomyces pastorianus
atgcacgaagttttaacgatatccgtttcgcagagagcaaaccatttaaccactcaattcttcaacatacaagagggctatttgaaactttccaaagaagaacaagttaatgactccaaaatattcttgaacccaatcgttgacaagttttcaaaaacagtttcatatacaccaagggctttactatgggacgcccgtacaggtaatggttcattgggaacatatcaatatgcagagacgaaagactatcattttggcaatgaggacgaatttaaaaatcaaacggttgtaaaaactcacccagcgatacccaaatctgaatatcaaatcgccttagattcagcaataccgcttccaaccttaactaaagagaataccaaatattggtccgattactctaaattaatttatggggcttcaagcttcaatacgttgaaggactggtaccatgacattgcaaacccaaaccaacctgactttcaaaacttaggggagcgaaaatttaacaaatactcaatcggttatgacgagtttactgaaaattacatgcaagaattctttgatggaaatttgcatacagaattggagaaatgcgacaccttacagggactaaatcttataactgatatcgagagtggatggggtggattttctagtgctttactattggaattgaaaaacgaacttccaaaaaaaactgttttttcttggggtttcaatgaagatgatccatttacagatgtgctttctataaagaggcttaccaagaaatggcttccaataatctcgaataaactaaggagtacaatgaatataatgcaagattctgatctttattttccgttatatgctcctactgggctaaccaattgggaaactgctggtaagacgtgcagaattctagattccgtgaacgcaacaatttcccagagtaatcctgaacaaagaaaaatgatggattatattactacggccgtcaccttaggagattcgtcaagaaatatggttactcaaatgcttgtcggtaataacgattattctttctgttcccgaatagtgccgtttaaaaatagccgtataaacaatgaatgccaggtattctccaacagctttatcaatagagaagagcaaatgcttcgagaaagccccgagtctgctcctcgaagtaaacggaatgaaatgtttacacataggtatttcccttctgatacaataccgacagagttttctaatgactgtgatttttgtttaaaactaacttcctccgaaaaaagtagagatatattcaagcattggaacgaatttgtgacaagatacttcaaaaacgataatgatagagaggaattgaagaatcaactctctgattacgctacagcgtacgaatctggatggtacgacgacgaggattctggtgatgatgatatgtaa

SEQ ID NO: 2040 - DNA, 2358 bp, Saccharomyces pastorianus
atgcaattgtctatgcggatgatgttcacaccaaagcaccagaaactggtcaatcaatgttatcctacggggaggactactgataagaagcctaagtcatcggagacttcatatttgctatattatgtcaactcgagacgtagcaaattggaaaaggtcagcacttacctaattaaaagatctacttctgatttgaaccatcgccgtataggaaatatagctgttacattggatttgatgaataagattgtgctgcattgcagagaaaacttaaacgtattcgttaaagattttttgtatattatgaacaaagttctctcgaacaacaatttcaacaatgatgtagccgtcgtggaattggtagaactggcattcagtagcatatgcctgaatttggatgacgtcttatgtaacggtgatatggaatttattcagttatatcaaagttttgtcgatctattctttaaaatagtcactgaaagaattcataatgatgatatgcttttaaaatgctgtattgatatatcgaacacaaacagcgtttcaagtaatcctcaattgaattattttgtctccaaatccgtaacatacactatttccaaatttcaagaaagaaatccaaaatttaaaacgctgtcattaggaccagttttagacggtaatttaggtaatttaggtaaacgactaagtcgaacacaaacccgcaccgttggattggataaaactgttgacgacaacaatgatatctctataagggctttacaatcatatttcaacacaactgagacagataaattaaacctatccatacgtactttgttacgttgtctgcaaaatacgccaaataaggaactgctagaatttatatgtaacggcatacctgttcagctgcgatacatcgttattcttcttttagtcagacaattaagcgacaaggataaaaatgtggatccggtcgtttctttgaaattgatgtcatcattgcttgtctctgacgttagtatagtaggcttaagtgtccttgatataatgagaaagcttttaaatttccaattgaagaacgtagccgataaagaagttgtggagcaatcctgtattactatgacagacttgaatcacaaaacttattacactgaacagacttcagatatgctttatgaactactcttaaaattgaagagtgataccactaaagacctagagaggaacgcagttgtggaagacgttgattatcttgttgagcacattacacaaccaagtattagtttggaactattcattgatttggcgcattacatgagaaatcaaattataagtttatttgccattgttgaaaccgaggttccgactggatttgtcttttcaaaactctattcattattgcgtgaactggattcacatggtgtgcaaaaagaaatgatggaagaaatttttgataagtatggaaaagtggcactattatccggtttgcattatttcttggagaacgtttctgaacctgaatacacctactattcgtatcatttacaagctgctgaatttttaaaattgaatgattacaaatcgcaaactgaatacaaaatgcaaactaagacactatttactaaggaagatttattgtcttactattccgatatgggatcgaacaaatacaccaatagaggcgcacaaattttgatgtctcgtgacaaccaaatttccacttctgatttactatcggatttccaagttcgtactacatctccagattacaggactgtgcctaatgtcgtcttaccaaacggtaattcaatgcccaataataaagatgttacaataaagcaaagcagattcgataaaagcatagatgacaaagtagacgaaggcaatgatactgttatttctgatgctaatgcaaagggtagtatctacaggtttgttgctgaagatgcgagatcatggaaaacaatgagagtcactgcgccaaaaattagtgacttgaaaaaagcaattaatgaaagaaaaaatccaaatgacatgaaaagagatggatctgttcgctgttctcaatcggtgaaatctcgcgttactaatattacgtttttgctaagtgaattaaaaaatttttcagaggacgcaaacaatgttaaagatcccgatgaggaaaatattgttggcttagataaaattgatgtggctagatctaattccctgcgacttgcaccaatatcgagtgtttccgatcggagtagtattggaaatagaaggtccttgatacaaaagacgcctgtcgttgaggatcaagacgacgactttaaagacgcaaacgaagatttacattctttaagttctagaggtaaaatattttcctccacttga

SEQ ID NO: 2041 - DNA, 1554 bp, Saccharomyces pastorianus
atgaaaatttctaaaagtgtgctattagcggcattaactgccaccccatctttggtgagtgccatgctgcccatccatatcaagaactacaggttcatcaagccatcctctgccacgaacagcgatgcagataacgaaatctttttcgttaagggtgtcgattaccaacctggtgggtcctccggctacgatgctgattcggatacagacattctttcagaccctgaaatttgtgctagagatgccttcacctttcaacaactcggcgtcaacacggtgagaatctactcattaaaccccgacctaaaccacgacaagtgcatgaccattttaaatgacgctggtatatatgccattttggacgtcaatagtggtaactacggtgagaatctaaaccgtgctgacccttccggtacctatgactcactgtacttgtcaagagtcttcaaattcatcgatgcttttaaaaattatccgaatgtgctagggttcttttctggtaacgaggtcattaatgatcaaaaagactatgccgaaatcgaccctccctacattcgtgctgttcaaagagatatgaagcagtatattgccaaacacgccaacaggagtattccagtcgggtattccgccgctgataataccgagttgagattagccactttcaagtatctgcaatgtaattctttagatggcaaaaaagtcaacgatgatttggacgtctctagatctgattttttcggtttgaatacttatggatggtgctccggtatttccgactggcagtcttctggctacgacatactaaactccacttttgacgatgctgtcattcctttaatgttttccgaatacggctgtaataccaaaactccaagaacttttgatgaagtctctaagggtttgtatggtggtttgaagaatatcttttcggggggattggtttacgaatatactgaggaagctaataattttgggctaattaaactcggtgacagtggctctttaacttataaggaagattttgttaatttagaggcccaactgaaaaacgttacgttaccaaccacaaaagaaaatgcgctttcttcagactccatttacaagtgtgatagtagtgtcattactaaaatttactctggattcgggaccgacaactttacgttgccttctcaaccggcagaggttgccaatatgattaaatatggtgttaatggtagcaacacaggtaaaatattgaccgactatgctgttccaacaacgtttaactatacaatcaaaaacactaacggtgacaccgttcctgccactatttactatgataaagctaacgcattgaacgaattagacgctacagctacagtagccgttaggtctgtgtccacatcacaatcatcttcttattctacagctacaagcaccaaagaatcgtccaccgttcaatcttcttcaacttcaagcagctctaaaagtaaaggtgcggccaacatcaacatttcagttgatcaatctggatactttgccttgttggcaggtgtagtctccactctcttataa

SEQ ID NO: 2042 - DNA, 2166 bp, Saccharomyces pastorianus
atgggctcatcgattaattatcccgggttcgtaacaagaagcagtcatacggccggttctggtacggacggaagcagtacgagcaaggacgcagcaggctcgcaggaaacgaagaagaatttcttccagagagattataacactatgaagaaggcacctgctccaacgaagtccaaattgtctttggctttgcagacctctaagtcgtcttttagcatcaatgggacgacatcggacagtattcccacgatgacagaggcattttctacaagtagtgtcaggaagcaacagcgcgaggacacagagtcgccggtctcgtttcaatccgatacagcgacgaactcagactcggatacggactcttctgtttcatcttgcgatgaaagaaatgaagagtctttgaaggattataggcccggcgggtatcaccccgcatttaaaggcgagccttacaaggattcacgttacatcttagtgagaaaattgggatgggggcatttctccacggtttggttggctaaggatacggcaaacagctcccacgtggccatgaagattgttaggagtgataaggtttacacagaggcagccgaagatgaaattaagctcttgcaaagagtaaatgatgctgataacacaaaggacgattccataggagttaaccatattttaaagctattggaccatttcaatcataaagggcccaatggtatccatgtggtcatggtattcgaagttctcggtgaaaatctattagctttgatcaaaaaatacgaacataggggcattcccttgatttatgtcaagcaaatctccaagcaactattgcttggtctagattatatgcatagacggtgtggtatcatacacacggacatcaagccggagaacgtattgatggagatcggagatgtggaaggcatagttcaaatggtcgaagcccttgacaaacaaaaaagagaagcgaagagactgcaaaggcatgtttcgcggtcatcggatgccactactaatgacatcagtgatgaaaaatgggccgaatgtcaaactactgtgccgttggtcccgaacgcgaactccaaatcccactctattgataaagacttatcgaaaagagcatgcttcagaaggtcaaggcgtcatacgatcatcacggggtcgcagccattaccttcccctattagctcctcaaatttttttgaaatgaggtcgcacttttctggcagtaaccaaaatagcttttcatcggtatccggaaatagaaccatgccatcttccatcaacaataaccatagcattggcacaaggaataacagcaacttcttaaattcaacaccacattctctcacaagaatgttcacaaatgaaagcaataacaatagcaataacaataatgacaatgatataatgaacacaccattgcatgaagagcaactggcagactctctttctacttttgatatttccaatatgtcacaatcctcagatacaaatagtccatacatctctaataccacggattcaacatcaaatgctagtaccaacacgaaccctccagagaacttgattcagatcaaaatagccgatttgggtaatgcttgttggtacgatgaacattatactaactctatacagacaagagaatacaggtcaccggaagtgcttttgggtgctccgtggggttgtggcgcagatatctggtccactgcgtgcttgatttttgaattaatcacaggtgattttcttttcgaacccgatgaaggccattcttacaccaaagatgacgaccacattgcacaaatcattgaacttttgggtgagttaccgtcatatctgctgaggaacggtaaatacacaagaactttcttcaattcacgagggcttctaagaaatatttcgaaattgaaattttggcctctaaaggatgttttaaccgaaaaatacaagttttctaaagatgaggcaaaggaaatatcagactttttgtcacctatgttacagctagatccaaggaaaagagcagacgcaggcggcttggttaatcatccatggctcaaggatactttaggtatggaagaaatccaagtagttgatagagagttgtatggaagcggctccgacattcctggatggtttgaagaagttcgcgaccataaaaagcattga

SEQ ID NO: 2043 - DNA, 1578 bp, Saccharomyces pastorianus
atggctgccgatgaacaagtttctaacatgtttgacactatcttagtgttagatttcggttctcaatactctcacttgattactagaagattgagagagttcaacatttacgccgaaatgttgccatgcactcaaaagatttctgaattgggctggactccaaagggtgtcattctctcaggtggtccatactctgtgtacgctgaagacgctcctcacgtcgaccatgccatcttcgatttgaacgtcccaattctgggtatctgttacggtatgcaagaactggcctggatcaacggtaagcaagtcggtcgtggtgacaagagagaatatggtccttccactttgaacgtgcttgacgatgccaaccctctatttaagggtatgaacaattctaccgtctggatgtctcacggtgataaactacatggtttaccaaccggttacaagaccattgcaacttccgataactccccattctgtggtgttgttcacgaaactaaaccaatctatggtatccaattccacccagaagttacacactccactcagggtaaaactctattgaaaaactttgccgtcgatttgtgtcatgccaagcaaaactggaccatggaaaacttcattgacactgaaatcaacagaatcagaaaattggttggtccaaccgctgaggtcattggtgccgtttccggtggtgttgactccaccgttgcttccaaattgatgaccgaagccatcggtgaaagattccatgccattttggttgacaacggtgtcttgagattaaacgaagctgccaacgttaagaagacccttgttgaaggtctgggcattaacttgaatgtcgtagatgcttccgaagaatttttgactaaattgaagggtgtcactgacccagaaaagaagagaaagatcattggtaacacttttattcatgtctttgaaagagaagctgaaaagatcaagccaaaggacggtaaggacattgaattcctgttgcaaggtactttgtatccagatgtcattgaatctatttctttcaagggtccttctcaaaccatcaaaactcatcacaacgtcggaggtctactagagaacatgaaattaaagttgattgaaccattgagagaactgttcaaagatgaagtcagacatttaggtgaattgttgggaatccctcacgatttggtctggagacaccctttccctggtccaggtattgctattcgtgttctaggtgaagttactaaggaacaagtcgagattgccagaaaggctgataacatttacatcgaagaaatcaagcaggctgggttatacaaccaaatctctcaagcctttgcttgtttattgcccgttaaatctgttggtgtgatgggtgaccaaagaacttatgaccaagttattgctttgagagccattgaaaccactgatttcatgaccgctgattggtttccttttgaacacagtttcttgaaaaaggtcgctgcgagaatcgttaacgaagttgacggtgttgcgagagttacttacgatatcacttctaagcctcctgccactgttgaatgggagtga

SEQ ID NO: 2044 - DNA, 3309 bp, Saccharomyces pastorianus
atgggtatagaggtgtattgtggatcagttcccgtaagctattttgacccgtttgacctattcgagagcctaaagccagagttccagcagatcttaccgttagacaatgtacactggaaagctccaaatggaactgtacgaacagttaacaagctgccaattgaattgattccggaagatagaggggatggggaaaaacctaatactgaacaaccgtttctcagattccttatagtaaactgtatttcgattgaccagtatagagcaaaagtacgccctctagtgaggcaatggttagcaagcctggaatcagtatcctcatcgacaggagagaaaatgatatataagcccattattctgctgtatgctaattccgaagtggtagattctaacctattcaaatctgtatctctaatggaaaaatttggtaaagattttccgcatatacaaactctggaagttcgatctgtctataggtctccgaaggatagacaagagttttggaaccagtttagccaacaaataaaggcttcggtgttggtcatcttccagcaacgattgacacatttacagcgttcgttggctactctgcaaaagggaaatgattttgaagagcaacttttaacaagagaaaaactgtatgagctgtatgtagcgtttaatattctagaagacgccaacctggaactacaaaaaattaaaagggagatacttcacaggaacatgaacatgcctgatgggcaacttcaaataccatttgagtcgtcctctaaatcggatgaatctttaagttctataataattgaaggtaccctagataaatttcagctgcataggtattttttcattagaaggctaagacttttgagattagaggaacaaactttagccgcgtttgtgggtgcatatcaactaataaagaactttattgagtctgtgtcaatagaatacaaaaaatctgcgagattattagagtttaagcatagttttttaaaatcgatgttatcatattttccacgtgagaacattggcaatgcgatattgtgtgagattaaagctgaattattgatgttaaagcgcgataactggatacaaggtgttatgatagcgagtgattttaggttaatggacaagtcttgtccaaatacaggtgtaccatataagtttgatctgttgaaagaaacgttttccgatgaaataacctttcaagataacttccttagtctcaccaaagaaatcctttctcttttcaacatgtgtgaaggtaagcgccagaggatagttgatatattatccatagagattgggttgctttaccaccaaagaaaagaatatgaacaggctgtttcccttttcctttcgtgttatgaatattatactcaaacgaactggaatgtcattggtctcaaaatcttgcaagtttttatagactccttaacacactgccccgagttagaaatcttaaagattgatggagaatcgatttctgcatcgactatcctaagtaatgcatttctcaacatattaaagttgtgcaaagatgatattgacaaggaagcttggtggaaaaagttcatcgatttacagctgaaaaatcaggccgacctgatttatcctttggatgggctgtttgaagtaaatttgattcccaaggttgacatcacaagggcaaatgtttatggccttgaagttgatttgaagaattatggatttcctgaagacattagtacaaaggccatgaaattgactttaaaaaatataatgggtgatatcattatatttgaaacaggtaatattcttttgaaaaaaggtaaaaataggccggtattagaatgtaaaggtatcatgtatggcgaattttctcctctgtcttttcaaattactgttggaggaattacttttgttaaggattttctagaaactcaagatgaaactgttgtaattccggaattgtactgtaaagaaaataccaaggtcttgatcaatcaggcgcgtgacttgaacctgggggaatatgcacttgaattaacaagtgtgtgccgtaatcatttagaatcattacaagtcgagattgaagtccaaaaaagtgcgagtaacgtgaagaatgtacctatcagtttttctgtggatgaaattcaagtcaagaggagattcaataacttgattgagaacaccagagtggagtattatttattagatcaaacaacggctttcgatttagtagtcaaaacatcattcaccaaaaaaaataaacaagacgtgtatagcgagactaaaaaagtacatattgaatgctacttgcagctatcagtttcagtcgaagatattttcaaaaaggatatatttttttttaagttcctgttaaactcttctataagggaagagccagtgattttgtacagctcgcaattatcaagtccagacacgcggaatgactacaaaatagagggcaactacattgccaccacacctgagttgattacattcgatgggaatgagagtttcataaactgttatcaaattacagccaatattaattttgactcaaaagatatctttaaccttaaagttagatataatacactgaaggaacagctagattgctttgtcactgacgcattacttattgagggcgatgttgaatggtttgttggctttgaaaagtggagaatgttttgggaattggaaatcttaaaagagttaaaatatgattatgatgcatttaaagaaaacagaataattaaatcactaaaagcttcaatagatttgaataaaatcaactctcgtttaataaaactgtcaatggaaaagaccgttctcgacaaaatgttgcgatgtttgaataaagtgggcaagggagttgcagtatgtaatacagatatggatgaatacgtgaggaatctggtaccgaagcaattaactgtccctgtacaattaccaggttttgaccaattctttcgcgtacggttccacccgatacaaaccgagaataccacatcggacaataccatggttactctaggctgtccaattcaatatgtggtagtcgtggagaatcttagtgaacaatggggacaagacgccataaatgatggcgggtatattcttgaaatattaagcagtaatgagtggttaatccatgggaaaaaacgaggcgcgataaaagagagacaaatggagtttgaagtttatttaattcccttgagaaagggttatctaagttttccgcacgttgaagtgacgaatatatatggtaaaacctgtagagttgatcattcaaatgcatttgagtcgatgttaatcttttag

SEQ ID NO: 2045 - DNA, 1422 bp, Saccharomyces pastorianus
atgagcacttgtccacatatacagcaagtatttcaaaatgaaaaatccaaagatggagttctaaaaacttgtaatgcagccagatacatcttaaatcattccacacctaaggaaaaattcttaaaaaccatgaaatgtggcacatgccatgaaataaactctggatcaacttttatgtgtctccaatgtgggtactgtggatgctggaaccattcccattttctctctcatagtaaacatatcggtcacatattcggtataaactcaaataacggccttttgttttgttttaaatgtgaggactatctaggtaacattgagctgatcaatgatgctattctgaccaagtactgggacgacgtttctactaaaaccgtggtcccgattatggagagaagagatggactttctggcctcatcaatatgggatccacttgctttatgagtagtatccttcaatgtctaattcataatccatactttatcaaacactccatgactcaatttcattttaacaaatgcaaagtgcgttctcctgataactgcttttcatgtgcactcgataaaatcgttcacgaactttatggggtcctgaatacagaccagccatcttcatcatcgtctgcaacaaatcggcaagctggttttatatacctcttaacatgtgcatggaagatcaatcagaacttagcaggctattcccagcaagatgcccatgaattttggcaatttataatcaaccaaatacaccaaaattacgttctcagcctacccagtaccaaggaagctgacaaagaaaataccaagcattgcgattgcatagtacatactgtttttgaaggttcgctggagagctctatagtgtgtccaagctgtcaaaacaattctaagacgaccattgatcccttcatggatctttctctagatattaaagacaaaaaaaaactctacgagtgtcttgacagtttccataaaaaggaactgttgaaagatttcaactatcattgtggagaatgtaacagtacacaagatgcaataaagcaattgggtatacacaagttgccatccgttttagttttgcaattgaaaagatttgaacacttactcaatggaagcaatagaaaactggatgattttattgaatttccaacctatttaaatatgaaaagttactgttctatcagggaaagtgaaagtgaaaagcatgtcgtaaacgataaagtaccagatattatctacgaattaattggtattgtttctcataaagggacagttaatgaagggcactatattgcattttgtaaaatttcgggtggacaatggttcaaatttaatgattctatggtctcctcaatttctcaagaagaggttttaaaggaacaagcatatttattattctacactattcgtcaagtaaattga

SEQ ID NO: 2046 - DNA, 2088 bp, Saccharomyces pastorianus
atggagtatcctgatccagatacaataaggatcctagtcaccaccgacaatcatgtgggctacaacgaaaacgatcccattacaggtgacgattcctggaaaactttccatgaagttatgatgctagctaagaacaacaacgtagacatggccttacagtcaggggaccttttccatgtaaataagccttccaagaaatcactgtatcaagtgctaaagagtttgagattatcttgcatgggtgacaaaccttgcgaactggaattattgagcgatccctcccaggttttccattatgacgagttcaccaacgttaattatgaagacccgaactttaatatctctattcctgtctttggcatatcaggtaatcatgatgatgcttcgggagactcactgttatgtcctatggatatactccatgctactggcctaatcaatcattttggtaaagttattgaatctgataaaataaaaatcgtgccattgttattccagaaggggtctaccaagctagcattgtacggactagctgctgttcgcgatgaaaggttattcagaacttttaaagatggtggcgtcactttcgaagtgccaactatgcgtgaaggtgaatggtttaatttgatgtgtgttcatcaaaatcacactggccacactaacactgcatttctacctgaacaatttcttcctgattttctggatctggtaatatggggccatgagcatgaatgtataccaaatcttgtacacaatccgatgaagggtttcgatgtcttacaacctggttcatctgtagccacatctctttgtgaagctgaagcacaacccaaatatgtgttcattctcgaaataaaatatggagaggcaccaaaaatgactcctattcctttagagactatacgtacattcaaaatgagatccatttcgttacaagatgttcctcatttgagacctcatgataaagatgtaacttccaaatacctcatcgaacaagtggaagaaatgatcgaggaagccaacgaggagaccaagcgtaaacttggagacgatgctgatggtgatatgatctccgaattacccaagccattgatcagattgcgtgttgactatagtgcacctcccaataaacagtctccaattgattaccaagttgaaaacccgcgcagatttagtaatcgctttgtagggcgtgtggctaatggtaataacgtcgttcagttttataaaagaagatctcctgctactagatcgaagaacctcggtctaaatggaacaaatattagtgatagagatgtagagaaactcctgaacgaaagcggtggcgaactggaagttcaaactttggtcaacgatctcttgaacaaaatgcagctatctctcttaccggaggttggtttaaatgaagcagtgaagaagtttgtagataaagatgaaaaaacagcattaaaagaatttatcagtcatgaaatatcaaatgaagtggatatattgtctacaaataatgaatttctacaaactgaagatacagaggagatgaaagcgcttataaaacaagtcaaacgtgctaattctgttaggccagccactcccatggaaaatgacgaggccagtctttcacttgataacaaccgactgagttcttttcaacccagtaatgaattacgccgggacaagccttcaagtactgctcaatctcatgttagtaaggaagcagaagtagaccgtacaaaagaatttgaaagtgttaaaccaacaaagaaaactaggtctacacgaaccgtaagaagaaaaaaaactgctgctccttcagactcgattgttatatccgatgcagaaaatgaattcgaagatgataatgatgctcgagtcgatgatgttgatgttaatgaagatgatataattatggtcagtactgacgaagaggatgcaagttacggcttgattagtggtaggaaaacaaaaagaaagagccgttcgcctgcaggtacgaaggcttcctccacgagaggtaaaggaagagcaaaagcgacaaggacgccaaaaacggatatccttggaagcctccttgctaaaaagaggaaatag

SEQ ID NO: 2047 - DNA, 804 bp, Saccharomyces pastorianus
atgtcccaaggtagaaaagctgcagaaagattggccggcaagacggtgctcatcacgggcgcttctgctggtattggtaaggcgaccgcgttggagtatttggaagcatccaatggaaacatgaaactgatcttggctgcaaggagattggagaagctagaggaactgaagaagaccatcgacgaggagtttcccaatgcaaaggtccatgtgggtcaactggacatcacacaggctgagaagatcaagcccttcattgaaaacttaccagaggcattcaaggatatcgacattttgataaacaatgccggcaaggctctgggttccgaacgtgtcggggaaatcgacacacaggacattcaggacgtgttcgacaccaacgtcaccgcgttgattaacatcacgcaagcagtgttgccaattttccaagccaagaactcaggggacatcgtgaacttgggctcggtggccggcagagacgcataccccacaggctccatctactgtgcctccaagtttgccgtcggtgcgttcactgacagtttgagaaaggaactgatcaacacgaagatcagagtcatcctgatcgccccagggctggtcgagaccgaattctcactggttagatacagaggtaacgaggaacaagccaagaacgtctacaaggacaccacgccgctgatggccgatgacgtggctgacttaatcgtatattccacttccagaaaacaaaacaccgtggttgccgacagcttgatctttcccaccaaccaagcctcgccccaccacatcttccgcggttga

SEQ ID NO: 2048 - DNA, 1785 bp, Saccharomyces pastorianus
atggctgttataaggatcaagaagcccagagagccaaagcaagaggaggcggcattagaagacgagcccaaattaaagagaatccgcataaaggctaaggtcaataatgatgaggacgccacgccaaagccaaaattgaagataagcctaaagaaaaaaagagacaatattgaaaataaagagaagaaaaattcgttgaagctcaaactgaatttgaagaagaatgaagatgtagttaaaaaggtccataaaactccaaaactacgtctcaaacccattagaattcctggcgaggcatacgactcagaggcatctgacattgaagatgaccccctgatagagaccggtatagtattgagaatactcccggatatacaattagagttcgtaaaaaattcgttggaatccggtgattactctgggataagtatcaaatggaagaatgaaagacatgccattgtgactatcaacggtgtaatgtatggtgccattgtagtagatttacctacagtgatagaagtgaataagtctgtcgatagaaagaatcttttgaagacttttgatgtgtcacaaatgttattatgcgtaagatctatacaaaatgaagaagaggtgtatgctttagaagcaccagatacggaagacttagtggttaagcactttgaagaaattgaggacgaaatctcggaaaacaaagaagcctttgtgaaaggatacaatggtgcaccgctgagcgatgcagaggcaaagcatttgaaaaaaattgctttgaagaactatgattacaagcatgggatatcaccacctctatacaatgtgcgaaataggcgattcaggcggaaaatggacccgaatgaaatagactatgtagagaaagtgattgatatgctcttgaagcaagacaaacaggctgaagaggttagctacggtctggtcgatgagagtgaactacaaacaaagcaagagcgcgtttccagttgggagaatttcaaagaggagcctggagagccttcagtcggacccaagaagaaagaagaaatacctacaatcacaccagtagccgctgaacagcaagaggaaggggaagaggaagaggacgaggaccttgacttgggagctgcctttgaaagtgaagaagaagaagaagaaggaaatgtcgctgacagaaacaagagacagcaacaggaagaagtcggtgatgaggttgatcaagacacagaaggtgaagacgatgaagatgaggaggatgaagaggaagaagatgaaggcgacaatgaagtagcaggaggagagagcgaatctgaagaagaaaaagatgaaaacagacagcacacggaacttcttgttgacgaattgaacgaactagagaccacactggcccacacaagacacaagctgggcaaggccacgaatcctctcttgaaaagcaggtttatcgacagcatcaagaagcttgagaaggaagcagaattgaaacgcaagcaactgcaacaaaccgaagagtcttcccagaagcagcatcaacaacctcctgacacagaagtcccacacaacgaagaagaagacgaggatgaggacgaggacgaagaagaagaagacgaggcagaagaagaagaagatgaagaggatgagaacgaagaagaggatgagaacgacgaaggggaacacacgcaagagggcaagattaccggcgatgccggtgaggctccagcagaagaaacacacgagcttgaccaaaatgacctcgacatgatgatgctgttcggtgcggagggcgatgagtaa

SEQ ID NO: 2049 - DNA, 1026 bp, Saccharomyces pastorianus
atgtctattccaattcccggtatcaaagatatctccaaactcaaatttttctatggtttcaagtatctatggaacccaacggtgcatgacaaaatcttcgataaattggatataacgaaaacgtataaaaatcccaagaagttgaaagtgctcgatctgtatcctggtgttggtgtacaatccgccatgttttacaatagatactcgccccagcaatattctatgatggaaagacgctcgagtctttacaaatttttgcaagcaaacttcaaagattctcccttacagatactaaaaagagatccgtacgactggtcaacctacttgcatttaatcgatgaagagcgattgtttgttcccgaggttcagccatcagatcgtatcaacgatagctttctaaccgtggctaacgtaacaggtgaaggctcagaaggccttattatgcagtggctgtcatgcataggaaataagaactggttgtatagatttggaaaaatgaagatgttactgtggatgccaagtaccactgccagaaagcttctggcaagaccaagcatgcgttccagatcgaaatgttcagtggtaagagaagcgtttacagatactaaactgattgccatatctgatagagacgagttgaaggggtttgatagtaaatgtttagaagagtgggatcccattgtgtttagtgccgcggacatctggcctacaaaagggaagccaatcgcattggtagagatggatccaactgattttgactttgatgttgagaactgggattatgtcacgaggcacttaatgattctcaaaagaacgccactaaacattgtcatggactcgctgggacatggagggcagctatacttcaatagtagaattactgataaggaactgctgaaaaagtgccccattgatttaacaaatgatgaatttatatacataacgaaacttttcacagagtggcctttcaaacctgatattttgatggacttcgttgatataaatcaaacagagcattctggttaa

SEQ ID NO: 2050 - DNA, 5181 bp, Saccharomyces pastorianus
atggtagctcccatcaaaagaaagagagatgacgaatttccactttcgagggaagattccacaaagcaaccatccgcttcatcattgataaggaacactgaagaagtgtcttttccaagaggtggtgcttctgctttgactcctttagaactaaaacaagttgctaatgaagctgccaatgatgttttatttggtaatgaaaatgccaaagtttctgaaccatcaactagaccattaaagaagaagaaaaccacaaagaaatctgcttctgataactcagcaaatgaagattcatcaaccgctactgatgaagcaaaagtcggtctggtcggacatgtcaattttaagactttgaagaatggctcttctctgttaggacagatctccagtattactagacaagatttgtgtgttacattcacagatggtatttctggttatgtcaacttaacacatatttcagacagatttactatgattttagaagatctcgatgaagatatggatagcgatactgaaactgctgacaaaaaagaatccaaggatggtgatgctgaatacgaatcatctgatgatgaagatgaaaagaataacaagtccaacgagcttcctaatttgagaaagtactttcacatcggccaatggttgaggtgctccgtcattaagaatacttcgctagagccttcaactaaaaaaactaaaaagaagagaatagagctaactatcgaaccttcattggtaaacacttactccgatgaagatttggttaaatcaacctctattcaatgtgctgtcaaatctattgaagaccatggtgctatcttagacgtgggtctcccagattttacaggattcatcgctaagaaagatatcacagattttgaaaatttgttgcctggtgctgtttttttaggtaatatcactaagaaatctgacagatcaattgttgtaaacacaaatttctcagacaaaaagaacaaaattactcaaatatcttcaattgatgccgttatccctggtcaaattgtcgacttactgtgtgaagctatcaccaaaaacggtattaccggtaaggctttcggtttagtatctggtgttgttaatttatcacacttaagagcgttttccgaagaagacttaaaacataaatttgccattggttccagtattagatgccgaatcatcgcctgtctagaaaacaaaaacggtgacagagttttgatattgtcaactcttccacatattttacgactagaagactcattaaaatctgctgaaggtcttgatgcgttccctatcggttacacatttgaatcatgtgccgttaaaggtcgtgattctgactatctatacctagccctggatgacgacagattaggtaaggtacactcttccagagttggtgaagttgaaaaccctgaaaagttaagtgccagagttcttggtttcagccccgttgatgatatttatcaattgtctaccgattcaaaatacctaaagttgaagtacctaagaacaaatgatattcctattggcgaattgatagccggttgtgagattacttccgtttctagttcaggtattgaattaaaaatttttaatgaccagtttaaagctaccgttccactattgcatatctcggatactagacttgtttatccagaaagaaaatttaagataggctccaaggttaaaggtagagtactatcggtcaatgcaagaggtaatgtgtacatgactttgaaaaaatcattggttaacattgaggatgacgaatcaccactaatttccacttatgagattgctaaagacatcaaggctaagaatgaaaagactttagcaacagttcaagttttcaagccaaatggttgtattctttcctttttcggtggtttatctggtttcttgcccaattctgaaatttcagaggttttcgtgaagaaacccgaagaacatttaaggcttggtcaaacagtagtagtaaagcttcttgacgtcgatgctgatagaagaagaatcattgccacatgcaaagtttcaaatgaacaagccgctcaacaaaaagataccattgagaacattgttcctggtagaacaactgttactgtcaatgttattgaaaagactaaagaatctatagtggtcgagatcccagatgttggcctacgtggtgttatttacgttggccatctttctgatgctagaattgaacagaatagagctcagttgaaaaagatcaggattggtgctgagctaaagggtttagtgattgataaggatacaagaactcgtgtgttcaacatgactctaaaaagttctttaatcaaagacgccaaaaaagaaactcttccattaacttacaatgacgttaaagatataaagaaagacgctccaatgcacgcctacattaagtccatttctgacaaaggtttatttgttgcatttaacggtaagttcattggtttagttttaccaagttatgccgttgatagtagggatatcgatattagtaagacattctatgtcaaccaatctgttactgtgtatttgctaagaacagacgaccaaaaccagaaatttttactatctctaaaagcccccaaggtcaaagaagaaaagaagcaagctgaatctaaaattgaaaatccaattgattcatccattaaatgttgggatgacttgtccatcggtagtgttgttaaagcgaaaatcaaaagtgtcaaaaaaaatcaattgaacgtcatcttagctgcaaacctgcacggtagagttgacatcgctgaagtgtttgacaaatatgaagaaattaaagataaaaaacagcctttgagtcactacaagaaggatgatgttattcaggtgaaaatcattggtaaccacgatgtcaagagccataaattcttaccaatcactcacagaatttcaaaggctagcattttggaattatcaatgaaaccctcagaattgaaagtgaaggaagtacacacaaagaatttgaaagaaattagcgttggcgaagaactgactggctttgttaataattcgtcaggaaatcatctatggttaaccatttctccagtcttaaaggctagaatttctttgttagacttggcagaaaatgacaaagacttttcagataatattgaatcagttttcccattaggctcagctatccaagtaaaggttgcttctattgatcaagagcatggtttcgtcaatgttattggaaaagctcatgttgatgttgatatgtctacaataaaggttggcgatgaattaccaggtcgtatcttgaaaatagctgagaagtatgttttattagaccttggtaataaggttactggtatttcttttatcactgatgcattaaacgacttttctgtatcactaagtgaaactttcgatgacaaaattaacaatgttatcccaactactgttttggctgttgatgcagagaataagaaaattgaattatctttacgtactgccgctcctaaatctcgctctattgggtcccataaagacttgaaacagggtgatatcgtagatggtattattaataacgtgaatgacaagggtatttttgtttacttgagtaagaaagttgaagctttcgttccagttagtaagctatctgactcttacttgaaggagtggaagaaattttacaaaccaatgcaatacgttgtaggcaaagtagtcacctgcgatgaagattctcgcatttctctaactttgagagaatccgaagtaaacggtgacttgaagattttgaagaactattctgatatcaaggctggtgatatttttgatggtactgtaaagaacgtcaccgattttggtgtttttgtcaaactggacagtacagttaatgctaccggtctggcacacatttctgaaattgcagacaaaaaacccgaggatctctctgccctatttggtgtaggtgacagggtaaaagccattgttttgaagacaaatccagagaaaaaacaaatttctttaagcttaaaggcatcccatttctctaaacaagctgaatcgtcaaccgctactgcaaacgaagccgaaaaggaagatgaagatgaaatcatggctgacgtagccttcgacgattctgacaacgaatctgatgcagaggatcataacaacaacgctactgataagggggctaaaatatcatcagatggattatccttaagtgctggcttcgattggactgcccccattttggaccaagcacaggaagaagaagactctgaagaagatcttgaagactttactgaaaacaagaaacataagcataagagaagaaaggagaagatcatacaggacaagaccattgatatcaataccagagcaccagaatctgtcgcagattttgaacgtttaatcatcggtaatccaaactcttctgtcatatggatgaactacatggctttccaattgcaattaagtgaaatcgaaaaagcacgagaacttgccgaacgtgcgttgaagactatcaacttcagagaagaagctgaaaagatgaatatttggattgcaatgctgaatttggaaaacacttttggtactgaagaaactctagaagacgtcttcaaaagagcttgtcaatatatggactcttatgccattcatacaaaattgcttggcatttatgaaatgagtgagaagctagacagagctgcagagttattcaaagctacggccaagaaattcggtagtgaaaagatttccatctgggtatcatggggtgacttcttgataagtcataatgaagagcaagaggcccgtacgattttgggtagcgctttgaaggctctaccaaaacgtagtcacattgaagttgtccgtaagtttgctcaattagaattcgctaagggtgacccagaaagaggtcgttcattatttgaaggtttggttgccgatgcgccaaagagaattgatttgtggaatgtttacgtggaccaagaagtgaaagccaaggacaagaagaaggtagaagatttatttgaaagaataataaccaaaaagctaacaagaaagcaagctaaatttttctttaacaaatggttacaatttgaagaatcgcaagatgataagaagaccgttgaatatgtcaaagccaaggcaacagaatatatcactaatcatgaaacgccaaaggcagatgaataa

SEQ ID NO: 2051 - DNA, 1050 bp, Saccharomyces pastorianus
atggcaagacaaggcgggttttatgctgttcgaaaaggtagagaaactgggatcttcaattcgtgggatgaatgcaagagccaagtgaatgggtacggcggtgccatttacaaaaagtttgacaactatggtgaagccaaatcctttgtcggccaatcgaataatgcatcggattacaggagttccgaccgtttcgcaaactctaatattagcaaacctcatagtagacgaaagccctctcacgggttaaatgcgccatcatctttctattcctcgctaacaccatctccagcatcagcatcatactccgtcaacaaatctgccttttactcagtaaaaagtatcaatccagaagtcgagagtaagattttcaataactggaatgactgtcaaaactatgtcaagcgtaaaagaggtataacatttaagaaatttgaggatcaatctgctgcagaaaactttatcaatggaattagcgtacatgactacaaactaatgaatatttctaaggacacttttgaatccaactataagcattccaactctgtcagatatgataaatccatgaacgtttattgcgatggttcaagtctcggtaatggtacctcatcatcaagggcaggctatggtgcatactttgagggagcgcctgaggacaacatttctgaacccttaatttcgggagctcaaactaataatagagctgaaattgaggctgtttctgaagccttgaagaaaatatggcacaacctaactactaaagaagataaaataaactaccaaattaagaccgattcagaatacgtggccaaactgttaaacgataggtacatgacttacgatgatagaaaattgaaagagttgcctaattcagatctagtcattcctttagtggagagatttgttaaagttaagaaatattatgaattgaataagaactccttcaaaaatgatggcaaattccagattgaatgggtcaaaggacacgccggtgaaccaggtaacgagatggcagattttctggctaagaatggagcgtccagaaggtaa

SEQ ID NO: 2052 - DNA, 1227 bp, Saccharomyces pastorianus
atggctactttacattttgttcctcaacatgaggaagatcaggtttactccatttccgggaaggcccttaagttaactaccaatgacgatatcaagccgtacttacaagaactggttggtttgaagacgtgtacaaagttggacttttcaggcaataccattggtaccgaggcttctgaggccttggccaaatgtatctctgataacactcaggttaggaactctttggttgaagtgaattttgccgatttgtacacctcgagattggttgatgaagtcgtggactcgctaaagtttttattacctgtcctattgaaatgtcctaaactggagattgttaacctctccgataatgcctttggattaagaaccattgagtctctagagaactacattgtaaatgccgtgaacatcaagcatttgatcttgagtaacaacggtatgggcccttttgctggtgaaagaatcggtaaggctcttttccatttggctcaaaataagaaatctgcttccaaacctttcttggaaacgtttatctgtggtagaaatagattagaaaatggttctgcagtatacttggccctagggttgaaaagtcacgctgatggtttgaaagtcgtcaagctataccaaaacggtatcagacctaagggcgtggccactttaattcactacgggctacaacacttacagggcctggaaatcctggatttacaagataacactttcactaagcatgcttctttgatattagctaaggctttgcctacttggaaggatagtttgtacgagctgaatttgaacgactgtctcttaaagactgctggttcagatgaagtcttcaaagttttcactcaagttaagttctctaatttgcatgttttgaagttcgaatacaatgaaatggttcaaagcacccttgaaacatcctttttacctgccatggaaaaggggaacttgcctgaattggaaaaacttgaaatcaatggtaacagattagaagaagattctgatgctttagatcttttacaaggtaaattcgatgatttggagattgacgatttagaagaacttgacagtgaagatgaggaggaagaggaagatgaggaagatgaagacgaggatgaaaaacttgaagaagtcgaaacggaaagattagaaaaggaattgctcgaggcacaagtggatgaccttgctggacgtttggctaaaactgaaatcaaataa

SEQ ID NO: 2053 - DNA, 2175 bp, Saccharomyces pastorianus
atgctttcgcagacttctattccggaagtaaaagaagacgtggtaggttatgccctgcaccagaggaggtccagggtgggccaatttcaggacctaggtccccctgatttgatcactttggtcaaatcactaccttcgtcctcgagcaccatggcaccctccgtctcagccaccgataatggagcaggccctaacatcaatggccaagatcccacgactatagttaccgaattgcattctcatgataaactaaaaggtcagatcggtactttcttctactccatggggattgacacttctgatcctacttccattacgatctttgctaagaaaataactgatcttttcttggacacgcctcagatttggtttggtaagaagaagcatttccatgtttcgaaaatttccatcagttcttggaatgcgtttagaaagtatgatgttaatatcatagtccacattccagggaccgtgcaaacctatatcataagtagcgacggcgaacaatcgcagcttccctccgtgacagagacttcatccgcctccaattcacaggacttgaacgtaaacatgatctgggcggaaacttttatgagcggtattgtacgtgatattatgctgatgaaagataaccgagtagatggagaatcccaaaatttagtcgaaaccttgatattcaacccactaacctccggtgaactagaggatgtcgccacaaacttcattaaactgttccccttggtttatgagaaaggtgttaatttagacgcgcccacttatgttttgaatccttctttaaccaataattatttggttgaaacgttagtagaaatagttagattaaccaagagtttggacgcttgtcgtaaaatgctcgaggagctaatagaaatccatcctgaggcagttataattttaattcgcgtttattttgcatgcgatttagaaatagacgcaattgatctgatcaatgaacaattgaattccccatcgtcattcttagttgatgactcaaagacaagtcacatccagttgattttcaagtctgaattactaagcattcaaagcgagtttctattaaacgtcaagagagactataaactagctaaagaagtcgctatagaggctgtcaactgtgcaccaaacgaattcaaaacatggtttttattgacagaggcatatattaaattaaacgatatggcaaatgccctcttgtcacttaatgcttgccccatgtcacaggtcaaagaaaaatatgttcttagaagaattgcccctatcacctcagatgaaaatctccatctaccattaccgttggacgcatcggttgaagaaatttcgtcattgaatcccatggacgtccaattggaacaaaaatccgcagatccaaacttaatcaatctttctgcatccagtttaaaatctactttccaactagcgtataaactactaacagaaattgttcaaataaccggatgggaacaactcttaaaatatagatcaaagatctttgtcatggaggatgaataccaaggctcagcttcttctatcgacgaagtagatgttcatggtaatgaagcttctaagatgaggtccaagaggttatgtgaaaggtggttggataaccttttcatgctcctatatgaagatttgaaaacttataccgattggcaatccgagcagttgtattttgatgctcaaaacagtaagtaccataaactaactgtcgaatgggagttattcgggctttgtgccaaaagactgggacatcttccagaagccgcaaaggctttccaagttggattgtctcaaagattttctccagtctgcgcaaagaatctactggagttttacattaatgaacataagcgtattataagggattcagttttggtaaattccgaattgacctcttctcaaatattgtcaagtattaatgacttggacaggtcaattatcgatctagtagtcaagatttgttgttggaatcaccgttggtacattgagttttcaataattctaatagatgctttgagcgtcgcagttcaagacatgggtatcactaaagtgcataatgaaattgcctctagattttctgagcctgtggctcaactggttgacgataacattctaaagtttttaaaaaattttacaaatgacacattcgataattaa

SEQ ID NO: 2054 - DNA, 1377 bp, Saccharomyces pastorianus
atgatcgtcaaagctagtatgaagacggtcctaccgttatgccttacgctcctgtcccttttcagagcaacaagtgctttggatttggacaccactgacgcaacatcgatttgtgatgccacggctttaatacaagatggtatgctggattactacgaaggtactagatatggtggtgcagtggggatgttccaatctccctactattggtggcatgcaggtgaagcgtttggtggtatggttgaaaattggtttctttgtaaaaatgacacatacgaagaactattatataacgcgttactcgcacaaactggtgctgattacgattatatcccagctaatcaaacaatggttgaaggtaacgatgatcaaggtatttggggtattacagttatgggcgctgtggagagaaattttacagaccctgataacggtgccccaggttggctggcaatggtacaagccgttttcaataccatgtattccagatgggattctgaacattgcggtggtggtctaagatggcaaatcttcacttggaatagtgggtataattacaagaatactgtttcgaatgcctgtttgtttcaaattgctgcaaggctgggaaggtatactggtaataccacatatttggatgttgctgaacaggtttttgattggctagtggatgtcggatatgtggttcttaatgacactgctaacgtgtttgacggtgcagaaattgacaccaattgtactgatattactaaaattgaatggacctataaccacggtattgttcttggtggtatggcgtatatgtataatgctactaacggaacaagtgaatggaagaccagtttacaacagattctgaatggtgcggcgtcatatttcttcaaagatggtattatgtacgaaagtgcttgtcaagactatggcacttgtaacacagatcaaagaacatttaagagtatcttttctcgtatgcttggccttacaagtgttatggctcctttcactagtgacactattgatgcattaataaagacaagcgctgaagccgctgccaaatcatgtgatggtggtagagatggccatacatgtggcttagattgggaaaagcaaacaaacgatggttactatggtctaggtgaacaaatgaacgcattagaagttattcaaaatcttttaattcatgacagaccagccccatacaaggaagataatggtggtacatctaaaggtgatgcaaatgctggtatgaattcgtctacaaccagtgtgcttcaaaataatctgaacatcacaaagggtgatcgtgcaggtgctgctattatcacagcagtcatattaagcgttctaattggtggtgccgtctggatgttgttttga

SEQ ID NO: 2055 - DNA, 1410 bp, Saccharomyces pastorianus
atgagcgaaaaggtgaaaggtaaaaggaaaacccaaatagagaataagttgaaaaagggtgctagttcacaacaacggaaggaaacctgtatgaaaaatggtttggaagatcgacccaggacagccgattacgattaccttgaagtgattcaactggagcatgccgtgaccaaactggtggagtcctataacaaaataattgaactttcgccaaatctagtaacttataatgaagccgtagacaatcaagataaagtgccagttcagatacttccctctctgtcacgttaccaactcaaattagccgctgaattgaaaacactgcatgatcttaaaaaagaccctatcctcagagagatcagtgactatgaaaatgtattcgatattgaacagaagcaacatatcttgcaagaaatcaataaatttgacatggaaaagttagaacaaatcaaaaaagagagaaaagacaaaatcgatctaaatgtatacgaaagtttgaatggaaaggaagaggaaggggaggaggacgaaggagaagatagttatgacccaacaaagacaggagataccactaaaacaacaaaatggcctcccaaattaccagagattcaagatttagcaatcagggcaagagtgttcattcataaatctaccataaaagataaagtatacctgtctggatcagaaatgatcaatgcacataacgaaagactagaattcttgggtgattcaattttgaattctgttatgacactaattatttataataagtttccggattacagcgaaggtcagttatcaacattgaggatgaatttggttagcaacgagcagatcaagcaatgggcgataatgtataagtttcatgagaaactcaaaacaaattttgatctaaaggatgagaattccaacttccaaaacggtaaactaaaactatatgcagatgtgtttgaagcctatattggtggcctgatggaagatgatccaaggaacaatttgcctaaaataagaaaatggttaagaagactggccaaaccggtcatcgaggaggccactcatagtcaagttgccttggaaaaaacggacaaacttgacatgaatgccaaaagacagctttactctttgattggttatgcgtcattacgtctacattatgttactgtcaaaaagccaactgcaattgacccgaattccatagtagaatgtagagttggcgacggtaccgttctaggaactggtgtgggaagaaacatcaaaattgcaggtatcagggccgcagaaagtgctcttcgtgacaagaaagtattagatttctatgccaagcaaagagccgcaattcctagaagtgaatctgtgctgaaggatccctcaaataagaataagaaaagaaaattttcagacacgaattga

SEQ ID NO: 2056 - DNA, 1323 bp, Saccharomyces pastorianus
atggccaggaccaaatctaggaaacgttccggaacaaagcaaagtaaaaatgtgtctgtggtaaatagtaaagctgatatcgccgccatgattgaagcaagaaggctcaagcaaaacaaggggagcgttgagttggctaccaagaagagagcaataaatggactggtggatgagaagctagaagaacagtttaaggatgtcctgcgacggtttcaagtacaggcgcatgaagctgtgccgaaagaaactagaaatcagaacgatcaagtagttactacagtaaaggcgggacacgtcatggaggcaaatcctgatgccaaacgtgagttggaaaatgtatttcaagatgatggtgaagagcatttttcgacgagaaagcgtaggaaaatggaaaaaccgtccctatcagaattgaaaagccaggtaccgtttccgcaaaatatagagtggtacgactgtgacgcaaactaccctgccttactggcttccattaaatgcaccaaaaatgtgatccctgtacccaaccactggcaatccaagaaagaatacctttctggccgttctttgctgggtaaaatgccttttgaattgcccgatattatcaagaagacaaatatagagcagatgagatcaacgctcccgcaaagtggaccggatgctcaagacgaaaagtcattgaaagaagcatcaagagctcgagtccagccaaaaatgggcactctagacttggattacaagaaattgcatgatgtgtttttcaaaacgggagcgaactggaaacctgatcacttgctacctttcggtgatgtttattacgaaaacaggaatctttttgaggaggcgaaatggagaagaatggttaatcgcaagaggccagggagaatcagtcaagaacttcgcgagattatgaacctgcccgaagggcagttaccaccatggtgtatgaaaatgaaagatgttggattgcctatagggtaccctaatttgaaaatcgcaggcttgaattgggacataacgaatttgaaaggagatgtatatgggaaaattattccccatggtcagtcaagggccaaaaatcaaaccaagaaatatttcggtgctttaatttcgtttgaaactcctgaatttgaaaccacaaagggtgatgaagaggtagatagagtggaaaaaaaattacaagatggagatgttaaagatgaagcagagaataaattgaaatacgttcagaaagacatatctgaagggataaccttagaggaagaagaagaagttgaaaacggggaggagccattagaaaagcaattatatactatattgaaatag

SEQ ID NO: 2057 - DNA, 1335 bp, Saccharomyces pastorianus
atgatttccggtaaagagttgagaattatttctcttttgaccttagacacgatctttttcctgttggaactgatcattggttatatgtcgcattcgctggctttgattgcggattcgttccacatgctgaatgatattatctctcttttagtcgcgctttgggcagtggatgtggccaaaaacaggggtcctgatgctaagtacacttacggctggaaaagagctgaaattttgggtgccttaatcaacgctgttttccttattgccttgtgtttttccattatgatcgaagctttacaaagattgattgaacctcaagaaattcagaacccaaagttggttctgtacgttggtgtagcagggttgatttccaacattgcgggtttgtttctgttccacgaccatggcagtgacagtttgcactcgcattctcatggctccaccgaaggcggaaataacgatctcgacatagagtcgaatgccactcattcccattcccacgcgtctcttccaaacgataacttttctgccgacgaagacgctatttcaagtcctggtccatcagaggacatcagagaagtccttccccaatcagtagtaaacagattatccaacgaaaaccaacctttattgaaccatgatgaccacggtcacaatagcggaccaaagaaaaacaaacaacgttcgctaaatatgcacggtgtctttttacatgtcttgggtgacgctttgggtaacatcggtgtcattacagcagctttgttcatttggaaaacagaatattcttggaggttttattcggatccgattgtctctttgcttatcaccattatcattttctcttcagctctgcccctatcacgtagagcttcaagaattttactacaagccacgccatctacaatttctgccgatcaaattcaaagagagattttggcggtacctggtgtagttgccgtccatgatttccacatctggaatttgaccgagtccatatacattgcatccattcatgttcaaatcgactgcacacctgataaattcattagctccgccaaattgataagaaaaatcttccatcaacatggtatccattctgccacggttcaaccagaattcgtttctggagaagtcaacgaggatatccgtagaagattttccatcatagccggcggtacagaaccttccccatcatcatctcaagaagccttcgagaataacggaaactctgaacgcgataagaagcgttcccctactgcctacggtgccaccacagcatcatctaactgtattgtcgacgatgctgtaaactgtaatacttctaattgcctttaa

SEQ ID NO: 2058 - DNA, 1752 bp, Saccharomyces pastorianus
atgctacacagacacaagtcaaagcaaaaaaagttcgaaggtattactgaacaagttggtcgcgacttggcagggttgcaattactttccaatgacatccaaaaatctgctatccaacagggtcatccaacaacgaaggggaatggtggaactcaaggcatggctaacaagtattcggttcctaaaaaaggactgcctgctgatttatcatacgaattgattcataacgaattaacacttgatggtaatccgcatttgaatttggccagcttcgtaaatacattcactacagaccaagccaaaaagctgattcatgagaatttgtccaaaaacttggctgataacgatgaatacccgcagctgattgaattgacccagcgttgtatttccatgctagctcagttgtggcacgccagtcccgatgaggaaccaatgggctgtgccaccaccggttccagtgaagcaattatgcttggtgggctcgccatgaaaaaaagatgggagcataggatgcaggatgccggtaaagatatttccaaaccgaacattataatgtcgtctgcatgccaggtggctttggagaaatttacaagatatttcgaagtggagtgcagattaattccggtttccagcaaaagccaccatatgctataccctgaatcgctgtgggactatgtggacgagaacaccattggctgttttgtcatcctagggactacctacaccggccatttggaaaacgtggaagaagtcgctgacgtgttgtcgcaaattgaatctaagcatcccgactggagtaacgttgacattcctatccatgcagacggtgcctctggtgggttcatcattccgtttggctttgagaaagaaacaatgaaaaactatggtttggaacgttgggggttcaatcatccacgggtggttagtatgaacactagtggccataaattcgggttaactacacccggtctgggttgggtgttatggagggacgaatctctactacctaatgaattgagattcaaattgaagtatctcggtggtatcgaagagacttttggtttgaatttttcaagaccggggttccaagttgttcatcaatatttcaattttgtttctcttggttatgcaggatacagagcacagttccaaaattctttgtttgtggcaagagcgttttctttcgaactgttgaattctagtaaacttcccggttgttttgaaatcgttagtagtatccatgaaaacatcaaggacaactctgtgccaaacaaggtgggtgagtactgggatcgcccacaagtgtataagccaggtgtgcctttggtggctttcaagttatcccaagaattccatgaaaaatacccggaagtcccacaggcaattctttcttctatgctaagaaccagaggatggatcataccgaattatccattaccgaaggctacagacggctccgataagaaagaagtgttgagagtggttttcaggaccgagatgaaactggatttggcacagttattgattgttgacattgaaaatgttttgacgaagttgattcagagttacgaaaaggtttgccaacacatagacgctgtcgctgaacaaacgccggagcgcaagagttcttttatttatgaaatgttgttggcgttggcgtctccgcaagaagacatttcaaatccagaagaatccgaaaaaaagaagaagctagaagaaagaacaacaagaaattacagaggaacctgctaa

SEQ ID NO: 2059 - DNA, 180 bp, Saccharomyces pastorianus
atgaagttatctcaagttgtcatttccgccgtcgccttcaccggtttagttagtgctgccaacagctccaactcctcaagctccaagaacgctgctcaaccaattgctggtttgaacaacggtaaggttgccggtgccgctggtgtcgcccttgctggtgctttggcctttttgatctaa

SEQ ID NO: 2060 - DNA, 435 bp, Saccharomyces pastorianus
atgtttggtaaagtgtttgtaagttacgtcaggacaagaatcgggtttaagccattaagcacgatatacgcgcccgcttcttcctcttcctcctcctcctcttcttcttcgtcgcacggcttcgacaaagaggcgtactttccgtataaaaaatggcaggagttggatatgcaccaaaagcaagaattcatccagcggttcgtcaagaactacagacaccaatacccaagctccaagaccaacgtatcgttgaagggactgatcatcggcatggatgagcacaacgattcgccgtccgtgttcggcattttttacaacgatatttggaaatcgttcaaaaacgagccagaaaaggccggtggtagtcttatccccatgaaatcgggtaatagattcagccatcctagcttcagacagttgttgatacaaaaatag

SEQ ID NO: 2061 - DNA, 1257 bp, Saccharomyces pastorianus
atgaacccgtcagaaccgaaagccatacacacagaaggaggtatgcatcccttagttgcaagagagatggacagtacagacttacagccaatacccggaacaaggtcgccttcaccaaaggaaacaagcaaccatgaagacgtggaaatcgaagactataccatcggcgaccaaacaacactacaaagaataagtaaagattatttgaaacctaatctcgggctcgttctcttgacagtatcatattttttcaactctgccatggtggtgtctaccaaagtcctagagaatgaccccgaagatattgccaatgacacacagatcaagccacttcaaatcttattagttagaatggtaataacgtatattggtacgttgatatacatgtatattaataaaagtaccatttcagatgtgccgttcggcaagcctgaagtacgtaaatggttgatacttagaggttgcactggatttttcggtgtgtttggaatgtattactcgttgatgtacttgaccataagcgatgcagtcttgataacgtttctatcgccatcgttgacaatatttttatcgtggcttatcctgagggagagatttaccagagtggaagcgctaggttcgctggtttcattaatgggcgtggtgttgatcgtgagaccatcgttcttatttggagtgcccgaaatgacagactcttcgtctcaaatagtggagtcttcagacccgagatcaagactcattgccactttggtcgggttgtggggtgtcttgggaatgagctgtgtctacatcattatccgttacatcggtaaaagagcccatgctataatgagcgtgagctacttttcattaatcacagcgttggtttcatttatcggtattaacacaattccttcaatgaagttccagatcccacattccaaaaagcaatggatattattcgctaatctaggtatttccggatttattttccagctcctgctgactctgggaattcaaagagaacgtgctgggagaggatcgcttatggcatacacccagctgatttatgccgtgttctgggatgtcgcattgtacaagcattggccaaatatgtggtcgtggtttggcatgataattatcatcaccgctacgttatgggtgataaggatccggtcagccaataacgaagctatcgctaaggatcttactccgatacttgaagacgaggaaaattccataccgttgacagatttcgatatgtcggactctaagtga

SEQ ID NO: 2062 - DNA, 573 bp, Saccharomyces pastorianus
  modified_base (92)..(112): a, c, g, t, unknown, or other
atgcctctagagtctatatgggccgatgtccttgacgaagaaccagtaaagaaacagaagccaattcacagacggaataacgataacaaaannnnnnnnnnnnnnnnnnnnnggaggaacagcgacaacaagccaaacaacaacaaaagagacactgaaaccaagacaaatcacaataaaagaaacaatgaaacgaagacaaagaacaaaatcaaagatacgcctgccagacagaagaatccgcctcgtaaccagggcaagacttccactacaaacgaaccattaacggtgaatcccttttcccaaaagacaaccgaggtgcctcccccacctgtttcgcctagcaagaataagcctgctaaaacgaagtccaaactggatgccgcttcaaagatgaaattactaaagaagaagatcgaagaacaaaggaaaatacttcaaaagactagtcatgaggagcaacaacaacagttgttgatggacttcttgaacgatgaggggaactcgaactgggtagatgacgaagaagaagaactgatccttcaacgtttgaatacctccctgaaaatatga

SEQ ID NO: 2063 - DNA, 183 bp, Saccharomyces pastorianus
atggccaacaaggttattcaactacagaaagtgttccaatcgtccggtaaacctctatggtggagacatccaagatccgcattatatctatatccattttatgccatttttgcagtcgctgttgtcacaccactattatacattccaaatgctattagaggtatcaaggccaagaaagcatag

SEQ ID NO: 2064 - DNA, 462 bp, Saccharomyces pastorianus
atgggtaagaagaacactaaaggtggtaaaaaaggtagaagaggtaagaacgactatgacggtccaaagcgtgagctttattacaaagaagaaggccaggaatatgctcaaataaccaagatgttgggtaatggtagagtcgaagccagttgttttgacggtaacaaaagaatggctcatattagaggtaagttaagaaagaaggtctggatgggacaaggtgatattattcttgtttctttgagagatttccaagacgaccaatgtgatgttgtccacaaatataatttagatgaagctagaacactgaagacccaaggtgaacttcctgagaacgctaagattaatgaaaccgataacttcggtttcgaatctgacgaagacgttaactttgaatttggtaatgctgatgaagatgatgatgaaggtgaagatgaagaacttgatattgatgacatttaa

SEQ ID NO: 2065 - DNA, 3156 bp, Saccharomyces pastorianus
atgactatcatcgtcgcttctttgttcttaccatacacgcctcagttcgaggccgatgtcacgaattcagacaccgccaagctggttgaatcaagcatgatcaaggtggactgcaacaatcaggaattggggaaacaagaaagaagcagctctgtgacttcggcgaactctcatcatatcggtttgccgcaagagcctcagatcaatggtgatcctttgtctaggatcacggcaaccacaccggccacggcggccaacttccacaatggcatggaaatgctatcctctgagcaatttttggaagaattgactgccaatgccacccatgcggccaattccggtaaccctcagtccaacccagtgagttctgcttctgctgccttacagccttcagtggaagagtttttctcagctcctagtgccagagtctgttctcccccacaagaagcgtctgcctcttcttccaacgctccatcatctcaccataacgacttgagctctagccttttgaaaaatgctaatttatcatttgacgcttgttctcctaggactagaagctcatccaagagtgccgtgattaccccggtttccaagagcgtcccaggcgtggaccctgccgttgtcgatgtggccaaagttagagaggagtttcaacagcaagcctccttgccctccatgaaaagagtttctggtggtactactggcgattcttctagcgctactgcgtgcacaggttccaatttaagatattgtgagcagttccacgataactttattgaagacactgatagtgaagacgatatcgattctgatttggagactgatgctaccaaagaatacaatgtccctaaattcggtggctattcaaataacgcgaaattaagagcatctctaatgaggaattcgtatgagctgtttaaacatttaccatggacaatagtcgatagcgacaaaggtaacggatccttgaaaaatgcagttaatattgcagtcgctgaaaagaccgtgaaagaacctgtttcttgggtaggtacgatgggtatccccaccgatgaacttcctcacgaagtgtgccagaagattacaaagaagttggaacacgacttcaattctcattcagtggtcactgatgatatcactttcaaaggggcttataaaaactatgccaagcaaatcttgtggcctactctacattaccaaattccggataatccaaattcgaaggctttcgaagaccattcctgggactactatcagaaagtcaaccagaagtttgctgataagattgttgctgtttacagaccaggtgacactatctggatccatgattaccatctgatgcttgttccgcaaatggtaagagagaaactacccaaggctaagattgggtttttcttacacgtttcgttcccaagtagtgaggtctttaggtgccttgctaacagagaaaaaatccttgaaggtatcattggtgcaaactttgttggattccaaactaaagaatataagagacattttctgcaaacttgtaataggttactggccgcagacgtctctaatgacgaggttaagtaccattgcaatattgtttccgtgatgtacgcgccaatcggtattgattatttccatttggcatcgcaattgagaaatgagtctgtgttggaatggcgtcaattgattaaagaaagatggcatgacaaaaaactgattgtttgtcgtgatcaatttgatagaatcagaggtctccaaaagaaaatgttagcttacgaaaggtttctgaaagaaaatcctgaatacatcgaaaaagttgttttgattcaaatctgtatcgggaagagctcagatcctgaatatgagcgtcaaatcatggttgtcgttgatagaatcaactctctgtcttctaatattagtatttctcaaccagtggtctttttacatcaagaattggattttgcccagtatttggcattgaattgtgaagctgacgctttcttagtgaacgccttaagagaaggtatgaatttgacatgtcacgaatttatcgttagttcatttgaaaagaacgcgcctttgcttttatctgaattcaccggtagttcttccgtcttaaaggaaggtgctatcttaatcaacccgtgggatataaatcttgtagcacagagtatcaaaagaagtttggaaatgtcccctgaagagaagagacgtagatggaagaagttatttaaaagtgtgattgaacatgattccgataattggatcactaaatgttgcgagtacgtgaataacgcttgggaatccaaccaagaaacatcaactgtttttaacttagctccagaaaaattctgttctgattacagagcttctaaaaagcacttgttcatcttcaaaatttcagagcccccaacatcaagaatattatctttattaagtgaattaagctctaacaacattgtttatgttttgagttcctttaccaagaatacatctgaaggtttatacaatggtgttctaaacatcggtttaatagctgaaaatggtgcctacgttagagttaatgggtcgtggtacaatattgtagaagagctcgactggatgcaagaagtagccaagatctttgacgaaaaagtagaaagattacctggctcctattacaagattgccgattctatgatcagattccatacagaaaatgcagaagatcaagaccgtgtcccaaccgtcatcggtgaagctatcacacacattaacactttattcgatgataaggatatccacgcttatgtgcataagaatattgtctttgttcaacaaacggggttagccttagccgctgctgaatttttgatgaaattctacaatagtggcgtcaataccaccgacaatagcagaatctctctatcaaggacaaattcttcaatgagtttcaggagcaacaaaaaacatttacaaaaccacgtggattttgtttgtatttctggttcaacatcacctatcattgagccattgttcaagttggtcaagcaagaagttgagaaaaacaacctaaaattcggctacaccatcctttatggtagctccagatctacatatgccaaagagcacattaacggtgtcaacgaacttttcacaattcttcacgatatgacagcagcttga

SEQ ID NO: 2066 - DNA, 933 bp, Saccharomyces pastorianus
atgagtttactgcgaatgaattctttcgtcggtaaaaatagatcattagaacggttaaaacaaacactaaacatactatccattcgtaaccagagacagttaagtaccactcaacaaggcagtaaatatactcttggattcaagaaatatctaaaacttcaaaatggggaggttggctcatttttccatgatgtacctttagatctaaatgaacatgaaaagactgtaaatatgatagtggaagtccctagatggactactggaaagtttgaaatatctaaagaactgaaattcaatcccattatacaagatacgaaaaacggtaagcttagattcgtaaacaacattttcccatatcatggctatatacataactatggtgccattccacaaacgtgggaagatccgacaatcgagcataagttgggaaacggcgacttggctttgagaggtgacaatgatcctcttgattgctgcgaaattggttcagacgttttggaaataggttccgtaagaagggttaaagtattaggatcactagctttgattgatgatggtgaattggattggaaaatcttagtaatcagtgtaaacgatcccttatatcctaaacttaataatctggagaatgttcaagagcattttcctgggattttggatgctaccagagagtggtttagaaaatacaaagttccaatggggaaaccattgaataaatttgccttccgtgaacaatatatggactccgacaacgccatcaaaactataaaggaatgtaataactcgtggcgtaaactcatatcaggatcactacaggccaagtacgacaacctgccaaatatagaaagggccggtaaaggtattacgctcaaagatagtagtaagcctccttctgaaataccacctgaggtacagaaatggtactatgtttag

SEQ ID NO: 2067 - DNA, 1335 bp, Saccharomyces pastorianus
atggaagatgcgcatgataccacatcacggtcaaaacgtcccctggatgtagacccctcagtagcggcaatatcatcttcaaagaaagcgaatgaaactttaacaaggaatagagaattaacgactgtgctagttgaaaacttaccaaagagttataaccaaaacaaagtctataaatattttaaagactgcggcccaattttacacgtcgatatagcagattcgctcgagaagagctttcgttttgcacgtattgaatttaccaaatatgatggggccctcgcagcactgaccaagacatataaacttgtaggccagaatgaaatcacagtgtctcatttggtagactgcacattatggatgaccaatttccctccaaactacacacagcgagaaattaggggcctatttaaaaatcttaacgttgtcatcctaagtatacgacttcctagtttacgtttcaatacaaacagaaggttcgcttatattgatgttacttctaaagaagatgcaaatacttgtgtagaaaagttgaatgacgttgaaatacaagggtatatgttggtcactaagatctctaaccccctcgaaaggtccaaacggactgattccgctacattagagggacgggaaattatcatacgaaatgtgaatgcagaattgctcgatgaaaataccttgaaggagttgtttgatcaatttggtcacatagaaaaaattaatattcctgcaggacagaaagagcatagcttcaataattgctgcgcatttataacttttgaaaagaaatgttatgctgaaaaggctcttcaaatgaataaaactatgctgcacgacagggagatttctgtcggcttggcggataagaaaccatttttggaaagaaaggaagtcaaaagacttctcactttacgtaatagtaaagaattagaatcattgacgtgtttgtttccagtttccgataaggtttcatcgagccaaatcgaagagtttcttcaagaagaaatacacgtcaataaaaatcaaattgaaaaagtacatctcgtcagtgactttaatggcgccattattatatttagagatgagaaactggcagcaaagatgcccatgatacttaacaattctcaattccagggaagaatggtacgatcaggcactatcaatgacatgaaaaagtatcacaacaatcggaacaataataccgtaaaggatgcgaaacctagtcgcataaacacgatgccgagaagaccaactcatcaaataaaggataaatcagcagataaacaagagcaaatgtctaatgacgattttcgtaagatgtttctgggaaaatag

SEQ ID NO: 2068 - DNA, 684 bp, Saccharomyces pastorianus
atgcccgctactgctataaccttagaggactatcagaaaactttcctagaacttggactggaatgccaagccttgagatttgggtcattcaaactaaattcaggtaggcaatcgccatatttttttaatctaggtctgtttaactctggtaagctgctagcaaatttggctactgcatatgcaattgctatcattcaatcggaattaaaattcgatgttatcttcggtccagcttataaaggtattccactggctgctattgtgtgtgtcaaactcgcagaaattgggggcactaaattccaaaatgttcaatatgctttcaacaggcaagaggttaaagatcgtggcgaaggtggcataatcgtgggagcatgtcttgaagacaagagggttttaattatcgatgatgtcatgaccgcgggaacggcaatcaatgaagcatttgacatcattagtatggctcagggtagggttgttggttgtatcattgccctagatagacaagaaatagtccatgagtctaatccagaaagattaagtgctactcaatctgtatcaaagaggttcaacgttcctgtattaagtatcgtttcactggctcacgtggtgcagtttatggggagcaaactatctccggagcaaaaatcggcgattgaagaataccgtaaagcttacggtgtttga

SEQ ID NO: 2069 - DNA, 1155 bp, Saccharomyces pastorianus
atgtcgagcaatacttccaagacactggagctgttttctaagaagacggtagaagaacacaacactgccaaggattgctgggttacttatcagaacagaaagatttatgacgtgaccaggtttttgggcgagcaccccggtggtgaggagttcatcttggactacgctggtaaggacatcacggagataatgaaagacagcgatgtacatgaacacagcgaatccgcgtacgaaatcctggaggacgagtatttgattggttatttggccactgacgaagaggctgcgaggttgcttaccaacaagaaccataaggtcgaagtacagctatctgccgacgggacggagttcgactctactacttttgtcaaggatttgcccgctgaggagaagctaagtattgccaccgactacgggagtgactacaagaaacacaagtttctggatttgaaacggcctttgttgatgcagatcatacgtagcgacttcacgaaagatttctacgtcgaccaaattcacagaccaaggcattacggtaatggatctgctccattgttcggtaatttcttggaaccattaaccaagactgcttggtgggtcgtccccgtcgcgtgggtgcccgtggtggtgtaccatatgagtgttgctttgaagaacatgaactcgctatttgcttgcttcctgttctgcgtcggtgtgtttgtttggactttgatcgagtacggtctgcatcgtttcttgtttcattttgatgattggctgcccgaaagtaacatcgccttcgccactcattttctactacacggttgccaccattacttacccatggacgggtaccgtttggtgatgcctcccactttatttgtcattctgtgtgctccattctacaaggtagttttcgctttattgccactgtactgggcttatgctggattcgccggtggtcttttcggttatgtttgttacgacgaatgtcattactttattcaccattccaaattgccttcctttatgcgtaagttgaagaagtatcacttggaacatcactacaagaactatcagttgggctttggtgtcacctcttggttctgggacgatgtatttggtacctacttgggtcctgatgctcccttgtcaaagatgaagtacgaatga

SEQ ID NO: 2070 - DNA, 948 bp, Saccharomyces pastorianus
atgctgccagtaccaacgtttttggtacttctgtatatttctatatcatatgtcctaccattatacgcaacttcgcaaccggaaggatccaaacgagataatcctcgaaccataaaatctcgcatgcaaaagctgacaattctgctacttttcaatttactttttgtaccatttttgcaatctcaattatcgagtaccacatcacctataagtttcaaagacgcgttttttgatttgggtattatccctggttattacagggcaataccaaaccattggcagttcggtcagtttgtaaaagattgggccaaatgcgttatattgatggtcactttatattgtggtcccgtgctggattttgtactatatcatttattaaccccaaaaagttctatactagaggatttttaccatgaatttctaaatatttggagtttcagaaattttatatttgcgccaataactgaagaaatattttatacctcaatgctcttaacaacttatttgaacctaataccacattcacagctaagccatcaacaattatactggcagccatcactgttttttggactcgcacacgcacatcatgcctacgagcaatttcaggaaggttccatgacaactctatctattttactgaccacatgcttccaaatcctgtacacaacactctttggtggactgaccaagtttgtatttgtgagaacgggcggaaacctgtggtgctgtattgccctacataccctatgcaatctcatgggattcccgggcccatcgagactaaatttacattttacagtaatagacaagaaaacagggttcacttccaagctggtctcaatctggaacaaatgctacttcggtctgttgcttattggactcatatccttgaaggatagcttgcaaactatggtagggacccctggttatagaatagcactctag

SEQ ID NO: 2071 - DNA, 1104 bp, Saccharomyces pastorianus
atgtcgttgaatgtacatgtaaagtctggacaagacaagtgggaagtgagcgtggcgcccgagagcacggtgttgcagttcaaggaggcaataagcgaggcgaacgggatcccggtggcaaatcagagactgatctactccgggaaaattttgaaggacgaccagaccgtcgagtcgtaccatattcaggacggacatagcgtccacctggttaagtcgcagcccaggccacaggctggcgctgcaacgggtacaggtgcaggtgcagacgcaggtgcaagcgcaaacgcaagtgtaagtgctactccgaatatgtcatcgggacagagtgcaggtttcaatccattggccgacttgaccagtgcgaggtacgctggctacttgaacatgccctctgctgacatgtttggcccggacggcggtgcgttgaacaacgactccaacaatcaggacgagctcttgaggatgatggacaatccgatcttccagtcgcagatgaatgaaatgctgagcaacccgcagatgctggacttcatgattcagtccaatccgcaattgcaggccatgggcccacaggctagacagatgctgcagagccctatgttcaggcagatgctcaccaacccagacatgatcagacagagcatgcagtttgccagaatgatggaccctaacgctggcactggctccgccggcggcgcagcctctgcgttccctgcccccggtggggacgctccagaggaggccgccgacacgaacgctgctccatcgtctaacgcaggggccaacgccgcagcaaacccatttgcgtccctgctcaaccctgcattgaatcctttcgccaacgcaggcaactctgcggcggccacagggatgcccgccttcgaccctgcgttactagcgtccatgttccaaccacagcaagccgctgcacaagcgccccagccagaggatacaagaccaccagaggagcgctacgagcaccaattgagacaattgaatgacatgggcttcttcgacttcgatagaaacgtcgcggccctcagaagaagcggcggttccgtccaaggtgctctcgactccctactgaacggcgacgtctaa

SEQ ID NO: 2072 - DNA, 1869 bp, Saccharomyces pastorianus
atgtctctgcaatttccagataacatcccgtctgacctgaaaggtcccatatccttatggttcaatcaagaccgtaacccagaaactatagaagaagtcactgcactttgcaaaaaatccgactgggatgaattacataagagattcgacactagaattcaatttggtactgctggtttgagatcagaaatgcaagccgggtttagtagaatgaacaccttagtgattatacaagctacccagggactggccacctatataaaacaacagttcccagacaatttagtagtggtagtgggacacgatcatagatttcattctaaagagtttgctagagccacagcaactgcatttcttctgaaaggattcaaagtacactacttaaaccctgaccacgaatttgttcacacacccttagttccctttgcagtagataagttgaaggcctctgtcggtgtaatgataacagcgagccataatccaaagatggataatggatacaaagtatactattcaaatgggtgtcaaattattccgccacatgatcatgccatttctgattccattgacatgaatttagagccatgggccgatgtctggaatttttctgaagttttggacaagggcctcaaacaggggaaattgatgtattctagagaagaaatgttgaagttatatttaaaagaagtatctaaaaccttagtggagaccaacccactaaagtttgaaataaaggctaaaccatggtttgtgtacactccaatgcatggtgttggctttgacattttcaataccatcgtgaaaaagacaatgtcactagtggaaggtaaagattacctatgtgttcctgagcaacaaaacccagatccttctttcccgactgttgggtttcctaatcctgaagaaaaaggtgccttggatatcggtatgcggttagcagaagaacatgacattaatttactagttgccaacgatcctgatgctgatagattttctattgccgtcaaagacacacagtcaaatagatggcggcaactaacaggtaatgaaattggtttcttatttgcattttttgaatttcaaagatataagaacatggatgaagaatttcaacaaagccatccattagctatgttaagttcaacagtgtcttcacaaatgatcaaaagaatggcagaagtggaaggcttcctttacgaagatacactaactggattcaagtggatcggaaaccgtgcaatcactttggaaaaggaagggtattatgttccgtttggtttcgaagaagcgataggttacatgtttccagcaatggagcatgataaagatggtattagcgctgctgttgttcttttacaagcttattgtaaatggaaaatcgattctaatctagaccctatagatatcttggaaaatggatttaaaaagtatggcgtatttaaagagtacaatggctattatactgttccaagcccacttgttacaaatgaaatatttgaatacattagaaacgtctataccccaaaagacgtatcatatcctccatttatcggtgaagaaatcgaagtagtttactatcgagatttaactactggatatcaatctgatactcccgaccataaacctgttctgccagtggatccaacatctcaaatgataacattatctggaaagccaagtgacggaaatgctaatgagtacattcgtctcactcttcgtgggtcagggacggaaccaaagcttaaagtctacatcgaagcctgtgcgaataacgaaaagagggcttcttacttggcgaaattaacatgggatgtattgaaacgtgagtggtttagaccggaaataatgaatataaccactaatttttga

SEQ ID NO: 2073 - DNA, 1746 bp, Saccharomyces pastorianus
atgtggatgaataaactggctaaatatccatctcctagtattttgggcctatatacgagaaggttttgtaatgaatcatttcggtcgctacaggagtttgacatactgccgaacactatgagaggcaatccagtccattcccgaagagcatgtgtaaccactcgagtactcatgtgtgatataacagttcgaaagttctgcacgacccatagatcaaattcaattgatcagccaaccaatggaaatattaagagagctcatgataaattcaagatcaaggaaatacccatagacatgttcacgttaagacgcattgttgattcgagtagtatgagcgaaccggatttttcgaaaagcatgacctatttatttgtaaaggctgtaaactcggaagcgagggaaactttatcgttagaagatctgtccttccttttaaacaatctatattcacaacggtttggaatcaagaaaatctgtaaagacattaatgttaagtattcggaattctggtttaaactcttttccctttacgcagaaaaagtggatgtcaagagagaccaaatcaatttacgaaatacagcattagattcatgcgaaattttcgatatgaacctcctaattaaaaacttcatagaacttggtcaactgggaaaagctcaaaaagttttaagctttattctcgatagaaactccgatatattgctctccccgaataatgcagatatcggtacaataatccattttcttcaattacgttgcggtgcattggcagcctattggaagattccagataatagcgagcaagaatattcacgaaagacggttcggctaggtgccgaaaatacgtcaattcgcatctcctctagctacaaggccatggaccatcagaccttattgaagattgctgatgtcgtattacaaaaagaaaggttactggattctgaggatttagtatccgttttaattcagtcatttggacacttggggcaaactcaaattttggagagatgtattgaacacatatggcaaatatcattgcaagagtttcccagccgtgcaacgatcaagcctaaggcacgaggatgttatccaagttcgaagatcctcgtttcaattttggtatctttccacttgaatgacaacgatcttcatagaggcttgagtattctagattctttcataaaatattatcctgaagtgaaattggatgagttgttttggaggagattgtttcagttgagtcattttgcatggaagccagcacacgacaaaagagccacatctattgttagatgctggcacttgatgaagcattggcatgaatccaaagggttgagcccttctgttgattatgagacactgaggcaattgtatgacctggcgaaaaaaacaggcaattattcgcttgctattgatgttttacaaaacttcaaattaggaattacgaaaacgagggctatgaagtccgaaaaaatcaatggtattgttaccaagtaccagaaatatattataaaacagcttgtaaatagaggtaaaccctcagcagcgagagaattcatcaacgatttcagtttcgatagaagagcagtcaaagaattgaatattttctgtacgaatcgtatactgttaaggagtaagaaattgaaaaataagaccgagaacagaaaagaaaggaacggatcgggacaaggaaactttgatgatgatgatgatgatgatggtatggttataggtagtttgtggtaa

SEQ ID NO: 2074 - DNA, 1806 bp, Saccharomyces pastorianus
atgcaatcaccaagtcacgcctttagtagcatcggaaattttaacgacacaacggacgatgctagttacagaaaattcgacatccacgaaggcatcctattttgcattgaactgtcggaatcaatgttcaaagagtcaccggagctaaactataaatcgttactattggaaattctagagtcattaaatgaactgatgtcacaattggtcattacaagacccgggacgtctataggatgctatttttattactgtagtagagatgacgctaaagaaggtatctatgaactgtttccactaagggatattaatgctaagttcatgaagatattaaatggccttttagaggacctgtcatcggggcgattaaccctatttgaatactttaactttcaactttcgaagaagcaaatgcaaatgccgctaggtaaattatttacttttatgctggacacctttttgcagagtattcccggacaaaagcaactgagtagcaagaagatatttctattcactgacaacgacaaaccgcaagaatcacaagatgctgacgaacgagcaagattaagaaggcttacaattgatttattcgacaatatggtaaattttgtaacattttttattggttatggggacaattcatttgacaacgagttttattcggatattttacagctaggtgcacataaaaataagggcatggacttagattctgaatttgatgggccaaacacaaagccattagacgccaaatatatcaaatccaaaattttgaggaaaaaggaagtgaaaagaatagcgtttcaatgtcctttgatttttgatgaggacgcattcattattggagttaagggttataccatgcatagtcatgagaaagctggagttaggtacaaacttgtatacgagcacgaggacatcagacaagaagcgtattcaaaaagaaagtttttaaatcctatgacgggtgcagatgttactggcaacactgtcaaagtttatccttacggcgatctggatataaaattatcagaaaaacaaaaccaggtcattatggaagcttacacacaaaaagatgcgtttttgaggattatcgggttccgctcgccagacaggtcgatacattattttaataatatagagaaaagtacatttatcgtacccgatgaggcaaaatacgaagggtccataaggacgttgacttctttattcaagactttaaggaaaaaggataaaattgccttactatggggaaaactcaaatccaattcacatccttcactgtttgtactatccccctcgagtgttgaggaatataatgaaggattttatctctatagaattccatttttagatgagatcagaaaattcccgagtttgctatcctatgattctggtgaaaagcataaactggattatgacaacatgaagaggataacccaaagtataatgggatactttaacctcagagatggatataacccatctgacttcaaaaacccatcattgcaaagacatttcaaagttttacatgattatttgttacaaattgagatcaatactgaggaaaacgagacatctgaagccaaaataaatagagtaatacacgaagatgattccttgcggaaattataccatataagaaataagatactggaatcggaaaaatctgaagacccggccattcaaaggctaaacaaatatgttaaagtttggaacacatcctacagcaagttcaacgatgatgacgtttctgttaaagatgaaaagaaactatttgacaaaaagcctaaattcaacatatga

SEQ ID NO: 2075 - DNA, 1518 bp, Saccharomyces pastorianus
atggttaccccttccaagaagcgttctagagattccgaatctccagaagaacctgtagtagatgagattgaaagcataaagaaaaatgaagccacaagtgaagcagaccagacaacttatgtggaaactttcgcagaactgaatctatccgagccaactttgaaagccattgaaaaaatggggttcaccactatgacctctgttcaatccagaaccatcccacctcttttggctggtagagatgttcttggggctgctaagacaggttccggtaagacactggcctttcttattcccgcaattgaactattacattctttgaagttcaaaccaagaaacggtaccggtattattgtcattacccctacaagagagttggctttgcaaattttcggtgtggcaagagagttgatggaattccattctcaaacgttcggtattgtcatcggtggtgctaatagaagacaggaagccgaaaaattgatgaagggtgttaacatgttgattgctacacctggcagactgttggatcatttacaaaatacaaagggtttcgtgtttaagaatttgaaagctttgattatcgatgaagctgacagaatcctagaaatcgggttcgaagatgaaatgagacagatcattaagatcctaccaaacgaagacagacaatctatgctattctctgccacacaaacaaccaaagtggaggatttggctagaatctccttgagaccaggccctcttttcatcaacgttgttcctgaaacagacaactccaccgcagatggattggaacaaggctacgtagtgtgtgacagtgacaatagatttttgctattattctcctttttgaaacgaaaccaaaaaaagaaaattattgttttcttatcatcgtgtaactctgtgaagtactacgctgaattattaaactatatcgatttgcctgttcttgaactacatggtaagcaaaagcaacagaagagaacaaacacattcttcgaattctgtaatgcagaaagaggtatcttaatctgtacagatgttgcagccagaggtctagatatccctgctgtggattggatcgtccaatttgatcctcctgatgatccaagagattatattcatagagtaggaagaaccgcaagaggcaccaagggtaagggcaaatctttaatgttcttgactcctaatgagttagggttcttgagatatctaaaggcttccaaggtcccattgaatgagtacgaattccccacaaataaaattgccaacgttcaatcgcaattagaaaaattaattgaatccaattattatctacatcaaacagctaaagatggttatagatcgtatttacaagcatacgcttcacattctctgaaaactgtttatcaaatcgataagttggatttggctaaagtagcaaagtcgtatggtttcccagttcctccaaaagttaacattactattggtgccagtggaaaaactccaacgaccaaaagacgtaaggctcacaagtaa

SEQ ID NO: 2076 - DNA, 594 bp, Saccharomyces pastorianus
atgatgcatttcaggaaaaaatcaagtgtcagtaacacgagtgaccacgaaggagggaaccatcccacggaggccaaaatctctgatgacgacaaggcaagattaaagatgcgtaccgcttccgtagctgatcctatcttggatgctgtgcaggaagctcagccttttgaacaagccgctgataccttccacgataacatgaacagacaatcttacttctccaacgaagaaggtcacgttctgtgcgacgtcttcggtcaaacaatcacacaggctgatatatcgaacccaactagagcaagagacgagagacctctggacactataagaagtttcgagtatgctgtctctggagacccaatctgggcccaacagttggagactcccacctatgggttccgtgtaagacctgactttcccatgttcggatctgctgtggcctatgacgcgaacggtatgcctcaacagatgggtgcttcttccaaccaaatgtacggtgaacaagcagtttatcaaccacaacagcacgttgaaactggggagaaagaaaagaagaagaagagaggtttattcggtagaatgaagaagaaataa

SEQ ID NO: 2077 - DNA, 450 bp, Saccharomyces pastorianus
atgtctgaatctgctcccattataaccaaactaattcccaagccaaagccaaaagttttaaatttgtttcgtgtttgttttatttcattgctcttaatcgctgctgtggaatacttcaaatacggtacaagaatcaattatgaatggttccactgtactccaatcaaggaacctcaatctggctccgtgatcaaactttgggctcgtggtgggccaagctgtgacaaaagaggtgaatataaaaccatcgtaaagagaatcacaagagattacgaacccaacgatgagcatctatccttctgtatcatcgaaaacggcaacgtcccttctgttcactacccaatccatgaagataaaggtgaacctggctacgtagcttatgttggctacgatacggactctgaattagttcaaacactgtgtgctgattccaccatttatcatatgtaa

SEQ ID NO: 2078 - DNA, 1533 bp, Saccharomyces pastorianus
atgtgtggtattttaggtatcgtgttagcaaaccagtctactccagtagctccagagttgtgtgatggatgcatatttttacaacatcgtggtcaagatgcagccggtatagccacctgtggttctggtggtagaatctaccaatgtaaaggtaacggtatggcccgtgacgttttcactcaacaacgtgtgtctggtcttgccggttccatgggtattgcccacttgaggtatcctacagctggttcctccgccaactcagaagcacaaccattctacgttaatagtccttatggtatcaacatggcacataacggtaatctagtgaacaccgcctcattaaagagatacatggatgaggatgttcacagacacatcaacactgacagtgattccgaattattattgaatatttttgctgctgagttagagaagcataacaagtacagagtcaacaacgaagatgtctttcatgctttagaaggcgtttatcgtctgtgtcgtggtggttatgcttgtgtcggtttactagctggttttgcattatttgggtttagagatccaaacggtatcaggccgttgttgtttggtgaaagagagaactcagacgggaccaaggattacatgttggcttcagaaagtgtcgttttcaaggcccacaacttcactaaataccgtgatttgaagcctggtgaagcagtcattatcccaaaaaactgtagtaaaggtgaacctgagttcaaacaggtcgtcccaataaactcttatagaccagatttgttcgaatatgtttattttgccagaccagatagtgtcttggacggtatatcagtttatcacacaagattggccatgggttccaagttagccgaaaatattttgaagcatttgaagtctgaagacattgatgttgttattcctgttccagatactgcaagaacgtgtgcattggaatgtgctaatgtattagggaaaccgtacagagaaggcttcgttaagaataggtatgttggcagaacatttatcatgcctaaccaaagggaaagagtttcctcagtaaggaggaagctcaaccctatggaatctgaattcaagggtaagaacgttctgatagtagatgattccatcgttagaggtactacttccagggaaattgttagtatggctaaggaatctggtgcagcaaaggtcttctttgcatcagctgcgccagctattcgttataatcatatttacggtatcgatttgacagataccaagaacttaattgcctataacagaaccaacgatgaagtagcggaagtgattggttgtgacaaagttatctatcaatcattggaagatttgatcgattgttgtaaaaccagtgaaatatcgaagtttgaagatggtgtttttaccggaagttacgttacaggtgttgaagacggttatatacaagaactggaagaaaaacgtgaatcgatcgcaaacaactcttcagatataaaagctgaagttgacatcggattatataactgtgcggattattga

SEQ ID NO: 2079 - DNA, 2082 bp, Saccharomyces pastorianus
atgctgctttttccaaggtccccagtagtgggacgaatattaaagtcaggtcttagatctagatctagtctgatacggaaccgctcgccaatcataatatcggtatataagttatcaactcagcggcctctattgttcagttcagttggctccaacttatggaatgacactcgaaaggatcctgttcacaagaaattgattgaacctacttcgcctgtctcaaaaccgaaaactcaagcgaagaaggcaagcaaggcaccaacaatgtcagaattgaaaatcttgaaagacctgtttcgttatatttggcctcaaggcaataataaagtgagaataagagtgttaattgcacttggactattgatatcagcgaaaatcttaaatgtccaagtacccttttttttcaagcaaactattgattcaatgaatataacgtgggatgaccccactattgcccttccagcagccattggactgaccattctttgttatggtactgcaaggtttgggtccgttttgtttggtgaattaaggaatgccgtgtttgccagggtggcacaaaatgccatcagaactgtatcgttacaaaccttccggcacctcatgaaattggatttgggctggcacttaagtaggcaaacgggtggtttaacgagggctatggatagaggtacgaagggtatttcttatgtcctaaccgcgatggtatttcacattatcccaataagttttgaaatatccgtcgtttgcgggattttgacataccaatttggtgcgtcatttgcagctatcacgtttagcacaatgctactatattccatgttcaccataaaaacaacagcttggaggaccaatttcaggagagatgccaacagggcagacaataaagctgctagtgtggcattagattctttgataaactttgaagcagtaaaatattttaataatgagaaataccttgcagataaatacaacggctcattaataaactacagggactctcaaattaaagtatctcaatctttagcatttctgaactctggccaaaacttgattttcacctctgcgttaacggcaatgatgtatatgggttgcaccggtgtgattggcggagacttaacagtaggtgacttggtcctgatcaatcaattggttttccaactctcggtgccattgaatttcttgggtagtgtttacagagaactcaagcaatctctgatcgatatggaggccttattcaaattaaggaagaatgaaatcaaaatcaagaatgcagaacggccattaatgctaccagagcacgtcccctatgacattactttccagaacgttacatttgggtaccatcctgacaggaagattttaaagaatgctagcttcactatcccagcaggctcgaaaactgcaatagttggatcttcaggtagtggtaaatccaccattctaaagctagtatttagattctatgatcctgaaagcggtaggatcctcataaatgggcgtgatatcaaagaatacgatattgatgcgttaaggaaagtgattggcgtagtgccacaagatacaccactttttaacgacaccatttgggaaaacgtgaaatttggtcgcattgatgcgacagacgatgaagtgaatacagttgtagaaaaggctcaattagcaccactgatcaagaaactacctcaaggctttgataccattgtcggagaaagagggttgatgattagtggtggtgaaaagcaaaggttggcaattgcaagagttctactaaagaatgcaaggatcatgtttttcgatgaggccacaagtgctttagacacacacacagaacaggcccttttacggactattagaagcaactttccctctggctcgagaacaagcgtgtacattgcacatagactgagaactattgcagatgccgacaagatcatagtctttgacaacgggaaggtacgagaagaaggtaagcatcttgaactattggctacacccggttcgctgtaccgggagttgtggaccattcaggaggatctgcaccatttggaaaatgaactaaaagacgatcaaccactataa

SEQ ID NO: 2080 - DNA, 1302 bp, Saccharomyces pastorianus
atggtatttgaagcgaagccttttgatccgattacggtcaaaccaaatgataaaagacgcgttgcttatttttacgatgcagatgttgggaattatgcatatggagcaggccacccaatgaaaccacataggataagaatggcacactcccttatcatgaactatggcctatacaagaaaatggagatctacagagctaagccagcgacgaaacaagaaatgtgtcagtttcataccgacgagtatattgactttttgtcgagggtcacaccggataatttagaaatgttcaaaagagaaagtgtcaagttcaatgttggtgatgattgtccagtgtttgatggtctttacgagtactgtagtatctctggtgggggttccatggaaggtgctgctcgtctaaacaggggcaagtgcgatgttgccgtcaattatgctggtggtttacatcatgcaaagaaatcagaagcctccgggttttgttatttgaacgatatagtattgggtatcattgagctactacggtaccatcccagggtattgtatatcgatattgatgtgcaccacggtgatggtgtggaagaagcattttatactactgaccgtgtcatgacatgttctttccataaatacggtgagtttttccctggtacaggtgaattgagagatgtcggggtaggtaaagggaagaattactcagtcaatgttcctttacgagacggtattgatgatgctacctatagagccgtgttcgaacctgtggtaaagaaaattatggattggtatcaaccctcagctgtggtattacagactggtggtgattccttgtctggtgatcgtcttggttgcttcaacctttccatggaaggtcatgctaactgtgtcaactacgtgaaatcctttgggattccaatgatggtggttggtggtggtggctatactatgagaaatgtcgcaagaacatggtgctttgaaactggcctactgaataacgttgttttagataaagacttaccatacaatgaatactacgaatattacggtccagattataagctaagcgtcagaccttcgaatatgttcaatgtaaatactccagagtatcttgataagataatgaccaatatatttacaaatctagagaacaccaaatatgcgccgagtgttcaattgaatcacacacccagggatgcagaagatctaggtgacgtcgaagaggattctgctgaggccaaagacacaaaaggtggttcgcagtatgcgagggacttacatgttgagcatgacaatgaattctattga

SEQ ID NO: 2081 - DNA, 2619 bp, Saccharomyces pastorianus
atgaataatgacgcaatggaccattcccttggtgggggcgtgattgctacttctgggtccaagcagagaaagacctccaaatttgtgatgggtaaatatacgctatatgaaacaaaggatcgcatgtatattgttgggagcaataaaagagaaaccatgttccgcatcttggaaattgaccttacagtacctcgtggagaactcagtgtgctggaagataacgtcttcttcaccagaaatgaaattatgaatgtgttggcaagtttggaggaagccactgagaatggtttacataagaaaattacaggctatggtcttctgggatttattaaatttacctgttggtactacttgataatggttaccaagtacagccaagttgcagtaatcggtggtcatggtatttatcatattgatggtattgacattattcccataacaaacaactataagaaacctgaaaaaaattcagatgaagcaagactattgaatatattcagggatttggacttgacaaaaaccttctatctcagttacacttacgatataacaaatacgttacaaactaacatcttgcgtgagaaattgaaagctgtcgataggtccgatattacaatcccttctaggataactgactataacgagatgtttgtttggaacagcaatttgttgtccccgatttttgcctgtattgacaccgtattcgactggtttcaatgcattatacacggattcattgatcaagttaacgtgtcagttttggggaaatctatatatatcaccttgatcgccagaagatcgcaccatttcgcaggcgcacgtttcttaaaacgtggtgttaacaaccaaggacatgtggctaacgaagtggaaactgaacagattgtgacagatatgattttaactccctttcatcaaccgggaaatggatttttcgacagcgatcgttatacctcctttgtacagcaccggggctcaatccctctatactggactcaggatgcttccaatttaaccacaaagcctcccattaggattaatgtagtggatccattttttacatctgctgcattgcatttcgataatctgtttcagagatatggcggtggaactatccaaatattgaacttaatcaagaccaaagaaaagacaccaagagaaactaagctactttgggaattcgagcagtgcataaattatctgaatgagtttttaccagcagcaaaaaaattggattacacttcttgggatatgagtagggcctctaaacaagatggtcaaggagttattgagtttttagagaattatgctgtgaacaccgtcacaagaacaggaatatttcataatggtccagattttgcatctacaaagattcaggaaggtatatgtcgtagcaattgtatcgactgccttgatagaaccaatgctgcacaatttgtcattggtaaaagagcccttggttgccagttgaaatcattgggaatacttgataatagttacttagaatacgattctgatattgtgaacatattgacagagttatttcatgatttaggtgacacgattgcgttacaatatgggggttcgcatttggttaacacaatggagacttatagaaagataaatcaatggagctctcattctagagacatgattgagagtataaaaagattttatagtaattcatttgtcgatgcccaaagacaggatgcgattaatttatttttgggtcattacgcttggagagagggatttccctctctatgggaaatgaacactgacttttatttacataacggttatacttccaacatgccaaagagaagctatactcattggtggaatgactaccatatcaaaagtataaaggaattgattactgaggagctcattgaaacaggtaatgatatcactagggaaaaaattataaaaaatgttagaggttatcctggtgccttcgataactactggaatgagtactatctgccaagatcggtgacttggattcgtgatctttttgcatacaacatgaattcaacaagaagatatcataatgctctaaccaaacaggacaaagccatgtctccatttacttccaggaaacagagttggctgaataacaaattaaagatgattacatccaacaaaacatcggaaaagatcactaccggggcagttgaagctactgatttaaacaaaggcacttctgccaaacaagaattagagttgtacgagcattatctgcatatggtatcagaaaatggccaaaagcttgaagacaaaatgaatttattttcttactctaaataccctatatttattgattatgaaaagagcgagattccaccaatgaaagacgtggtgaaggaagcgccagctgatattacggatgatttcaccgaagcgtacaatgataacgatgatgaaacaatagtagaagcattgcttatagctcctgatgatgttctagtcgatgaaaaattctacgaaaaggtcctggatgtcgataattatacacccgttgatgattatgcaaccgttatacaaataaatcccgacaatttacaactttataaggatttgtgcatttctgcagatatacaacttgaatttcagtga

SEQ ID NO: 2082 - DNA, 2736 bp, Saccharomyces pastorianus
atggtcaagaacaaccacacgcccgctggcggcaacaacacctccggggacggccgtcttaaagaggagggcctgaccccgacgacgtccacgtcaacgcctcaccggatattcagtgtggacgacgatccaaaggagatccagagtgacattcggtacctggagggcctgcacgagggcctgaagtttgccctacacgccaacaagtccaagcggtctgtgagttcgcagtcgcctatggtgcatagcagcaacaacacgctgcatcaccacgagcaccaacaacacttgccgcccacgctggagttgctgtcgtccaaggcgcactccgtaccagacttgaacacggtcacttcagcgtctccaaggcggctgcactcgcccatccgggagctgtcccacgacggcatcgatggcatagacgataacgacgacagccggttcatcattcatgattcgcacggccatgacttgctgatcgatgaaatcaactgccaatcgccctcacacctggaaagcaacgaccaggcgtcgagcacttcgtctctggagtcgttcacgctgcgagagaggcaggacgccattaacgagacccatccgttcggtattaggatctggaagcctgctctgtacaagaagcaccggtccgtgcaaagaactgctgcccaggacatccacgagacacagttgaagaccatcacctggcaggtgaactgttccaatgcactgtggtcgatcttgtttggcttgcccatcgcgatacttttctactcggcggctattttggtgttcttattgggcggtggaggactggtgacgagctccgccaaggactactcgaagtgtttctacaagcttgccaactactttctgtggccgtttggcaagatggtttacctgttgcaggacgagcagtatttgcaagaggacaaagacgaaggaatcagtatgcagcaattttacgattgggtgacgtcgtactccaacagactcgtgttccatcaatctcaggccaaactgcagcagagagaggaacaacccgtcacggagtcctcctcgttgatgccgcccaacacaaccacaacgccaatgaattccaaccacccttcttataattccataagacaccaaattccacaaccggctgcccaaagaaggtactttggtagaggggaatggaactggggccgtgtccttttctacaccatctttcatctcgccatggagcccattcttgccctcttatctctttgtctatggcttgctgtgtttaccatccccatgagtaacgtgctgtggcaaatcatgtaccattgtagaagacacccactggcactaggcttcaagaatatcgagaattcctcgcaatcgcacgaaaacacaatcatccagcaccaattgaacaaaaatatcctcttgtgtacgttccgtgccgctggttggcattattataaatacacagtggatggtacaaacgttatcgttgttaacttgatctctattgtgtttttcaccatttttgatttttatgtttcgaagaattttctccattggaaaacatggatcactaacgagtcttctattttcattctttgtctgacttccacaattccattagcattctacattggccaagcagtcgcatcgatatccgcgcagacatccatgggtgtcggagctgttattaatgcgtttttctccaccattgtggaaattttcctgtattgcgtagctttgcaacaaaaaaagggtctcctcgtagaaggatctatgattggttccatcctgggtgccgtgctgttattgccaggtctgtccatgtgtggtggtgctctgaataggaaaacccaaagatacaacccggcaagtgctggtgtctcctccgcactactgatcttttcaatgattgtaatgtttgtccccaccgttttgtacgaaatttatgggggttactcagtaaagtgtgcagatcctgctaacgatcggggctgtaccttttcgcatcctcccttaaagtttaaccatctgttcactcgcatcatccagccaatgtccatttcttgtgccatagttcttttttgcgcctatatcattgggttatggtttactctaagaacgcacgcgaagatgatttggcaagtacccatcacagatccaacctcgagtgctgctgaacaacaagaatctaatgaacaacaagagcagggtcaccacgacgcacccaattggtcaaggaccagatctacctgtatactactgatgtccaccttgctctacgcaataatcgcagagatcctggtgtcttgtgtggactctgtcctagaagacttcccctctttgaatccaaaattcctcggtcttacaatttttgccttagtccccaataccacagaatttttgaatgccatctcattcgctattcacggtaacgtggccctctcgatggaaattggcagtgcctatgccttacaagtttgtcttctacaaatccctgctttggtcatctattccatcttctacacctggagcgagaagaagtccctgattaatatcagaacgcagatgtttcctctagtctttccccgttgggacctctttggtgctatgacgagtgttttcatgttcacttatttatatgctgaaggcaaaagcaactatttcaagggttctatgctgattttactatattttataattgtagtgggattctatttccaaggcgtaatttcagaatag

SEQ ID NO: 2083 - DNA, 855 bp, Saccharomyces pastorianus
atgttgtggaaagtctccaagatgttttttagtggctttttagcactatcatcgatatcgatcactaccctttatctctaccaaaaccgtcttgtctacccatcatgggcccaaggcgctagaaaccatgtcgatacacctgattctcgtggaataccctatgaaaagctgactttgatcacgcaggaccagatcaggctcgaggcatgggatattaagaacgagaactcaacaagtaccttattgatcctctgtccgaatgctggtaatatagggtattttataccgataatcgatattttctatcgccaatttggaatgagtgtctttatttattcgtatcgtggctacggtaattcggaaggttcgccaggcgaacaaggtttgaaattggacgctgattgtgtcatgtcacatctgtcgacggatccattccatactaagagaaaactggtactgtacggtaggtctttgggcggtgccaatgccctttacattgcttccaaattcagtaatttatgcgatggtgttatattggaaaatacgtttttaagtattcgaaaagttattccttatatttttccccttttgaaaagattcacagttctatgtcatgaaatctggaattcggagggcctcatgggcagttgtagtccagaaacaccatttttgttcctcagtgggttaaaggatgagattgtaccaccctttcacatgagaaaattatatgagacatgtcctagtgccaacaagaaaattttcgagtttccgcttggttcacataatgatactattatccaagacgggtactgggatatagtaagagaattcctagtagagaaaggctttatctaa

SEQ ID NO: 2084 - DNA, 1626 bp, Saccharomyces pastorianus
atgtccgttcaggttccatatcaacacagttcagggtacatttctcattttcataataacgaactcgatccagatggcgggagagattacaacgttacgatcaagtacctggatgacaaagatgaaaaggaggaaggtcaagtaacgaatagtattcataatgcaagtctacatattccaattcttttgtgtttgataatcgcacttggtggctttatctttggatgggacattggaaccattggtggaatgacaaacatgattagcttccaacagaaatttggtacaaccgatattattgatgatggagaaaccgttttcatttctactaagcaattgaatgatttacaaataggtttgatcatcagtattttcaatatcagttgcggggtgggggctttaactctatcaaaaatgggtgactggaccggtagaaaggctggaatttggtttgccttggtcgtgtactgtattggtataacggttcagatcttttcctgtggtagatggtattttttaactttaggaagagcagtaactggtattggagtgggaataaccaccgtgttagtaccaatgtttctttccgaaaactctccactaaagattagaggttccatggtctcgatgtaccagttggttgtgacatttggtatccttatgggaaatgttttgaacttcatatgcgtgagatgctatagagatccgtttcagaacatatcctggcaattaccgttatttttgagctacatttgggccatcataattggaatgtcgcttgtttacgttcctgaatcggcccagtacttggccaagattaaaaatgatgtgccggctgctaaaagctcctttgctaagatgaacggtgtttctgaaacagatagtatagtgactgagtttattgatgatttgatggaaaataattatgcccaagaggaatctaatgaagaagagaagaagaagagaagtctcgtgaagaagcaaagtttcgagtttgtcttgggaaaaccaaagttatggttgagattaattatcggcatgatgataatggcctttcaacaattatctggaataaattattttttctattatggaacatctgtttttaaaggtgttggaatcaaagatccctatatcacctcaatgattctttccagtgtcaactttctctctacaatattgggaatgtattacgtagagaaatggggacgcaagacctgtctgttgtatggttcaacaaatttattattctatatgatgacttatgcgacagtcgggacatttggaagagaaaccgatttttcaaatattgttctaataattgtgacctgttgctttattttttggtttgcaattacattaggcccagttacatttgtgctggtttctgaactatttcccttgaggaccagagcactttcaatggcgatttgcacatttgtcaattggatgttcaatttcttgatttcatttttaactccaatgattgtgtccaagattgatttcaaattaggctatatatttgccacttgtctgttagcgttaattatattcagttggatactggtaccggaaacgaggaataagaacgaacaggaggtgaataaaatatttgagtcagattag

SEQ ID NO: 2085 - DNA, 1410 bp, Saccharomyces pastorianus
atggacggttacaatcaaaatcagaaccaaaaccaaaatcaaagtcaaagccagcaaccacatcagccgcctctgaaaaagtatatgacgcagaggcggtcagtagatgtaagttcaccctatatcaacctatattacaacagacgacatgggctagcgaacccagtggtggagccagaaacttcatacacgatagatataatgcctcccaacgcctacagggttcgagatcgagtaatcaatcttcccagcaagtttacccatttaagctctaataaagtaaagcatgtcataccggccatccagtggacccctgaaggtagaagactcgtagtggcaacgtatagtggggaattctctttatggaacgcatcatcttttacatttgaaactcttatgcaagcgcatgattcagctgtaaccacgatgaagtattcacatgatggtgattggatgattagtggtgacgccgatgggatgatcaagatatggcaaccgaacttcagtatggtaaaagagattgacgcagcacacacagaaagcatcagagatatggcattcagtagcaatgattcgaaattcgttacttgttcagatgacaatattttgaagatttggaacttcagtaacggtaaacaagagagagtactatcagggcaccattgggacgtaaaaagttgtgattggcatcccgagatggggttgattgcctcggcatctaaggataatttggttaaactatgggacccccgttcaggaaattgtatttcgtcaattctaaaattcaaacacactgttttaaagacgagatttcaacctaccaaggggaatttattaatggcaatttcaaaggataaatcttgtcgtgtatttgatatcagatatagcatgaaggaactgatgtgtgtaagagatgaaactgactatatgacattagaatggcatccaataaatgagtctatgttcactttggcatgctatgatggatcgctaaagcattttgatcttttgcaaaatttaaacgagcctattttgactataccgtatgctcatgataagtgcatcacttcgttatcatataatccggtgggccatatatttgctactgcagcaaaggacagaactataagattttggacaagggcaagaccaaccgatcccaacgcttacgatgacccgacgtacaacaacaagaagataaatggttggtttttcggtatcaacaatgatataaacgctgtgagagagaagagtgaatttggtgctgcgccacctccacctgctacacttgaagcacatgcgctaccaaatacgcatggtttcattacttcaaagacacctcgccaagaaattcccggtatcgattcatcaaagaccaaaggttctactttacctggtctaagcatataa

SEQ ID NO: 2086 - DNA, 957 bp, Saccharomyces pastorianus
atgtggagactgacgagtatagcccgtgctaatattcatacttgtaatcggtttttgcctgtgtccaacaaatcgattggaacactttctgtttttcgtttttattcttccagtctagaagagaggtacaaggacaaattattacaagaagctcagaaacaaggattcaacagcattgaacagttgaaggaccatttgaaagaggatttggaatctagaaaacacaaattcaatagtattgatcctttgaaggaactggaagactatcaacaaagaactcaaatggcaaataataattccaagaatatgatgaccaaatcaaaaggccctctcgatcccaatgctcctaaagttccattcaaaacattagactcctttttagacgtgaccaagattgaagatctgtcaaaacaggaggtcgagtttctttggagagcaagatgggcagagaaggataacgcgttatgtgctgtaattcctgtcgccatttatgatagaatgatggccaatgccaagaacaaccccatgtttgtccttccactacctaggcaatctctgtctgaagacggaaaaactgctggagaacaaggaatggaactacactatatacaatggcagtttgttgggcctcagacaacacattgtatgatgacctccctggcagaatacaagctacatcaggagtttgcaagaccgcacactacctttcagtttcattcggatttagttaaggataaaggagtggtttgcatgaatgggcaagtggaaccggatacaaacgtcaatgtacaagacgcacaattgctattattaaacgttcaaaggttttatggcgctatgggcgaagaaacgccagctgctaaacaaagagtccaattgttaagagacttttccaaaggctctcctcaattcagtgttgagaagttgatttcactgtcccaatctatggaaagttaa

SEQ ID NO: 2087 - DNA, 774 bp, Saccharomyces pastorianus
atggatgaatcagtggatcctgtggagctgctgctgcgattgctgatacggcacaaaccgcatctcaaaccgtatgcctacaggcaagatagctggcagcgagtgctcgatgagtacaaccggcagactggttcaaggtacagacaatcgaggacgttaaagaccaagtttcgtcgactgaaggagctctatggtgcagatcgggcacaattttcactttctcagctcaagctgatgggggcacttttagatgagacaccagagcatacaaaatcaaaaaccaaactggacaatgaatcatcttcatcttcttcttcaccatcttttactaaaggtcattcagggcccgatccgtttcaacagttatcatcaaccgaacatccaaatactaacggttctgatgatgagcatgaacactcgggatcacaaccactacccctggattcgataaccattgggattccgcccactcttcacacaatccctattagcctgtctaaaaatggcgatgacatgaaagctgataacagtcccaagacgagtaaaaatataaacaggttcaatgagacagtgctgcctccacaaatggtggatgggcaggcgtggtctgattctaacatggagctggaaatatgtctagactatctccataacgaacttgaaatgataaagaaaagacaacaggatttcgaatgcaaagtgctaaataagcttaacataattgaagttcttctttcgcagatgcggccaccgaaccaaggagacagtttataa

SEQ ID NO: 2088 - DNA, 2715 bp, Saccharomyces pastorianus
atggacaagctattgcatgtaaagatacttctggtagaggaagtggaatcgttgaagatatgttctttggaccagaaatacgtgagcacggctgtgcatataatcaatggtgaatccttccagctcgtgcagcagtttatagaccagttcaagggaaaagtgaatatcacaggggaaatatctacatctagtgttattgcagctctaagtgatttccttacgcttgaaattgtcaaagaaggtcaagaaaacgaaatgctttttatggccattgctcttttgcagaccttcattcaaaataactatacaggcccagcagcaaagttgaggacagtttcggggttgtttaacgttactggatctgaaataggtgccatcaataaagctcttacccattcactagctatattgggccaacctgcttacgaattaatggatgatccattgtacttagttctttcgcttttattattggagcaaattactggtcaagctagtttattcgatatttcgcaggatcaagaggtgccgctacctgttatttctgccgagtctacacccggattgttggctgtggctaattggtggagagcgagagctcttttgacgcacttgtcattgattccggaaccttctgggtttcaacctagtattgtcgcatcaatataccaatctatagatttagtgcatgctatcgttaaggacttaccagaaaactgtaacgaagatttaaagagacaactctatgcgatgtattacttggaacatgtcaaatgttcattagctatcaatacagaacatctttgtttgtcctccttgaccaaagtaaaaaagctgacagattttcaatttgttatgacaggagctcgtgctacgaggaccaggtttcagcaaaaggctcatgcaggtttgattattcttgccaaatcgtctaagtttcagaaatatgctataaacacaaaatctgcctcaccggaaacattcgccttggagtctgatttgctattagagaagccgcatttcgaatccgttgctgatgaacctttagatgaacaaatttatagcaaaagaccaagactggacctcgattctggctatgaagaagataaactattaccgttggcgctacgccaagagaacattcctaagtcgttgatggggttggatcctaataaccaaccggctttatccgattatgacaatattcaactactattacgtcttcacactattaagaacaccaccccagctaaagatccgcttgtagaagaagaacttacggctctactttctaggattttgtatcaagatggtgacaagaattggtcggttttcgcccgttcattgtgggaaaggtccattcttgaaacaacaaaggctaaaactattgaaagaggtcttttacaaatgcaatctctggtggaggagctggatttaaaaattcaaagtaaattgattccaagctcagatgaaattaatgtggccggtagattatcttatatacatcagctgccatttatccctaggtgggaattagattctacattagctgaaaagtacatgtcgttgggtattttgaaatctgctgtggaaatatacgaaagactgggtatggcatgtgaaactgcgttatgttatgctgctgtaggggacgaaaaaaaggcagaagaaattcttttacaaagaatagaggaaaacgaattggatgccagagcctattcaatcgtgggtgatataaagcaagatccatctctgtgggaaaaaagttgggaaataggcaaatacgttaatgcgaagaactctcttgccaaatattactttaaccctcccgctaagtctggaatacaaccaaattattctgctactttgaaacatttaaacgattcattaagacagtacccactaagctttgaaacatggtatttttacggctgtgttggtttacagtgtggtaagatggaactagctgctgaagcattttccaggtgcgtttcgttagatcctcaccatgccctgtcatggtccaacttaagtgctgcgtacatgaaattggataaattgaaagaagcgtttagctgtctgaagagagctgttgcatctgacgcacaaaagaattggaaaatttgggaaaactacatgcttgttgctgttaaattaaatgagtgggaagatgtcctagtggcatgcaaacaattggttagtatcagaagagataaatctggcgaaggctctattgacttacctattattgagaaattagtggaattattggtaactagcgaatattcagaagatgcagaaaaactatcttacttccaaaaaagctgtacggaattcatatgtgtcactttacctcaagtgattactacgagtgcaagatgctggagaatagttgctagagtagaactttggaggaagagaccatgggccgcattagaatgccacgagagagcttacagagccatttcacataatcccgatttggaaatcgacgaaaaagcctgggatgatacagtagacgcttgtgaagacttggtcgctgcatatgaatctctcggtgaaatgcaaggtaaatatgggcccgacagtttggtgtgcaaagattggaaatacaagtgtagatcaactatcaaggcactaatgagtaaaggcaaaggtaggtgggatgactcccttggttgggatagattaatcgaagccagaagtcaaatatga

SEQ ID NO: 2089 - DNA, 2292 bp, Saccharomyces pastorianus
atgaaacgattacaattactgggtaaatcaaaatacttctcactgatttcaggtcctactaaagaggaagaggagaaacccaggcctgatgtcgagagccctctgttaggtgcaaaccatagtaatagttcagaatcgctcttgttggacgatacatcgtctctcatgtgcctgccacagaaggttttactgctgatactgcgaaacctagatttcaacacattagtcactctctgtcaagtcaattcgacgttctataatttaataaccaatgagttccttttccagaacattatcttgggttcgaaactgtcgttgttaaaattcaacgctttgatacattctgaatttcatacctcgaacatcacctcacacagtggcgatcatgctcgacacacacaatctaaattgcagaacgcaagatttttagtaaggtccatagaattcaaaaacccacaatcccaggattcgttattaaaatacagcaaattctatagtaagaacgaccaaaattctgtaattgcagggtcgtataagctcgattcgtatgacaaaaacttatcaaaggtaaagaatatcaaaacacacgatgacgttcccaccataacttcggatcgaatcaaacaactggataaatttgaaagcaattacttccattacacttacatcgagctgatgcttgatatcatcgactatttgccgaatctaaccaaggtggttctgagcgaagtggaaccaaattttaaaatccctctatggtattctgtatttaatgatggatctcgggacttcttcaagaaaatcatcaagggacaacagtccattacaaatgaagatttgaggactttcctaatatccaagaatttcgtcaaagaatacgaatctaaatattactctttaccgagattaaaaattttagaaattaaagccaacagcaaaagacaaagatcatccaatcgtcaacgccaccatcagaaactcttactaagaccaaatttgttctgttgtttcggtataatcaatgaacttaagctggaaaatatgatgatagatacagaatcactagacactccaatggaatttttaccactgtttttgaaaaatgaaaataccgaactctatagtctacagtctcccatcacttccttaactttaaattcttgtgatgtggttcctggaaacgggatattacgattgttccattcttatttcaaaatggtcaaaaatttgtctttgttgaaaattaatagtaaatttgatttattattatgtagctgttttccatctttaacgaatttaaccatcgactgtaatagtaaatgctttaccaacgagcaggtggtcaacgaatcgtactattttcaacaacgaaaccacaatgcagatgatgattttgacgattgcaattcgatgacggaaacgttgttcgaagcgccctctgattccaaaataacaactcctccgccaacatcttcagttgtactatctttaaatttgaactatatctctaaaactacagggaatgatgattcaaataacccatcgccaaataataacaaaaagcctgccgtcttaacaccagcacagttgcagaccttccagagacaacggattcctgaatttcattccttttatcattattacaaattactttgggaaaggatccctaatcaaaatatctctatcaacgtcattaatatcccgttcactaatgtctacccatcatctccattatccttttgggagcacctagtgcggacgatggttagtgacaatgaaacagacgagaatgctaacgatgctgatgaccaagaaacattaattggctatgaggctgagtcagaaagggccggttcaccggtcccaagtgctgttcctaacttggcaacagcaatggacccagaactaaatactcatcactcttactattggaataattccgtaaagcgttgcatgagagacagtttaatcaagttgagggatagaacattggaatacagagacttagatgtggaagagtttttacaaaatgtgaatctggaaaagtttttcaataatttccaagatccagaaaattttaaagatgttcccaacattaatctttggtgtttcttgagaaatttatcgaagtttaaagcggtcaagataagaatgttgaggcatttttcatcatgtacgcctagaacaagatacgactgggagctattactaaagccagttttgcgtgtgaacgtccctattgaagttcgtgataaagatggatttgttctttattcatacggacaagagtga

SEQ ID NO: 2090 - DNA, 654 bp, Saccharomyces pastorianus
atgctgttgcaacctatctgcagacgctgtcgatggactcggttcgtggggcccatcagaagatggaactcgaccgggacgaacggagaaaggccattttcatttaaggatatatctagtcaagaggagatctcgaacatctcgtatccttcggcctccagcccaggctccacaattaccacgggcggtactgaaacgtacaagccacaagaggaggtggtcaaatatattcttcatggaaagttcaccaagaataacacacatttgacgttttctagcgtgatggaagacaagaacttccgcaagaataaagggctatcgtataacgacacgatgctgtactacttgaacctgcctgaaaaagtcaggatttcgatatccaccggctgtctaggattcagaaaggctgcaagaggggaatatgaagctgctttccagaccagcagtaaaatgtttgatttgatcaaagagaagaacatgctgaataaagacatagaagtggtaatggacgatttcggcaagggccgggccgcgttcatttctgctcttgttgggaaggaaggtgccagtgtggtgaagaaggtagtcaaggtcagcgacgccaccaaattgaagtttggtggtgtgagatctccaaagatgagaagattataa

SEQ ID NO: 2091 - DNA, 900 bp, Saccharomyces pastorianus
atgtcggtcccaccacctcccccctatgaagagcaaagctcgcacctctacgggcagcctgcgggagacggccaggatggcggcgctttcgtcccagaagatttcaaatactccactgtggtcgtctcatgcgaacccataatccgccagcggttcctgcacaaggtttactctctattgtcgtgccagttactggccagtctgtcgttctgctactgggccagcgtctccacgtctttgcagaacttcatcatgtcacacatcgccatcttctacgtgtgcctggtggtgtcatttgtctcctgcatctggctagcggtaagtcctcgtcccgaggactacgaggccaatgtccccgaaccgctgctcacggggaccggtgaagaaacggcacaagagcagagacgtctgccctggtacgtcctgtccacatacaggcagaagctcacactgctgtcaatttttacgctctctgaggcatactgtctctcgctggtcgctctggcatatgacaaggacaccgtgctctctgcgctactgatcaccaccatcgttgtggtcggcgtctctttaaccgcgctatccgacagattccagaacgtgctgaactccgctacgtctatatactactggctaaactggggcctctggatcatgatcgggatgggcctcacggccatgctctttggctggagtacccactcgtccaagttcaacctactttacggctggctaggtgccattcttttcactgcgtacctgtttatcgacactcaattgatctttagaaaagtgtaccctgatgaagagataagatgtgctatgatgctttacttggacattgtgaacctgttcctgtccattttgagaatcttggccaactctaacgacgataattaa

SEQ ID NO: 2092 - DNA, 309 bp, Saccharomyces pastorianus
atgagactttctactgccgccaccattgccaccgttgctgccattgcttctgctgatgttacttcagacggcgtcacctacgttgatgttaccactaccccacaaagtaccacatcaatggtctccaccgtaaagactacttctaccccatacaccacaagcaccatcgccactttatctacacaacctgtcagcagtcagaataacaccactacaccaggtatcagcacatttgttggtgccgctgccaaaggttccgttgtcggactgggtgccatcgtaggtgccgccgccattgctttgttatag

SEQ ID NO: 2093 - DNA, 2571 bp, Saccharomyces pastorianus
atgtctctctcagctgcagctaataagatatccgataacgatttccagaatattgggccggcccctatgccccccaatgcaaatggacaaggccgtaccggttacaaccaaacgcaacctataaccaagctcatgagccaactggacttgacttcagcgtcccatttgagtgcgaattccttgaagaagaagagcggatgggtgtcttacaaagacgacggtttactttcattcatatggcaaaagagatacttagttctacatgattcatatgtcgcgctttacaagaatgataagcaaaacgatgatgcgattttacagataccactaacaagcattataagcgtaagcaggacacagctgaaacagtattgtttcgagttgatacgttgcagcgaccgaaactctgtttcatcaggatcctcgtcctctgtgaatgtatcgtctgagaataattcgaaaaagtccatctatatcgctacaaagacagaaaatgatttgcatacttggttagacgctatcttcgccaaatgtccattattgagtggtgtctcttcccccactaacttcacgcataaagtacatgttggttttgatccggaaactgggagtttcgttggcatgcccactaattgggaaaaactactgaagcattctaggattaccggagaagattggaacaacaactctgcggcggtcatacaggtattacaattctatcaagagtataatggagctggcaaccccacaaatcctttggaaaaatctcaaagtagtgaggcagcctcttctcaaaaatctttaccaagcagttataatgaaaacaagcattcagtgaattcaaaagcttcctctggtggctcctcggggttgacatcacagagacaagcttcgcaaccaccaaatacgaaaccacatgtatcttcaggaaatggttcactgccaccgataaacacaaaagtacttaataatcaatcaaatatacccagacacttacaaaatgtccctagccaacagtacaataagatgagaaatgcacattccccaaccaatggtcagtttcctagaggacctatgcattctaaccattcacaacgatctttgcagcaacaacagcaccaacagcaccaacagcaccaacaacaacaacaacaacaacaacaacaatatcagcagcagcaacaatatccttaccaccaacaggtaccttctccatctccatctccgtctccatctccatctccattaaatccgtataggccacatcacaacatgataaatccatactccaagcaatccctatcacctttaggtgcacagccatctaacgcaaaccaaaaacaaggtacaccgaattacgctcaaaatccaagccccactggtccacaatttcaacctcagcgaactgcaccaaagccaccagtctcggccccaagagctccatacccaccaaaacaaagtgcagtggctgctggtgctgccatgcaacatgttgcagctaagaacgatcagccggttctacagtcgatgaggcaggctccaaagagaccagatacaaatgacaaacaagcgaccggcgtcaccaagcccaagaagccaacaaggccaactatgtcaactgcagaaatcatgagcaagttgaagagtgttaccgtcaatgcagatccatccatctgttttaaagtgattgagaaggctggtcaaggtgcaagtggttccgtttatctggctgagagaacatatataccaatcgaaagtaacatgagcgaatttatgaataacgagattgatgaaccccaagttggagataaagttgccatcaaacaaatgattctttctaagcagcctcgcaaagaactcatagtaaacgaaattctagtcatgaaggactcacgccatgataatattgttaacttcttagaagcatacttgagaacagacgatgacttatgggtagtaatggaattcatggagggtggatcactaacagatattattgaaaacagtcctgccaacgatacttcacgctcaccattaacagagcctcaaattgcatatattgtacgagaaacttgccaaggtttgaaatttttgcacgataagcatatcatccatagagatattaaatctgacaacgtcctgttggatacgaaagcaagagtaaagattacagattttggattctgcgctaaattgacagataaaagaagcaaaagagccactatggttggtacgccatattggatggcgccagaagttgtcaagcaacgtgagtacgatgaaaaaattgatgtatggtctttggggattatgactattgaaatgttggaaggtgaaccaccatacttgaatgaggatcctttaaaggcgctctatttaattgcaaccaatggcactccaaaactcaaatatccggaaacattatccttggagattaagcgtttcttaagcgtttgtctttgcgtagacgttagatacagagcttccaccgaagagcttttacatcacggttttttcaatctggcatgtgatccaaaggacttaacagcattgttggaatggaaggagtga

SEQ ID NO: 2094 - DNA, 1212 bp, Saccharomyces pastorianus
atgaacgggatatttgctattgagaagcccagtggcataacatctaaccagtttatgttgaagctacagcatgctttaactaaaagtcaaatattctcgaaggaaattcaaagggcaacagctgagagaagagagcagtatgaacagcagacaggtaagaaagcgagcaaaagaaaactgcgtaaagtttcgaaggtgaagatgggacacggaggaacgttggatccgctggcttctggtgtccttgtaatcggtattggaacaggtactaagaaattagcaaattatctttcaggtactgttaaggtttatgaaagtgaagccttgtttggtgtctcgaccacttcaggagacgtagagggcgaaattttgtcccagaattctgttaagcatttgaatttcgacgatttgaagacagtggaggaaaaatttgttgggcaattaaagcaaactccccccatatacgctgctttaaagatggatggtaaacctctccatgaatatgctcgagaagggaagcctttacccagagccatagagcctagacaggtgaacatttatgatttgaaggtgtttcctgattcccttaaacgtgatcatgactattctttcttaaggcccacgacagaagaagcggttgacactgtgaaaaacttgaatgcaaacatgctaaatgatgttttgtatttctcaaaagattatacagacaagcatgggctgaagtctgaggtcgcagacgtaggggaggcattgccattgactaatgaagaagagcaagagattaaggaagaaggagattcttacagagctccaaagttgcacttcaaagcaaatgtatcttctgggacatatattagatctttagtgagcgatatcggtaaggctatgaggagctcgtgctacatggtgaaattgattcgtttacaacaacaggactggtctcttgaaagaaataatgtctttcaattggcagatttcactgaaagagatgaaaaagtatggagtaaggtattggaaaaggtcctggacgaaggggcaagtgttgatgttatagaagaattaacgaaagcagaaaaggaagtaccagctgatgtaaaggaggacgtggcgcctgatactcaattagaagatgaagtcactgctgaaacagtggaaactgatattgttgaggagtcgtctggtactttgaagaggaaaattgagcaagtgtaa

SEQ ID NO: 2095 - DNA, 1647 bp, Saccharomyces pastorianus
atgattgtatggcagtttctatttgtagttcattgcttgttggcggcaaccattcaagcaatattcgaagacttcaaccctttcgcacataagaatgtttcactagaagtacccagtgtaaatgggtggcgcaagaacatcatgaccactggtcaacaaaccattttcaattccgataacatctacgaatggaccccgatcctctccaatttaactgctggcaaaaaggacagtttcgtgttcaccatcgatgcagaatcctccggttacgggttcgcacccacatacgaagtactgatgttcattagtggtaatatttgcgacatgcccgaaaatattacgggggctgaattaatgatatactattctttcaatgagtctgttttggacaacccgggtattggccagagtgctgtttttcaaaatggttacattcaagcattggccattagtccagtgcaatcgtctagctcgaatgccacctccacctactcaaacctttatgtggtcactgagctagtgaatgccacgacaaaacaaccactgtccagttctgacacatcaggtatctgggagtacagattgagtatctctgagaatgatttagtcttccaatgggacgtaagaccctgggtagaagtgttagacacagatatgcactctgcgttactgtccacagggaatgttaccgctgatgcaaaggtttaccataactactcaatatatgatccatccttatacgatctatatgtttactcgtacgaagagtcgactcggctaaatgaaaactataatctatctctatgtgctgtgaaaaatggaccgcatttggtttcatctcaagacacttcaaactcaacagttacaacaaacagtacaaatccactggagagtaccgatttgatcatccaaaaaaagattacagagtacggtggcagcgtaagtgaaatgttttacattaccgggttaaacggctcaacaacatataccgcttacctaacaaagaaaatcagtaacggtgatggattgtcaaatgtcggtggcgtgctattttcacaagtttatttcaccaccaaaagtactaatgcatgctctttaatttttgatttggatttctgtagtgacgttgcttattctgtacccacatcatcattttcggtggagaataagactctcatggcgcaaacttatgatcacattgcagaggctttatattcaaatttcagcaaagctttacagttagtatcttgcgacgcagacaaagatgcaagatattcgccgatcatggcttgtgaagattgcgctgaagcatatcgtgattgggtatgtgcagtgtcaattccaagatgtagcacgttatattccaagtactttactcacagagataaaacgcaaaatcgtaatgattatctgaatagatacatcaaacctttagatgattattatgaaatattaccttgtattgatatgtgctatacgttagtacgaaactgccccagtgatttcgggtttgcctgccctaatgataaatccacggaagatttactttacgaaagttacaacttctacatggacgttgactacgcaacatgcaactacataggtaattcttcattaatgacgattcatcctttgaaggacacatag

SEQ ID NO: 2096 - DNA, 840 bp, Saccharomyces pastorianus
atgtgtgaatacagcaaagctctacatattctgctcaagtctccagtcacggacgacataataaaattcttaaccgacaccacgttgagggtcctgccctcgagcaactacccaacgcctccctgctctccaggcgggaagcccgtggccaggttgccatcgctgatgactttcatcaccagactggtcagatacaccaatgtgtacacgcccacgctgctcactgccgtgtgctatctgaacaagctgaagcgcatccttcccaaggacgcaactgggctgccctccaccatccatcgtattttcttggcctgtttgatactgagtgccaagttccacaacgactcttcgcccttgaacaagcactgggccaagtacacagacggtcttttcacgctagacgatatcaacctcatggaaagacagctgctgcagctgctgaactgggacctcagggtcgacactgaagacttgatcctggatctacagcctctactggagcccatcaagcaggacttggtgaggtccagcgaccaaagaaagagaataggcatgatgatggccatgaacaagagggccagtgcaggcacaagtcctatcgcttccaacaatagattcaagctttacgaaaagcaaagaaacgtgtctattgcatcggacctaagttctgccacgcttgttgacagttgtaacgacctaagaaggctgaaagacgtcaccaatataccgaacagcacgcgtaccaacagcaactacgtgaagtctgtggagaggtggaacgacaacgtcaacagacaaagttgggatctggaacagatcatgagccagcatgggttttaa

SEQ ID NO: 2097 - DNA, 1194 bp, Saccharomyces pastorianus
atgttctcagcacaaaagccaatgtatggctctgggacaggcataaatatgggtgccggtggaccccctgcaaacaatccaggatcgatgcctatgcccggagtcccttcgtcaatgggcccaggcatgaaccaacaaatccctggcggtggcccaatgctaatgaacaatactcccaataacaataataacaataataacaacaacaacaacaacaacaacaacaacaacaacaacaacaacaacaacatcggcaataataacaataatggcaataacaacaataacaataacaacaacagtagtagtaacgatggtaatgctgcccgtggcaacatgaacatggccaatagtagaggcgcagtacacgcattagatgatcctaatgtgtaccattggatttgtcaattgacatacggcccccaaaaggaacaagcgttgcttgaacttggtcgcaaaagagaacagttcgatgaccttgctgtggttctttggtcttcgtttggtgtaatgacttcgttgctgaacgaaataatctctgtttaccccatgctgcagcctcaaatgctatccaacaacttatctaatcgtgtctgcaacgcgttggttcttttacagtgcgttgcgtcgcatccagagaccaaacaccttttcctccaggctcacattccactctttcttttcccctttttaaatacgacttcgaggcagaggacattcgagtatttaagattgacctcattgggggtgataggtgcattggtcaagaatgactcacaagacgtaataacgtttttgctcaggaccgacatcgtaccgctatgcctaaggattatggaatcttcatctgagctctctaaaacagtggcgattttcattttacaaaaaatcctattggatgatgtcggattgcaatacatctgtgctacattggaaagattctacgcggtcactaatgtgttgaaggatatggtggagcatttgaccgtgagtacgccaccgggaagactactgaagcacattatcagatgctacctaagattgagtgacgatttggaagcacgcaggttgctgaaagtcgtattgcccgccaagttgagagacaacactttcaccgaagtgctaagagacgacgtcgggtccaagagatgtttggcgcaattgctgttgacgctaaacgaagaaacctcatga

SEQ ID NO: 2098 - DNA, 1461 bp, Saccharomyces pastorianus
atgaatttacaactcatacactggtcttgcgtcttcgtgtcgctcgtgcttatacgagcagcgttcgctgaccagttcacatacaaagcttgttattcgtcaagcgacatccgaaaactggggttatcttctaagggaaattacgaataccagtctgtttcgtactgtgaaaacgagtgttctggacaagctattgtcgctcttttcaatggtaaaggctgctattgcggtggttctgtttctcaattgaaatccttaacacaactggattccagcgactgtaatgttgcgtgtgctggttggccttaccaaaattgtggtggttcttcggccatgaacgtttatatcaacaacgcagcatccacggcggactcatcttcgtcctctgtgtcttcatctaaatcatcttctgcatcttcaagcactagttcaaaaacgtcctcgaaatcggactcgaaaagttcaactagttcttctgctacgcagtcttcaatttcctcatcgtcaactaccacctcaagttcttcctcaaagacgaccacatcctcttctacttcttcttctacttcttcttcctcttcttcttctttttcctcttcctcttcctcctcttcttctagttcagaaacgtcttctacactgacaaccacttcatccacgacattgccctcgtcttcatcatcgacaccaaaggttacgtcggccccttcatcgagttctgcaggtacatcaacacatttaactactcgcgtggtgacacagtccgttgtttctgaagcgaatgaccaggcaagcacaatatatatcacaaggacctctgtttatgcgacagattcgtctacggcctcctctactagtacatctctggatgggaagtcaagcacctcaaagagtaaacatttaagtggtggtgccattgcaggtatcgtagtgggtgtcgtttgtggtacagttatcttggcagcattggtcatattatactttgtttggaaaaaacgtcgccagacttcccagcaggtagacttagaggagactaaacattaccagccgtattcctttggtgacgccgatgctaaccccgttcttccacgatctacttccagttccaactggcatataccctcccgaaacaatactgcgttgtccaagaataccgcacccggtttcgccaattatgacctgccgacaaggttgccgggcggtagagattcggtaatggctggtgatatttctaatgccaccaaaagaagccatgtaccatctgtggtatatgaagagccaccttcgatctataacgggaaccaaagattcagtgctacctcattgcccgatatgatggaagaaagacaactacatattgtaaaccctgataatataagtttgagtaatgagagcaacgcttccaatggtgacgacgattatgatgatgccaaggattccaatgatagttctttgcgctga

SEQ ID NO: 2099 - DNA, 462 bp, Saccharomyces pastorianus
atggttgtcttgaatccaaacaactggcattgggtagataaaaataccttaccttggtccaaggactacttgaacggtaaattgacgagtctatccactgtctgctcagatgggaagagcaagatcgagttgactcaagtcagtagcatcaccggtgactccaatgtttctcaaagaaagggcaagccgatctgctacttcgaccttcagttatcgatgagcgtcaaagtgacaaacttagatactgacgagaacaacaaagacgatgacggcgtacttgcggacggaaaactggagattccagagttcatgcatgacgaatctgatttccctatcctgtcgcaaggttttgacgcgtttgatggattggttagatctgaatttgtccctaaagtattggagacgctactaatgtaccaagacgacttgatcaaagagcattccaaggacgtacaaatctga

SEQ ID NO: 2100 - DNA, 1317 bp, Saccharomyces pastorianus
atggtatcgattttgaatcccagaacaacggagtttgagttcggcgggctgattggtgccttggccatcagtgtggggctgcctgtattcagcatcatcttgaaccaaatggttagaccggattattttattaagggatttttccagaattttgacctgattgagctttggaacggtatcagacccttgcgttactacctgggcaaccgggagttatggacggtgtatggtatgtggtacgggatactggcggttttggacgtcattttgcctggcagagtcatgaatggtgtccagttgagagacggttcgaagctttcgtacaaaatcaacgggattgctatgtcgacaactttgatcctggtcttagcagtgagatggaagttaactgacggtcaattgccggaattacaatacctgtatgacaaccacgtcaacctatgcataatatccatattgttttccttctgtttggccacatactgttatattgccagtttcgtaccattaattttcaagaagaacggtaataaccaaagggaaaagattctggcacaaggtgggaattcgggcaacattatttacgattggtttattggtagagaactaaaccctcgtttcgggcccttagacatcaagatgttctctgaattgagacccggcatgttgttatggttactgatcaacctttcatgtttgcatcatcactatttgaaaaccggcaaaatcaacgatgcgttggttttagtcaatttcctacaggggttttatattttcgacggggtgctaaatgaagaaggtgtgttaacgatgatggatataactacggatggattcggtttcatgttagcgttcggagatttgactttggttccatttacatactctttgcaagcccgttatttgagtgtttcaccagtggagttgggcttgggcaaggtcgtgggtattttgtcaattatgttcttgggatactacatcttccactcggcaaacaagcaaaaatctgaattcagacaaggcaaattggaaaatctacaaagcatccagactaagcgcggtacgaaattgttgtgcgacggatggtgggctaaatcgcaacatatcaactatttcggtgattggttgatttcgctaagttggtgtttggccacatggttccaaactcccttgactttctactactcgttgtatttcgcgacactgttgctgcaccgccaacaacgtgacgaacacaaatgtcgtatgaaatacggggaaaattgggaagagtacgaaaggaaagttccatacaagatcattccgtatgtttattaa

SEQ ID NO: 2101 - DNA, 1461 bp, Saccharomyces pastorianus
atgtctcacactgcaaaatcgaaaacgctccaagagctggatattgaggatattaaggagaccaaccctttacttaatctggtccaaggacaaagaattgttcaggtcccggaactggtgttagagtctggtgtggtgttaaataactttcccattgcttataagacatggggcacactgaacgaagcctgcgataatgttctggtcatctgtcatgccctgacaggttctgcggacgtcgcagactggtggggcccacttctgggcaacgatctagcattcgacccatcgagattttttatcatatgtctgaactctatgggctctccttacggctcgttttcaccattgacgataaatgagcagaccggcactcgatatggtcccgagtttccattgtgcactgtgcgtgacgacgtcagggcccacagaatcgttctagattctttaggtgtgaaatcaatagcgtgcgttatcggcggatccatgggagggatgttgagcttggagtggactgccatgtacggtaatgaatacgtgaaaaacatggttgctctagcgacttcggcaagacactctgcctggtgcatatcgtggtcggaggctcaaagacagtcgatatactcagaccccaactacctggatggttactacccagtggaagagcaaccggtagctgggttgtcagctgcacgtatgtctgcattgttgacatatcgaactagaaacagtttcgaaaacaaattttccaggagatctccctcgatagcccagcaacaaaaggcccaaaaagcagaagtgcgtaaaccctccactgtcagcgagcattccttacaaatacacaacgacggttacaaatgtaaagccaatggtgccattgctggcatctcaggacagaagcgccaaagcgtggtctctactacatcgtcttcggactcattaacttcacaatcatcgatgacttcggtaagctccgtcaccggtgaagtgaaggacatcaagcctgctcaaacatatttctctgcacaaagctacttgaggtaccaaggtactaaattcatcaacaggtttgacgccaattgttacattgccattacgcgtaagctggacacgcacgacctagccagagacagggtggaagacatcacgaaggtactttccgccatcgagcagccttcgctgatcatcggtatccaatctgatgggcttttcacatactccgaacaagaattcttggctgaatacataccgaattcgcaactggagaaaatcgagtctccagaaggccacgatgcctttttgttggaattcaagctgataaacaaactaattgtgaacttcttgaaaaccaactgcaagaatatcatggatgccaaaccaaggacttggggaggagatgttggtaacgacgaaacgaaaacatcagtcttcggcgaggcggaggaagttaccaactggtag

SEQ ID NO: 2102 - DNA, 1053 bp, Saccharomyces pastorianus
atgagcggaaaaccaattgttttgaaattagggaagaatgcctttgctgaggaagcgtggaaggacctgggcaggatcgcagacgttatcactatccctgaaaccaccactcgagagcaattcttgcaggaactcaaggaccctcaaagtaagctttctcgagtacaagtcatcaccagaaccgcgagaagcgttaacaatacaggtaggtttgatgaagagctggctcttgcattgccctcttctgtggtcgccgtttgccacacaggtgccggttacgaccaaattgatgttgagccatttaggaaaaggcacattcaagtggccaacgttcccgacttggtaagcaacgctaccgcggacacgcatgtgtttttattgttgggcgccctgagaaactttagcattggtaataggaggctaatcgagggaaagtggccagaatccgggcctgcgtgtgcttctccctttggttacgaccctgaggggaaaaccgttggtatactgggtctaggtaggatcggtcgttgtattttggagaggttaaagccatttgggtttgagaacttcatataccataatagacaccagctaccttccgaagaagaacacggttgtgaatatgtaagcttcgatgagtttttgaagcgctcggatatcgtgtctgtaaacgtcccactaaatagtggcacccaccatctaatcgatgcagagaccattgagaaaatgaaagatggcgtggttgttgttaatactgcccgtggtgcagtcatagatgaacaagcaatgaccgatgctctacgcagtggaaaaattaggagtgctggtttggacgttttcgaatatgagccaaaaatatccaaagaacttttatccatgcctcaagttttgagcttacctcacatgggtactcactgtgtggaaacgaggaacaaaatggaagagttggtcgctcataacgctaagaatgtgctattgaccggaaaagttttgactattgttcctgaattgaaaaacgaaacctggcccaacgatgttaagccgttaatttag

SEQ ID NO: 2103 - DNA, 2241 bp, Saccharomyces pastorianus
atggatgcttctgaggaatcaaaaagaatatcaatacaggttacatccctgtctactcaactaattgagagtgtagataaacaatcacatttagaggaacagcttaataaatctttaagaaccatcgccagtcaaaagtcagcgattgataactacaaccagctgaaaaccgattatgataccctgaaacagacattatcagagagagatgaagaagtgatgagactgaatgggaatattgcgaaagaaactcagctccgaactaaagctgaggatgaatctggaaaattaaacagagaagtcgaagatctgacagcttcacttttcgatgaagcaaaccatatggttgctgatgctagaaaggagaaatatgctatcgaaatattaaacaagagacttaccgaacaactacgtgaaaaggacacattattggagacattgaccttacaacttaaaaatttgaagaaagtaatgcatagtctagacaatgagagtacggtcacaaacaactccggtagatactcgaccatcttaagcgactccgcaacttcttctagcacttctttaaacaaagtgccaacttccaactctttcacttcacaagatatgtacagtggaattgtatattcaccaacaatatcatctattcgttatgattcaaatctttacaatgaatttttaaaatttgttgctgcactacctcattgtgaaaatataaaggcaacttcatcagagtcaaaattgatacgaaggttggtaaatgatgaaatccaacctatacttaaaatcgataatgcgtccggaattggctggttggttaagaaaaccttactctctctgattatagatggtatggtggttgtggaaccattaagcggtgtcaatgcaacataccaaatcggatacaactcaagtagccctgtgaagcaagccacttctaatatgccaaagatgtttaagtttcccttggattcgcccccagtagctgtgcatgctgcatgttccttctgtggagaatccagagacgatattattgaacacgcaaggatgtatgtgctgaaaacgttacataagtctgatgatggtgcggaacacgtaacaaatacctacccgttatgtcattggtgtttgctaaaggtaaggcaaacatgtgaaatctttgcatttttaagatcattaaaggtaggagcatggcatttagagaaggtaactttgcaaaatattgccaagggtgatttggagaggttttcagaggtcacaaagcgaactaaatcagaggggggcagagtttctcctcatgataagatggctaagcgattgagtttcatggcgggccttggcatcaactcttcaacaaagagtaaaccaagggtggaagtcccgtcctccgaaatgaatgtaaagccgggccaaccaaccactaatattcaaagagcatgggtacagctgtgtaaattgcgttgtatacttcactggtctcatattggcatatgggcagtagatgattctatttcctcaaaaataggaccctttgttgacgatgaaggtactgatgagggtccaagtgacactgtaccagtccgcttgcaagacaagtcattgtggaagaaaaacgcggacatacctttgtcgtcatctagtacagatgaaagtcagaggagtgacactttcgacttcgaaagcgaagacacagagaacgcaaccacagatgaatcacccgccggtgtatctccctcagatacgtcgtcctcagctgcgactactacgagtggaaactcgtcggcagcagaagaacaaggccataatgagggagatgatacagtaacaaaagatgatgagagtagtagtaagtcgataaaaaaacataacgaagaaagtgccactaccaacgataaaaaggttcaggaaaagccgaaaaggaaagcttctcagcgtaagattcaaaagaagaaattgctcagggatttggatgaattggaagaacaatttagagaagaaagtacaaatgtccaggacgaactcaaaagctctgatgatgtcaaagctcaagttgtatctccagacaatactacttctacagaaaaggacactaaaggagatgagcgttcaagcaataaattatcaaagttgtcaataaacaatgaacacaatgaacaaataaaggaaaacagtccagggagaggattgcatgcatcttcaagcaacgatgacaattttgacgatgcccaagaacaacaatag

SEQ ID NO: 2104 - DNA, 1713 bp, Saccharomyces pastorianus
atgagtaaaaatgtggacattggcgtggccaaagaggctcgatacgaagtaaactccatcaccacgaaaaaggaggaggagctggtagacgtccagtacgatggacaggatgccccggcggctatcgcagccgatgattgtattacaaatgaaaatttcaaggcggcaaagacgctaccgcgggaggtgaaacggaacttgaagcagcggcatatagggatgattgctctgggagggaccatcggcacgggcctcataataggtatcggtccgccgctggcgcacgcgggccccgtcggcgccctgatatcgtatatattcatgggaaccgtcatttactcggtgacgcaatcgctgggggagatggccacattcatacctgtgacgtcctcgttctctgtctttgcccagaggttcttgtcgcctgccctgggcgccaccaacggctatatgtactggctgtcgtggtgcttcacgttcgcgctggaactatctgtactgggacagatcatccagtattggacagatgctgtgcccctgtcggcttggatcgtagttttctggtgcctgctgacaatgatgaacatgttcccggtgaagtactacggggagttcgagttttgtattgcttccataaaggttatcgcgctgctcgggttcataatctactcgttctgcatagtatgtggtgccggacagccggatggacccatcggattcaggtactggagaaacccaggcgcttgggggcccggtatcatctccagtaacaaaaacgaagggcgttttctcggttgggtctcctctttgatcaacgccgccttcacctaccaaggtactgaactggtcgggatcactgctggtgaagcggctaacccaagaaaggccgtcccaagggcaattaagaaagttgtagtcaggattctagtcttctatatcctctctctgtttttcataggcctcttggttccgtacaatgacccgaagctggacagtgacggatcgtttgtctccgcatccccctttatgatcagcatcgagaattccggcactagggttctcccagacatattcaacgcggttgtactgatcaccataatctctgcgggcaactccaacgtgtatatcggctcaagggtcctgtacagcctatccaaaaacagcttggcacccaagtttctgtcgatcgttaccacgggcggagtcccctactttgccgttttggcgacatccgtattcggattcctggctttcttagagacttctgtaggcagtggcaaggccttcaactggctgttgaacatcactggtgtggcaggtttttttgcatggctgctgatttcgttctcgcacatccgttttatgcaagcgataagcaaacgcggaatatcgaggaatgatctgccttacaaggcccgcatgatgccgtacctagcttactatgcgtcctttttcatcgccctgatagttctgatccaaggatttaccgcatttgcgcccattttccagcctgtagattttgtagccgcatacatatcggtcttcctgtttgtggcaatctggatcacattccagctttggttcaagtgtcccataatctggaagttgcaggacgtcgacatagattccgaccgccgcgaaatagaggagcaggtatggatagaacccttacacaaaaccaaatggcagtgcgtgtgggatgtccttgcatag

SEQ ID NO: 2105 - DNA, 1836 bp, Saccharomyces pastorianus
atgggcaagtttagaaatttaatatcgcccaagaaatgggacgaggagcaggaaacttccgaagagcagagtatacgggacgactcaataaatcagatagaacatgaaatggaggtgatagatacaggcaacaagccggtcgcatactccatggacgagaagcagtacaatctgaagacgaagaacgggttaatgcaagatggcaccattggtgacgtaaattccatcacaaactcgttatcgaggtcccgaattgcctcgcacgaggcaggtgcggacgaagaagaagaggaagctcactacgaagacaagcatgttaggagagccttgaagcagagacacattggtatgatcgcactcggtggtactatcggtactggtcttttcgtgggtatctccacccccctgagcaatgcaggccctgtcgggtccctgatcgcttatattttcatgggtactgtggtttacttcgtgactcagtcgctaggtgaaatggccacatttatccccgtgacgtcatccatcacagtcttctcaaagaggtttctatcacctgctttcggtgttgccaacggttacatgtactggttcaattgggccatcacgtatgccgtggaagtctcagtaattggccaagtcattgaatactggacaaagaaagttcctttaggggtttggattgccatattttgggtccttattactttaatgaattttttccccgtgaaagtttatggtgagtttgaattctgggtcgcatcggttaaagtcttggccattatgggatatctaatatacgccttggtcattgtttgtggtgggtcccatcaaggtcctattggttttaggtactggagaaacccaggcgcttggggccctggtatcatttctagtgacaaaagcgaggggcgttttctcggttgggtctcctctttgatcaacgccgccttcacctaccaaggtactgaactggtcgggatcactgctggtgaagcggctaacccaagaaagactgtccctagagctatcaataaagttgtcttcaggattgtactattttatatcatgtctttgttcttcattggcctcttggttccatacaatgacaaacgtctgtctgccagctctgctgtcattgcatcatcaccctttgtcatttccattcaaaacgccggtacttatgctttgccagacattttcaacgctatagtcttgatcactgttatctctgccgctaactcaaacgtttacgttgggtcccgtgttttgtactctttggcccagaccggtaacgctccaaagcaatttggatacgtcactaagcagggtgttccatactatggcgtgttgtctacagctgcattgggtcttttggccttcttggttgtcaacaataacgccaacaccgcattcaactggttgatcaacatctctactttggctgggttatgcgcttggttattcattagtttagcacacgtcagattcatgcaagctttgaaacagcgtggtatctctcgtgatgatttgcccttcaaggctaaattcatgccctacggtgcctactacgcgtcctttttcgtcaccgtcatcattttcattcaagggtttcaagcattctgtccattcaaagtggccgaattctttacgtcctacatttctttaattcttttggccgtcgtgtttgctggttgccagatgtactataagtgtagattcatttggaaactggaagatattgatatcgattctgacagaagagaaattgaagccatcatttgggaagatgatgagccaaagaatttgtgggagaaattctgggcagccgttgcataa

SEQ ID NO: 2106 - DNA, 3201 bp, Saccharomyces pastorianus
atgcctaaagaatctagttcaaagaaaagctttgatgataccctcgaactgaaaaaaaacgaacagttattgaagctaataaactctaatgaattcactttgcacaattgtgtggagttgttatgcaaacactccgagaatatcggtatccattattgtttgtgccaaaaactggctacatttcctcacagcgaactacagttctatatccctcaattagtacaggtcctggttactatggagacagaatcaatggctttggaggatttactattgagactaagatcagaaaaccctcattttgcgctgctgacattttggcaactacaagcattactgacggatttgtctaccgatcctgcttcttatggtttccaagtcgctagaagggttttaaacaacttacagtctaatctctttaatacgaactcaaatgacattaagacggttaagatacacgaaaatgtcgcaccagccataatcctttcttccatgatgatggcagcaatagcattaccccagttaagtgaagcttccaagccattggtagagtcccaaggtagaagacagaaagcatttgtttttaaattagcaaggagcgcaatgaaggattttaccaagaatataactttaaaaaatactttattgaataagaaaaactccaaaaccaaaagagtcagctcgaatagcagtttgactccaagctctccgatagatttgatagatccaataaaaaccagagaagacgcgtcgtttagaaaatccagacgtaatgaagtaaagctagattttgacatagtagacgatatagggaatcaagtcttcgaagagagaatctcatcctccatcaaactacctaaacgtaaacccaaatacctggataattcctacgtacatagaacatatgacggtaaaactataaataatgatggaacaccaaggacgagtgaagaaaccattgatggaaaacgaagtagctatgttcctcccaaggtctacaatgatgagaatatagacaacattaacaatggagatgaaacaggcggggagacggaggaagacacagatgctctaaactccgaccagtttaccagttctatgccagatctacataatatccaaccaagactttcttctgcatcattcgcatctttagaaggaacacctagactgaacaggactaactctcaaccgctttcacgccaagcagttaaaaacagtaagaaagaaaaatcatccctaaatcaggaaattgatctatcccaattgtcaactacttcgaaaatcaaaatgcttaaggcaaactatttccgttgcgaaacacaatttgccatcgcattggaaacaatatcacagagactatctcgagtaccgacagaagccagattgagtgccttacgtgctgagttatttcttttgaatagagacttaccggcagaggtggacatccccactttgttaccccccaacaagaaaggaaagttgcataaattggtaacaatcactgctaatgaggcacaagttctgaactctgcagaaaaagttccatatttattgctgatagagtatttgagggatgaatttgactttgacccgacaagcgaaacaaatgaaaggctactaaagaaaatcaatggcaatcaaggcagcttgatatttgatttgaactacatgaaaagaaaagaaaaaagagaggatataaatgaaaatacttctgcaagcataatcatgccaccttcgttacatgataccgatgcaccttacaacgaaacgtctcgtaatggagacttgtccggtacttcaagaaatacgtcagtctctgcggcacgttttaaaactgaagttaataaagaagaagatctaggtgatatgtcaatggtgaaggtccggaacagaactgatgacgaggcatatagaaattctttagtgttacaaagtgccacgagtattcctgtactgtctgccggtagtcaagacagaagtccgcaactaaactttggttcaaacttggatgatatgctcattggaaatggcactggcagcaaaaacattcatagtcaaacggacgctttagccgaccaaatgagggtctcggcggttatgttagcgcaattggacaaatcaccacagcaattatccgaaagtacaaaacaaattcgtgctcaaatcatctcatcaatgaaggaagtacaggataaatttggctatcatgatttggaagctcttcacggaatggcaggtgaacgaaaattagaaaacgatttgatgacaggtggtattgacacgtcatatctgggcgaagactgggccaccaagaaggaaagaatacgtaaaacttccgaatatggtcatttagaaaactgggatctatgctccgtgatcgccaagacaggtgatgatttgagacaggaagcatttgcgtatcagacgatccaagcaatggccaatatttgggttagagaaaaagtcgacgtttgggttaaaagaatgaaaattttaataacaagcgctaatacggggcttgtggaaactattacaaatgctatatccgtgcacagtatcaaaaaggccctaacaaaaaaaatgatcgaagatgcagaactggacgataagggtggtattgcatcattgaatgatcacttccttagagcatttggtaatcctaatggattcaaatataagagagctcaagacaatttcgcctgttcattggctgcatattctgtcatttgctaccttttacaagtcaaagatagacataatggtaacattatgattgataatgaaggtcatgtaagccacattgattttgggtttatgctatcgaattctcccggttcagtgggattcgaagctgcaccatttaaattaacttatgaatatattgaaatcttgggtggaatacaaggagaagcattcaaaaaattcgttgagttaacgaagaaatcgtttaaagctttgaggaagtatgctgatcaaattgtatcaatgtgcgaaatcatgcaaaaagataatatgcaaccttgttttgatgctggcgaacaaaccagtgtacagctacgacaaaggtttcaattagaactgtctgaaaaagaggtcgatgaatttgtggacaactttttgataggcaaatcattaggcagtatttacacgagaatatatgatcaatttcaattgatcactcagggtatatacagttaa

SEQ ID NO: 2107 - DNA, 972 bp, Saccharomyces pastorianus
atgtcttataatccgtatgcgtacactaccggagagcagaacggcgtcaacgaccgctttgctcacactccacaacaccagcaaccgatgcaaatgcccagaaacatgccgatgaacggccaggctaacatcaatgcaaacatgaacgcaaacgtgaacgcaaatgtgaacgcaaacaccaatggtgccggcggctttccgttccaagatacacgtggttcagtggcattccaattggggcagagtgccttttccaactttattggtcaggagaattttaaccagtttcaagagaccgtcaataaagccacggcaaacgccgccggctcccagcagatctccacgtatttccaggtgagcacccgttatgtgttcaataaattgaaactcatcttggtgccctttatcaacggtaccaagaactggcaacggatcatggactctggcaattttttgccaccaagggatgacgtgaactccccagacatgtacatgcctattatggggctggtcacctacattcttatttggaacacacaaaagggtttacaaggctcttttaacccagaggacttgtactacaaactgtcctctacgctgggctttgtcgggctggatttattgattttgaaattgggtctatatcttttgatcgattcgaagattccaagcttcagtctggtggaactgttgtgttacgtcggttacaaatttgttccattgatcctcgcccaactgttaaccaatgtgaccatgccattcaacttgactatcctgataaagttctacttattcatagccttcggcgtattcctactaagatctgtcaagtttaatcttctaggccgctccggtgctggtgaagacgacatacatgtctccgtgagcaaaacaaccgtcaagaagtgcaactatttcttgttcgtctacggcttcatctggcaaaacgtcctcatgtggctaatgggatga

SEQ ID NO: 2108 - DNA, 1440 bp, Saccharomyces pastorianus
atgaatgtcactactcccgaggttgcctttagagattaccagatcaaatgtcttgcatcgtacatctctgctgatccagacattactccgccaaatttaattctgcaaggctacagtggaacaggaaaaacgtatactttaagagaatattttaaagccaatccagacttgcatgcggtttggctggaacctgtcgagttggtttcttggaagcctttactgcaagcaatagcgcgtactgttcagtataagctaaaagtactatacccaaacatcccagctacagactacgatccattacaggttgaagagccatttcttttagtcaaaacattgcataatatttttgctcaatataagtctttgagggaaaaagtttgtctgttcttaatattggatggttttgatagtttacaagatttagacgctgcattgtttaataaatatattaaactacacgaattacttccaaaggactccaaagttgatttgaaatttgtttacaccatgttagagacatcttttttacagagatactccacacattgtattccaaccattatgtttccgaggtatgagatggataaaatttctagtatcctagttatgtctagatgtggtgagctagttgaagactcatgcctgcgtaagcgcattattgaagagcagataacggattgtacagatgaccagtttcaaagtgtagcagcaaacttcatccacttggttgtacaggcgtttcattcttatactggtaatgatgtatttgcattgaatgacctgatcgactttaagtggccagattatgtctctcgcattaccaaggagaacatatttgaaccgctgactctttataaaagtacaatcaaactatttgttggcactgatgatgatttgagtacaaatgaaattgcagagaattccatgaatattaatggggatgagcctaagagcagccaaacgtacgaactatcaataatttccaagtatctgctaatagcttcgtacatttgttcgtatttggagcctagatatgatgcaagtattttttctaggaaaacacgtattatacaaggtagagcagcttatggacgaaggaaaaaaaaagaagtcaacccaagatatttgcaaccttctttgtttgccattgaaagattgctggctatttttcaagctatatttcctatggaaggaaaagccaaaagtggttctctatcggctcttcgtgaggaacctttaatgagagcaaatattgaggtgttccaaaatctgtcagaattgcataccttaaaactaatagctacaaccatgagcaaaaatatcgattatttgagtcctaaagtcagatggaaggtaaatgttccttgggaaattatcaaggaaatatcggaatctgttcaattcgatattagcgattactttagtgatgttcatgaataa

SEQ ID NO: 2109 - DNA, 222 bp, Saccharomyces pastorianus
atggctgatacaaatcattaccaattcaatgtcgtcatgacctgttcgggttgttctagcgcagttaataaggttttgacaagactagagccagacgtttctaagataaatatatcacttgagcagcaatcagtagacgtgtacactacgctttcttacgactttattttagagaaaatcaagaaaactggtaaagaagtgaaatcagggaagcagttgtag

SEQ ID NO: 2110 - DNA, 465 bp, Saccharomyces pastorianus
atgtcccaaaaagcctgttacgtttgtggtaagatcggccatttagccgaagattgtgattctgaaagactatgttacaactgtaacaagccaggtcacgtccaaacagactgtactatgccaagaactgttgagttcaagcaatgttacaactgtggtgaaaccggtcacgtcagaagcgaatgtaccgttcaacgttgtttcaactgtaacggaaccggtcacatctccagagagtgccctgaaccaaagaaggctagcggtagattctccaaggtttcatgctataaatgtggtggtccaaaccatatggctaaggactgtatgaaggaagacggtggtaacggtttgaaatgttacacttgtggtcaagccggccatatgtctagagactgccaaaacgacaagctttgttacaactgtaacgaaactggccatatctcaaaagaatgtccaaaggcttag

SEQ ID NO: 2111 - DNA, 1269 bp, Saccharomyces pastorianus
atgtcatccggtgggactattgatattgttaaccagaaaaccataacttccgaggtagctgcttcggtaacatcgaaatacctggaaagtacgctttcgaagaataacacaagtgatattgaggatgaaaggtttattcacgtcagttcacgttcccattcaaggtttacttccacccctgtaacccccaacgaggttctttctctgaaatttcatgcttcaggctcatcaatggcatacagtagaatggacggctctttgacggtttggttcatcaaagacgcaagtttcgataagtctgtcaaggtttatattccagactgttgtggatctgataaactggccactgatctgtcttggaaccctacttccttgaatcaaatggccattgtgagtaattcatcagagatatccttactgctgatcaatgagataacactgaaagcatctaaattaagaacactatcattaggaagcaaaaccaaagtcaacagctgcctttatgatcctttaggaaattggttactagctgcaaccaaatcggaaaaaatatatctatttaacgttaaggaagaccatcgtcttgttcattctttgaatgttagcgacataagccctaatcctaacgacgttgtatattccatagcatggaataataatggaagtcacatttttgttggctttaagagtggtcatttgatcattttgaaagtaagagacgaaatgctagaaatatctaccaagatcaaagcacatactagttccattactggtatcaaaatagatccgtggggaagatactttgtcactggtagcagtgatgggagctgttatatttggagcctaaagtcactatgttgcgagagaataattcaagatttagactctgccgtagtagcactagacgtgtgtcatttgggtaaaatattaggaatttgtacagaggatgaaatggtgtatttttacgatctcaacgaagctaaactactcgaatccaaatctttagccaaccacaaatctgacctagttttgaaattttatcccgataaatcatggtacattttgtcaggcaagaatgacacattatcaaaccattttgtaaagagcgacaaaaatctaataacatactggaaagatatgtttgatagctcaataattgaaaaacgcaggaagaacaataacagcagtaacaaccacagcaaaagagtcataaaaaatagcgatagaatcgtcaaagacaggccgagtagattcaattctagaaaatag

SEQ ID NO: 2112 - DNA, 840 bp, Saccharomyces pastorianus
atgaaggcaaacttaatgttaaagagaaggctggctactgcaacagccaattccgccttgcccaagatcaaagtcggaatattactatcaagaatccccataattataccaaaaataaatgaactggaaaaacactactacgaataccaatcaaaactggaaaaaagattgatgtggacatttccagcatatttctatttcaagaagggtactgtagcggaacataaatttttatcccaacaaaatgggcccatttctaagaaaggtggtatttggtttcctaaaggtataccggacatcaagcatggcagagaaagaagtaccaagcaggaagttaatctgcctagtagcaatacagcgaaatccgccatagataaaaaagagcataacaaggacgatgttaacagacccgtcattccaaacgataaaataacggaagctgataaatcaaatgatactaagagcctcgaaagacaattaagcagaactttatatcttttagtaaaagataccgaaggtgtttggaaattcccaaactttgacttatctgacgactcaaagcccttacacatcaacgcggaggatggattgagatcgttaggcggtgatcagatacacacttggtccgtttctgctacccccatcggtgttttgaaggacgaccagaatagctcagcagagtttattgtgaaatctcacattttggcagggaagttcgatttgacagccgacaagaatgacacatttaaagactatgcttggttgacaaaggatgaaataaatgaatgcgttccaaaagaatactttagccaaaccgggttccttttagcggataattga

SEQ ID NO: 2113 - DNA, 1740 bp, Saccharomyces pastorianus
atgcagcaggacgacgattttcaaacttttgtagctaccttggaatcattcaaagatttaaaatctggtatttcaggttctcgtattaagaaactaaccacttacgcacttgatcacattgatatcgaatcaaaaatcatatctctgataatagactactcaagactttgccccgactctcataaattaggttctttatatatcattgattcaataggtagagcttacttggacgaaacaagatcaacgaacacgacaagtgcaaacaacaagtccggcacttgtacccatgccataaacacactaggcgaagtaatccaagaactgctatccgatgctatcgcaaagagcaatcaagaccacaaggaaaaaatccgtatgcttttggacatttgggatagatccggcttgtttcaaaagagttatttgaatgccatcaggtcgaaatgttttgccatggacataacaaataacaccaccgctcccccacaacagttgtcatcggaccccaggcagaggtcgaaacagattttgtcgaatttaaaggcaactcctcccttaaacttgaccataaatgtaccaacgagtttaacttccacagatccagctaaacaacaagccgctttattccaactaatagctgccttgcaacagcacttcaatccttcttcttcctcttcttcgtctgcgcccacgaccgttgttccgccatcggaaacacatacaattactgagtacggtagcagacgtgaacgtgaaagagaaagagaaagatacagctccaggaggaatagatcgagatcccctcctccacctcttccccaaccatccgccgctagaaaggaccgctacccatctgtagctcaggaccaatacagtataggcgccccaaatacgacctttggcacaaacaaccatcatttatacccggatgaacttaacgtttccaacaaccctcattatagacccaaacccgtgagctacgactccacattgccaccagatcatatcaaagtgtacagtcgtaccttgttcatcggcggtgtcccacaaaatatgaaagaatgggatttggccaacgtcttaaggcccttcgctgaagtgcaaagcgttattttgaacaattccaggaaacatgcctttgtcaaagtttattcaagacacgaagctgagaacgtcttgcaacattttaataaagatggtgctttgccgttaagaactagatggggggtcggttttggcccaagagactgttgtgattaccagcacggttacagcatcattcccatgcacaggctcacggatgctgataaaaagtggtctgtaagtgcccaatgggggggtacttccggtcaacctctagttactggtattgtattcgaagagcctgatatcatcgtgggcgaaggtgtctcttccaaggcaatctctcaaaagatgcccaccgattccggcagaaacggtcctcgttccgggaaacctaataaatcaggaagcatatcttcattatctcctgtaccttacggcaatgcctccttagcgtctcctccaccacaacaatacgcgcaacctataatgcagcaaccatacggttacccccctacccaaccacttccaccacaaggacctccaccagccgctgtccccgttccccagcaacagcaatttgatcccactgctcagctgaattctttgatgaatatgctaaaccaacaacagcaacaacaacaacaaagctaa

SEQ ID NO: 2114 - DNA, 1248 bp, Saccharomyces pastorianus
atgcctgtgaaaagatctatttccgaaattgaaattcaaagtgttcaagatcatccttccgttgctgtaggtagtttcttcaaaggtttccgtgcccccagtgagacctcgttcgagttatacaaaaacaagaaatctagcaacgacgagtttgtgttgcatggtgagaacgaaaggctagagtacgaaggttcgactgatcccggctctcaagcctccaatcaatatctcgtgggtctatataatccggaaaagaagagtattcaactttacaaggctccagttttggtatccaaagttatctccaagtcaagtaaaaacctaagaggcccaaagattaagagcaagagtgatacacgtccatctgctttgaggaacgccttaggtgaggcatttggtaccaaaaaggctaaaaaggcaattgctgatttggaaagaaatcgtattgattctgacaaattgaccgattccgctattgacattgtcgattccgtgagaactgcatccaaagatctgcccacaagagctcaattggatgaaattacctctaacgatagaccaactccattggccaatatcgatgctactgatgtagaacaaatttacccaattgaaagtataataccaaagagagaattgcaatttatccgtgtttcaccaatcttgaaggagtctgataaagaaaagaaattggaaatgttcccatatcaaaacaattccaagtacgtggcaaagaaattggactctttaacacagccttcacaaatggccaagttgcaacttttatactacttatccctgttattgggtgtatacgacaatagacgagtgaacaataagaccaagctactagagagattaaatagcccacctgaaattttagtggacggcatcttgagcagattcactgtgatcagacctggtcaatttggtagatccaaagatcgctcttatttcattgacccacaaaatgaagacaaaattttatgctatatcctagcaatcattttgcacttggacaacttcatcgttgaaatcactccattagcacatgagctcaatttgaaaccttctaaggtcgtcagcttgtttagagtactcggtgccgttgtcaaaggtgctacagtggcccaagcagaagcctttagtattccaaaaagtactgctgcctcttataagattgccactatgaaggtaccattcaagttacctgaaatgaccagaagaggaagaggtccaagacgttag

SEQ ID NO: 2115 - DNA, 534 bp, Saccharomyces pastorianus
atggggtcaggcgatttgaatttgttgaagtcatggaatcccaaacttatgaaaaacaggaagaaggtctgggagaccgagcaggacctggttaacgagcagcagaagctaaacacccggttgaaggagattgaaaaggagcgtgagctgaatgagctgctacacgcatcgaacaaggaccagccggatgctctcaagactgatttgacgctaaagaagtccggtttggaatggatgtatcaggacgcaaaactgaacgatgaaaaggaggactatttattaggtaaaaagaaactagattcatctatactaaagcagcctgcggccgcaaccgaaaaagctaccgaaagggctgccgctgctgcagccgcacccaagaattcacacaggaaaggctcaacgctgcacagagacgacccaatgagcaagttcaagataacaaagcaacacaggagaacccacaatgcagtaaaggcggcaccgcttcagcgcgggaaaccaccgcccagacctgccgcagacctggactactaa

SEQ ID NO: 2116 - DNA, 327 bp, Saccharomyces pastorianus
atgtccattgagaatctgaaatcatttgatcccttcgccgacacaggagacgacgaaaccgccacttcaaactatattcatattcgtatccagcagagaaatggtagaaagactttaactacagtgcagggtgtgcccgcagagtacgacctgaagagaattctgaaggtgcttaagaaagactttgcgtgtaacggtaacatcgtcaaggaccctgaaatgggtgagattatccagctgcagggtgaccagagagcaaaagtgtgcgagttcatgatcgcccagctcgggttgcaaaagaagaacatcaagattcatgggttttga

SEQ ID NO: 2117 - DNA, 2892 bp, Saccharomyces pastorianus
atgtctagaatagactcagatctgcagaaggcgctgaagaaggcgtgctccgtcgaggagagtgcgcccaagagaaagcacgtacgcgcgtgcatagtgtacacgtgggaccatcagtcggccaaagccgtgttcacgacgctcaagacgctgccgctggccagcgacgaggtgcagctgttcaagatgctgatggtgttgcacaaggtcatccaggggggccacccgtccgcgctggccgaggccatccgtgatagggagtggatccggtcgctgggcagggtgcacccgggcgggtcgtcctacagcaagctgatccgggagtacgtgcggtacctggtcttaaagttggacttccacgcgcaccatcgcgggttcaacaacgggacgtttgagtacgaggaatacgtgtcgctggtctcggtctccgacccggacgaagggtatgaaacgatcctggacttgatgtcgctgcaggactcgctcgatgagttctcgcagatcatctttgcctcgattcagtccgcgaggaggaacacggaatgtaagatatccgccctgatcccgctgatttcggagtcgtacggtatttacaagttcgtcacctcgatgctgagggccatgcacaggcaattgaacgatccggagggcgatgccgcgttacagcccttaaaggagcggtacgagctgcaacacgcgaggatgtttgagttttacgcggattgttcctccatcaagtacctaaccacgctcgtgaccatcccaaagcttcctgtggacgccccggacgtgttcatgatcaacgatgtggacgaatcgaaggaaatcaagtttcaaaaaagggaatccaccccgactccggctcggactccgactccgacgcctcctatgatggagccgtcgctgtccccccgtccggtgtctagcaggaccaccagcacgcccctgggccaattgcagaccatgcagaccggagccacagcggcaatgatgatccccaccgtgactggtgcggccaacgccatcttctcgcaaacgacggcccaaatgcagcccgatttctgggtcaaccagcaggcccagtttgccaacgagcaaaaccgtctcgaacaagagcgtttgcagcaattgcgggaacaacaagcgcagcaggagatgttccagcagcaactgcagaagtcgcaacaggatatgatgaatatgcatttacaagagcagaaccaacaccaaaacgacttaatcgccctcaccagccagtatgaaaaggatcaggcgatgttggagcaatacgaccaaagagtgcagcaactggagggcgaaatcgtgacgatgaactcgaacgcttctaaacaactagccaacaaagacgagcagctatccgctctacaggaccaactggacgtttgggaaagaaaatacgactctttggccaagctgtactcccaattgcgtcaagagcatctaagtctcttgccccgtttcaaaaaactgcaattgaaagtcaatagcgcacaagaatccatccagaaaaaggaacaactagagcaaaggctgaagcaaaaggatttgcagctagccgagctggttaaggaccgtgacagagcaagattagaactggaaagatccaccaataacgcagaggccagcactgcagcggccgcagcggccgcggaaacactttccaccgacaagatgaaccctatcttagatgccatattagaaagcggaatcaacaccatccaggaatcggtgtacaacctcgattctcccttgagttggtccggtccactgacccctccgactttccttttgtctttgttggaaagcgcttctgaaaacgccacggaatttgctacaagcttcaacaacttgatagtggacggcctcatcaacggcgagcagacagaagtcatacgctgtgtgagtgatttcagcacttcgatggcgacactagtgaccaactccaaggcctatgccgtgaccacattaccacaggaacaatcagaccaaattttgatcttggtaaagagatgcgctagagaagcacagtatttcttcgaggacttgatgtctgaacacctgaatcaacttgacgatgaggagaaaacggatattgtcattaatgccaatgtcgacatgcaagagaagctgcaagaactttcattggccattgaaccgctgttgaacatgaaatccgtcaaatcaaacaaagaaacaaacccacattcagaattggttgctactgctgacaaaattgtcaagtcttcgcaacatttacgtgttgacgtccccaaacctttgttatcgttggcactattgattattgatgctgtggttgctttggttaaagctgctattcagtgtcaaaacgaaatcgccaccacaacaagtgttccgctaaaccagttctacttgaaaaatagcaggtggacagaaggtttaatctccgcagcaaaggctgtggccaacgctaccaatgttttgatctctactgcaagcaaattagtcacatctgaaggtaacgagaacacgtcacctgaacaattcatcgttgcctccaaagaagtggcagcctctacaatccaattggtagcagcatcgagagtcaagacttccatccattccaaagctcaagacaaacttgaacactgttccaaggacgtcacggatgcatgcaagggcttgggtaaccatgtcatgagcttgatcgaaaacgatcaatccaaggcacagcaacagcaacctttggaattctcgtccgaacacacattgaagactgccgagatggaacagcaggtggatattttgaagttggagcaatctttgagtaatgccagaaagaggttgggcgaaattagaaggcacgcttactacaaccaggacgatgattaa

SEQ ID NO: 2118 - DNA, 1371 bp, Saccharomyces pastorianus
atgtacaaaaagaatacgagaacaacttgtgggtcttctacaattgcaggtgtttgtttgttagtatgttttctcattgaagaagtccgcggtgatatgggcaatgatatgggcatggatgatacttctgagtatactagcccagatatagtagacgccgggtccaaaacttttcactggctatgcacgctagggtttctgctgcttctgccatctgtgattacttgtctttcattcgctggcaaaatatatattgctacttccctgcaatgtatttgtgccgtctacgcctttttagaggctgctgtccttagattccacgataatgacggggtagaaaatagaacttcaagggggactgcgtggtttttggcaggactgacttggatcgccctattctctggtggacttgccggagggaccagcttcttggtgagaagcaagaagttgcaaactttcatctcaaatacaggcgagacaaggttatcgtatatccatcgtggtttatcctttttgactgtcatcacaggctgggttaaggtatgtttggcaccagtcgctttgttcgggttctgtagagaggcgcacacggggcagtgtattgctcacggtatcatggggtctgcgtttgtattatacgggttcatttatgtgcttgtattgaccattccgtggattcgtaacgctcaggcttcatattcacaagactatattgacagttgggtaatgtgcgcatggggtattgttaacaccttcaccgaacatagatggggacgcgaagaatggagtgtccatgattaccagcatacatttatgggaattatctggtgggctggcggtatacttggaatttttctttctagaaagggtagaagaacattcgtacctagtttaatcattatcttcactggatgggcaatgtctcagcatgctcagcacttgataattagtacaaaagtccataatatgtttggcctgcttttaatgtgtggaggtgctctgaggataatagaaatatccttcctcataaaagataagagaacactgggaaacgtacattcgtttcaatatcttgctcccctttgtctagtatgttcaggtcttttatttatgggcgcgaatgaagaacaattgattttggtattaagacttggtggagatcatagtgcctatgttttattaattctatcaggtgcatttttagtctatttttggatgattacatgcctggagttctacctatatctggtcgaaaaaggacagcaaggcttccttccaaaatcctacgagcttcaagaggaaaacaatcgggttagcttcgagttagataatatttcagacaacgaagatgctggctctttcaatgtctga

SEQ ID NO: 2119 - DNA, 1269 bp, Saccharomyces pastorianus
atgacaggtgacagagaagtttttttgcagttggtgctcaacaatgtcaggactaagaagaacgttccctatgctgaatcgatgatgtatgacgtacccttaccttactacaatggcagtcgcatggagcacctcgagtacttgaggattaacgatagagcagggtcccatgaccattcgatacgaagcgggatgtcgtccaaacatcccgggagcgagtttatgccacagtccattttcgatactgaaagtagtatataccaggaagaaggagatgactctacggagaagtatgatttcaaagtaaatgaaagagatgtagtgctactccaaatgtcatgggacatcctcctcaaagagtatttaactcccgaggaactaaaagtgtttcacacactattatattcaaacaagaacataaattcgacagaaagaccgtatctgaatactaattttgaaggcttaatttccaaaacttcagatcccaccgtcaaatcaagtaaaatcaaaaagagagacaacgatgacaaggttgataccgcgctattttgttcacaattttatgataatctgattgccatggacccattactagaagattatttcccatctttgagacaccaggcagtttcattttgtaaagtccttaattctgctgtcgacaaccttgaagatgtacatgtcttagacagttatattgtaaaactaggaaagcggcattctagaattctcggtatcaaaactgttggttttgaagttatgggtatggcatttatgacaacgttacaagacagattcggatcttttttcacattagagcttaagaatctctggggtcaactttactcttacatggcgaattgtatgatcaaagcggggaaagacccaatggaaaagactaagagctgcgctccaggtcaagatgtttcaaccgttttaaaattaccggttgccaagcttacaacgcatgatacgagtgctatcaacgagctgcatttggtcaagactaaaaatgccactaggcctaacaatataacacaagtaccaaagaacaaacccaatccggaaatagtcatagaaacacttccaaccgcagaaaggaaagatcgtacaggatcatcatcaatctcaccgaagggttccgaaagcacgaagcctagagtcagtagcagcagtgtcgtggagagcagcatcaaaaacagtagttatgagaaaagaattcgcgtaatccaaaaaacagctcagcaaaagaactgttcgatcatgtaa

SEQ ID NO: 2120 - DNA, 2697 bp, Saccharomyces pastorianus
atgccggatagtgtttcagactcaaaatcattggagctgctcaactcttctttttactcatcgaactcaataaacacactcgatcatgctagaacttttagaaattcgttgattttaaaagagatgtcagatcaaagtttaaattcgtcaataaagccaaatgaatcgttttctggtgcaactgaagggagctctgttttgcagcactcatttaaagaaggcttaaccggagactcagaggtgcaaactgttaatatgacaacctcaccctcattaagtgcattggctgatattttaaatgaaaggtcaaaatatgctgatcaaaaaactagaaacgcacaaaatatcgaatcgtctataatcgaagaggaagaggatagcaaagagcaagacaatatgtataaccataaccacaatgtaagcggatccagactcggtataccagaggaggcaagaggaagcctagcaacatcttcacctaatcttattgatattaatggtttcaataatatccaagctgctccttccagctcacactcattcgaagaaccggactttttatctactcccaaggtgaaatcagattttcataagccggtaaagaaagttcatattcaacctacaatcgtagagcaagagaatagtccgccaaccaaacttgaaaatgaaagcacagttcatgcagaaattggaaaatccacacaaaatatacgaccattaaatgaaagttcaaaaccattgcctactccaaagaaactgaaaaacactaaagtacgttcaaaaaaacctcaaccacgaaaatataccgattcatcagcacagagaaccacttcagcaggatctgttcttgaagatacatctgtgcataaaaaaaaaaagagtttcttttctttccttaaaaaaaaagaaccgaaagctacggtcaataacaataacgatatattaaatgggagaagtagaatgtcatcatcgaacaccttttcaatgaaaaatcaacatcccatgaaaacgcctgaaaaactcaaaaaaaaatcgcatagtagtagtagtatttttaattctttcctcaaagggaaaaatgacgcatcagattcacctggaagggaatcaataaggcacaaaaaacacactgaaaaacctgatgaaacaatgcaagacttagaactaacagttgataccaattcgatatcgtctattgaatctcctattttacgaaaaaactttgacgatgctcctgtgaaagcagatattgtaacaaaaccaattgaccaaaggaagctcactcccttaaatatggatattttactgggaaatgaagaacgggagaaaggtgccgcacagaaacaacaaagctcagacagtgttgctagtgatgatgttttaatgccgtccaaggacaactttttgtccttgaactacgaagctccctcaccagcattttcaaagcatgatacaggtgaagttcttttccccaaatttcttgatagtcacgaagtcgactcgatcgtttccttagaaagaacaaggtctacaaagtctaacaagagaagttcaatgaattcacaaagaagatcgctaacagacacattatcgattaaagcacaaagtgaggggatgttcattactgaggcatcttcagttgtattatctaccccagatttaacaaaatcacctgctagtagcattttgaagagtggaaggtttgaatgccaggacagcttttctagggagttttcatacgaagggaacacaaacgaagatcataatgctttcttaaatataaggaatgataataatttatcgaaaaataacgacgtatttttgaattctattgagcaaaaatttgaccaattggtgatggcttctgatgaagagaaaactgaagttgaaaaagatataccgaaagcaaaaatatcgcctgtgaagagtatttccgaaagtcaggatctgtatgtagacgatgatagtgagttgatttctgatataatggaatttgcgagttttattaattttggcgacgatgacatcagtttagatttagatttgggaaccacagaagctccgtataatcctggaaagcctacattactggacaataaaaatgtgagcagtcctgctacgtttgatacaagaaataaccaagagcctactcgcgtgacaagagaaccacagccacatattgctgaagaagaacgatttgctatgtacgaagatgaccaccgagaccagtcagccatctatcaacaagacgacggaataatagacgataacgactttgaagatgcggatttcaataatcatacggacgcacctgtagaggttacgcccagaatcaatgcatatctaccagaatttgaagccaataggcccgtttctatgtctttcaaaggtctgaaagctccaagaatgaactcttcttttattgattccatgacacctaattcacctgcgaaatcagatataacaagtattagtgaaacgaatgctaaagacaatactgacgaaggggttaggttttcgtcacagataattctttacgatacctacggggaatttgaatatgataggcacccagaggtttccacctgtaaccaactaactccgcaattggctcaaatgatcaaattagagttgaatgaattaaagagcgtaatggaggtgcacgacgattcaagatgttacacacacttctattaa

SEQ ID NO: 2121 - DNA, 1125 bp, Saccharomyces pastorianus
atgaaaagtttaagaacattatgtgaaatctcgttgatgagaaatcactccaatatacaatctgtcagtaatgttccctaccatctgctaaaaaaaatactgcaaaaagtcaaaataccgcagctgttgaaactagagaaaagcaacgttttgttgatatttgatgacgatgatctatggctagaaatgctgaagcaagattttccgaccaatgtgcaggaacaatttgtatccaaaagagattccatttgcaaatattatatcactttcataaaggagaatgacatacaactttaccactcggatcaagacctaataaaactctgtatacgacagtcggtggtcaaagacccccggaacaacaagtaccgcataccctacagaatgttatactcgaagtaccagcaggatgtggaaaagaaacaagaagaaagcgcagagaggctgcgatcagaaatgctgaaactaaaacaagaaagagagaaaaagcaaactgtagtagtagaccatactgtttacttccaaagaagaaaccccaggaagaccacgaggtcggacagcgaaccccactcgcaactgtacatgaaatcattgagagatcacgaatccagactaaagcatttcaaagacggcgggttcaacattgcgaaaaggcatgcacagcgtgtagcgtttggcgggaaagctggcggacagccatcgtctccaaagaaggatgcaacgttgtccaggccggaacccgtcaaaacagaccgagaaggggacggtcctacagaagagaagaaagacgctctagttcccgccgcaccgatcaagaagagaaggttcgaattaccgtcgatctttctcaaccgaaaaaaacccgcactacccagggtggcgaccaagatcaacactgcacttcctcgtcccgctccagcatcgattaccaatgatcaccatccccacacaaacaccgcttcctcctctacgtcaactgccaccgctaataccgtgccgaaaggccacaagaagaagaaatcgggcatcttcgtacaaaatgccggtcctgccggaaatactacgccgcacgtgaccgccaacatgcccgctacccggccgtatatccacgatccgcggaaatag

SEQ ID NO: 2122 - DNA, 1749 bp, Saccharomyces pastorianus
atgaccgattttgatctaatgaattttccattcaacgagcatttagactctcctgtttccgatgacactggggagagggacgaacagcagatcccacaaaactggcttaacgagaaccatgttgggaagtctattttgcctttgttcgttaaccctgacgatgttatcaagcgcaacttctccaatgttagagattcttctgaagaaaataaaccaccatctatggatcgcatgaactacgccaggaatacaaatcttcaagaatctcccggattacaagaaagatcacacaatggacgacatcgttccaccaaagtaaccgaaagtcacaaaggagatgtaccgaattttatccattccaccccaagggaagactcttctgcgaagcatttcacgaaagcgaatgagcgtggttcttctcaaacgtccaatgaaaatttatcgcctgacctctccatagaagactgtaacggtgcaactgttccattacaagcttctctatcaaaggaagatcttcagattttggaaagcgttatactcggataccaaaagaggattattgaattaggcaaagagaatttagaaaaagaggaaagatcaaactctttacaaagagaactagatatcgccaagaaattcagtgacaagaactcaaacaatgaaaaaaaactcgaagaaaaaacagtaatgattgaaaatataacggaagagttctcacatacgaaggagttactagaaaaggctaaagatactattcgaacaaaacaaactgcactattgagtcttactgactctcttcgaaatgttgaattgttcacaataccaatcggtatattattttttgaactatatgactctgaggacgcatccttgaatttggatggactattacgggaaaaatatcctaatatcataggatttttacgacagtcacatttagatgagcaaaatcgtatgtcacaacgtttagaaaacgcaaaatcggaaaatagcgatctccaaaatgaattagaaaacaaaaaatcagaaattcaagccataagagaaaaaaataataatttacttggtacaaataagaccctatccaagcaaaataaagttctgtgcgataaatttgagaaattaagcaatgacgaaaaggaaatgttaaaaggttgcaacgaagaaataaaaactaagctagaaagtttaaatgaaagactgggatcatgggagagaaacaaagaaagctatgaggcagcactgaaagataaggaccaaacgataggggagtttgagaagaagacaaatagcatgtcaaaagaactgacccatttaaagtcacgtttgggtaacttagagggaaatacttctgaaaggattactataaaagagattctacaatcaaggtcagatatttctgttgaagaatgtaatcttcttatgatcgaacagattgattcagcatgtctaacagacttacaaaatattgtcaaagaaatcgtacttgctattggaattccctactccaaattacggagaaaaatccccttattagcaattaaactgaaatatgaaagtatattactgtccaactttgcccaacgccttcatagacagatatataatcaagaaatgaatctaaaaaagtttacggatcaggcatactatgaattcatgactacacgtaggattgacaccatagatcaccatttggagagatgcctggatcatctgtatgattatatcttggaaaagatggtcaggtaa

SEQ ID NO: 2123 - DNA, 2289 bp, Saccharomyces pastorianus
atggcgaaaagacacagccattatcaaggaagtagaggcaggcatgcacgtggtggtagtaattccaagagaggtggcaagggaaatgctaaaggtccttcaacgggcaggaacacaaagaaaaagtcagttcctacaaataattggcacaactcgtctgttccactgggaggaggggaccttgctgacctaggtgcggatttcaacccggggagagcgttaatatcttctaagaccatagaggactattattttggtcgcgatgccaagagtcggtctatgagaatgggtggcatgagaccaggccaccgtaatgactcttcaaacaatttacaggaaggcaaagcaacctttcgcaaaagacccatggaatttgtcaaagctaaagaagtctacgatccatctcatgatatggttcaaaaactccaggaaaaaagtcttgctgctcataacagggacctcgctgacacgaaagcaccagctgatgaagaaactacagagcaggtttacaccgcccaagacgtaggcaatgaatacatcagaagcgaagatgatgaaagcccgatatcaccaccgtctttgtcctcactctcctcttccacttctgagattaaagacaccgaacttttctttgtagatgaagaaggccaaaaacgactagattcaaataaaataaaacgggtccgtattgaagaggttctaaaacccaaggaaatcgcagtagagttcaatcctatcttaacaatcggaaaggttgaacttaatgttgcagaaggtgacgaaaatgaagatgttggagttgatgttcctaataaaggtagtaagacatatcacccatttgctgattacatttcaggtgtgatgcaaaatatggaaaacaacgattcaagcgatgatgaacttgcttatgagatagaaactgaaaacagtagcgacgctcagtacgaacgttttgacgatagtgacgtcgaagacgaatcttattttgacgattactatttgaatgctccaaatgatgttagtcttttaccaagtcccagcccgcaattaactcaagatataaaatccctttcgatcaacggcaataaagcgcctgaagaccaagatggcaatgtacaatcacctgtgagtgatgaagtagagttcggattcaaagaagaagactttgttataaatacaaatgacatagtggtcactaatattaggatgggtggagccgataattcatactacttgcaatgttatcgattactgggagattacgattttcattggattgatcaggacctgcttgctgatttcattatagatgacttgggtcttcctgaatatagattatccgcatatttgaattttgtcaaaaactctcttataccaaaagttgaaccacctgagccaacctactctgatatccaaatttccgattccagtgacgaagaagacaaatatgatgaagatttagactcttcaattgtatatagtgatatggaagaggggttgaacgatcttattgcatacacattgaagcatgaccttgatagatccaggacttttgaaagcaagtctttggaaactaagggtaaaggcaagaagaagaagctactgatagatgaatcattggcattggatacagaaacaatgatcacactacaaaataaactaagcaagcgtctagaaaacaaggcaaagaagagaaaagacaaggaggactttattgataaagagaataagaattcagatgatctgttcaagaaatacccatacggtttccatgttcagaatataagggacgaatttgagttatttttgtcaagaaacaaagacaggctcacctttcctccattagatcctcatggaaacaaaacagttatgaaacttgccaaacactataacatgaagacttcaaaaattgggaaagctaatcacacatctgtagtggtcgaaaaagtaaaaaaaacaaaatggtccaccccaagtcataaccttattgaccaattgttaaggcagagaccagtatttatgagaatcgatgtgaaaaggccaagagaagaacaagctgtgtttgaaagaaccaaaacgatcagaggaaaattccaaatcaaagaaggcgagattgttgggaaagacgccccagaaattgggaacgaaaatattggcagaagaatgctggaaaaacttggttggagaagtggagagggtctcggtattcaaggtaataagggtattagcgagcctatctttgccaaaatcaaaaagagcagatcgggtttgaggcacagcgacaattag

SEQ ID NO: 2124 - DNA, 621 bp, Saccharomyces pastorianus
atgtctaatcatcgcaatccaaacttgaaattttgcacagtttgtgcgtcaaacaataatcgttcaatggaatcgcataaagtcctgcaagaagcaggctataatgttagttcttacggaacaggttcagcagtgagactgcctggtctgtcgatagataaacccaacgtgtactcatttggtacaccctataatgatatatataatgatcttttatcacaatctgcagaccgttataaatcgaacggtttattacaaatgctagaccgtaatagaaggctcaaaaaggccccagaaaaatggcaagaaagcacaaaagtctttgattttgtttttacttgcgaagaaagatgttttgatgccgtttgtgaagacttgatgaatagagggggtaaattaaacaaaatagttcatgtcattaatgttgacataaaagatgatgatgaaaatgccaaaattggtagtaaagccatactggagttagctgacatgttcaatgacaaaatagaggagtgcgaaaaaaacgatataccattcgaagattgtataatggacattttaaccgagtggcaaagcggacatccccaactaccgtcattgtatgctccatcatactattga

SEQ ID NO: 2125 - DNA, 2613 bp, Saccharomyces pastorianus
atgagtgaaagactccctaaacagagtggtggaaagaaaccgctaaacaaaaatcagttattaaagagaaatcgtataagaaatgctaggtctattagagcagaagcagtggcggcttcttcctcaaaacacgcatcaccaagtgatttgagtgagtcgggcggtaagctaaaggtggaccaattcatgaactctcgacaattcgaggttaagcagctgcagttggccatgcacaattccaaaggtgcaagctcaacgagaatattccaagcactgccccgtaaactgcgtcgtaggacagcctctcataatgtccgtaggatcccgaaaagaatgcgtaatagggctttaagagaaatgcgtaagagtgatcagcagcaaactttgaagaactcttcggcctcctctaggaaaactcatggcttgaacgcgaaacaattgtatcgagctaagatgtccataaaactactacgattggctagtaaatctacttctatgaagcttggcatgccattagatatcacttcatcaaagtgccatgtgagacaaaagattaaatcactaaaacgtatgatcaaagaatcatcaaatccgaattcgaatataataagactcaataatcgtatgggaagttatgatactaccggccttaatgaattggcatccactccaaagggtagaatcaaatacacgaagagacaaaagcattttgcttggctacccactcacatttggaatgctaaaaggtctcatatgataaaaagatgggggtaccaagtgccatgggcccctacccaaaaatgtttcaaattgactcacagattgggtggtgacacttgcgcctctgatggtgctttatgtcttgattcaagtcatatcggtacaattgttgttagagatagcaatagcgacactaaaggtgagtttttgaagtcaatcattggtaaactaactagtggaagagcaagcttaaacaaataccgccgatctcaaaccttgtttcaagggctgatttacagtttcagtgaaaactcccccaggccactgggaccatgtgatatattctggattcaagacgatactgtggttttaagattacatccttcaattttcacgcaggtctttgaaatctttatacaatacattgataagttaactattcaagattgtcgatactcactggctagtataactttaaagggagccaaagctttagaatctttagcttcctgcttaagaagcaccaagcactgcacatccttcgagcaatttaaagatacatcaaagataactgaccatgcaattttgccacagagatgtacatttgcatttgaagccattgatccacgccatttggctgccccaaaaaaattaaatgattcccagaggaagacatatagctctgatgacattttatcattacaggtaaactaccctcaaagtgaaataaattctgttttaaagcaattatgtgacccagactcacgtacacgatcatacaacaatcaaaacactctaaaagaaatttctgcaagacgttccgaactgttggcctctacaccaaaccacattaacaaaacaacgatcccgtttaaggagaatagtgatccctccatcccgctagttataatgagaaggcccaagacaagcgattggatcgtcatgctgccatggttttggctactaccactatggcaccaactgaacaggataccgagagtttatcacattggtctaaggcagttccaacaaattcagtacgaaaacgaacaactctattttccagatgattatccattcacacagttaggttatgtagaaaattctttttataaaagagaagcctcaaaaacaaagtgggataggaagccaaaggggaaaaaaatcaactttgaaagggttaaggatatacatcacactcaactccctgcatacaagggtgagatcggtgattttttcagctcagattggcgatttttacagatcttgaaaaacggactagactatttacagtgtgatgataaggacttgaagttgatggatagtaagaagactggtcaatttggcgatcaaggaataagaattattaactgtctgaatgatgttttagaatttcacaaggactatgaaactaaggtaacagctgaaccattgccagtcgaggagaacgtacccataacgttatgtaaactttcaaaatgtcaaacacctcctaaaacaattaactccaacacttcttcattagatctatcaatccagccgcgttgtacgattgccatatcttgcagattcttggaacgaggccatcccaaggacaacgctagaatatatcgaatttcagaagagcacttagatcattggatgcaggtggctgagggagtctatcgttccaatggaagaaaagatcacgatctagagattccgctaccagaagtacatgacttgattggatttatcaccagcggcacgtaccatttgaactctggaaacggtatggggattggattcatagaccaccattctgccatccaacagtctgctcgatatgttctcattagaaacgtggggaccaatatctatagattagcaaaatggtcggaaatatctgtatga

SEQ ID NO: 2126 - DNA, 1668 bp, Saccharomyces pastorianus
atgaattgcaaggcggtatccattagtttgttgctactgttgtttgtaacaagagtatatattcaacccacgttttccctgatttcagattgtgatgaaacattcaattattgggaaccactgaatttgttggtacgtggatttggcaagcaaacctgggaatactctcccgaatactctattagatcatgggcgttccttttacctttttatggtattctttatcctatagataaatttactgaactggaaagccactggaacttttttattacaagggcatgtttaggcttttttagtttcatcgtggaattcaaattgcaccgtgaaattgcaagcactttggcattgcagattgcgaacacctggattattttccaattatttaatccaggttggttccatgcatctgtcgaattgttgccatctgctgttgccatgttgttgtatgtaagtgccactacacactctttgcgctatctatcgaccggttctgcttcgaattttacaaaaagtttagcatacaacttcttggccagtatacttggttggccgtttgtcttagtcttgagtgtcccattatgcttacattaccttttccatcatagaataatttctaccattagaacagccttcgattgtagtttaattttttcattaactgccttcgctgtcattgctactgatactatcttttacggaaagcttgctcctgtgtcatggaacatcttattttataatgtcattaatgcaagtgaagaagccggtccgaatattttcggtgttgaaccatggtactactatccattaaatttgattttgaatttcccattgcccgttttacttttagctatcctaggaattttccatttaaggttatggccattatgggcttccttattcgcatggattgcgatctttattcaacagcctcacaaagaagaaagatttctttatccagtttacggtttgataactttgagtgcaagtatagctttctacaaatttttaagttttttcaataagaaaactgttttgaagaagggaataagactatcagtattattgatcgttgcaattcaaggcatgtcacgtattgtcgccttggttaataattatacagctcccttagccgtttatgaacagctctcttccctcaatcaaggtggcgtaaaatcaccagtagtgaacgtatgtactggccgtgaatggtatcactttccaaattccttccttttgccagataaccataggctaaaatttgttaaatctgggttcgatggtcttttgcctggtgatttcccagaaaagggctctattttcaaaaagattagatccgtgccaaagggaatgaacaataaaaacatttacgatgttggcaaggaatggcctcttgctaaatgtgattattttgttgacattgtagcaccaatagacttaaccaaagatgttttcaacccattacatcttacagacaactggaataaactagcatgtgctgcattcattgatgcagaaaattctaagattttaggcagggcgtattatgtaccagaattcatcaaccaaattatgcaaacagttttaccaaaacagtggaatcaagtctatggtgttcgttacattgattattgtttgtttgaaaaaccaaccgaaactatcaactga

SEQ ID NO: 2127 - DNA, 978 bp, Saccharomyces pastorianus
atggatagcaaacgtaaaaaacaggccattacgggtagcacagtattgatttttttggttgcatgctgtctttatacattatatatcttaaaattcgagaatcctaatgtaatcccaccagctcttttgctgcccaccattagtaccttgaagaaaattgagaatgtgattgaccccgaccaacgatacgtattcgttggtgatattcatggcaattacgacgaattcatggaactcatcgatgacaagattggagggctggatgatacgacgatggtattactgggcgatttcatccacaaaggtccggactcagacaaggtggtctcgtacattttaagtcataagaaccaaataaaatgtgttctaggtaaccacgaaatattggttatgatggcctatttgaacccagacttcctaaagtgggaagggagccccaaatttatgacaccattaacgttcagtaccgagaacaagttcataccacaagacatctcgaagattagcgaggcgcacgctcaattggcccactcgcttggcttttccaaattgagccagctggctgaacactgctcagtggctttcgaactggacttaggacttactggcgagaaactgtttggagcacacgcagggatgctaccgggagacttcatgaagcccaatcaaatccccagcgtgggctctctctcgaacatgaagttcgtcgataagaaacattggtcaagaacatcacgtgaaaaggaaaatgatgattacgtcaggtggttcaaattgtgggacaagtatggagaccatttcagcaacgctaaagtattctacgggcacgacgcttccatgggattgaacctacgcgagcagaccaagggcctcgacactgcctgtataaaggaccacttgctttcatccatggaagtgaagtacgatagaaagaaggggcagtacgactataaactaattcaagtcaagtgctcctag

SEQ ID NO: 2128 - DNA, 2490 bp, Saccharomyces pastorianus
atgtccagcccagatgatttcgaaactgcaccagctgagtttgttgatgctttggatccgagcatggtcgccgctgataatgatcctaccccaatctctgcgccatcggattctgccgctgatgtgaaaactagtcaagacgtagagaacactgcggctatcgaggataaagctaccgagacggagggccaggtagagagagaggagaaggtcggtgataccactgaaactgttttggcgaccgccacatctgctgttgttgatgccgccggtgccgatattccagaaacgacaacttcggctgctgctgacgttgatgctgacgttgatgctgaagctgacgttgatgctgatgctgccgctacagacgagaagaaggaacaagaaaatgcccctcctctgctgcacatgaagttctacctcaatcgtgacgcggatgcgcatgattctttaaatgacgtagatcaattggcgcgtctgatcaaggcaaatggtggtgaagtattggacaccaggccaagagaatcaaaggagaacgttttcattgtatccccttacaatcataccaacctaccaacggtgaccccaacctatatcaaggcctgttgtcaaagcaactcgttgctaaacatggaaaattacttggtcccttacgataactttagagaagtcgtcgatagcaggttacaggacgagccccagtctagtggcagaaccgacagtaacagcaacgatcctactgtgcccaaaactgaaagagtctctgaaaatgctgacaattccgccgaagaatcaagcaagaacaaggtaatggtggacgcggagcaacaggctaggctgcaagaacaagcacaattacttcgccaacacgtaagtagtagcacatcaatgagaggcgacggtaatagtgacttggttcaaatcgaacagcctcagacagacgcctcgaataataataatgttgacgatggagacaacgatttagcgacacaagataacaatgtacagggagatgatgagggcagtgcatccttccaagcacaaagacccatgatgtcaagaggcactttgccctctcataacaaagcttcttttactgacgaagaagacgagtttattttggatgttgtgaggaaaaatccaaccagacgtactactcataccctctatgatgagatatctcattatgtgcccaatcacacaggaaattccattagacataggtttagggtctatctttcgaaaaggttggagtatgtttacgaggttgacaaatttggtaaattggttagagatgacgacggcaatctaatcaagactaaggttttgccaccatcaatcaaaaggaaattctccgcagatgaagattatactttggcaattgcagtgaaaaagcagttttatcgtgatttgtttcaaatagaccctgatacaggaagatcactaatcacagatgaagacacgcccaccgctattgcaagaaggaatatgacaatggacccaaatcacgttccaggaaatgaacccaattttgcagcttacaggacacaaagccgtagagggcccatagcacgagaatttttcaagcattttgctgaagagcacgcgactcacactgagaatgcttggagagacagattcagaaaatttttacttgcttatggtatcgatgattatattagctattatgaagctgaaaaggctcaaaatagagaacctgagccaatgaagaacttaaccaatagacccaagaggccaggcgtgcccacccctggcaactataactctgcagccaaaagagcaaggacttatggcactcaaagaaatgctcagcctacagccaatgctgcttccgccaatgctgctgccgctgccgctgccgctgcttccaattcttatgctataccagaaaacgaactactagatgaagataccatgaatttcatttctagtctgaaaaacgatttatctaacatttcaaacagtctgccctttgagtatccacatgaaattgcagaggcaattagaagtgacttttcgaatgaagatatatatgataacatcgatcccgatacaataagcttcccacccaaaatcgcaactaccgaccttttcttgccgttatttttccatttcggtaatacaagacagttcatggacaagcttcacgatgttatctcaggagattatgaaccttcgcaagctgaaaagttagtacaggatctttgtgatgaaaccggtatacgtaaaaatttcagcacaagcatattgacttgtttatccggagacttgatggtctttccccgttatttcttaaacatgttcaaagataacgtcaatccgccgcctcatgtcccgggtatttggacgcatgaagatgatgaatcactaaaatcgaacgatcaagaacaactaagaaaactggttaaaaaacatggtactggcagaatggaaatgaggaaaagattttttgagaaggacctcttataa

SEQ ID NO: 2129 - DNA, 969 bp, Saccharomyces pastorianus
atggacagcgaagcaagtgatatagacatagaaatatctgacagtatctctgttggaggtgaagaatatatagaggacgatgatgaatatacagaagattttgacgatcggatagttgcaagtaaatcatctaaacgtgcagcacgtaaaagagaaccaaaaggggtaagagcgtcgaaacggatcagggacaaagaactcactgacgaggttgatgaggaatttgacgaggatgaggaagtgctaagcccttccaagaaacgtcatttacacaccaggtcaatggataaaagaaaggttggtactgctgtgtttgaaagttctgatattgaggatactaaaaccaatgacgacgtaatggatgaaagcaatacagaagaagaagaggaaggtttagaagaagtgctaaatggagatgaagataaggagattgccgagaaaggtgaagacatagattacaatcaaagtggcaacgagccaaaaaaggaagaacaagacatgggatctggagactatgaagataacgaggtcaatattagcaaggaatcagacgaaatggagtctgttatgaacggtaatggaaatgaagaggacgaagaagttgaggcgaccaaggaaagcacaacagactctactaggagtactacaactcgaagtaagatgttgatggatttattggaggatggtggctctaaaaagaagttaacagatgaagagattcaattaagaagagctgaaaatgctcgtaaacggaagaacctgagtgagaagagattagaagaagagaagcaagacacaataaataagctcttgaagaaaagggccggtaaatctagaagtcatctgccgaacgaggatgataaaaatgatggctcatcaagttttgtaaagccgcgtaggccttataatagcgacggtatgacaagaattttaaggaattacaaggaagatgtattttgtaccttttag

SEQ ID NO: 2130 - DNA, 645 bp, Saccharomyces pastorianus
atgaatattctgcgaatggcatgtcgttcctttcattgcctgcgctgcggctcactgctcaatgagaataagggaacatcattcaaggcaattgtcaagttgatcaataaatcgagtttatccaacaaggaatttgaagaaaaagtgcgagatggcgctaaggagatacctgagtggaagaaacagaaaatggcagtcaggaaaaaaattcaaggccaaagatggaacccatcaaaaaagatatctcaggagcaaatggaggctttgaggctattgaaatcaaactttcccgagatgacagcatctgattttgcggagcggttcaagatttctcctgaagccgttagaagaattttgaagtctaattggaagcgtagtgatgacgagaataaaaacgcacacgagagatggaagaggagaggagagagaataaaagaaatgtatgacaaaaatgagggcgctgactttccatcccaccagatcataagtggcaaaaaacttattgttagttccaatccaaacgcatctgaactaatagcaaaaaatgtccacactactagaaattttaaacataataatgatagacctgaaaagaaaaacaccaacaagctgtaccttttaaagcatttatcctcaagacagtaa

SEQ ID NO: 2131 - DNA, 2346 bp, Saccharomyces pastorianus
atgaacattttgaagaagtttatggattccgggaacaggccagagctcattaccataccttcagggcagtttaatcttttgaggtcaaagagttcacctaaagctgctttagaatgtatctacaataattctattctaagtgttcgcaaagttggcaggtttgattacgaattggctgtttatagggtagaagatgataatgaagctggtacaggagatgagtctgagaattttgaggatgacagtatcagtgttttatccacacaatctaaaaaaaaggaagaggagtggagctttgaaataacggataaaattatgtttcacaagacctgggatgaacaaggaaacatagcgctcgtatgggagaatttggttggtgatgagcaagatgaaaaggttcaatttgttgttgctactgatgtttcgatgtctgatgtggagcaatttatacaaactgtttaccggtgtcaatacgaagtaagatataaaaaatcctctttcactgcttcagcagatgacttgaagcagatagaacacaaatcggcaagtctatttgttcaagatgaggatgggacagactcaagttcagacgattttcaagatgctaatgacttatattttgaacaaaaagaagaccatgacttactggcaagaaccccttctccattgaggagggtacctgaaggaaaaaatctgtgcttaatcatgtctggtttatacgtttatgatccgattcaagaaatgtttgttttacaggatcctgcggttaaagtagcgattatcgacactgggaaatacgagttttggctggctatagaaggtaaagatacccgtctgggcacccaagttgctccgaatatcaaccctacctttgaactggcaacagatgcatttcttttcaattatacactacaaaatattactctgtcctacatgttgaagttcaagaacttggataaatgtattcaattcagatctgtttgggtagaatgtctgtggatgtctttgaacaaagaaacctggaaggatcttcctgatagggagagagattatattttagattcatcgtctgtaccattggaaaagcagtttgatgatattttacacttgggtgagagtcctaacgaaaaaaggaacgaagaatcaagtgaaagtgaaagtgaaagtgaagacgaagtggacggaaaagagcactccaaaagaattgtttcctctgaagcctttgaagaaccaaaacgtgcaacttcaaagggtaatagctctttaacaattgctttcagaaataatagatcgtatgttacaagagacaacaaaattggtgtattcaaaacagatgatgatgatgatttattagaattcgttactgccatcaaaaatgtttctgatttgggcggtaaaagtattgatcctcataatccaatgctgtatatggaagatcgtaacctgatcctaactgacggtcagaatgaaaataggctctacaagatggatatagaaagaggaaaggtggtagaagaatggactacaggtgacaagaatgttgttcaatacggtccggccaagaaattcgaccaaatgacaccagaacagacaattgtgggtgtttcacaaaaaggcgttttcaaaatagatcctagaattagtggaaagaataaaatagtcgccgatcagtccaaagactatgtcgggaagtataactttagttccatcggaaccacagagggtggttatatcgccatcggctcagaaaagggtgatataaaactgtatgataggttgggtattagagcaaagaccgctataccttcactcagccaagcggttaagtatatcactatatcagctgatggcaaatggttgttagcgacttgcgagagttctttgcttttaatggatctagaaatcaaggagggcaaaaatgctggtaacattggattcttgaagtcattccctgcaagtgaaaatgtcaaaacgtatgttctgaaaatacgaccggaacattcagcatccatattgacatacacaaagaaacccattagctttacgaaggcttcctttaacaccggtataggccaaagggaacaaacgattgttacctcgacaggcccatatgcaatttcttggtcgttaaaagctattctcgaacaagatggtagtagaaattatccatacagaattcgtagatacaacggcgacgtcgttgctgataatttcgaatttggttcggataaaaaggtgatagttgctttgaaagatgacgtttctttatcgaaagtgaaatccttcaaacagccgagcaagggtgtcttgatgccaaattcctctctccaagatttttatggctga

SEQ ID NO: 2132 - DNA, 1296 bp, Saccharomyces pastorianus
atgaaattggatacatctcatatgagatatttgacgacggatgactttcgtgtcctacaagccgtcgaacaaggctctaaaagtcatgaagttgtcccaactctcatgattcaccagatctcaggaatgaggtcacaatcgggtacaaacagggccatcagtgatttggccaagctaagcttaatctccaaaatgagaaatatcaaatacgacggttataggctaacatacaacggtatcgattacttggccttgaaaacaatgctgaacaggaatactgtttattccgtcggtaacacgattggtgttggtaaggaatctgacatttataaagttagtgataaggacgggaatccgagagtgataaagattcacagattgggtagaacctccttccatactgtcaggaacaatagagattacttgaggaaatctaatcaaggtgcgaactggatgcatctttcgcgcttagccgctaataaagaatatcagtttatgtcaatgctatattcaaaaggattcaaaatccctgaaccattcgataattctcgccacattgttgtgatggagctgatcaatggtttcccaatgagaagattaagaaaacataaaaatatacccaaactttatagcgatctaatgtgttttattgttcagctaggtaatagtgggctcattcattgtgatttcaacgagttcaatgttatgattaaagatgaattggaagacgaaaatgactgtgggtttgtggttattgatttcccacaatgtgtatctattcaacaccaagacgccgactactattttcaaagagacgttgattgtattcgccgttttttcaaaaagaaattgaagtatgaaccaaaaccagactcatcaatgctcgatacagacggtttcggagatggttacaaatacgcctatcccgaatttaaaagagatatcagaagaaccgacaatttggatgagttagttcaggcttccggatttagcaagaaacatccaggtgataggagtttagaagatgcagttgaaagcatgaggaacgctgcttataactcagatgacgaagcagaagtagaggacgaagtagatgcagaagcagaagacgaggaggatgagggtgatgattcagaggaggaggaggaatattatgattccgaatctggtgatgacagttctgatgatgatagcggagattcgcaagaagaagaaaatgaacgtattatagaggcgctttctagcggtgttggaaacctgaaaatggataaattaggaaactatttactagaatag

SEQ ID NO: 2133 - DNA, 1392 bp, Saccharomyces pastorianus
  modified_base (962)..(962): a, c, g, t, unknown, or other
atgtcgaaatcttttctagaccatttgccggagcctcttagcgagaaaattggccttgtcgtgagggcattgccgagctcattagaaacattcgaagaattgtataattatgcattggatgaaactagcaaccgcaaaaagggacagcataaaaagcccaagttgcatagctctccagatgaacttaaaatagatgtgatttcagaggcaaacaccattttcaaattagaaggtgtttctgtactgtcaccactaaggaaaaaacttgatttggttttctatctttctaatattgatggatctccagtaataacgttcctaaaaggaaacgatagagaactgaccatttgccaactaaacagcaacattaagatggcttctttcttgccagtgccagaaaaacccaatctaatataccttttcatgacatatacggcatgtgcagacaacaaattttctgatcctgtgttaatgactttaaataaagagaacacactgaatcaattcaagaagttaggacttctcgactacaatgcaatagatttcgataagtgcgttgagtacatgaggaaacaagcgatcttgacaggtttcaaaatctcaaacccatttatcaacactaatgcggccgatacagaactgataagctcattccacgtggaatgtcatagaggtactaaggaaggtacattatatttcctacccgataatataatattcgggtttaaaaagcctatcctattgtttgacgcttcagatatcgaatctataacatattcatccatcactagattgacattcaacgccactttagtaacaaaggatggtgaaaagtacgaattttcgatgatagatcaaacagagtatgccaaaattgacgattacgttaaaaggaaacaaatgaaggataaatcgatgtctgaggaattaaaggctaaatctaaaaataaagctcagcagcntactgatggtgaaaccgaccagccatctatcttacaagaagccactcgtcaaatgcaagatgaaaaaaagacagaaattttctccgatgacgatgaggaaaatgatcaaaattttgaagctgaaagtgatctttccgatggtagtggccaagaattctcagatggcgcagaggatggaacggaagctgaagaggaagaggaagaagaagaggaagaggaagaggagggagatgataaccatgaggacgacaacggcaacgaaagagaacgcactgcgtctcacactgataataacactatgcttataaataatgaagtgggtcaggaacttcaatataaagaattcaaagaaaccttagagctcgaggacattcccatcgaaattgacaacgatgatgaggaggagggatcaggcgtagaatacgattga

SEQ ID NO: 2134 - DNA, 741 bp, Saccharomyces pastorianus
atgtcagcgttgaaagtcgtttcttccaagcttgcagctgagatcgacaaggagctgatgggccctcaaatcggattcactttacagcaattaatggaattggctgggtttagtgttgcacaggctgtatgccgccaatttcctttgaaggacaagactgaagcagagaagggcaaacacgtattcgttattgctggacctggtaataatggcggggatggtcttgtatgtgcaagacatttaaagctttttggctataaccctattgtttactaccctaagaggagtgagcgcactgaattctataagcaactggttcaccagttaaatttcttcaaggtccctgtattgtcacaagatgaggaaaattggctcgaatacttaaagccagaaaagaccttgtgtattgtggacgcaatctttggctttagttacaaacctccaatgagagagccattcaggagtatcgttgaagaactgtgtaaattacaagaccgtattcccattgtttctgtagatgtccccacaggttgggacgtggataagggtccaatctcacagcctgcaataaaccctgcggttcttgtatctctaactgttcccaaaccgtgcagcacatacatcagagagaagcacacagctcattacgtgggaggaagattcattcctcgagattttgccaacaaatacggatttgagcctttcggttacgagtccactgaccagatattgaagctgtaa

SEQ ID NO: 2135 - DNA, 1074 bp, Saccharomyces pastorianus
atgtgtagatttttgattttcaaaggtaaacagccaatccggctttctcaccttttaacgagaccagctcattctattataaaccaatcatttgacagtagattacgtttagatagaagaagaccaatgaatggtgacggatttggtgtagcatactacccactagacaacgaactgagcgaagacggcccatgtcttttcaaagctatcacgccggcatggaacaatcaaaatctaagtacactagcagaaaagacgaaatctgatttagtctttgcccacgtaagggcctccacatacggtgttttgtctgaaacaaattgccatccgtttacgtatcacagcttatgttttatgcataatggtggtatatccaatttcaaaggaatcaagagaaaattattgaatcacattaaggacgaatacctcaattttatccagggaagtacagattccgagtgtgcatttgcattgtttttggatacgctagacaaattaggccatgatccgaagaaacaagagggcgattttggtaacgtcgctcttaggaaggcaatgctacaaaccattgactatatcagggattggaccaaagaagccaacaagaatgaagtgcatgtggatccatctttattgaactttgctgtaacagatggatctaccgtcattgtttccagatatataacatccaagactgacgaggcagcatccttacatttcagctgtggttccagttttgtagagacctcaccaggggaatacagagtagagaggctagacagaaatcaagatgtgattatggttgcatcagaaccattgacattcgaaagaggagattggaccgccctacccaccaatagcatattgaccatcaagaaacagacaatattgttgcatcccattatcgacgaatattaccaagaagacccactatacttaagaagctccacgctggcagaaagcaaagggcttatgggttctataccgctcgcaaaggctgtggaaagaaatgttcctccgttagagagagaaggccgtacaagacctccaactgctgccgcacacatagcataa

SEQ ID NO: 2136 - DNA, 603 bp, Saccharomyces pastorianus
atgaagttttcctcagttaccgctattgctctagctactgttgccactgttgccatagctaagaagggtgaacatgattttactactaccctgactttgtcccaggatggtactttgctcaccaccacttctactcatactactcataagtatggtaagttcaacaagacttccaagactaagactcaccgtactggtactcacaagtatggtaagttcaacaagacttccaagactaagactcaccgtactggtactcacaagtacggtaagttcaacaagacttccaagactaagactcaccgcactggtactcacaagtacggtaagttcaacaagacttccaagactaaaacccaccgcactggtactcacaagtacggtaagttcaacaagacttcaaagtccaagactcctaaccacactggtacccacaagtatggtaagtttaacaagaccaaacatcaccacaccacttatggcgtgaacgataaggctgccgtgaataacgctgccgctggtccatccaacttcaactccatgaagttattcggtgttaccgctggtagcgctgccattgccggcgccttattattgttataa

SEQ ID NO: 2137 - DNA, 2391 bp, Saccharomyces pastorianus
atgactactcaagaatcgatcaagcctttggtcgacagaatcttatcgaaccctctgcagtttagtgctgcaatgatctctaagaaatcaaagaataataataataatggtactaccgccgcgccgcaaaatagctcgtacatcgtgatagggaagcagcataataatagcagttctggcggcaccactattgcaacttctaatggcggccaagcacaactcgatgggtcgatggaaaagtctaaaaatgaaaacaagcctgatgccgctcccaaatcgatggccgaagctttgttactatatacttctaagaatagtaacagcggtaataatgttgccgctgtgaaaaggccagcggagctttctacggagctttctacggaacctcccacttctgcttctgcctcggaagatgagaaagaagttgagaaggaagacgagaaagaagaacaggtccatgaagaagaaggagaaggagaagaaggagaaggagaggtatttcacgaggcaagggattatctagagcctgaaaatgcccacataaacgatgacgaagacatcggtgaagacatcggtgaagattttggtttgcctgtcgctaccgttgatggagaagaggaaaagggtacgctttctggcaccaatgaagcggacgatgatgatgaagacatggattatgatcccactgccatggagaaggagctccctgaagaagaagaagaagaagaagaaggaggagaaagcgattctagctctgcaatttccgaagatgagaaaaaggatctacgcaaagacttgatagaggctaatacagaaaacgtaaagcaaggcgaaacgcaaaacaacgacgcggaagcaagtaagatcgtaactccaaaaggagaacaagaagaggaagaggaagaggaagaggaagaagaagaggaagaggaagaagaagaagaattaaaacataaaccaagatcagttaccccaccaactacgatatcagatctgtcgaacttttaccaattcaatgaaaatatcaacgatcacgggtccttgaattctagtaaaatcatcaagaattggggtgaccaattcactactttaaaacctcgtggcctattaaaccatggtgttacttgttatacaaatgccgcagtgcaagccatgttacatatcccttccattcaacattatctgtttgacattcttttaggaaagtacgacagcaccatctcaaaaagctctgtttcctacactctagccgaaacgagcaagaaaatgtggtcaccgatcttgaaaaatcctaaaaaaagcccttcagcctcttacatcaatccgaaatatttgatatccagactagatgatatcaactgtatgatgagcgaatggcagcaggaagattctcatgaatatttcatgtcgctgatgtcaagattacaagaagattccgtccccaaggggcataagctaatagaatcgataatctatgacatatttggcggtcttttaaagcaaatcgtcacttgcaaatcttgcggcagtatatccaaaacggaacaacccttttacgatctatcgttgcatttgaagggtaagaaaaagctggattcagattcagatttgttggatggtagcagtaataatgcttccaccgccagctctacttccaacgccaccactgcacaatcatcagcctcttctgctgctcccaatttgaataccactactccaggctctgcagccggcaatttaagttcagtcaatcgtaggttctccattgagaagtcaatcagagatttcttcaatcctgaattgattaaggttgacaaggaacaaaagggttatgtttgtgaaaaatgtcacaagactacaaacgctgtcaagcacaactcgatcataagagcaccagagactttacttgtacatttgaaaaaatttagatttaacggtacttcgtcatccaagatgaagcaagccgtttcatatccgatgtttttagatttaacagaatactgtgacgataaagatttacctgtcaagtaccaactattaagcgtggtcgtccatgaaggtcgttctctctcttccggtcattatattgcccactgtaaacaaccagagggtacttgggctacttacgatgatgaatatattaataaaatttctgaaagagacgtgctgaaagagcctaacgcctattatctcttgtatacgaggctaactcccaaggtgatttcgttgccactagcaaagtctacaatgacggccgacaatattacttcgtccaaatccaaacaagaacaagcatccagcgaatcaaataaacgtccattaaagattaacagtaagaaagataaccggaaaaaatggaaaaagaataagaaaaggaagttttctaaataa

SEQ ID NO: 2138 - DNA, 477 bp, Saccharomyces pastorianus
atgtcacaggcagccaaaaacgtaatagtgaagctgatagtaggagcaggtcaagcagcaccatcaccacccgtagggccggcgctgggttccaaaggtataaaagcgattgacttctgtaaggaattcaatgcaagatcggcaaattatcaaccaggcgtgccagttcccgtactaattacgataaaaccagataggacgttcacatttgaaatgaaatctccacccaccggttatttattattaaaggctcttaagttggagaaggggcacggacaacctaacgtaagtacgacattaaccggtgctcccgttaagggaccacctcgtattttgggagaactatcgttgaaacatgtttacgaaatagccaagataaaaaagagtgatgaaatgcatagcctgttggagatggaaggtatcgttaagtcaataatcggtgttgcgaaaagtatgggcatcaaaatcatgccttga

SEQ ID NO: 2139 - DNA, 1224 bp, Saccharomyces pastorianus
atgcctttgaatattattggaacagcccttttagatggaactgataaaattccttactttcagacgattaaaaaggtggcgccttatgtattaggggcaagtgccatcaaatactggtcaagaggaccatcgaatacatgggaaagaaagctgcatggcaaagtgtatttggttactggagctacttctcaaggaatggggacatctgtggcctttaaaatggcagaattaggcgcacagctaattattttgaccagagaagtggatgaatgggtcacagagtggtgtgaagacttacgtgaaaagacaaacaacgagctaattttcgtagagaaatgtgacctgagtaatttgtgggaaattcgtaaatttgccacaagttggttagataattcgccacccagaaggttagatggtgttattgtcatgtctggtgatatggagccttggggtgttcccaaaatatctctaccgaaaagaagatcttccaaggatgggttggagttacaaatagctacgaattatgcggctatttttcatcttttaaatttgctgcaacctagttttaaggctcaaccacctgatagagacgtaagaattatccttgcgacatgctggttgcaagttgttggagatattaatgtggaagaccccttatggcaaaatgccaagtataaaagtgctttgaaatttttcgcaagcagcaagttacagttgggattaagcatgatggagttgcaaaggagaattactgcagacattcaaaagcaaaagactgatggtgtcgaaagaacaggtaaaaatgttacaatcaccatggtgcaaccaggaacaatgagatccaatagtttacgtcgtgtcattagtaatgggtcagtgattttattgatggtattatattgtattttactataccctatattgtggttatttaccaagagcggtcgtcgtggtgatcaaagttttttgtatgcattaatgaccccagaactggaagagataaatctaaaggatacgaaggccaagtacatttcagactgctcaattgtaaaattcgctcggaaaaaatttgatgatgaggaattacagaaaaagttatttgagaatactgaaagagatatattacaactagagaaaaaaattgcagcgaagaggaatgctgatggaaagagaggaaatgatgctaaaaagaaaaaacaaacgaagagcaagaaagatgattag

SEQ ID NO: 2140 - DNA, 996 bp, Saccharomyces pastorianus
atgaggtccatcaagtgcgtaataattggtgatggtgcagtgggtaaaacatctcttctgatatcgtataccaccaattctttccccaccgactatgttccaacagtttttgataactattccaccactatagctattcctaccgcaactacagatagccccttagagcctggaagcgataatactaagggagaatcattttcgtcttcaaattccttaccaagtacagaaagaaaactatttaagatcaatttatggggcactgcaggacaggaagattacgatcgtttaagaccgttatgttaccctcaaactgatattttcttaatatgtttttctgtaagtgaacatgctagttttgctaatgtcactgaaaaatggttacctgaacttaagcaaacttctaatattgaaaacctttctctcttcaccaaattaaagaagtatccgatactattagtaggtaccaaggctgatctcagagatgatcctgtaactcagaaaaaactacaagaaacaaattctgattatgtatcccaggaggaaatagataaagtcgtgcaagagtacggatttatgggatatacggaatgttctgctgctactcaagctggtgtccgagaggtttttgaacacgcagtgagatatgccatttacgagccggaatccaatctgcagaaatcagtaaaagagaccaccaccgatgaactaacgaccgccacaactaataacaacaaggacaagattatgcaagaacaaaaaccacatccacatcccaataatagtacagatagcacactttccaaggacaattcacaacaggaaaaagaagcccttaattataagccgactaaaaaacaacataaagacaaaactcacgaacaggttaaatccaaaggcaccaagatggccacaaagacgcattgtaataaacaaaccaaatcaaaggtaagaaacgagaagaagaagaagaattcaaaatgcgtaattctttaa

SEQ ID NO: 2141 - DNA, 1791 bp, Saccharomyces pastorianus
atgagctctaatagtaccatcgggacggacaccattgatcagtcaggtacgtcatcactgtccatcagtggccagaccagcagtctaatttccccatcgacctatgtctcatccacgccttcttcgactttgacaccccagcaaggaagtctaacatcattgccaccggtatccagtacttctgtctctacattccgcacctcaaatacggtttctgatgaaagcttgtattcgtctttttccgtatcttcaacgtacactttgatatcatcttctattagtggtcaatctagcgggcaacagatggaaagttcacagtatggaccaaccactacttcattctctgtcatcacgccatccttatcgattctttcgtcatctttatcaccatcatcttcattatattctgcctccgcaaaatcatcgcttgatagcgtttctacgtctttctccacgtcaacaccttctgcaatatctcccagtttcacttctctatcttctgcgtacacaggttcctcggaatttaccagtaccccgcaaaccacatcaacggagtcttcggcaatatttacatcttcgccaacatccaatgaagacattacatcttcatattcctatcggattacatccacattgatgtactcttccctgttttcatcagctactaattcctccactaaaagcgaatcctcagagtcgaattcaaaggccccatcatcgacggtctcggacacttttcagagtaccacatcagtcacacatatgccaaagctagtttcgagtcatactactagttcgacttctacttcaagccgtctttcatcttcatcagatgcttccacaagtgcatttgagaactcttctttgagcgataacacatattcttccaaacaaacaacctatacttctagtagtagcgtgccaatgacaactcctccacctaccaccactacgacttctacaacttcaccgacatcatccagtcaaacgtatagcataggggtcgtatcaagctcagaagactcacaaaccatctattatttttatacccaagcatacgatattactggctcttctacaacatttgcaacagggttgcctactacggttgctcttgccaaaagtgcagtaagctcattttctgttccatcttcaaccattactgcagatatgtctttctaccagcactggctgaacggtggtttagacgacaatcaaaatcaagggacatcaaagtcaaatactggtactattgtaggaagtatagtgggcagtattggtggtattcttgtatgcgcggtgatagtttggtttttgttgttcagaaaaagaaaaggcaagagagagttaaaggaaaacagttctttctgtcatgaaatagggcgcagaacgggatttcccacgactgctcaagcaagggagacatcagttcatgcccaggactctggtgctcaacaaacaaatatggacagtaattctaccaataacccatttagcaatgaattcaactttaaggccaggtgtgctactgcagtaccaccatcaagaaatggtgtcaccctcgacaacccttcccaaaccattcgcaatgattcaatgaactcaaacaacaggttttcgtatgtctcttcatttacgtattcatctctcggttcatctactcagggcggtttttctgctttatcttcaaattcgataaatctcgggcctggcttaaataacaatgtctcgaatgatgaaagagcttctgctcgagatacttcacaagggttcttaagagaaataatatga

SEQ ID NO: 2142 - DNA, 1212 bp, Saccharomyces pastorianus
atgtcagaaatcgaagtcccaagcgaacaaattgtatccaataacaaaaacgaggaacagattaaaaaagctttgctcgacccaaccaaaaagagaaaagctgaagatgaaatcgaaatcgacttggagagctctattcctttatccaagaaacaaaaacgtctcttaagaaggggaaagattaccttggaagagttgaacgcgaagtacaacatcgatcctaagtccgttcaagaatataaagaggacgctgaaaagaaaaaatctggtgatgttaagaaagatgcccaagatggtgaatccaaaacagatgttacagtagaaaccgcatccgatgatgctgcaacgaagaaaaaaaaagaagaaagcaaatatggtgtttggattggtaatttatctttcgacactacaaaagatgatttagtcagatttttcatttccaagacgagagacaatgaagacgaaaaaagcagagtcattcaagaagatataactagattgtccatgccccgtgttgcttctaagaactccaactctatgcaaaacaaagggttctgctacatgttcttcaagaaggtggagcaaatgaaagcggtcttagaattatctgaatctcatttgaatgggagaaatatgctaatcaaggactctgagaacttttcgggcagaccggataaggaagatttcgtcgccatgtccaaaaacccaccctcaagaattctattcgtgggtaatttgtcatttgatgtcaccgatgatttgctaagaaaacattttcaacattgcggtgatattgtgaagatccgtatggcaacattcgaggatagtggtaaatgtaaagggttcgcgtttatcgatttcaagaatgaagaaggctccactaatgcgttgaaggataaaagctgtagaaagatcgcgggaagaccattaagaatggaatacggtgaagacagaagtaagagacaagtgcgtaagaaggttgaaaacgtcactcatgacaaaccccgttcgtttgacatctccaacaacagagaatacgatcgtccaagacaggatagcggtaataaacccgagtacaaaaggtctaacgctaataggcgtccacccgtggattccaataaccgtactaagagtagtgtggcattggctaccgctcaaagaggatctgcagctattgtaccatctcaaggtaagaaaatgaagtttgactag

SEQ ID NO: 2143 - DNA, 1113 bp, Saccharomyces pastorianus
atgcagtcaggcctacttcaatttactttcaaatggcccaagggccctcaatctgttgtccttacaggtgccttcgatgagtggaagggaagcttacccatggtaaagaacccgagcggagcattcgagataaccctgccggtgcagtttgacgatcctggtgacaagttctatttcaagtttattgtcgatggccagtggttaaccaataaagactacagggccgacggtaatgtagaaggcaagaataacttcatcaccaaggaagacataatacaacagtggggtagcaagacaggaacgctggtacctgaaagtgccgggttggcggtttcgaaaaacaccactcttactgaacaggagggcgacaaaaagcctgcgaagttgagaaaattcaagattaagagagtgatcaagaccaataaagaaacgggggagaggtcgatcttttctcagaaagtcatcgaattgcctgacagcgaagacgaagacgaagatgaagacgaagcgcagcagacggtcaagaatgccaagaatgtagatggcctgagtggcactacaaccataattggaaacaccgatggcggtgtagaagaggagaaagcagtcaagccatatgaagaaaagcaccccaatattggcctggttaagagtgaagaaaccgctacggatcacctgggtaagacacaatcttccgattctagactatatgagctgtccgcagaagagcttgaagaggaggaagaggaagaggaagaggaaaaagaagtgggtgactcaagtagaaccgctggtacgggcacggaaactcgagaagaaaagcccttgaatgaaaccactatagctgagaacccacaagaggcaattccagtaggaacggcaacagtcgtcaaggaggcgcctgggaaattgaccagcgaatctaaagctgagacccaaactttggaaggacaacaaaacccaccagcaattactgcaaaaacagttggaattaagggaactactagaactgccaaacctggtggcgcgaagggagtaccacataaagaggctccgggaagttcggctaagaaaggtggatttttcaaaaagttgggccagcttttgaagtag

SEQ ID NO: 2144 - DNA, 1506 bp, Saccharomyces pastorianus
atgtcaatcatgccagtcaagaacgccttggcacaaggaaggacgctcctcatggggaggatgcctgctgtgaagttctccacaaggatgcaattaagaaacaaaaccgctgtgctatggaatagaaggttttccacacgtcttttcgttcaccaacgacgtagttccggtgaaattgtggatcgtgctaaggcagctgccgcaaacagtgggaagaaacaagtttctatgaaatgggttgtacttactagtttcaccattgtcctcgggaccatcctgttggtctcaaggaacgataaaacagatgaagaggatgacacaaaaagtaagaagggaacaagaacaagaaaaatcaaaatatttaacaataactggcttttcttctgctattctactttacccttgaatgcaatgtctcggctatggggccaagtgaattctctcactctacccatctgggttaggccatggggttaccggttatattcttttctattcggggttaatctggacgaaatggaagatcctgatttaacacactacgcaaacttatctgagttcttttaccgtaatataaagccagatacgcgtccggtagcacaaggcgaaaacgtcatttcctctccaagtgatgggaagattttacaagttggtataatcaactctgaaacgggtgagattgaacaggttaaaggtatgacatactcaatcaaggaattcctcggcactcattcccaccctttgatgtcgaaaagtgaatctagcttggatttgacttccgatgaagaaaagcataaagaatttgccagaataaacaactttcaattagcgggcgcaggggatacggaacaacctctcatcacaattaaaaatgaaggtgaccaatctgttgaagagtttaaaccaagcgtttccaaaaatatacatcttttaagccaactttctctgagctacttctctaacggattttcgtgctcagaacctcatgatacggaactattttttgccgttatatatttggcccccggtgattaccatcatttccactccccaattgactgggtctgtaaagttcgccgtcatttcccaggtgatttattttctgtagcaccttacttccaacgtaacttccctaatcttttcattctaaacgaaagagttgctctattgggtggttggaaatatggatttttcagtatgacgcctgttggtgctacaaatgttggttccattaaactgaattttgatcaagaatttgtaacaaattctaaaagcgataagcatttagaactacatacttgctatcaagcaatctatgaaaatgcaagtaaaatattagggggtatgcctttggtcaaaggtgaagaaatggggggcttcgaattgggcagtaccgtcgttctatgcttcgaggcaccaactgaattcaaattcaaggttaatgttggtgataaggttaaaatgggacaggagttaggcattattgaaaataaagattcaaaataa

SEQ ID NO: 2145 - DNA, 780 bp, Saccharomyces pastorianus
atgagttacaattatttgaaagcagccaggaaagtcatatgcattggtcgaaactatgccgcgcatatcaaagaactgaataatacaacccccaaacaaccattcttttttctaaagccaacttcaagtatagtgaccccattatcatcatcgctggcaaagaccaagagaccgacggattcaagtttcaatgggttgaatgaagacgggtccaatccagggcccatattcatcccacgaggagtaaaggttcaccatgaaattgagctggcattgatcataaacaaacacttgtccaacgtcgctgagatgaaacccgaagaagtctatgaatctatcagtggtgtggctctagcattagatcttactgcaagaaacgtgcaggaggaagcaaaaaagaagggattaccttggaccataagcaaagggtttgacactttcatgccaatatccgctctaatctcccgcgagaggctttcaacctacaaatccaacttgcaagacattttcagaatcaagtgttccgttaatggagaactgagacaagacggcgggactggtctcatgctacacccattgcacaaaatcttgccacatatatctaccatgatttctctagagccaggtgatattgtattaactggcacacctgccggcgtgggcgagctgaaacctggcgaccgtgttcattgtgaacttttacaaaataacgacaagctcgtggacatggatttcgaatgcgaaaaccgccctggtccttatgaattcaaggaaacgtaa

SEQ ID NO: 2146 - DNA, 1962 bp, Saccharomyces pastorianus
atgtcaagtgaggagcgttcaagacaaccaagcaccgtttcggcatttgatttggaacccaatccttttgaacaaagctttgcttcttccaaaaaggcgtcactcccaggcgtagcccctcatccatttcaaccaaagagcccttcgagaagcggttccatatcgacgttagcgcaaaatcctcatcgttccacgcatagtttggacagcataccggaggggaacgggaaccgaattattccaagtaatggtaatacaaatgaggcgaaaaaagactcgccaaattttttaccgagccaacagagacctaccataatatcaccacctatacttactccaggcgggtccaaaaaattgccaccgctacttctctctccctctattctgtatcaggcaaactcaacgtcaaacccaattccaaactcacattcagcctcaacttcgaattcgaatcccagtgcctttagcgcttcttctgcttctggatccatgtacccgaacagctcatctccttcaggctcttcattaacacaccaacctcgaaaccataatgctacagccagcactaccagtaacggcttccctacgaatgattcacaaatgcccggtttcttgttaaacttatccaaatccggattaacacctaatgaatctaacataaggactgggttgacacctggtatcctcacacaatcatacaactatcccgtcctcccttcaatcaacaaaaatactgttacaaatggtaaaactaccaacaaaagtatcactgccaatgggaatactgaaaaccacgctcacattaatataatgcatccaactgtaaatggtacaccaatcacaccaggactgagttctttgttaaatctaccatctgctggcattttgacgaatccaatattcaaatcgacaccatcgacaattattacagatgcgaccgctaataccaatgccggaaatagcaacatctccccaaacacatcgaaagccgcggtgaaaatggataatccagcagtaatcaacggcatcgggcagcctacccttaatcacaacgaaaatgaacattcgacaactcaacttgagaataatgatccattatttactacaaagacacgaaaaaggaaaagaagaatgtctagcatgagtccaacttccaaagtcccgagaaagagctctgtatcgagaaagagctctaccgttacggctttgacagcgccaaaagacggtgtcgatagtaacgaaaattcaaacaatgtaataattgatgagacagaagaacaagaaaagaaaagaaaggaatttttggaaaggaatagagtagctgcatccaaattcaggaaaaggaagaaggaatatatcaaaaaaatcgaaagtgatatacagttttatgaatcggaatatgatgatctcacccatgctgttgggaaattttgcgggatagtaccttcaagtgcttcaagttctcaatttagtatgaatatgtccaccccatcgtcttcatcatcgccaacatctacatctttattagcactgctagaaaatagcatttcaagaaatgacttttcaagtgccatgtcaatattatcaaacatgaaacaagttatatacgaaactaatttttaccaaagagggggcaaaaatccaagagacgacatggaagatcaagatgatcagagcagcttcaataaggacattactactgttaagaatgaaaacgcaggatatccctccattaactcaagaccgataatcttggacaaaaaatacccgctgaactctgtaccaaatatcagcaaaagcaacacaatcatcaacaatgcgggacagactacacagactgcgcagagtataatcaattcatgttattcagttcctaatacattggtaataaatgcaaaccctgatactcatgatgctaataatggccatgatgtattatccacactacctcacaataattga

SEQ ID NO: 2147 - DNA, 1329 bp, Saccharomyces pastorianus
atgggattagaccaggacaagataaagaagaggctttctcaaatcgaaatagacatcaaccagatgaaccagatgatcgatgaaaatcttcaattggtggaaccaacagagaacgaagatgcaaaggagataccagaggttggtgaagcgactgaagcggcttttccaagtagtaacgaggaattcagcaatacacgagaagatgcagtacagcccgaagctggtaatgagtctccaaaggagcatattttcagtgacaatgagaaaaagaagagtatggagactgaacctgaacaattagaacctcaggttgcggtagtccaagaaattcaagtgaatcacacggccattgttatcggtgactcctataacgcgtttgtcgccaaatccgccaaaaatgcggagtcaaatgacagtgacactgaagttaaagcttatgatactgaaaatgtaaatcaaagtggagttgataatgaaactgccaaaagtgacgacgatgaatgggaagacgaaaaatcggatgcggaagacaagtgcacaggtaaggaagaggtagaaaagattgaggctcaacctctaaaacctcccactcgcgaaactatcagctacgctggacaccgtacagcagataccgagttgatattggataacttttctttaggaaatgatggaggagacccgaacatactaccgcaaactatatctgtagggagcaaaaacgacgacaatcacaagaacaagcatttagctgaccaaacgaccgacacctcagaggacttccccaatccttccggaagaagcactccgcttgattctcaatctaaaatctttatacccaagaaaaatctcaaagaagatgataccgatgcaaatgactccgattcagctagtcgagaactaaaacccgtaccaaacttcgagaaacgacgcctgacaaatccatttagagttatctcggtaagtagcaattctggttcgagggatgggagccgtaaatcttcactgaacaagtacgatactcctgcttcgtctcctatcacttcagcatccgagttgggtaatactgccaagctagaaaaaagacatgattatttggctatgaaatgtaccaaattgcaaaaggaaattgactatctgaacaagatgaatgctcagggttcactgtctatggacgacggtaaaagactgaaaagagccgtggtgaagcttcaagaataccttgatagtaaaacaaaggaaaaatatgaggttggggtgctgttgagtagacaattgaggaagcagattgaccgcggtgaaaatggccaattctggattggtactaaatga

SEQ ID NO: 2148 - DNA, 1236 bp, Saccharomyces pastorianus
atggacagagtacgctctcttattgggggccaccgcacacgcaatcgccagcgtcccttatattcacacaacgagactccatcaaccacgaatcttttgggagctggtggtaatggggacgatcaatccacgatatttgagcatgaaacggagcgaccgggtactgcagagcagactgtacacgacggcgatgacaatgcggatgttgctactttgaatacagcggtatcagagggctccactatcggggatctacaaagacaaggttttattaacagagctcccaggttcacttctgaaagaaccatgccattcatttcaatcctactacaacgagggtattttgttttccctagtgaagagtctttccaattttttttacgcaacaagagaaaacttgataatattgatccaaaaaccggtttgggacttcccctatttcacgctgtctctttgaacttagtcaagtccctctttagtaatcataatactccggtaatgaggatttacaaatacgccataatagattttcaatgcgagaagcctccacccaattccgagctagtcctggaaataaataagaatatttcaatatataaattcgaattctgcaccattttaaaaaagctagaaagccataatttttccagtagagtagaacacgacttcatttttcatttaaacaacgagcctgacgttcatattcccatgattaattacaatcaaagaaaaaacgcagatacgacagttcatggactgaatctccgttggtatgggacaactagtttggcctcaccgttcgggtcaaacagcatcaatctgcttgttctcgacgataccatggcatcttatatgaaccaacctactatagaagagtttgattcttattgtcgttcacgccctacaagaccattgggctatctcccagtatgggctagatatactgatgataaggttagtataataccgaaaaagagatcgttgagggtggctaccctttacatgcaggagactgattccttgaatgacgaatctaattcgacgacccccactccgtgtaccattggtagtgaaatacaccccaatattattgacacaatcccgtgggatagccaagtattgacttgtatgtgcatgcttttgcacgaatatgaatcaagaaaggataaacgtcacactgcatggggaagttcaaccggttatatgttgaatggacctgcaggattacttatgtaa

SEQ ID NO: 2149 - DNA, 219 bp, Saccharomyces pastorianus
atgtctgacaagcctgactctcaagtgttttgcccagactgtaatgagagacttcaaaaatgtttaatacagcaaaattacgccatcatcatatgccccagcctcacctgtggctacccatttaaccaaagggaagtgctcgaaaacttaacgtacgtagatgataacgacgttttgagagttgcaaaaaaaagactgtctacgcggagtaaaccatga

SEQ ID NO: 2150 - DNA, 2304 bp, Saccharomyces pastorianus
atgtatactagtaacagtaatcatcatggaagtgcgtctccctcaggacaaggctattatatgtcacaacaacaagatcaacagcagcaacagtattccaacgatatgaattcctaccaacaaatatctagaccgcctgctgcaggattcagcagtaactatatgaaggagcaaggctctcatcaatcattgcaagaacatttacagcaacgtgagaccggcaacacgggcggtggttttacagatatcccaacactaaattatcctgccacaccgccgccacagaataactataccgcaccaaatcagatgattagcaccccacctccatccatggggggtctttacaggcacaataacaattctcagagcctggtgcaaaacggcaatggaggcggaaatgttctgcaatcccaattatctccaggtcagtattccatagaatcagagtataatcaaaatataaatgccagcacgtctagtagcccattccatcaaccgcaaacagtccagagcaatggatcgtactcaagtgggttaagaagcgttaagagttatcaaagattacagcaagaacaggaaaatgcccagtttcaacaacaagtgcctccagcgcagcagcaaaattcacagcatcaacagcaacagcaacaacttcaatttcagcaacaacaacaacagcaacaacaacaacaacagcaacagcaacagcaacaacaacaacaacaacaacagcaacagcaacaacaacaacagcagcaacagcaacagcaacagcaacaatcacctgttcagggaggcttctgcaatggtagcatatctagctacatgtatttcgaaagacggcctgacctgctgacgaaaggaacacaagataaagcagccgctgtgaagttgaagattgaaaatttctaccaatcatccgttaagtacgccattgaaagaaacgaaagaagagtggaattagaaaccgaactcacatctcataattggtcggacgaaagaaaatctaggcaactgagttctttaggtaagaaagaatctcaatttttaaggttgcgcagaacgagattatcgttggaagacttccacaccgtcaaagttatcgggaagggtgcttttggtgaagtgagacttgttcaaaaaaaagacactggaaaaatatacgcaatgaaaaccttattaaaatctgagatgtacaaaaaggaccagttagcccacgtcaaggctgaaagggatgtattggccggtagtgactctccatgggttgtttcattatactactccttccaagatactcaatatctatatttgatcatggaattcttacctggtggtgatttgatgactatgctgatcagatggcaattattcacggaggatgtaaccaggttttatatggcagaatgtattttagccatcgagactattcataaattgggctttattcacagagatatcaaaccagataatattttgattgatattagaggccacataaagctatctgattttgggctatctacaggttttcataagactcacgattcgaactactataaaaagctattacaagaagatgaggctaccaatggtatttccaagccaggtacctacaatacaaatgcaaatgataccgcgaataaaagacaaacaatggttgtggattctattagtttgacgatgtcgaatagacaacaaatacaaacgtggaggaaatcacgccgtttgatggcttactctacagtgggtacgccagattatatcgcgcctgaaattttcttataccaaggttatgggcaagaatgtgattggtggtcacttggtgcgattatgtatgaatgtttaattggttggcctccattctgttctgaaaccccacaagagacgtacagaaaaatcatgaactttgaacaaactttacaattcccagacgatatccatatctcttatgaagcggaagatcttatccgccgacttttaacgcatgctgatcaaagacttggtagacacggtggcgcagatgaaataaaaactcatccgtttttccgtggtgtcgattggaatacaattagacaagtagaagcaccatacataccaaagttgagctccattacggataccaggttcttcccaacagacgagttagagaacgtacctgattctccagctatggcacaagctgcccaacaaagagaacaaatgacaaagcaaggtggaagcgcaccagttaaagaagatttgccgttcattggttacacttactccaggtttgattatttgacaagaaagaatgcgctatag

SEQ ID NO: 2151 - DNA, 1065 bp, Saccharomyces pastorianus
atgaagttccaagttgctctctctgcccttttggcatgctcttctgctgtcattgcaagcccaatcgacagcttgttcaaatacaagtccactaagactgcgcatagcagagacattaactccactttgcctgtctggaataccacttcgaacacaacttatgctaacggcacaaacggtacaaacggtaccagtaacacttcctccaacaacagcgagctacaaatcattgtaacaggtggtcaagtcccaatcactaacagctctttgacccacacaaactacactagattatacaacagctcctctgctttgaacattactcaattgtataacattgcacgtgttgtaaacgaaacaatccaagacaaatcctcctctggtgccattgttgttaccaatgccaagtctttggaagccgtctctttcttcttctctatcttattcgataccaacaagccaatcgttgtcactgaagactctgcttacgctatcccagtcgctaacgataagggtgctgctaagcgtggtgtattgtccgttacctctgataagttagtatactccggtgttttcactccagcttctaccttttcttatggtgctggtttgccagtcgctatcgtcgatgaccaagaccaagttgaatggttcttcgatgcttccagaccaactttgatttcttctagctctgttatcagaaaagaatacaacaacttcactacaccattcggtattttcgaaaacggcgcaccaattgtgccaattgtctacgatggcggttactcctccagcttgattgactctttgagttctgccgttcaaggtttggtcgttgtttcttcaggttccagcaattctacttcttcatccattgcaagcgacataattccagttgtctacgctgaagccagtacaccattgaacttcattgacaagcaagatgttccagagaacgctgtcggtgccggttacttatccccagttaaagctcaaatcttgttgtccattgctgctgttaatggtgtcacctccaagtctgctttacaagacattttcccataa

SEQ ID NO: 2152 - DNA, 870 bp, Saccharomyces pastorianus
atgtccacccaccaatatcgctcccatggtcatcggacagaaagagacgacaatgacgattatttgttccaacgatttctggttgaatcagacactaggccaaatagagaaccatcgcctacaactgaacagtctcaacaagaactacagcaagatgtgcagcaagccatcgatggcatattcaattcccttagaaggaatatgagttcgtcctctaatataaacagagctactaacgtggacccaaggagaggcggaaacgaaggaattaatgtagataacagaagggccgcaaacgcaaacgcagtcgattcgccgtttttagcaagacagcaaagtcctcttagaacttttcttagaaatctattcattttagattactttattggactaatactattcccgttttccgtgtataacatattgagaagtggattcaattcaatgactttttccgagaatgactttataattgaaattgtggggtactggaaattcgcgaaaatttttggttcaaatggcacgacacttattgcctataaagatacaggcaaattgggactacttggcaaatttcataatattatcgtattttattcttccccgatgataaaatttataatgaaaagtgccaatggtaatgaatcaaagatggactggctaaaacaaatgttttccaaaattttcgaattattcgtgaaattctctaccatcttaatatatttaatctatggcgtgagcggtactatatacatggttactgcaggatttttttttgtactgtgtctcttgtttactgttatcagaagatataaaggcgttcatagaatactggtaagccaaagaatgtcagggccaactgttttttaa

SEQ ID NO: 2153 - DNA, 501 bp, Saccharomyces pastorianus
atgtcgaacgaaaacatatctcccaatagtagtaacactgatttaccaaaactgactaatgatgagggcgaagctatcgacacaagcaaattctctcccaacgaaatgaaactattaaaaatgtatggtaagttgccatcaaaaaaagatatttttaagcataccatggaaaagagaaaatattttgatagtggtgattacgctttgcaaaaagcaggcattcaaaacaacgatccaataaattatggtaagaataatctgcccttgaccaaccctagcaagctacgagaagatataataagaagaaggataagcacctgtccatcgactgcgtctactgctggggtagtagacaacgcaactttgatacagaaggagggcagtatatcgagtggaccaccatcgtctaacaacggtgcgattggaggcagtacgagttcaactccaactggcaatcacggatcttcacctcctagtctacatggatcatccactagataa

SEQ ID NO: 2154 - DNA, 888 bp, Saccharomyces pastorianus
atggccaatagaagagaaccggatccaaaaaaaagcaccgaatcaattagttctttaactaagccccagctttattcattgtatgacgatgacgtagtgagatcggaagataacgacatttatgaggaattgaaacggtctgtctctatagactctggcagatatagcagagatcaaacgattgattctacgtttggatatggcgataaggtaagtagttcgctccctaggaatccagtatcgtcaaataatctggaaaggatattatctgcttcatccattcaccaaaacttcccatccaggactatgaaaacccgtcagaatttcgttcattacttgcaagccattttttttttatcattaagtggcatagcataccatgaactatcaagaaacttgcacgataatcatcttttacatccagaattcgcatcaagacctcttattctcggcgttaaaatatgcaatggggttttaccggactggttgggttacgccattgagggggtgttatttggttctatcataccgattctagatcacattttccaaacagaggttgttaagagctcagtaccccacgacagcttgctttctgtgattagaagcatcaacgccatgttaggtgtcacgtttggcataagaaaaatacagtggaactcttctctacaagctgcaggtgcatgggggcttctaaatgtgatattatggttatttttcgatggttccatatctatgctactgagttgcatctgtatcgggataagttgttgcatttcttgttataaagacattattgatggttctcagttagtatatttcatggatttttacttccttggttctttaatgttcggtaaactaggaagatatttatattctcattaa

SEQ ID NO: 2155 - DNA, 1683 bp, Saccharomyces pastorianus
atgtctcaggtgcaaacttccttaacgggaacgaattcaggtctagcagtcaataatatatcaactacaatgaattcacaaatgcccaatcgtagtaacattagattggtgaatggcaatttgcctccatccttacacgtcagttccaatctgaatcacaatcctggaaacagttctgcttcgcattctggctctcaatctcgtgatgattcaagcatagttggattacattacaagataggtaagaaaattggtgaaggttcatttggtgttcttttcgaaggtaccaacatgattaatgggttgccagtggctattaagtttgaaccgagaaaaactgaggctccacaacttaaggacgaatacagaacctataagattttagcaggaacccctgggataccacaagcatactatttcggccaagagggactacataatatattagtcattgatttattgggtccttctttggaagatttattcgactggtgtggaagaagattctcagtgaagactgtagtacaagttgcagtgcaaatgataactttgatcgaagatttacatgcgcatgatctgatatatcgtgatatcaaacctgataacttcctgattggaaggccaggacaacaagatgccaataaagttcatctgattgattttggtatggctaaacaatatcgtgatccaaaaactaaacagcacattccatatagggaaaagaaatcattaagcggtacagcaagatacatgtcaattaatacccatttgggtagggagcaatccaggagagatgacatggaagcaatgggtcatgttttcttttattttctgagaggccaattaccatggcaaggcttgaaagcaccaaacaataaacaaaaatacgaaaaaattggtgaaaagaaaaggctaacaaacgtttatgacttagctcaagggctaccaattcaattcggtagatatttggaaattgtcagaaatttatcatttgaagaaactcctgactatgaaggctatcgtatgttattactatctatcttagatgatttaggtgaaagtgccgatggacaatacgattggatgaaactgaacggcggtcgtggctgggatttatcaataaataaaaagcctaacttacatggttatggtcatccaaatccacctaacgagaagtcaagaagacacagaagtaaaaaccatcaatactcatcacctgacaatcaccatcagtatactcagcaacagcaacagcaacaggcacaagcccaggcacaagctcaggcgcaagcccaggcccaggctcaggcacaagcacaagcacaagcacaaaagcaacaacagcaactgcaacaagctcaggcccaacagcaagccaatcgctaccagttacaacacggtgattcgcattacgatgaagagagagaagcttctaagctcgatccaacttcatatgaagcataccagcaacagactcaacaaaagtatgcccaacaacaacaaaagcagatgcaacagaaatctaaacaatttcctgatactaatgctaacggtcaaactaacaagtatccatatggtgcacaaccaacaacaaacaacgagccaaacgccaacaacgcaactcaagacatgagtagtaataaatcctctaagggatttttcagtaagatgggatgttgttga

SEQ ID NO: 2156 - DNA, 390 bp, Saccharomyces pastorianus
atggaattgttgccccagggacaaaggaacaacacacaggtgacgtttgaagaccagcagaagatcaacgagttctcaaagctgatcatgcgcaaggataccgttgcgcaggaattgactttgcagaaacaggagaaggagtacctcgatgatgtttccctggagatcgaactgatcgatgaagacgagcctgtgcagtacaaggtcggcgacctcttcatcctcatgaaacaaagcaaagtggccgcacagctcgaagaggatgcacagcttctcgaggacaagatccagaccctgcaggataagcaaggtgagattgacggccgtcttgatgctctgaaggcttccctgtacgccaaatttggcgataatatcaaccttgaacgttaa

SEQ ID NO: 2157 - DNA, 390 bp, Saccharomyces pastorianus
atgtctgaagtggcggcaacttggatagagaccctcttaaccagaataatcaactatgattacaaacatttcataagattggtgatgatcgtaggcggttatatgttggtgagaaatatagcatccagagaattggctaagaagcaattggccgctcaagtggaacatgacaaacgggagaaagaggaaaaaaggtctgaggagctgattgataaactagacggaccttccgtagcagaaacgacttctttcggttggggtaagaagaccagacaaagggtgaagaaacaacaggagctgtttgaaaaggctctggaagaggccaaacaaaagcaacaaggaagagatccagatagtgacgcagatatcgaggaactgctggaagaataa

SEQ ID NO: 2158 - DNA, 738 bp, Saccharomyces pastorianus
atggtcacggttattatagagagcgaattggttcacacagagaaggacttcccgcagatgctcagattgagcgagttcaaggagaagctttaccgcatcaccgggatagagcccagcgacatggacttggtggtgaagagacagtacgacaacaaggagatatgtcacgtgaagaaggaggaatcagacgcggattgcgactttctggcctccgcggagacgttagttgtggtggccacagacactaacgcacactcggtcacgaaccaactggccgagcaggccgatggacctacaccagctcagggaatcagcgaagaggactacttacaaagagaccagtccgttttgcgatggaagatggcccatgggtacggcaggtttgatgttgcccagcagagccaacgtgctgcacagacgttacaagacgaggcgtacgcccgcgagcatctaacggcggctatcggcctcgcttgccgggtcacgtcagacggccgcgcgccccgcgaggccgtgctgcggtacgtggggccgctgccgtcgggcgggactggcacgtggtgcggtgtcgagttcgccgaggcctcgggcaaaaacgccgggtgcttccagggggtgaccctgttcgggccagtggcgccgggtcacggattgttcgtgcggccgagggcggtggagattctggccgaaaacgaaggtgccgttcatcgtgatgaggagagcgatggtgaaatttga

SEQ ID NO: 2159 - DNA, 303 bp, Saccharomyces pastorianus
atgagtaacactaaacataccacctctcatcatatagatttcaaaaggatcattaaccttgtgctcttcttcataataatagcattgatttttcaaaactcagcatatttcaggacggcattccaaaaactactctcagggttttacaaaaacaatcatcagggccctgccagtagcgtaaaaccattgcctatcttttcagaaaacttgatagatttcgacgacgttaacgtggtagacaagacaagagtagccatatttctggttttctgtttcatcattaccataccgtttatggtataa

SEQ ID NO: 2160 - DNA, 117 bp, Saccharomyces pastorianus
atgcaaccagtcaccaccatctctgcccaagcttctcaaaaggacaagtcttccgagaagaaagacaactatatcatcaagggtctgttctgggatcctgcctgtgttatcgcttaa

SEQ ID NO: 2161 - DNA, 1044 bp, Saccharomyces pastorianus
atggtctcccaagagtttttacaagaattgccaaagtgtgagcaccacttacatttagaaggtactctggaaccagatctattgttcgtattagcgaagagaaacaaaattaccttacccgacgcattccctaaatcaatcgaagaattaaacgtaaaatatgaaaaattccgcgatctacaggatttcttagattattattacatcggtaccaatgttttaatcaaggaacatgactttttcgatttggcatgggcttattttgtaaaagtccacaagcaagggttggtccatgctgaggttttttatgatccccaatcccatacctccagagacatttctatagagacagtcactaagggcttccaaagagcttgtgacaaagctcaggctgaattcggtattacatccaagctaatcatgtgccttttgagacacatcgaacctgaagaatgtttgaaaaccatcgaagaagccactccgtttatcaaggatggtaccatttctgccttaggtttagattctgctgaagcgccatttccaccaaatttattcgttgaatgttacaaaaaagcagcctctttaaaccaagatctgagattgactgcacacgcaggtgaagaaggttctgctcagttcgtctcagatgctctagatttgttaaatgtgaccagaattgatcacggtataaatagtcaacacgatgatgaattactggatagattagctcgcgatcaaatcttgctaaccgtctgccccttctctaacgtcaaactacaagtcgtcaaatctgtttctgagttgccattgcaaaaatttctggacaaaaatgtccctttttctttaaattctgatgatccagcttattttggcggttatatcttggataactacattcaagtctcaaaggatttcccacactgggatcatgaaacctggggtcgtattgctaagaacgctattaatggttcttggtgtgatgataaaagaaagggcgactggttggataaagtggatcaagtagtcactaagtattccaattaa

SEQ ID NO: 2162 - DNA, 1599 bp, Saccharomyces pastorianus
atgcccgactctaaatatacaatgcaaggttataaccttgttaaactattgaaaaggttagaagaagccaccgctagattggaggatgttaccatttaccaagaaggttacattcaaagcaaattagacgcttccaagacgaacgtatctagcaactcgggtacttccaccagcagagcacctacaaagggttcttctttagagaacgttccagaagtccaagaagatccgaaatgcgttactgccttccagacttatattaatgaaaacattgatagattggtagagctatcagggaagatcgatgcagtggtcttagatgctttgcatttgctaaaaggaggatttcaatcccagttgattttcttgagagctgctgtaaagtctaagaaaccggattattcctcccaaacatttgctgattctttgagacccatcaacgaaaacatcataaaactgggtcaattgaaggaatcgaaccgtcaaagtaagtactttgcatatttgagtgctttatctgaaggtgctcctttattctcttgggtcgcagtggacaccccggtatccatggtcacagatttcaaagatgcagcacagttctggaccaatagaattttgaaggatttcagagaatccgatcccatcgccgttgaatgggtcaagactttcttgaccgcttttgataatttgaaaacttacatcaaagagtatcatactactggtgtgtcttggaagaacgacggtatggagtttgccgatgctatggctcaatcggcaaatacaacaccagttccatcagcgccagcttcaactatttcacaaacaggcagttcagcagccgcaccaccacctcctcctccaccggcaccaccagcttctgtgttcgaaatttctaacgatgctccctcgagtagcaataattctggtaacgtcggtattggtgctgtttttgctgaattaaaccaaggtgaagacatcactaaaggtttgaaaaaagtagataaatctcaacaaactcacaagaaccctgaactgcgtcaatcttccactgtttcctccgcggaaggtaaaactggtccaccaccaagaccaaagaagccatcgacattaaaaactaagaaacctccaagaagggaattagtgggtaacaagtggtttatcgagaactacgaaaacgacaccgagtctctagttattgaggctaacagagatgagtctatcttcataggtaaatgttctcaagtacttgttcaaatcaaaggtaaggtcaacgctatctcattgagcgaaactgaatcatgcagcgtggttcttgattccagtatttctggaatggatatcattaaatcaaataagtttggtattcaagttaaccattcggtacctcaaatttctatcgataaatcggatggcggtaacatctatttatctaaggaatctttgaacaccgaaatatacacttcttgttcaactgccatcaatgttaacttaccaatcggagaagacgatgattatgtggaatttccaatccctgaacaaatgaagcataacttcgccgatggcaaattcaaatctgccgtttttgaacatgctggttaa

SEQ ID NO: 2163 - DNA, 1275 bp, Saccharomyces pastorianus
atggcagtacactggacgattgtagatgaaatacgacttcttagatgggcatccgaattcaagccggccggaattcataagcattttcacatgttttgtatagtggaaagaatgaactcgccagataagtatccagtgacattattgcagaaggagaccatgaaattggggaaagtttttaccgctacagatatatgggagaaattgagtcaatcttacaacttaaaagacattgacaaaagggaaactacgtttcccatcgcaaccacgacagatagtgcgacaaatgataatgattatgatgataacgataagagtattcatgaggaaacgttactagagctgaacaatcgaataaggacacgaaaacaagactttactctgccttgggacgaatacggggaattgatcttagaaaatgcaaaaaagagtccaaccccaaatgaagaggaaacgcaaattgagccttcaaatgatacgaacggtcaaacacccaagaagacggctgaaagtcctaaaaaaactgtcaaaaaggaagaaaacaaagatgtggaaggtggaaaagtgggtgacctaaaagaatctaacacaaatgagaataatagccctacgcttgattccaaaaacgaatcaatgcaaggcctaccagatgatggaaaatacaaaaaaacagaacattcgagtgatgaggaacagaagatgaaaaacgaaagtaaagccgcagctcctataaggaaatctcaaaggttgaaaaggaacaaagaggtaaaatttgaagacgaaggcagagaagaagcaggagaagaaaaagagcaagaagaagacgagggattagtaaaagaagactatgataaagccatcgaagaagaaggcgaagaatgtaatgggaacgaagaagaaaatgatgaacgcgaaaagtctagctcttctgaaaccacgaatggatctgaaagtgaggaagctgacgaaacactcgaatctgattctgatcatgagagggaggacacagaaaaggacctaggtgcaaagcctgattctgaacgtgacactttaaaaaggaaaattgaaaataagaatgaagagagtacacaggacggtgaaaaaaagaattccaaagctcaggatgaaccattagcgagaagaacgaggcattcgtcatctgcagggaacaccagcaatgaaacctcgccaaagaggcaaagacgaaaggcaggttcccgcaaaaataggactccggccactagagtatccagtaggcttcgaaacaaaaaatag

SEQ ID NO: 2164 - DNA, 345 bp, Saccharomyces pastorianus
atgtctgaagtaattgaaggtaacgtcaaaatcgacagattatccccaggtgacggagccaccttcccaaagactggtgatttggttactatccactacaccggtactttagaaaacggccaaaaatttgattcctccgttgacagaggttctccattccaatgcaacattggtgtcggccaagtcatcaaaggttgggatgttggtattccaaagttgtctgttggtgaaaaggctagattgaccatcccaggcccatacgcttatggcccacgtggtttcccaggtttgattccaccaaacagtactttggttttcgacgttgagttgttgaaggtcaactag

SEQ ID NO: 2165 - DNA, 3171 bp, Saccharomyces pastorianus
atggcgaaaaaagctatcgattcaagaatcccttcactgatcagaaatggtgttcaaaccaaacaaagatcattctttgtcattgttggggacagggcacgtaaccagttgccaaatttacattatttgatgatgagtgctgacctgaaaatgaacaaatccgtattgtgggcctacaagaagaagcttttaggtttcacttcgcacagaaagaaaagagaaaataagatcaagaaagaaatcaaaagaggtacaagagaagcgaatgaaatggacccctttgaatcctttatttctaatcagaacattagatatgtttactacaaagaaagtgaaaaaatcttaggtaatacttatggtatgtgtatcttacaagacttcgaggcgttaactccaaatcttctagcaagaaccattgaaaccgtcgaaggtggtggtatcgtggtgatcctattgaaatccatgtcctccctgaagcaattatacacgatgactatggatgttcactcccgctatcgtactgaagctcatggtgacgttgtagcgagatttaatgaaagattcatactatctttaggttcaaatcccaactgtttagtcgtcgatgacgaattgaatgtgttgccattatccggtgctaagaacgttaagccattgcctcccaaggacgatggtgagttatcacccaaacagctagaactgcaagaactaaaggagtctttagaagacgtccaaccagctggttctttagtcgctttatccaaaaccgtaaatcaagctcacgctatcctgtctttcatagacgcaatttctgaaaagactttgaatttcacagtcgcattaaccgctggaagaggtagaggtaaatctgccgctttgggtgtttccattgctgctgctgtctctcacggttactcgaacatttttgttacttctccatctcctgagaatttgagaacattattcgaatttatatttaaaggttttgatgcgttagggtatcaagaacatatcgattacgatatcattcaatctaccaatccagactttaacaaagctatcgttagagttgatatcaaaagagaccatagacaaactattcaatatattattcctcaagattaccaagttttgggtcaagctgaactagttgttatcgatgaagcggcagcaattccgttaccaattgtcaagaacctattgggtccatatctagtttttatggcatctactatcaatggttatgagggtactggtagatctttatctctgaagttgatccaacagttgcgtaatcaaaacaacacatctggtcgcgaaagttctcaaacagccgttgtttctagaaataataaagaaaaagactctcaccttcatgctcaatcgcgtcaactacgtgaaatctcattggatgaaccaatcagatatgctcctggcgatccgatcgaaaaatggttgaacaaattgttgtgtttggacgttaccttgattaaaaacccaagatttgcagcaagagggactccccatccatctcagtgtaatctatttgttgtaaacagggacactttattttcttaccatccggtttcagaaaatttcttggaaaaaatgatggcattatacgtttcatcccactataaaaactctccaaatgatttgcaattaatgagtgatgctccagcacaccaactgttcgtccttttaccaccaattgatccaaaagatggtggtagaatcccagatccactatgtgttgttcaaattgcactagaaggtgaaattagtaaacagagtgtcagaaattcattatctagaggtcaaagagccggtggtgatttgattccttggttgatttctcaacaattccaagacgaggaatttgctagtttgagtggtgcacgtattgttagaattgctacaaatcccgaatatgcatctatgggatatggttcccgtgcgattgaattattaagagattacttcgaaggaaaattcacagacatgtcagaagatgctcgtcctaaggatttctctatcaaaagagtaagtgacaaagaactggccaaaagtaccttactgaaagacgatgttaaattaagagatgcaaagtccctaccacctttacttttgaaactttctgaactgcctcctcattatctacattacttgggtgtttcgtacggtttaacacaatcattgcataaattctggaagaacaataaatttattcctgtgtatttacgccagactgcgaacgacctaactggggaacatacctgcgttatgttgaatgttttggaaggaagggaaccaaactggcttgtggaatttgccaaagatttccgtaaaagattcttgtcgcttctttcttacgatttccacaaattcactgccgtccaggctttaagtgttattgaaagtagtaagaaagcgcagagtttgtctgatgacgaaaggtttgagaccaaagaactgacacgcttacaaatggacgacattttctctccatttgatttgaaaagattggacagctactccaacaatttactagattatcacgtcattgttgatatgatacctatgcttgcgcttctatattttggtggtaaaatgggtgattcagtaaatttgtctagcgtacaaagtgccattttgttggccattgggctgcaacgtaaaaacatcgatctaattgctaaggaattgaacttacctgccaatcagactattgctatgtttgcgaagattatgagaaaaatgtcacaatatttccgtcaactgttgagccaagctatcgaagaaactttaccagtggtcagagacgaaaacatagccgaaatggatggtgaagaaatcaagaagtacaacgctgctgaagcattagaccaaatggaagatgatttagaggaagccggctccgaagccgttcaagctatgagagaaaagcaaaaagaattgatcaactctttgaatttagacaagtatgccatcaacgataacagcgaggaatggaccgagtctcaaaagtccttagagaaagctgccaaagccaaaggtgttgttagtgtaaaaactggtaagaagagaaccactgaaaaatctgaagatatctatagacaagaaatgaaagctatgaaaaagccaagaaaatccaagaaaggcggaaattga

SEQ ID NO: 2166 - DNA, 459 bp, Saccharomyces pastorianus
atggtcgaattaactgaaattaaagacgatgtcgtccaagtagaagaaccacaattcggcggaaaccaagccattatcgaagaaaagactgccgcacaaaacgacgatgttgtagatgatgaagacgaatctgacagtgatttcgaggatgaattcgatgaaaacgaaacattgttcgatagaatagttgctttgaaagatatcgtacctccaggtaagagacaaactatctctagtttttttagttttacgagctctcttgtaaagaacgctttctccagatccggaaaccttgcctggactttgactaccactgcgttgttgctaggtgtcccattgtcattgtccatactagctgaacaacagctaattgaaatggaaaagacatttgacctacaaagcgatgctaacaatatattagcccaaggtgaaaaagaagcaccagcaattgccaactaa

SEQ ID NO: 2167 - DNA, 723 bp, Saccharomyces pastorianus
atgacttcgaagaaaataatactcgttgccttgagtggatgctcctctagtggtaaaaccactatagctaaactcacagcgaacttatttaaggaggccacattgatccatgaagatgatttctataaacatgataaggacgtaccagtagataccaaatataacattcaaaactgggactcaccagaagctttggatttcaaactatttggcgcagagttagatttaatcaaacaaacaggcaaaattgcaaccaaactaattcataatgacaacgtagatgatcccttcacaaagttttgtattgataaacaagtttggaacgagctaggagctatgtatgactctattgatcatgacaagtatcaagttgttattgtagatggatttatgattttcaataatactgaaatatctagaaaattcgatttgaaaattttagtgcgtgccccctatgaagtattgaaaaaaagaaggtcctccagaaagggatatcaaacgttagattccttctgggtggatccaccgtattatttcgacgaatttgtgtataagtcttatcgagaaagccacgcccaattgtttgttaatggagatgtagagggtaatttggatccagtaaaggccaagcatattaaagagtttataaataacgacaacacaccgattgaaagccctttaaaatcggtgtgctatgaaattttaaagctttgtaaggactag

SEQ ID NO: 2168 - DNA, 2901 bp, Saccharomyces pastorianus
atgaatactagcggcaggtctcattccaaaggtccgattataaggtcagtatcattagaagatttaaagaggaactcaagtttcaaaaacactttgaagtacaaagatgatgtacccgcacataaagaaccgcaaaccagcgcagtaagtaacgaagaactgctgaaagatttggataacatgttgcgcaacaagcttaatattggaagaaacgcctttcatgccgataaaagaaacaaatcagatagtaatatcagtgccttaaattttaaagcaagatctggtcttgatggagactttcgcactatagacacagagcaagataatgatgacgatgatgacgatgatgctgatgatgacgatgatgatagtaatgctaatgattttaaattgggtgcagatggcgctaataaagatgaggacgaggagaaagttaacaacactgacaatgccgttgaatttcaagacgatgctgaagaagctgaagaagagaatgaagatgagtcgtttgctaatgttgatgaacttgatggctttgatttaaataaagctgcggataataagcacgctcctgtaaatgaaaagggtgaaattgattataatatgcccgttgacaaggagtttcaaaaatcactcgaccaatgtgccgcttctcttgaagggagagcaagcgctccttacgcattacaaagagccgtggattgggaattgaagatgttttataccttagaggacgaactttcagaatggttttgtagctccgactatattcattttggccaagcccagacacaattcaaacaaaagataaacaacccacgactatttttcgatgatgagaactacgctgaaagtgtagtaaaaggtttaattgaggatatccccaacgttttgacaccgaatttactagcgttgacgtacatatctatggggtgctttgcgtatacaagcaacaaagatcagcatacaaagattatacggcgtaacaatatcatgcttgttccttatattcaagaaatcgttcacgcttttaagaagattgctataaattgtagggatgataccagaaatttgaaaaagcagacaatcttactattttactcatcaacaatcctctattttatatccgccatttgtatcaatggaagagatgaaaacccagaagctgttgagcaagttatacatgcatttgacaacatggatttgatagagtttttaaccaagtatattgaaagttggagatggaatagtaagttagctatgcgcataagaaatatgattttattgcttttcaagcttatagttttgcaactcggtgatgactcggtgtacaaaaaaacaaaatcagccatttataaactccatggactgaaatacccattaaatcatccagaaaagttatctatttctccattacattatcaagcatttagggaagacataacttctcgttttcccgactataacatgccatcttctcatttgcctaaagatgtcgacaaatcggagtctttatctcaatttttggaaattcctcgcccaaaatcaaagaatcctctaaatatgacgttgaatgttcctgaaaagcatataactacacctgcgccttcgccaccgacctccccacagttaatgcatttaggggaaggttctaggccaagaaaatccttccagacaaatatggcatatccatgtttatatccatctgataatgaagagcttgaggatgatatcctagaagatagaatggacctccattccaacaaaacatctaataatgacataattattccgtttagcacggaggaagcagccaaaatattaagtgacaacttggaaattaagctaagtacaaaacagctttggcatgagagagatttatttatgataacagagcgcggttggaaacttcaatcagaaaacgaaccatacaattactctaccttcgatatcgacagcaattcttcaacaaaggaaagagatgctattcgcatcatgcaaagaattgacaaatactataaaggctgtctttcgagcttcaattctcttgttttcgtactactacaaacaatggaatcaagcttaacaaacaactttcacagaaaaactgaggtttccgacaaaaatctattaagtatgttagcacctcaactggagattgtaagagctaaggaattatccctaaagtcggctgctggaatactacacgcattattaaagtggtttaaactaagccatattttgaagtttgaacatctgtcagtagttattcacgattcgcgatacattaacacatgtgcgtctattttaagcaaatattctgaaatttattctgaaaaggttttcaataaatatgtgcaaactcctaattcattttggaaagaatgttctttgcataacgaattgtatcgtgaatcttacggaacggaagactcgaaagagatcaacacagaggtgcttccatcttttgcatatcttttaaggatcttgagaaaaatcacaggaaataaaacgcaaagattaaaggaactgcccttatccattggaattttattcaaacgctactatcgacttttcaaccttgacatgtaccatccgatattgaagataacaagagaactcacaccttttaaaaataagaggtggaagtcagaacacatggaattgatatccggtgtttatctttacgaaaagttggaattgacagacaactgggtaacaggtaaggatatatctggggagttgagcgatgcttgcggacaggaaattgcgctcagagccttacttcagttttacaatttccaacattatgaaatctccatggaagatcttggatatggacaccgtaacaattctagtcaggatctcttaaataaggaatctgagtacttgaatatttag

SEQ ID NO: 2169 - DNA, 2013 bp, Saccharomyces pastorianus
atgtcactgcaatcgaataattacgtctctgctcgctcagggatggcctccgaagacgcatcggaggtctcctcgataaattcttcattgcccgcatcctactctaaggagtttgctgctggtccagcgcctctttctgatctgcaaagcaccaagtcgaacgatggctcaagaggtttgtctataacgagaaccttgactagccggtttcacgacatcaagaaagcggtcgatgacgacaacgcacagacagatgaggcttctgcagacgtcaataaactattagaatcgaggttcgaagtggccgacgctcttagactacagcacaatgagtcactccaatcagatttgaacctccccgctacatattccactactgcaggagcttcctcgtccacgcagtctgtttctccatcttctgttcgaaacgacaccacacggcacaaaacctccatggactccaaacttatgaggaacaggctatgttcagcgtccaccaaaggctccgccaaggacctcgaggcccagggaatatctgagttcgaacccgacgagccgaccgtaaaaagagtctttaccaacaagtctaccgggcagttggagctgcctcccgatggtgggtatggctgggtcgtgacgttctgtgtctttttgaccatgttctccacgtgggggtgcaacgcatcttttggtgtggacctggcttattatctgaaccacgacacttacccaggcgcgtctaagtatgactatgccttaatcgcgggtcttactgtgtgtcttggtcaaatcctgtcccctttcgtgatggccctgatgagaataatcggtctacggactaccatgctttttggtaacgccgtcatgcttgctggatatatcttggcttctttcacaaccaagctatggcaattgtatctcacccagggggtcatgatcggttgttccatatcgctaatttttgttccagcaacaaccgtcttaccaggctggttcttaaagaaaagggccgttgcgatgggagtctcattattaggcactggtgccggtggtgtcgtatatggcctggccacaaataaaatgctttccgatttcggtgatacgagatggtgtcttcgtatcttgggtatatcgtgtaccctaagtattctcgttgccactgcattaattagggaaaggaaccccacccccgctgtcggcttaaggtcattccgagccatggttggtcaactaaaggcaatgttttcattaaaagttataacaaaacctttcgtttcattaattgcgctatggttcatgttcgcactgtttgcttataatctgatgatttttactctatcttcatatgcaatctcgaagggtttatcttcacacaacgcctccacattaactgccattttgaatggttctcaagctattggaagacctataatgggtcttgccggcgacaggtatggtagagctaacgtaaccatcattttaaccactttgttagcggtatacatgttcgcgttttggattcctgcacataccttccttcaactgattttcttttcaatcatggttggttcatgtgtcggtgtcgctaacgtcatgaacacggtcttgattgctgatatggttaaaccagatgagtttctacccgcctgggccttcgtcaactattgcggtgctcctttcctgttggtttgtgaagtaattgctcaagctttaactgtggaagacgataaaagcaacccgtatttacatacgcaaattttttgcggttgttgtttcattgctgcactaattttgatttccatccttcgtgaatattctattaaattgaaattaacagaaagacaagcaactacaaacgagcaattacaggattggaagacaattgattatgacactgattctgctaatgaagattggagtaagctgaataagagaaaattaaaatatgaccttcttttgggtcccggtttaaaaaaatacctaatgagaatggtatacccaatgaaagtttaa

SEQ ID NO: 2170 - DNA, 2994 bp, Saccharomyces pastorianus
atgactatatcgttgagcaatataaagaaaagggatcacgccgaggtttccgatggactttcagctgaaacatcgcccgtgaagaggaaacagttggaatgcgccactggagaacaagatgaagactacacagaccacgaggttgtcatagagccacttcattttgctaacaataatgctgcggtgctcacggactcagaaaattacttgagatggcaaaacactatttccaatgtggttcaatcagtagtctccattcatttttcacaagttgcaccattcgactgcgattctgctttggtgtctgaagctacgggattcgtggtggatgccgaattaggtatcatcttgacaaacagacacgttgtcggaccgggcccttttgtaggttacgtggtttttgataaccatgaagagtgtgatgttataccgatttatagagatcctgttcatgatttcgggttcctgaaatttgacccgaaaaagataaagtactctaaaattaaagctttgaccttgaaaccaagtttggctaaagtcggttccgaaattagagttgttggtaacgatgccggtgaaaagttaagtattctagcaggttttattagtagaatcgacagaaatgcgccagaatatggtgagcttacatataacgatttcaacactgaatacattcaagctgctgcatccgcctccggtggttcaagtgggtctccagtggtgaatatagatggatatgcagtagccttgcaggctggtggttcaacagaagcttccactgatttttttctaccactagatagaattttgagagcattggtctgcgttcaaaacaatcaacctatcactcgtggtacaatccaagttcaatggttattgaggccatacgacgagtgtagaagattaggtttaacttcagagagagagagtgaagcccgcgccaaatttcccgaaaatatcggtctcttggtggcagaaactgtcttgagagaaggcccaggtgacggtaaaattagagaaggtgacactttaatttcaataaacgacgaaactatttcttcattcatgcaagtagataaaattcaagacgaaaatgtgggaaatgaagtcaatttggttatccaaagaggtggtgtcgaacataacgtcgtttgcaagattggtgatctgcattctatcagtcctcatcgttatgtagaggtttgtggagctacttttcacgaactgtcataccaaatggcaagattttatgcattgcctattcgaggtgtatttttaagtagcgcatcaggatcgttcaattttgattcaaaggaaagagtaggttggatcgtggattctataaacaacaaagaaacacctgatttggatacatttattgaaataatgaaaaccattccagatcgtaagcgtgttactgtacgataccatcatctcacagatcaacattctcccctcgttacatctatttacattgaccgccattggtgcaatgaatttagagtatacacaagaaatgacactaccggtatttgggatttcaccaatgttgcagatccacttccagctgaaccattgaaaccacgctcagccaaaattattcctattccaatcaaaaatgatgaaatagctaaactatcatcttcattatgtacggtggccacaatggctgcagttccattggattcgctttctgcaaatatctggaagacatctggtttgattgtcgatgccgaaaaaggatatgtgcttgtctccagaagagtggttccgcatgactgtctcgataccttcgttaccattgcagactctcttgtggttccagctacagttgaatttcttcacccaactcataatttcgccgtagtcaaatatgatccaaaattggtagaggcccaagtaatcactcctaaattatccgccacaagaatgaaacgtggcgataaacttcaattcataggttttactcaaaatgagagaattgtcacgtcagaaacaactgtcactgacatttcctctgtaagtatcccaagtaatctaattccaagatatcgtgctactaatttagaagccatttccattgactgtaacgtcagtaccagatgcaattctggtattttgacagataatgatggtaccgtaagaggcttgtggctcccatttttaggtgaacgattggaaaataaagagaaagtatatttgatgggtttagacataatggattgtaaggaggtcatagatatcctgaaaaatggtggtaaaccgagaatgagtatagttgatgctgggtttggttcactttctgttttacaagctagaattagaggagttccagaagagtggatcacgcgtatggaacaagaatcaaataatagactacaattcatcactgtttctagagtgtcttatacggaagacgaagttcacttagaaacaggtgatgtcattttatccgttgatgataagttagtcattgaaatgaatgatttgaatggggttataagctcggcagatggtattttacccccaaccatactgaatttcaaagtggttcgtgacggtaatattgtagatttgaagatcaaaaccgttgaggtcaaagaaactgatcattttgtaatatttgccggtagtatcttacaaaaaccacaccatgctgttttacaagcaatggctgatgtcccaaagggtgtctactgtacatttaggggagaatcatcaccagcaattcaatatggtatctccgcaacgaactttatcacacatgtcaatgaaattgagacccccaacctagataaatttctggaggttgtcaaaacaatttcagacaatagttattgtaagatgagattgatgacatttgacaatgtaccatttgctatttcactgaaaacgaattaccattacttcccaaccgcagaattgaaaagagacaacgtgacacgtaggtggattgaaaaggaatttaccggaaatagccaaagcgaaaaatag

SEQ ID NO: 2171 - DNA, 1854 bp, Saccharomyces pastorianus
atgaagagttttatttcaaagaacaaaactgccattttggccaccattgccgctacaggtactgccgttggtgcatattattattacacccaattgcaacaacagcaacaacaagggaagaaggaaacgctctctcgggatgaaaagaaggaggaaaaggggtctcagaagaaagctgaaagtgctaagaaatcggcaagtgaatcaaagccccccgtttatccagtcactgctaatggggaaccagatttttcaaaaaaagcagattttactgctgaagaaaaggataaatacgcattagccttaaaggacaagggtaatcaatactttagaaataagaagtatgatgacgctattaaatactacaattgggcattggaattgaaggaagaccctgttttctactcgaacttgtccgcctgttatgtttctgttggcgacttgaaaaaggttgttgaaatgagtaccaaggcccttgagttaaaacccgattactcgaaagttttattgagaagagcctctgctaatgaggggttgggaaattttgctgatgcgatgtttgatttgtctgtattgtccctaaacggtgacttcaatgatgcttctattgaaccaatgttggaaagaaacttgaataaacaagctatgtcaagattgaaagaaaagttcggtgacgttgatgccgctactgctacaccaacagaactatctacccaaccactaaaagaacgtaaggacaagcaagaaagcttaccttcagttacatctatggcctcattctttggtattttcaagcctgagttaacctttgctaactgtgacgaaaccaatgaagctgataaaaaattaatgaacgggttagctaatttgtacaagagatctcctgacagttacgatagggctgatgaatccttcacgaaagctgtaaagttatttgaagaacaactggataaggataatgaggacgaaaaagtgaaagaaaaattagctatctctttggaacatactggtattttcaaatttttgaaaaacgatccgttgggagctcatgaagacatcaagaaagccatcgatttgttcccaagagtcaattcatacatctacatggccttaattatggctgatagaaatgactctacagaatattataactactttgacaaagctttgaaattggatttgaataactcttctgtgtattatcatcgtggtcaaatgaacttcatcttacaaaactatgatcaagcaggtaaagacttcgacaaggctaaagaattagacccagagaacatcttcccttacattcaactagcatgtttagcataccgtgaaaataaatttgatgactgtgaaaccctgttcagtgaagctaagagaaaattcccagaggcaccagaagtaccaaatttcttcgctgaaatattaactgacaagaacgatttcgataaggctttgaaacaatacgatttggctattgaattagagaacaaattggaaggtatttacgttggtatcgcaccattggtcggtaaggctactttattgacaagaaatccaacagttgagaattttattgaagctaccaatctattagaaaaagcatccaaattagatccaagaagtgaacaagctaaaattggtttggctcaaatgaaattgcaacaagaagatatcgacgaggctattgcattattcgaagagtctgctgatcttgccagaactatggaggagaaattgcaagccattacttttgctgaagcagccaaagttcaacaaagaatcagatccgatccagtattggctgccaagattcaagaaactctagctaaattacgtgaacaaggtttaatgtaa

SEQ ID NO: 2172 - DNA, 2988 bp, Saccharomyces pastorianus
atgtcactaccgctacgacacgctttggagaacgtcacctctgttgatagaattttggaggacttgttagttcgttttataataaattgtccgaatgaagatttgtcaagtgtcgagagagaactgttccatttcgaagaagcctcatggttttacacggatttcatcaaattgatgaacccaaccttaccgtctttgaagattaaatcatttgctcaattaatcataaagttgtgccctttaatttggaaatgggatataagagtagacgaagcgcttcagcaattctctaagtacaaaaagagtattccagtgagaggtgctgctctattcaatgagaatttgagtaaaatattactggtgcaaggtacagaatcggattcgtggtcatttccaagaggtaagatttctaaagacgaaaatgatatagattgttgtattagggaagtcaaggaggagataggctttgacttgacagattatattgatgagaatcagttcattgaaaggaatattcaagggaagaattacaaaatatttctgatatccggggtctcagaaatcttcaactttaaaccacaagtaaggaatgagattgataagattgaatggttcgatttcaaaaaaatctctaagacattgtacaaatccaatgttaagtattatcttatcaattctatgatgagacctttatcaatgtggctaagacaccaaagacaaataaagaatgaaggccaattgaagtcttatgcagaggaacaattgaaactattactaggcattacaaaagaggagcagattgaccccggcagagaattattgaacatgctacatactgctgtacaagcaaacagcaacaatatcataacctccaacgaacaggtgccctcgaatcaacaaggagaacaagaaaaacaagaagaacaatttcaacaagaacaggagaaacaacagttaccaccaccgccaccaccactgcaacaacaacaacaaccagtctttccttctctctcagaaccatttgcaggcgccaacaatgttataccacctgcaatgcctatggtgaattcattcatgtcaaatcctcagctgtttgcttcaatgaatggtcaaccgtttgcacctttcccattcatgttaccaataaacaacagcaccaacaacaacggtggtcacaacactcttccaacgcagatacctcctaacttcaatgcccctccaaatccaatggcatttggtgttccaaacatgcacaatttttcaagaccaactttatcccaacctttttccctaccccctgctccaccattacatcacaatattttgcccactaattctgttgaaaatagttcttcttcaagacaattattgaacttattaaactcaaaaaagtctgaagaaaatgaacagattagcgaaaagccaaaattaaaaattttgcagagaggaactgatttgaattcaaccaaccaaaacgttcctcatgattctgccaactcaaattctcaagctttattaaatttgttgagaaagccggcaccatctcaagaatcccattcttccactgtagatacttcgtcactatcaaatgactcttattctgatacacaacaagaggattatgaagattttgaaagcagttcagatgaagacatggagccaatcaaagaaagaagaaactcgtcaaatgaagaagtcaaagtcaacattataccaagcgaaaaagacggccaaagaaggccaaagaaagaacaaagaacagaaaccaaaaaattcaaatcaggcgactcaacggaatccgacatcatggaatggagacctacgaagtctttagtttcttcgcaaagtaaacaaaactcattagtaagagctcctaataaagagaccagttcatatcgtcaagaaatgcacatcaacaataacagcgcgtatgaagctttcgaaagcagttctgacgaagaagacgagaagaaattaaaagaattggaacaaaagcaagacagttctaaaggaataagccaagaaatattgaaagagaataactttcaggatggcgaagttcctcacaaaaatatgacaaccgacagtaacaaatctatcaatgaaacagccaggttttcatcagctacaagtactataaaaaagacacctaaggtgaaattactaaaacgtggtgaaacaatccccactttagcaaatgaaaacaaaactcttggatcaaactcgaaccagtcttcgtcaaaagatttattgcaaatgctaagaaatccaatattttccactgtatcttcaaatcaacaatcacctaagtcacaacaactagatggggatgaagaaatcatgatgatgctgaagagaaattccgtgtctgaacatcaaaacaatgaagaatctccatcaaaattgccaaaaaaaaatgaagcaaacgcagctgaattactaggaatgttaagtcaaaaggacgctgcatctccaaaacaacctggtagtattgacgcgaacatggaaggtaattcagcaaaaggactgttgagtatgctgggaaaaggtaacgtttcaaagccacctccgactaccgataccccatcaaatgaattgttcaacttgttgaagcaaaacgaaattactgaaaaccaagaatctaataataactcgtctgaattactaagttacttgaatcctaattcactcgaaaatagatattcaaaagtctcaagcgaagacaactcccacgaattactaaacattttgcatggtaataaaagtaacaacaccttcaataatagtatatacaccacgccaacagccacttctaaggccgctgcaaccggattccccctaatgtctgctagtcaaggaaattcttcaaacgaattactaagtatgttacaaaacagaccaacagctacaaatgcacaaacgtttgacatacgttccaatgggaacatggaatctaacgaattattgaatatcttgcataggaaatga

SEQ ID NO: 2173 - DNA, 1665 bp, Saccharomyces pastorianus
atggtaaagatcagtttagataacgtcaaattgttggttgatgtggacaaagacccattcttcaagccatccaccaccacagtgggtgatattttgactaaagatgctctagagttcattgttttattgcacaggactttcaatggcaagaggaaacaattattagagaatagacaagttgttcaaaaaaaattggactctggatcttaccagttggatttcttacctgaaactgagagcatcagaaacgaccccacctggcaaggtccgattttggcaccgggtttgatcaaaagatctactgaaattacaggccctccattgagaaatatgttaatcaacgccctaaatgcccccgtgaacacgtacatgacggattttgaagattctgcttcccccacttggaacaacatggtctatggtcaagttaacttgtacgacgctatcagaaataaaatcaattttgacactccaaggaaatcttacgaattgaacggcaacgtcgctgacttgcccacgatcatcgtgagaccccgtggttggcatatggtggaaaaacacctttatgttgatgatgaaccaattagcgcctctctgtttgattttggtttatatttctatcataatgccaaagaactgatcaacttgggtaagggtccttacttttacttgcccaagatggagcatcatttagaagccaagttatggaatgacgtcttttgcgtggcccaagatttcatcggaatccccagaggcacaatcagagccactgtactgatcgaaactttaccagcagcttttcaaatggaagaaattatctaccaattgaggcagcattccagtgggctgaattgtggacgttgggactacatcttctctacaatcaagaggctaagaaatgaccctaaccacatcctgcccaacagggacctggtaacaatgacctcccccttcatggacgcatacgtgaaaagactgataaacacttgtcaccgtagaagcgttcatgccatgggcggtatggccgctcaaatccctatcaaagacgatcccgtggccaatgaaaaggccatgactaaagtccgcaacgataaaatcagggagttgacaaacggccatgatgggtcttgggttgcacatccggcactggctccgatctgtaatgaagtcttcatcaatatggggactccgaatcaaatctacttcgttcctgaaaatgtcgtcacggcttcaaacctcttggagaccaagatccccaatggcaaggttaccaccgacggcattatacagaacttggatattggcctgcaatacatggaagcgtggctaagaggctcaggttgtgtgcccatcaacaacttaatggaagatgccgccacagctgaagtgtctcgttgccaattgtaccagtgggtgagacacggcgtcacactaagtgacaccggcgaaaaggtcaccccacaattgacccaaaagatcctggaggagcaagtggaaagactatccaaggcaagtccactaggcgacaagaacaagttcgcgctggccgctaagtatttcttgccagaaatcagaggtgagaaattcagtgaattcttgactacgttattgtacgacgagattgtgaccaccaaggccacccccactgacttaagcaagttgtaa

SEQ ID NO: 2174 - DNA, 1632 bp, Saccharomyces pastorianus
atgtatacgcccattcctgccaataccccggcacccactgctccagcctcgtcgatggcttctaactcttcatccggatcgaatgccaactctagcagcactacgggcaacaactcgaacatgaggaacgctggcaatggtagagctagcggtacgtcttccaacggaagagctcgttctgggtcaggtatcagttcgtttttgaatactttcggaattagacaaaacaaccagacggcctcgtcttcttctgtggctccggatcagcgtctatttggcaccactccatccaactcaaatatgagttcggccatggaaaacgctaatgctgctccacctcagcaggaaccccgcttgcatcaccccatacaaatgcctgcatcggtccagtttcacgttcaccgtaactatcagcttccaatttccttatcgctaaccgcccccatgtccgcagatcaacaccaacatcatcaacaacagcagtctccacaaaattttgaaaatagcaatgctgcgagtattcaagaagccttgaatcaacaacagactgccactacatccaataacaatactactaccactacaacgtctactactctattgataccagcggatgtagcaagaaacaatacaggtctcgcagcctctggcttggaaggcccggcctccaccactaataatcaggaaatgtataagaatctgcgtcacttgatatatgctgcaaaccagccaaatgggacggaaattttgcatttggacttacctgcgacaatcgcaggagattcaagcaatactattaatgttgatgaagatactttgaagcaaagaaaggacaagcatggtcttttcagtataaggttaacgcccttcattgacagttcttccaccacaaatcaaggtttattttttgaaccgattataagaaaagcagggccaggatctcaattggttattggccgctacactgaacgtgtccgcgatgcaatctctaagatacctgaacaataccatccagtggtatttaaatctaaggtcgtatcaagaacacatggctgtttcaaagtagatactcaaggtaattggtatataaaggatgtgaaatcttcgagtgggactttcttgaaccaccaaagactttcccccgcttcatcgttgtcaaaggatacccttttacgggatggtgacatcctgcaattaggaatggattttagaggcggcactgaagaaatttatcgttgtgtaaggatgagggtagaggtgaacagatcatggaaactgaaggcaaactcgtttaataaagaagctttgcaacggttacagaacctacagaaattaactacaggagttgaagaagaagattgctcgatttgtttgtgtaagatcaagccatgtcaggctattttcatatctccatgcgctcatagctggcatttccgttgcgtaagaaggctagtcatgctctcatacccgcaattcatatgtcccaactgtagatcaagttgcgatttggaagcttctttcgaaagtagcgacgaagaggatgaaagtgatgtggaaagcgaaggcgatcaactggttgatcaattgagcgtactaatggaaacttcaaaggatgccgtcgaccatccctaa

SEQ ID NO: 2175 - DNA, 1956 bp, Saccharomyces pastorianus
atggaggccaacagtttagataacgaacctacaaggaaaccagcacaggcgggtgcacatgacaagcatccggaagtacaaccgcttctaaacaacaaccacaggacgcttgggggcagctcctctatcaacggtccgtcttcagttaacgaaagtcgtgatatcgaatctgaagggtttataaaggataggctattccaaattcgtaagggttataggattttcatccataattccaagtggattttgaacgttctaattttaatcaatactctttggttagtcaccacgttgatttcggatttctttttcaacatcgatgttcttttcgggtttagcaaccgatacgcaagtttcaatgacctgactttaatatttatttcaattgttgcgaactcttttaacctctggtttaacaagttgggactgtattcggccctagattatggcttgaatgtgaccctctgtgttttgacgctgttcaatctggctctgacgtatatgatcaaatataccagacagagaatcgggtttgtcggtacatttacctatttatggacatcattttcatttttcgttggcgccatatttgactggtacctcgtattttacaatgattcaataaatgaaccgttggaggaacgcagtattgaagatactactattaccgtgaatgataacaatgcaaatgtcgaaaatagcaacaacatcaacaacagcaacggaggccaatacgggtcggccccaacaactcctacgcgcgaggttagaccagtacaaggcaagcataccttaacagaatgggtattcattgggtttagaaattcaatcaaatctgccattctgatattcttcactctatttactttaaacaccctgttgactacattagatacctacagattgacgcacaaattaccaataactgttcaatcgccttcatacgaggcatttcactacgtcgacgctgctaagacttacaaattgcacataacttgttatggtgacgtgtttaatcaaagcaatgaaacagagtcaactgacaggaaaaagaagcagcaaccgataattttgttcgaacatggaggttacgataccggttatctgtctgctacttggatcgaagaactataccatttagatagagttcaaaggtactgtttatacgacagaccagggtacggattgagtgattctcctcctgcaccaatttcaattgctatggtagccgaatccctaaggtacgcactgattaaggacgctaaaattatgggtccattcaccacggtaggatacgatcttggcggactattcacaagggtgtttactgccaaaaatgttgatatcgtggatagcatgatgctcgttgaatcatggcacgaggaactgctgttaaaaaactatgttcagagactattacccccaggccgtggcgacggcgatgatggcgatggaaacgatggcgataaccgtgatggtcgcaatcatgataaaacttggttgccttccgagattgaaagacacaatgagttcagactatggtggaagggtatttggtcgagtttagggtggagattacaaacctcttggttgttggctcatcatgggtctaaagagcgtatatttggacgtgatatgaaataccagggacgtttcttgcgttctaaatttttggaaagtgtcactagctccattttaagttataaggatgtgacaaacaatagagagtccttacaaaacgtcaaaacaagcattgtcagttctaaagaaatggtgaagaagtcagcattgtggggtgactggcaaagggaattgacaaaaatctctcacaagacccaagaatggaaaatcgtagagggtggccatgaagtatacaagtatggtcttggtaagcaacaaacccaagaagttttgctaagattgataggtgagctggataagttttcacaggactaa

SEQ ID NO: 2176 - DNA, 429 bp, Saccharomyces pastorianus
atgactgaagatatcgaaaacaagaagactgccctagaggaaacaacacaggagccaaaacctgcccaggaagaggaggatcaggatgtcgagatgactggcgatgaagagcaagaggacgaaccagacagagaaaagatcaagcttttaacacaggccacgtctgaagacggaaccagcgcctctttccagattgttgaagaagaccacacactgggcaacgctctgcgttacatcataatgaagaacccagacgtagagttctgcggttattcgatacctcatccttctgaaaacctgttaaacgtcagaattcagacctacggtgaaactaccgctgtggaggccttacagaagggattgaaggacttgatggatctgtgcgacgtcgtggaatctaaattcaccgaaaaaatcaagagcatgtag

SEQ ID NO: 2177 - DNA, 363 bp, Saccharomyces pastorianus
atgcctcaagtttacagttaccaagaagtcgccgaacacaacggtccagaaaactgctggatcatcatcgatgacaaagtttacgacgtttctcaattcaaagacgaacatccaggtggtgacgagattataatggatttgggtggtcaggacgctacagatagttttgttgatattggtcattctgatgaagctttgaaactactgaaaactttatacattggtgacgtcgacaaaaccagtgagcctgttgttgtaaagaaggctgttacctctgaaagtcaaagtcaaggtagcgctacattggtcatgattttggccgttgtaatgctaggtgttgcttattatttgttgaacgaataa

SEQ ID NO: 2178 - DNA, 666 bp, Saccharomyces pastorianus
atggtcaagtcagtaaagaagagttccaccaaggaagtcgtaaacaaaataaccaaagaagaaaaaccagtacagaaaaaagaagaggaattacagttagaatcatcatctaccagttcagatgaagaagacaaaatcgatgaagacaaaattgaaggtttggctgtttctgatgatgaacaagacggtacgcacaaaattaaaaagttgaatcctaagaagaaagttgatcaaaaaatatcaaaggacaagaagaaactcgacgaatattctgccattatttatgttagcagattaccacatgggttccacgaaaaggaactaagtaaatattttgctcaatttggtgatttgagggaagtgagattagcacgtaataagaaatcaggaaactctagacattatgggtttttagaattcgttaacaaagaggacgcactggttgcccaagaatccatgaacaattacttgttaatgggccatctattacaagtacgtctattaccaaacggagccaaaatcgaaaaattatacaagtacaagaaaagagtcttggtagagaagggtgttaccaagccagtgaagcaactaaaggaaaacatgaagcaaaaacatgaagaaaggataaataaattggccaagtcaggcatcgaattcaaatggtga

SEQ ID NO: 2179 - DNA, 813 bp, Saccharomyces pastorianus
atgactatagaaaatatatacatcgccagacatggttatagatccaattggttaccaaaggggccatatccaccacctcctaccggcatcgataacgatgttccgctttcagaacatggtgtcgaacaggcgcaagaattagcaaactatatctcaaaactggatgtcaaacctgagatcattttttgctctccgttttatcgttgcctggaaacgagtagacccacagttgagtctcttaaaattccattatacgtagatcgtggtgtgggagaatggtacaaacctgatagacccattatcccagaaccagcaactcatgaagtaatgagtaaatttttcccagctatgataaatccaaattgggaatctagtatcattcctagtagtagaggtgagacagaagaagacatttttgaaagatgtcataagttctggcccattttcatcgaaagggtagaaaaaagatttccagaaatcaagacgattatgattgttacacatgcagccactaaatcagctcttggtatgaatttattgaaattctccagtgctaaagagcccattgatgataaaggtacctttataagaaacggaagttgcgctattgacaaatttgaggtgttgaaagcagaaggtgaaaatctgccatttgaaaagagggtatggagaattacgatgaatggtaatacatcttttctaactaacggagaagaaatgaattggacatttatgaatgcctttgaagccggatctgacgccgacattaaggcaagaagagcagcagaaagcggaaaattgaaaatggaataa

SEQ ID NO: 2180 - DNA, 3549 bp, Saccharomyces pastorianus
atgaaaatactcatatccaaacaacaaggtagaagtatagcgatagtttcagaatcgtatggattagtatttagaccaattggtgataaaatctcccgaaaatctacatgtgccgtggaattcataccgaaagctgacttgagcagtcatggtttccaaagactctccagccatgaaatattcgggttcattggtcttattgaacttgaaggtcttatatttatagcgactattaccgggaaatctaaaacggcccaaccgattcctaataagaccgtcaacaaaatatatgctgtggactttttttgtttaaacaattccaaatgggatttccaggacattgattcttctggctatccaattatgaccaacgatggagattttgaaccacgctcacgtaccaatgcctccatacggtcatctagatcatcgctgcattcttcttcctcgagtagcttgaaccgccaagatcaagttcctaagcatccatgctacgaattgagaaaactactgtcgaatggttccttttattatagcacagatttcgacctgacttgtacgttgcagaaacgtggattcactgaacattctttgagttttgatgatttcgatagggagtttatgtggaactcgtttctcatggatgatattatcacatacagagataggttagatgtgataactaagcaactcttggacgaacaaggattcctcacaacggtaatccgtggatttgccgaaacagttttcagctacatcaataagttaaaagtggggcttactatcatttcaagacaaagttggaaaagggcaggtacgagattcaatgcacgtggtatagatgacgaaggctacgtagcgaatttcgttgaaaccgaaatgattatgtattcttctcagtattgttatgctttcacacagataagaggaagcgtcccagttttttgggaacaagacacgtcattgataagtccaaagattcaaattactagatccatagaggctactcaacccacgtttgatgaacactttatgagattattcagaaagtacgggcctgttcatataatcaatttattatcatcgaagtcctcagagcttcaattatcgaggaggtatagggagcatttgaagaactctgataaaatgaaaatcggaagagatgtgttcttaacggattttgacttccatagagaaattcatcaagacgggttctcagcggcaaaaaagattatccccaaaataaaagactcgatcatggctgcaggctatttttcgtacgacgtgaaagaagggcgattgatatctgaacaggatggtatcttcagaactaactgtttggattgtttagatagaaccaatctgattcagcagacaatttctttatcagcattcagattatttttggaagattttagattaattaggcccaatattctcacaaactttagcgaattcgtgcaaaaggagaacgttttatgggctgatcatggagatcagatatcacagatttacaccggtacaaacgctctgaagtcttcctattccagaaaaggtaaaatgtctctatctggtgctctttcagacgccacaaagtccgtcagtagaatgtacattaataattttgtggacaaaggaaagcagcaaaatattgacacgcttttggggaggttaccacatcaacaagctgtcgaactgtatgatccaatttgtgagtatgttaatgaaaggctattggaactagaaaacgaattcactacttgttctaatgtaaatctgcttattggtacatttaatgtcaatggtaactctagaagagcggacttatcagagtggttatttccaatcggcgacaaattcaagccagacattgtcgtgctagggttgcaagaggttatcgaattgactgcaggatctatcttaaatgcggattatacgaaaagctctttttgggaaactatggttaccgactgtttaaaccaatacgaagaaaagtatcttctaattagagtggaacaaatgtcctctctcttgatattgttctttgtaaaatctgataaggcccacaacgtgaaacaagtagggggatctactaaaaagacaggtttcggcggcatcactggtaacaaaggtgcggtggctattagattcgattacggggcaacgtctttctgtttcgtcaatacccatttatcagcaggtgcaaataacattgacgaacgtcgtcatgactacaacaatatttacaggaatataacatttccaaggtctaaaacgatacctcatcacgattcattgttttggttaggtgatttaaattacagaataaccttagtaaacgatgaagtaagaagagaactgaggactcaggaagatggctatattggcaaattacttcaatatgatcaactaactcaagaaataaacgaaggtgtagtatttcaagagtttaaagaaccaaccgttcaatttcgccctacctataaatatgattatggaactgataattacgatacttctgaaaaggcaagaacgccatcctggactgatagaattatctataaaggtcagaacctgcatccattagcatattcagatgcacctttgagaataagcgatcataaaccagtttatgctgcgtatagagcagacgtgaatttcatcaatgaggataaaaaacgtgatctagttgagaaattgtatgcggaatacaaaaagacatatcccgaaggatcaataaaggattttaaaaaatcacataatataaaagctgagattcaaaagaaaagcatacctttggacgtaactgttcaatcagctggtataaaattaatcgacctcgatgacacatcttcatgtgtttctcctccacttcccatttcgcgttcttcaaggtcgattgctggatctagttcagaagcactcttcgagaaaagtaagcccaatgtttctccaccgcccatttcaagaaatagtaaggaaacttcgcttaggccggtaatatctgtaaatgagatccctataaccggagtgtcgtcgcataaagttgaaggtactcttactgccttagagggacatgctatgcccaaacctctaccccctccacctgtttcgtcaaggtcagccacttcctcaaaaagtacagcattagtagtcgatcatacagagacaccagagagtaaggaaccaattccccctccttatacacaaaggagaaggaagagcagcatttacttgaatgaaagtgccatttccaccgatagctcacgcctatcttcaaggtcaaatactccgaaaaacgcagatgcttctccaaaggcccctacacaatctgagaaaccaccaattgtcaagaagcctgcttatctaagcgctgctgctactaaggttaacaatagcgatggacgcttatcaaaagtaacctcatcggatacaacatctgacgaggaggtctcatcgaaaaagaagtctacacctaaagtacctgcaaaaaacccagaattagagaaactaagcgtagattcgtggaaaccccttaagcctagttag

SEQ ID NO: 2181 - DNA, 2154 bp, Saccharomyces pastorianus
atgaccaacagcaatgaggatgatgagcaccttggaggcaggagacaagggaatttgaggcacgcatctaataacatgaaaattcctggaagaagtcaatcaacagttctcaattcaaatccattttctagtagaaaatactcgatgtgtactttaacacccaaagatatatgtcgaagcgttgattctagggttttcgtggatattgcatcgcccaattttcagactctcgaggatccccataaagatgaaataataaatagtgtacggctcaactatttgaacaataatagcaaaaggaattctatcagcctgcacgggcaggaagaaaaagccagagctgatcgaactaagaattcttctggaagtttcagtactagaactgccgcaaacatagacagcgaggacgatgaaactaatttgaatagtgctggtggtgacataacgcatgatatttacaaaatggttaaagcagaaaatcctcagcggcttagacgccttcattccatggaagatgtaaactccaaaattgaacatcataccaaactgtcatcagcaagcggactaaatgttcccggtggctttagaagagaatttatcgttaacaagaaaagacaagaacatcaactaaatgattctgctagctctgatttccattcgcaggaaagcgattcgattaatcagccatcttcatcttctaagcaagatattgataaggtcccgtttctgacaagaaactttttggaatttctatacgtatttggacattttgctggtgaatcctttgaggatgactttatctctgatagctcgaaccttttattgcagggagaagatgaacgaagtgcattattatctcggccagatcatatgaaggtcctgccctccgccaagggtacaacttcaacaagaaaagtgttcctgatattgctcaaatcctttatcggaacaggtgtcttgtttttacccaatgcgtttcataatggtggtttgtttttctcagtaagtatgctcacattctttggtatttattcatactggtgttattacatattggtacaagccaagtcttcgtgtggtgtgtcctcctttggtgatattggtttaaagttgtatggaccttggatgaaaatcataatcctgttctccctagtgataactcaagttgggttttctggagcgtatatgatatttactgctaaaaatttacaggccttccttggaaacgtatttcatgtgggagcacttcctttgtcgtacttgatggcatttcaaacagtaatttttatcccactttcatttatcagaaatatctcgaaattatcattaccatcgttgttggcgaatttttttattatggctggtttggtcattgtgattattttcacttcaaaaaggttgtttttcgatttaaaggcgataccagcaatgggggtggtatacgggttaaacacagatcgttggacactgtttatcggaactgccatctttgcttttgaagggatcgggctgattattccggttcaagactcgatgaggaatcctgaaaaattccctctagtacttggattggttattctcactgccacagtacttttcatttccatagctaccctggggtatttagcttatggctcggatgtcaaaactgttattcttttgaatttgcctcaaagtaacatttttgtcaacttgattcaattattttattccattgcgatcatgctgtctacacctttacaattatttccagctattaaaatcattgaaaacaagtttttcccaaagtttgctaaaatatatgtcaagcacgatgacttgacaacaagagtagaattacgtcccaactctgggaaactgaattggaagataaaatggttaaaaaattttatacgatccatcattgtcatcatcgttgtatcgattgcttactttggctctgacaatttagataaattcgtttcagtcatagggtctctcgcctgtattccattggtatatatatacccatcgatgttgcatttacggggtaatagtcttccagaggctaaagggaatttttggaaattcaaaccaattttggacaccattttaatttttttcggcataacaagcatgctttatacttcctatcagagtatttttggcgtttaa

SEQ ID NO: 2182 - DNA, 708 bp, Saccharomyces pastorianus
atggtaaatttttacaacgacgttaatgaatctacgaattcaaacggcgaattgcccttaatacctattgcgtttcaggattcatcagaattattagtcaggactatatctacgggaaatgaaatcatcgaatcagtacacttgacgaaatggttacagaaacgcagaactgcgtttgctgatcaacttgaccgctacgaaaaaaaatgggaaaccaatacagctaactttagacttcaagttcaacatattatcaactattcgagaaaaaacattttcaatgatgaatttgaaaataagcatactgtggtcccaggctcactaatagcactgggtgcctttttcgctggcagtttagcagtcaataaatctaactggggagctaagagattgttattcagtcataagtcaagcattcttgaaaaactgtgtacatcattaccatcgagaatgttgctgccttgggtattggcagcagcaacgtttaaattctgggcacctcaaacatcacagaatctagttagtgccacggaaaatgatctactaccacgcgactttgtaagttcatatcatgatgcttggaaacaactctacgaagaaggatatgttgcgaaaaagaataccttgaaatgccatattgatcagactctacaaaaaagtatcaaatacgcaagggaacaactttatgaaaagttggaacaagcatga

SEQ ID NO: 2183 - DNA, 723 bp, Saccharomyces pastorianus
atgacatctaatgttgcagaatatgaacacgttccagacgatgagtcctacctgacaggggaggacgtatcgatgcctgaagaagaagaagaagaagaagaagaagaagaagaagaggacgatgacgatgatcacatatatatcaacgaagaaacagaatccggacgtgaaaaagtcttagtctcgcatgctccactagagcgtattgttcctcctttgaatttttgtcctgtggaaagatacctttataggtcaggccagccctcgcctgtgaatttcccctttttattgaatttgaagctgaagacaataatatggctgtctaatgaagaacctcaggatacccttttagagttttgtgatagccatagaataaacttacaatttgcggccataaacccggatgccggtgaagacgataatccttgggacggtctcactgagcactccatcatcaacgtactgcaaaccatcgttactcaagagaattatcccttgctagtctgttgcggtatgggaaggcatagaactgggacggttattggatgtctaagaagaatcatgggttggaatttagctagtgtgtccgaagaatataggcgctttacgggtagtagaggcggcagaattcttgtggagttgcttatagaggcctttgacactaagctagtgaaaatagacaagaacaaggcgccaagttggttgctgacagccctagagtaa

SEQ ID NO: 2184 - DNA, 969 bp, Saccharomyces pastorianus
atgcctttgaacaagtcaaacataagagaatacaaactagtcgtcgttggtggcggtggtgttggtaagtcagccttgaccatccaattgactcaatcgcactttgtagatgagtacgaccccacaatcgaagactcatacaggaagcaagtgatcattgacgatgaagtgtccattctggatattttggacactgccgggcaggaagagtactccgccatgagagaacaatacatgcggaacggtgaagggttcctgctggtgtactccataacgtctaagtcgtccctcgacgagcttatgacttactaccagcaaatactgcgtgtcaaggatactgactacgtgcccattgtggtggtaggtaacaaatccgatcttgaaaatgagaaacaagtctcgtaccaagacgggttgaacatggcaaagcaaatgaacgctcccttcttggagacttctgccaagcaggccatcaacgtcgaagaggccttctacacattagcgcgcttggtgagagacgagggcggcaagtacaacaaggcattgtctgagaacgaggcttccaagcaggactctcaaacgactccaggggtcgttgccaattcgttgccaagaaatagcaacggaaacagaaaggcaaacaatgtcgccagtgccaacaacatcaatagctccacgactgctgtaaaaacccacaatacaggaatagaagctaatacggggtcgatgggcaaccaagcaaccaatggccaggcgcggtccgatcgtgccaacggagacaactccgccggtaacgctgatggtgcctatgctagaactgccaatacggccgatgatcgtgtaaataaaaacaccgaggcaggtcagggttctgctgccaaacaagccagaaaacagcaagctacatccagtggcaccgccagtgaaacctccaagagtggatcaggcggctgttgtattataagttga

SEQ ID NO: 2185 - DNA, 987 bp, Saccharomyces pastorianus
atgagttcaccagcaaatcttttccctgggctgaatgacataacggacgtcctggaggaatttcctctagccacgtctaggtatttaaccttattacacgagatcgatgccaaatgtgtgcattcaatgccaaacctgaatgaaaggatagacaagtttttgaagaaggacttcaaaaaagaccacgagacgcaagtagggttgctcaataacataaacaaaatctacgaggaactgatgccgtcgttggaagagaagatgcacgtatcatcgatcatgttggacaatctagacagactgacatcccgattagaattggcatatgaggtcgcgatcaagaatacagaaattcccagaagccttagattgggcgtggacaatcatccggcaatgcatctacaccatgaactaatggagaagatagaaaccaagtcaaacagcaaatcgtcgcaagcattgaaaagcgaatcgagaagagaggccatggccgccaacagaaaacagggtgaacatttcccaccaactccacaacaacatgacgatctaaagaatgatctcagctacgcagccggcagacaggatagccagggccaggttggcagtagcacaagttcgagaaagagaataaacaccacaaatcccaatatcagcgaaacagaacccaaaagacgcaagcgaagagtcgccactacttccgtctccccggccacctccaacaccaccgcccacagcagcagaatggccggctctgcggtgtcccgggctgtcagcagcgctggcagcagcaacaacagcaggatatcaaggccgaagaccaacgactacggcgaaccgctctactgctattgcaatcaggtggcgtacggggaaatggtgggttgcgatggagcagactgcgaactggagtggttccacttgccgtgcatcggcctcgagacgcttcccaagggcaaatggtactgcgacgactgcaaaaaaaagctgtga

SEQ ID NO: 2186 - DNA, 1893 bp, Saccharomyces pastorianus
atgctgcacataacattaggtcaagccatttgggcttctgttaagccgatcataaaaatttacttgattataggtgtagggtttttaatggctaagatggggatcctaacagtggaggcgacacgaaccatttccgatgtcgtactaacggttttgcttccctgcttatcattcaataagattgttgctaacattgaggataaagacatcaaatccgtagggattatttgtctgtccgctgtacttatctttgtgacaggtctatttttcgcatatatggttagactatttctgccagtacccaaacagtggtatggtggtattctcgctggtggcatgttccccaatatcagtgacctgcccattgcgtatttacaatccatggaccaagggtttatattttcagcagaagaaggtaacaagggtgtagcaaatgtcattatatttctgacaatgtttttgatttgcgtcttcaatttgggtggatttcgactgattgaaagcgattttggatacaacgacaatgaaaacgctgcaagagtgtcagaaacgacaggcacattgcccgccacagatacgaacagtactactaataataaaaattcctctccgtatgaacgcaagattttcaatgacaaatataccgcatgtaacagcctcactgaagctacaaacgcatcatcaataacaagtccaagaagaagtataggccccttatcagttgcgggcactcgttccggttccatagtcacaaaacctgctcaggcaaggacaaaggatactgttgaacgcatacaaggtgaagaatcacatatagcatctggtttaaactcattggagaaccaatcgtccgcttcgacagtgcattcctataatacgtcagagagttacaatagcagcctggatactatgagggcacggagaataccaagcctaccgagagcttacaataccgtttctgaagaaaagagtctagacgagtacctcccaggaaatatatctatgtcagccttggagcctatccgctccattgatatgcgtgcattgcctcctcaagacatacaccatctcattagagaatactccaacgttgaccaatttgggcacagaagaaggaactctagtttgatcagttccgatatgaatgatgcacattcaatcaagtcgatctctactctacaaactataaaaaatgccaatctaactaggattttaacctcggatgccaccgtaagtaaaaaggatattgaaacttcgggcgaatcattacccaaatgggtgagaaagttcccactaactcccttgctagtatttttcttgaaaaattgtttgagaccgtgttccatggctgtcattctcgcactgattattgcgtttatcccatggctcaaggctctatttgtcactaccgctaacaccccgcacataaggcaggcaccagacaacgcacctgcattaagcttttttatggattttacaagttatgtgggcgctgcatgtgtcccattcgggttaatcttgttaggggcaaccttggggagattgaaaatcggcaggctctatccaggattttggaaagccgccgtggtacttgtcattttgagacaatgtgttatgccgatttttggtgtcttatggtgcgatcggttagtgaaggctggctgggtcaactggcaagatgatagcatgctattgttcgttattgcgattagctggaatttgccaacaatgaccaccctcatatactttaccgccagctatacacctcctgaggtaactgagccgatccaaatggagtgtgtgtccttcttcttgatgcttcaatatccactaatgactgttagtttgccatttttagtttcttactttctgaaagtacaaatgaaactttag

SEQ ID NO: 2187 - DNA, 1776 bp, Saccharomyces pastorianus
atgaatggccaagactacgatgaaagttcttcttctgcagctgcttccactaatcctgtttcagtcgaccaacggatggggaagaaacagcgatttatgaatctcatgaggactacgaaggacgtttacattcccaatctaacgtcatccatatctcagaaaacaatggatggtattagaagcactacgaattcttttgagggctccaatgatatgttgccgcagttgccgtacaacaccatgatatcattttacccgacgtataccacaacgaacttagtcgactcggacggcgtaagtgctccacgaaaagattttgaaactaccgttagatgtgctgtatcttatccagggaaccccacgagtaggagaaatagatggctggtttctctctgtaagcaatatcttaggacaggaaccgtggaagccgatattgcggccgtggttcccgcacgcctcgaagacgatgctgaagacttgatggattctcaatcaagtatagatagctcgtcatcttcgaaaagtggcaatacgtctccccatacgggcacccaagaggaagatgttctgaatgagagaattcaaggattcttggcaaggaaagttccgaatactccgatagtagttgatcttttgcccaaagatagccttcgcggtgatacagcttcgttttttggtaccacagactattacggtaacttattgcttaaggcagaaacagatttcttaccctcgaaaatcaacattacgttggacacccctgtggctggccgcccagattcaatatctcagagttttcccgtcaattatgtctcaccctatggtgttggtttaatcagtgacatcgacgacactatcaagcatacaggtgttacaggtgacaagagatctatgtttcgtaacgtgtttattcatgatgtgaaatcatgggtaatagacggtgttcctctttggtataagactctgcatgacgttgccgacgtggacttcttttatgtgtccaattctcccactcaaacattccccattttgaaaagttatatttacacaaactatcctccaggtccaatctttttgaagcagtattctggcaattttttttcaactattatgacttcgagcgcaaatagaaaaattgagccaataatgaatatattgagagattttcccaaaaagaaattcattttggtaggagattctggtgagcatgatttagaagcttacaccacgactgcgttgcaatttccaaaccagattttggctatttacataaggtgttgttctaattcaatgagtgattccccgttgcatgaacaagaagtaatgagagaagtgaacaatatcatcgagttgcatcaagaacctatccaaacaccgaaatcttctctgcacaccagaagaagaccggcccctccccctccccctcctcctgtgccttccagtcggaagccatcgctaacaaaagagcagaccgaaagtattagattatcacgtcacaatgaagttgaaaataccaccaacaaggctatacccccgccactaccgaaaagaactttacctaacgtagaggcagacgattactgtttaccatcttctcaaaacgattacggtatgtatggtgcttttatggacagaaaagctgacgaatggaaaagaagagtaatggattcaattcaaaagttgagcaatcaggatactacgttgatgtttttttctgatccagcaattagtttagaagatagcatccgtagaattagggagaagtacgcaagttaa

SEQ ID NO: 2188 - DNA, 657 bp, Saccharomyces pastorianus
atggataaaagtatagcaggcatgccaactttgacaattaaagtggttttacttggagaatctgcggtcggcaaatcatcaatagtcctcaggtttgtatctaacgattttgcacagagtaaggaacctaccattggtgccgcctttttgacaaagaggatctaccggaacgatgaggccataaagtttgaaatctgggatacggccggccaagagagattcgcccctttggcaccaatgtactataggaacgcacaagctgctttggtcgtcttcgatattactaatgaacaatcttttcataaagcccaaaactgggttgaacaattacacgaaagggtaggaaatcatattattattgcgttggtcggcaacaaaacggatttgttgggtatgcaaaacttaaacatgggtgtaaaaaaagagatgatagaagatttttgtcaacgtgagaacctgtcatatttcgaaacgagtgccaagactggtgaaaatatacacgaagtattccaagccattggagaaaagactccacatcccacacagaaggcaagaagaaattccgatcacgacctgaccattactgatgatcaacgaatcgacctcgaatcaacaactgtggaaggtgcaagggaaactgggggttgcagctgttaa

SEQ ID NO: 2189 - DNA, 3735 bp, Saccharomyces pastorianus
atgccaccaaactctaagaataagagaagaaagaataagtccaaacagcacaacaaaaagaccgagagtttggaccctgaacaacatattaaccctactcatttagtccctcgaatggaaccagagctgtaccatacggaatccgaatatccaacgtcaagagtaataaaaagggcacctaacggtgatgtcattgtagaaccaataaatacagacgatgataagaaaggacatgtggcgacattaaccgacgataaagacactatggactcagcctcttctttggcttttactctggattcccattgggaatcactatcaccagaagagaagaaggctattttacgaattgaaaagggcgaagtattcaatgtgataaggaactatcaggatgatcacagttgcagttgctcggtttgtgggcgtcgccacttagctatggaccaagaaatggagcgtatttacaataccctctacgcgatggataaagataaagaccctgaaactaaccccgtcaaatttcatctaagtataataaaagagctacagatttcaaagaatcaacaacagaatgatgtgcatcctgcaaagggtgaagttgtaaataactttctttcctcgagcacggttgactccttaaaagaggaagtactgcattttaagcagaaacaattatccaaacaagaaccaatacacaacgaaatagtcaatagtgcttcactccttgaagaagatttggacaatgtacatatcagcgagacaccaagagccgtttccccaagttttgactctatgaacgatgaggaactgaagcaaaaatactctaacttcacaaaaacgtttatatcgtcacacccaaaaatagcgcaagagtacgttcaaaaaatgatgatgtatccaaatataagaacattaactgatgatttgatgaataataacggacaaggcttcctaaacgcaattgaagattttgtgcaagacgaacaattgtcaaccccgcatacagatgacaacatatctggcgataagtcgtcttacgcggatctcactgatccaaaggagtttacgacaatgttacatagtgggaaaccactaacaactgatgaatatgctgaccttcagcgcaatattgccgaaaggatgaccaacgcatacgacacttcgagtaagcaattcaaagatgtatcacagttggagaaggagctattcacgcgatttatgtttggtaccgataagaaatactttagggagttaataattcaatcatttagaaataaatttgacggagaattgggcccatctgtcatggcagccactctaagttcgtgcttttcatctcaaacgaaagataattcactggatacggattccatatacgaagatgaagaagatgatgattacgactattcagaatatgctgaagatagtgaagaaatatctgattacgaaggaatagacgacaaaaagagattttcacactttgatgacgaaaatagtgaaacacatgacgtactgcatctgaaccacgatcccagacataaacaacaagaacatcctcatcatcatcacaatgttagcgcccacagcgaggatgaagcagtgagtgaggaggaatacatttccgatgtcgatttacatcatgaccctcaccaagactaccatcaccaggatggcataatcgacgaagatgaagatgatttagaggagggtgacgaagatggagaacaggatgaggaagaagacgaagaagatgcatatgatagtggtcttgacgaaacggatcgtttagaagaaggtcgtaaattaatacagatcgccattacaaaattattacaaagtaggataatggcttcataccatgagaagcaagctgacaataataggttgaaactactgcaagaactagaggaagaaaaaagaaagaaaagagaaaaagaggaaaagaagcagaaaaaaagagagaaagagaaagaaaagaagagattacaacaattggcaaaagaggaagagaaacggaaaagagaggaagaaaaagagagactgcaaaaggaattagaagagcgtgaaatgaaaagacgggaggcccaaaggaaaaaggtcgaggaagctaaacggagaaaggacgaagaaagaaaacggaggttagaagagcaacagcgtagagaagaaatgcaagaaaaacagcggaaacagaaagaagaacaaaagcgcaagagagaagaggagaacaaacgtgttagagaagaaaagagactggaacaagaaaaattacagaatgaaaaagaagaggaggaaaggcaaaggacactagctgagaacgcgctaagacaaaaagagctgagtgaagaacaaatgtcttcaatagtcgatcctactaacttcttcgccgagagtgggatttctaattctgccacaccacaattacttcctagcattaatagataccaagagaacaataatcgcagcatcaatgacgaaatacttaaaatggtcaacagcgtagcggcatctaaaccagtttcaccaacaggtttcaatgttcatgatttgctccgctcgtccaatgatacccagattgtagaaatagaaaacatgcagtcatctcaaccagccatcacaaacaacttatttgggagtacaactatcccaaatactgtggatttctctactaaatcttcttcgcatgttgataacgattatttgatgaactcgtgggcccaacataataacagtatgttgatgcccaatggttcatcttcaaccaaaagactaccagatgattttgggttaccatcctggaatggcttggcaaatccactgtctacaaactctacatgtaactcatcgaatatccaagcaacaggcctgtcaccacaacctcaacagcccagccctgaaccaagcgtaccatcatttgggttatgtaatgatggtgctcatcgaaaatcatttgccgaggaattgaacactttgactagtatgctctcttccactgggttcgtggacacatcccttacatcatcggggttcccacaatcacagcgttcagtgtggaacgaccaacagagctcattttcggggcctacaacggctggaaacttcaataacagcaacataccaggtggaatgatgctcccacccacgatggcaaatgttgaaccgctcccacacagaacttctatttgggacagcagtccttcttctctgctaaacaaacccgacgtcactgatcgcagtatcgcaagtgccgctcgagacagccctgcgttcatgacatcgaacatctggtccaataacaaccactatagctcaccatatttggctagcaatactctccaaccttcgggaactccgaatggaatggatgaaagtcatattttagatagcatttacaacacttacttgtctatctcttcccaggacagtttaaaccagtacgtagctgttggaacgctataccaaagcttattgggattgaatctggattatccagcgtttatcaacaagcttataagcatgcaagctgcttataattgcgaatttttcactgatgggaacggaaccattactcatgttcgatttattaggcagagccccgtgagtcactcaaaagggttactaagtcaattatttaatggcatgaacgaccgcaccaatacgcctttcacatcaagacctcatacttcgacacccaccacttttccaatagcttcttcgacttcgcaaacgagttaa

SEQ ID NO: 2190 - DNA, 579 bp, Saccharomyces pastorianus
atgtccgaaaaggccgttagaaggaagcttgttattattggcgatggtgcctgtgggaaaacgtctttactatatgtatttacgttaggaaagttcccagaacaataccacccgacagtgtttgagaattatgttaccgactgcagggtagacggaataaaagtgtccttaactctttgggatacagcggggcaagaagaatatgaacgtcttcgtccattttcatactcgaaagcagacataatattgattgggtttgccgtggataactctgagtccctaatcaacgcaaggacaaaatgggctgacgaggcgttacgatattgccccgacgcgccgatcgttcttgtgggtttgaagaaggatttgaggcaggaggcccatatcaaagaaaatgctgtagacgaaatggttcccgccgaagatgcaaaacaagtggcgagagccattggtgccaaaaaatacatggagtgtagtgcattgactggggaaggtgttgatgatgtcttcgaagtagctacgagaactagtctgttaatgaagaaggagccagggacgaattgttgcataattttataa

SEQ ID NO: 2191 - DNA, 4260 bp, Saccharomyces pastorianus
atgtcagttgaaccgaaaagtgcttctgacaaataccagaagatttctcaactggaacatatcttgaaaagaccagatacttacatcggctctgttgaaagtcaagaacagcaacaatggatatacgatgaagagaccgattgcatgattgagaagaacgtcattattgtcccggggctgttcaagatctttgatgaaattctagtcaatgcggcggacaataaagttcgtgatccatcgatgaaacgaatcgatgtaaacatccatcctgaagagaataccatagaagtaagaaacgatggtaagggtatccctgtggagatccatgacaaggaaaaaatttatattcctgagttgatttttggtcatttgctaacatcatcaaattacgacgatgatgagaaaaaagttacaggtggtagaaacggttatggtgctaaactttgtaacatattttctactgagtttatcttagagactgcggacttgaatgctggcaaaaagtatactcaaaaatgggaaaacaacatgagcgtttgccaccctccaaaaatcacatcctacaagaagggtccttcatatactaaggtcacattcaagccagacttgaccagattcggtatggaaagtttagacaatgatattttaggtgtgatgcgtagaagagtttatgatatcaatggttctgttcgcgatatcaatgtttatttgaatggtaaatttttgaagattagaaatttcaaaaactatgtagaactttacttgaaatcgctcgaaaaaaaaagacagttggataacggccaggacgctaccactcagaccaacattccgactattctgtatgaaaaaatcagtgacaggtgggaggttgctttcgctgtttctgatatttctttccaacaaatctcatttgtgaattctattgccactactatgggtggtacacatgttaattatatcactgatcaaattgtcaggaaaatcgctgagcttttaaagaagaagaaaaaaaatatcaaaccttttcaaataaaaaatcatatgttcattttcattaattgtttggttgaaaatcctgcattcacttcacaaaccaaggaacaactgacaacaagggttaaggactttggttctcgttgtgatgttccgattgaatatatcaataaaatcatgaaaactgatttagcaactaaaatatttgaaattgccgacgcaaatgacgacaatgccttgaaaaaatccgatggtacaagaaaaagcagaattaccgattatcccaaattagaagacgctaataaagctggtaccaaggatgggtacaaatgtactctgatattaacagaaggtgattctgcgttgtcattagctgttttaggtttggctgtagtaggtagagaccattatggttgttatccacttcgtggtaaaatgctaaatgttagagaagccagtgctgatcaaatcttaaagaatgcggaaattcaagccataaaaaaaattatgggtttacaacatcgtaaaagatatgaagatacaaaatctttaagatatggtcatcttatgatcatgacagatcaagatcatgatggttcacatattaaaggtttaattatcaactttttagagagttcatttcctggtctcctagatattgatggctttttgcttgattttatgaccccaattatcaaggttactattactaaaccgacaaaaaatactatttcattctataatatgccggattatgaaaaatggagacaagaagaatctcataagtttacttggaagcagaagtactataagggattgggtacgtctttggcgaaggaagtgcgtgggtacttttctgatttagacaggcacttgaagatatttcattctttacaaggtgacgataaagatttgatcgatttggctttctccaagaagaaggccgatgaccgtaaagagtggttaaggaaatacgagcctggtacagtcttagatcctactctgaaggagattccaatcagtgactttatcaataaggaattaattcttttttctttggcagataacgtacgttccattccgaatgttttagatggattcaaaccaggtcaaaggaaagtcctttatggttgcttcaaaaaaaacttaaaaaatgaaatcaaggttgccctattggcaccatatgtgagtgaatgtactgcctatcatcatggtgaagattcgttgtcacaaaccattattggattagctcaaagtttcgttggttctaataacatttatttgttgctacctaatggtgccttcggtacaagagctaccggtggtaaagatgcagcagccgcaagatatatctataccgagttgaataaattaacccgtaagattttccatccttctgatgatccgttatacaagtatgtacaggaagacgaaaaaaccgtagagccagagtggtatttgcctattctgcctatggtcctcgttaacggtgcagaaggtattggtaccggttggagtacaaatattcctccattcaatccattggagatcgttaagaatttaaaacatttaatgaatggtgaagatcttgagcaaatgcatccgtggtttagagggtggaccggttctgtaacggaaatcgaacctttgcgttacaggatgtatggtaaaattgagcaagttggaactaacaccttggaaattactgagttgccagccaagacgtggacatcgactattaaggaatacctgctattaggtttaagtggtaacgataaagtaaaaccttggattaaggatatggaagaacaacatggtgataccattaaatttattatcagcctatcgccggaagaaatggcgaagacaagaaaaattggtttttatgaaaggtttaaattaatttctccgattagtttaatgaatatggtcgcgtttgatcctcatggcagaatcaagaaatacaattccgtaaacgaaattttgagtgacttttactacgtcagactagagtattatcaaaagaggaaggaccacatgagtgagagattgcaatgggaagtggagaagtattcttttcaagtaaagttcatcaagatgatcattgagaaggaattaacagtcaccaacaagccaaaaaaagttgttatccaagaacttgaggatttagggtttccaagaatcaacaaggaaggtaagccatattatggtagccccgagactgaagtggctgaacaaactgacgacgaaggtgaaggtgaggagagttctcttgaagacaccgaaagtatcgtaaatggtcctgaagaattgtacggtacatatgaatacttactaggtatgagaatttggtcgttaactaaggagagatatgaaaagctgctgaaacagaaacaagaaaaggaagtcgaattggaaaacttattaaagctttctgccaaggatatatggaataatgatttagaagcctttgtaaccgggtaccatgaatttcttcaacgagatgaagaagctcgaggtggtaatgttccaagcaaaggaagcaaagcgaaaggtaaaaaaaagagaccactgattgatgatggtgaatacgacccatcaaaaaagggtaagaaatctactggaagaaggagcaagaaaatcaaattagaagacaaaaattttgaaagagtattattggagcaaaaattagtgacaaaaggaaagggacctacgaggattaaaaaggagaaaactccttctctgttaaaggctccagaagatgaccaaagcgctccttcttcaacaggttcgtcttctattttcgacataaaaaaagaagaagataaaaatgaaagtggattaagcaagatgtctaacaagttcaagaaaataagcacaattttcgataagatgggttccgcttctgcaacatccaatgaaagcacaccagaggaaattgttacggctaccgcaacaaaaccagccgctgtcaaagaggctgtcgcaaaacccaaaccagccaggaaaccaaaaaagaccgtagagttatctgatgaaagcgatttagaaattctagattcgttcaattctggtgaagacgaaaatgaagacgaggatgacgctgtaccgcaacgcccaagaagacaaaggtcagcaagagccgcatccgcccctaagaaatcttactcggaaactatagaattgtctgatgatagcttcatcgaagatgatgaagaacaaggacaagaagaagactcggacgtgtcttttaatgaagaagattag

SEQ ID NO: 2192 - DNA, 3540 bp, Saccharomyces pastorianus
atgtctccaaattcttcgaaagatcgatcgagccaaatagggcctacgcccgaagttgttaaaaccactaagatagaaagcaagaatgccgtaaaggatactgttcccgtagtatctgaagctgaggttgatggtacttcaatagcaagagaaaaacaagaggcatcttatgtcggttggaagcaagttggcggctgggaggaaaaggacgagctaacacccgaggatcttctggtggatttaagcaaagacacatacgtaggtaacctcctaccagagaaactttacggtgattggtaccacgatgtcgctatccttaccataggtgctttaggctcttttgcattaggttatttcaaattttctttaacatctgttcttattgtgatccttgccacaggagttctatacagatcgtcgtcgaaaaaatacagagaaaggttaagggatttggctcaaaaagagcagactgtagagaaaattagtgacgactatgaatcaatcgagtggttaaacacctttttagacaaatactggccaattattgaaccttctgtctcccagcaagtcgtcgatggtacgaatactgctctgtccaagattgaggcaattcccaaatttatcaaagctatatggctagatcaattcactctgggtgtaaaacctccaagaattgatactataaagacattccaaaatacgaagtccgacattgtggtcatggatttatgtctgtcattcaccccacatgacatgtctgatcttgacggcaaacagtccagaaactacgtaaattctaatatcgtattgaaggcaaaaatgtttggggtggatttacctgtatctgtctccgatctttcctttagagtttttactaggctccgcttccaactaatgaccaccttgccacttgtcgaaactatgaacatccaattgctagaaactccagaaatcgatttcattggccgtctattaggcaattccattttcaactgggaaatattagccattcctggcttaatgagattaattcaaaaaatgacacttaagtacttgagtcctgttttgctcccacctttttctttacagctcaatattcctcagctactttccaagactggtttacctataggtgttcttgaaattaaagtcaaaggagcttatggattaagaaagcttacagatatcatagacaaaacagtagacccatatttgactttcgagctatctgataaaatagtcggtacaactaaggtcgttaaaaactctataaatcctacctgggatgaatctgtttatattttactgcaatcattcaccgatccattaacaattactgtatatgataaaagcgagactttgaaagataagaaaatgggcgtaatagttttcaacttgaataaactacatgcaaatcattaccaaaaggatgaaaaggctcattttctgagaaattctaaacctgtcggccgtttggcatttgatttgcggttctaccccactattgaagcaaagaagttaatcaacggtgacgaagaacctttaccagatctaaatacaggtatcaccaaaattgttatcaatgaaatcaagggactgaatgaaccttccgataaagaatcggtctttgctgaattatacgtaaatgcacaattggtgatgactacaaaaaagaaaaaaagaactgctgacataaactgggactcttgctactattctgtaataacagatcgtagaaaggctatttgcaggtttgtcattaaaaaccaaagcggcaaagttatctcgtcttcagtacaacctttgaatgatttgatagatagaacagaagttgataaagaatggattccactaaaggatggaaaaggtgaattaaaaattacgacgtattggaggccggtggccatagatcttggtttgaaaacggtcggctataccactcctatcggcatgttaagagtatttatcaacaaggctgaaaacttaagaaacccggacagcttaggcaaaattagtccttatgccaaagtatctgtgaacggtataacaaaaggaaggacaaatcaaaaaatagaaacgctgagccctatctggaatcaagcaatttacgtttctgttacatctcctttgcaaagagtatccattgactgtttaggaacagatacgaatggcgatgtccttcctctcggcagttttaatatacaaactcagaatgtattccataaagacaatgatgacaaatatatcgattttatcgacaacaccccaagaaccggcaatttagtaggaaaaaaaggcgtaaaggggattgttacatactatttatcattctacccaattgttcctgtactaagtttggaagaggcgagggaagtcgatgacatcaacgagaagaaagacaagttggaaaaggaaaagatctctttggatgacaagactacctcccgggaggagaaagaaaggattaaaaaagaagaagccatgatcactgagaagtacgacatgtatagttataagatgaaactggatctagatgaattgctgcaatacaatgctggcgtattgggtgtaactgtattgggcggagaattgccccaacctggtctctatgtccaaaccttctttgattcttgtggttacgctacaataaccagtgcaaagaatgcaattaggacaattaagacaggctggtctggcgatttcatgatcaaagagcttgaatggtctgtgactacattcagagtgacaaaggtcaaagatgcaaacaaggctgaagacttcgtttgtgaagttaacatcccaacacttgagttggtgaaaaactgttattataaaccctcggtattgaacctgatagacaagaagagtgccaagctattggttcaggtatcatggtttcctataagtgcttcggaattacctcagtctgacctaatcacaaactcagggaacttgaagattaccgctaagaatgctgaaaacttgaccggtatcaacaggaatggttattccgatccatacttggaatttttcttaaatgagatgaatacatcggctgttttcaaaactacagtccaaaagaagacactgaatccctcttggaatgaaagcaagactatcgaaatctcaaatcgtgtcaatgactatttgacaattaatgtaatggactatgaatcaaccaattccaacagatgtattggtaaagcggtcgttcccttatctactatcgaaccagaagaagatgctgatttagatgtagcattagtaggaccaaagggagaagatggcggactattacatcttaaatttgagttcgaaccccactatactagcaatgtagttaaacgtgaagctaagttcgggaattttgctacaaaagggttaggtacgggtatcaaagctggttctacggtttttgccttaggaaccaatgttgtaagcactgggtttggaaccatcgataaggtgagattgggggtcttcggtggtggtaaaggacgtaagcatactgaggacgaagagcccaaagagaaacaatag

SEQ ID NO: 2193 - DNA, 2496 bp, Saccharomyces pastorianus
atggcaatcaagtcattggaatcattccttttcgaaagaggtttagtaggctcctatgccattgaggccctgaacaactgtaccctaggtattgatgttaaccattatgtttctagattattgaccaataaaagagagcagtacttggatgctattggtggtttccctaccagtttaaagatgtacttggaaagtgatctgaagatatttaaggatttcaatattactcctattttcgtcttcaatggaggtttgacttacaatcaattagaagcatccggccatttcactgctgcggcttctgattcagcctctatctcaccagccactacctctaccaatgggtctaacgcaacaacaagatcaaacaccgaatccgttcttttacagagaaacagaggttggacacaatggaacaacttgattagttcaaaccaaaactcctatatcgatcaacctattcaacctcaagagccattcagacataacactactattgattccaaggcataccaaaatgatttgatagctttcttcattgagcatggttatatgtaccaagtggctccatactcttcatggtttcaactagcatacctattgaacagcggctatattgatgccatctacggcccaactgattgtttgatgttagattgtgttgatagatttattttgggcatggaatttccaaacaaagagtttagattcattgatagatcaagagtcatgaaggatttgcgttgtactcatgaagaattcattgatattgccatggctgtaggtaatgacttacaaccaaaaactttaccaccattacaaatttatcccgttcctcaattattcggcattgcccttgaaatggttttgaatacagaagcaaacttttatgcttatcaattatctacaccgttacaaaacgattcgaaagagaacgttcaaagttatcaaaaaggcatatctgctttaagatatatgccagtcttgaaagatacaggtaaagtagaactttttgtgcaagaaattgttgtttcagaggaggaaaacgaaaaaatcaataaagaagaaaagaagagtaacctctcttcaccaacctctacatcatccagtgcctctccttacgccagtggaactaaaactgctggcgaaacgtcagcttacgaaaaatctggtaccaaagaggttaagaaaccaagagatattcctaatgacgtccatgattttattggccaaatgttacctcatgagtactatttctatagatccatagggctagttactggtaaactatttgacgcaattgttacaggtgtttatcctgaagagcctccattaggtggcggatctgctgcttcttatagaaagttggtttctaaatccgttgagatcttcaaaaataaggaaattaacctattaacccaaccaattaacagatactaccaaatcaaacaaatcaaacaagttaaatggtatgcgccaaatgaaccaaccactttaagtaatagaatgtcaccttccctgtttgaaactattaaccgtttgatcattaaaacagaaggatcggccgaaaaagagttttcaatttctgattttattacaacaatcactgcctccaacgatatggcaaaagatttcatatctgagaacgttatttttccaaattccgtaccagttgaatccaaattgaatgcgccctatgatttattgttaacaaatttcttaagattgctagtactattggaattcttcactttcgattccaaggaaaaatcattaaaacctaccaaatggggggaagtccttttgaaattaaataagcttgatattgatgctaaatatcacgaatcagtgatcatctttttggtatatctgaaatgcgacgttttgaagctcgacgaagaagttcagccacccgctccttcagcgttgtctcaagcaactcttcgttcataccctgaggagtcattgtatgtgctattgattacacgtgtattgactttatttcaagtggaacaaaaaccatcgaactaccatggtcctattgataagaagactttgatttttagagatcatctttctttcataaaggaaaacttaaatgaactattcgaagctgtgttaatctcttcattaacctcaggtgaattcaatagattgtcacttgataattttggttgggaaaagaaggtcgttagacgcttaccatttaaattagattctccaaatactatcatggccatgatgtgggaattcttcttgcaaaaatatctccacaatggtaatgctaaaaatgatgccttatctttagttgcgacagaattcaatacttataaatccacacctaaccttgacgaacaatttgtcgaatcccataaatttttactagaaattgaaaaggttgcgcacgagttaaatgatgcaaagttgatcaaagataatgagtttaaactgttcaccaaagcaattgaatttgctaccactgccctttctagctaa

SEQ ID NO: 2194 - DNA, 1050 bp, Saccharomyces pastorianus
atgcccaagctggaacaattcgaaatcaaaaagtactggcaaatattttcaggtttgaaaccaatagaaaacaaggtaaaccatgaccaggttttacctattctttataattctaaactggattcttcggttttgaacaagatctggtttctagctgatatcgatgaggatgataatttggattttgaggaatttgtcatttgcatgagattaatatttgatatggtcaataaaaacatcagctctgttccagatgagttacctgattggttggtccccggaagtaaagtaaaactgattaaagagaggaaaaagcgtgaacaaatagaaaatgcagacttgcctccaaaaaaggaaattaaagtagactggtacatgtctccagaagatctggatcaatatgaaaaaatctactcgagctgtgtaaaacttaccgatggtaccataacattcaacgagctatccacaaagctttcgactaaatttttcaacatcagtaagacagacttgaataaagtttggagcttaattaatcctcaaaatttaccatcagttgatagagatcccacattctacttcattcattgtttgaggcaaagaaacgatttgaatgcggaaataccagcaagcttaccaaactcgctagccgaaatatgtaataaaaaacaggtgaattataatctagagctctctcaaccaagtgcgaagaaaaaagacccagtaaggggagtggacaatgtacatgataacgtggtcgactcaaatgctgataacattagtaacaatgcctttacagatgacaacagtataaagcaaaaatatgctactctaacagacgagcaagttgtcaacgtgagagagcagttagaaggtcttatgcaatacaagaagaatgaagagactcaaggaggttcaaaccgttcaaaaaatgtcaacatcaactcgataattgatgatttggataacatggaacaacaggtagaattattggagagctacttaagcaacaagaggcacgagttgcaatcattacaagcagaaattagttga

SEQ ID NO: 2195 - DNA, 432 bp, Saccharomyces pastorianus
atggttgttcacatcttggggaaaggtttcaaaggcaaggaggtcatccaaatagcgctggcttccaagttttatggtattggtagaacaacggcggaaaaagtgtgctcgaaattagggttttatccatggatgagaatgcaccaactatcggaacctcaaatcatgagcatagcaagcgaattgtccacaatgaccatcgaaggtgacgccagagcgatcgtaaaggataatatcgctttgaagaagaaaattggttgttatagtggtatgagacatgctttacatttgcccgttaggggtcaacgtacaagaaacaacgcaaagactgcaagaaagcttaataagatcgatagacgcgggtttcatactgtctctcaagcggaaacacaacacaatccgtctttttggtcatatttctttggcaaataa

SEQ ID NO: 2196 - DNA, 600 bp, Saccharomyces pastorianus
atggataagatcagagagaagctaagcaacttgaaattggaggccgagtcatggcaggagaagtacgaggagttgaaagagaagaacaaggacttcgagcaggaaaccgtcgaaaaggagaaccagctcaagtctttgaccgtcaagaaccagcaattggaggaagaaatcgagaagctggaagctggcctctctgagacgaagcagaccgagcaggacaacgtcgagaaggagaaccaaatcaagtcattggcggtgaagaactctcagttggaggacgagatcgagaagttggaggcggaattggccgagtctaagcaattgtccgaggactctcaccacttgcagtccaataacgacaactactccaagaaaaaccaacagttggaggacgacttggaggaaagtgacaccaagctgaaggagactaccgaaaagttgagggaatccgacttgaaggcggaccaattggagagaagagtcgccgctttagaagagcaaagagaagaatgggaaagaaagaacgaggaactgaccgccaagtacgaagaggccaagaaggaattggacgaaatcgctgcatctctagaaaacttgtga

SEQ ID NO: 2197 - DNA, 873 bp, Saccharomyces pastorianus
atgttaagaagacaagctcgtgaaagaagagagtatttataccggaaagcacaagaattacaagattctcaactgcaacaaaaacgtcaaatagttaaacaagcgttagcccaggggaagccgttacccaaagaactggctgaagatgaagccctacaaaaggattttagatatgaccaaagtttaaaggaaggtgaagaggtagatgacgtacaaattgatgacgaatatgctgcgacgagtggtataacagatccaagaattattgttacaacatcccgtgatccaagtacccgtctgtcacaatttgccaaagaaatcaaactcttgtttccaaatgccgttagactaaacagaggtaactatgtgatgccaaaccttgtggacgcttgtaagaagtccggtaccacggatttggtagtattgcatgagcatagaggtgtcccaacatctttgactatatcgcatttcccacacggacccactgcacaatttagtttacacaatgttgttatgagacatgatataataaacggtggcaaccaaagtgaagttaacccacatctgatatttgataactttaccaccgatttaggaaaaagagttgtctgcattttgaagcatatgttcaatgcaggacctaagaaggactccgaaagagtcatcacttttgctaataagggtgacttcattagtgtcagacagcacgtatatgtgagaactagagatggtgtagagatagcagaagttgggccaagatttgaaatgagattatttgaactgaggttaggaactttggagaacaaggatgcggatgttgagtggcaattgagaagatttataaggactgccaataaaaaagactacttgtag

SEQ ID NO: 2198 - DNA, 1731 bp, Saccharomyces pastorianus
atgaattggctgttgagaagaggcacttgggcactggcgcccgcatggctgcggtgccggtgtcgtagcggcagcagaagactgtattcgctagcacatgaggtggacacaagcaagatggaagctaccaggaggaatgctcaaatagtgaagaacttggccggctactacccttcggtttcacaaccggcgctgcgtgaattatgtcgtgggtataaggaggtcagtatagatgagttcaacgagaaattcctggacaatccctcggttttgaaccataaggacaatccggactggttgtttaccattaacggcaggatcaagagcattaggttttcgggccagaagattgtgttcattgatttgtacagcacaaacaatgggctgaaaaatcattcgaaactgcaattgatcttgaactacagccaaatcaacgggagcgacaaagacgaggtgcagtttcaagagcatatgagctttttgaaaaagggcgactacatcaaagtgttcggataccccgggttttcccagtctaggcttaagatgttatccctgaaatgtaataggctgcccataatcttgtcagcttcgcaactacctttaccttccaaattgaatgacgaggctaagatcaagtccaatagagtgatcgattatcagttaaatggtattcaggcgttgctggtaagagcgcatgtcatcaaacttttaaggaagttcttggataataaaaatttcgtggaagtggagacccccatactgtcatcaaaatcgaacggtgctatggcaaagcccttcataacgtcctccaaggacttcgatcacttggaattgcgtattgcgccagaattatggttgaagagactcgttatcagcggcgtgcaaaaagtgtatgaaataggtaaggtcttcagaaatgaaagtattgattccacacataacgccgagttttccactttagagttttatgaaacgttcatgtcaatggatgatctgattgcaagaactgaggaactgttcaagtttttgatcacaaacatgcagaagttctttcaagatacgcatttccccgttcctaaaaccttcgatgagctgcactacgcattatccaagaatgattggaagtttaagaaggtcgagtttctaccaacgctaaagaaagaactcggtattgacttaatggcccccgaactcgatatcaacagccctaaggagatcttgagaattttgccgaaagacgtcaaagacgaatacttctcctccgcagaggatctagagcagctttcttcactacaaatattgaataaactatcagacgttttcttggagcaacgctattgccgctcgatactacccactataatataccaccaacctacaattctatcgcctctggccaagacagactcacgcaatgaccgaatcaccaagagattcgaagttttcatcaaggggaaggaatatataaacgcctatgaagaggaaaactgcccacaactacaactagagaagttcctacagcaaaagcaaatcaacgaaatgacgggaaacaaaatcgagactttatcaccggtcatagaccaccagtatatcgagtcgatgaaatttggtatgccccccacaggtggctttggtctcggtatagataggctttgcatgctcttctgcgacaaaaaaagagtcgaagaggtcctgccctttggttgtgtagatgatgtaaacaggcagtga

SEQ ID NO: 2199 - DNA, 924 bp, Saccharomyces pastorianus
atggtccctcccacggtagaaccatcactggactctgaatccaccaaatcctatttctcaccggtcccgccacaactcctagaacagaatgactcgcccgtgataatgggtatcgatgaagctgggagagggcccgtgatgggacccatggtctacgccgtagcatactccacacagagataccaagacgaaacggtgatccccaattacgagtttgacgactccaaaaagctgactgaccccatcagaagaaagctgtttgccaagatgtacgaagacaacgaggaactaacccagatcggctacgcaaccacatgcatcacgccgctagacatctcgagaggcatgagcaagttccccccaacaagaaactacaacctcaacgagcaggcgcacgacgtgacaatggctctgatagatggcgtgacgaagcagaacgtcaagctggatcacgtgtacgtggacactgtcggaccgccagcgtcctaccagaagaagctggagcagcgcttcccagacatcaagttcacggtcgccaagaaggcagactccctgtactgcatggtcagtgtggccagtgtggtcgccaaagttaccagagacatacttgtcgaatccctcaagagagatcccgatgaggtcctgggctctggctacccctccgacccaaagaccgtagcctggctgaggcgcaaccagacacgcctcatggggtggcctgccaacatggtgaggttttcgtggcagacgtgccagaccctcttggacgacgttagtagagaaagcatcatcatcaagtgggaagagcaatacatggacagcaggaagaacgccgcgcagaagaccaggcagctgcagttgcaaatggtgggcaagcctgcgaggaggaagacgctcagaaccctggacaactggtaccagtaa

SEQ ID NO: 2200 - DNA, 1449 bp, Saccharomyces pastorianus
atgtctgcatttgtcagggtgcttccaagaatatccaggagctcggtgctcaccggatcattgagattacaattgagatgctatgcatcgtatccagcgcacactatcattggtatgcccgcgctgtctcccacaatgacccaggggaatctggccgtttggagcaagaaggaaggtgaccaattggcccccggtgaggtgattgcggagattgaaaccgacaaggctcagatggacttcgagttccaagaagatggctacttggccaagatcttggtcccggagggtaccaaggacattcccgtcaacaagcccattgccgtctacgtggaggacaaggacgacgtggcagctttcaaagatttcaagttggaggactcaggcccggatgcgaagaccagcacgaaggcccagcctgctgagtcacagggggcaaagaaacaggatgcgccatcagaaaaggccaagtctcctgctccagaggcaaaagaacgcactaccgccgctcctcaaggtagagtctttgcctctccactggctaagacgatcgctttggaaaagggtattgccttgaaagatgttcagggcacaggcccccgtggtagaatcacgaaggctgatattgagtcatacctggaaacatcttccaagcaatcttccgttggtggagcttctgtgactgcttcggctgcttctgccgctccacaggttgcggccgctgctgctccatcaggcacttccacagcatcatacgaggatgtcccaatctcgaccatgagaagcatcattggagaacggttattgcaatccacccaaggtatcccatcatacatcgtctcgtccaagatatccgtctctaaacttttgaaattgagacaatccttgaatgccacggcaaacgacaagtacaaactatccatcaacgacttgctaatcaaggccatcaccgtcgcggccaagagagtgccagacgctaatgcttactggttacctaacgaaaacgtcatccgtaaatttaagaacgtcgatgtctctgtcgcagtggccaccccaacaggtttgttgaccccgattgttaagaattgtgaggctaagggcttgtcgcaaatctctaacgaaattaaagaactagttaagcgtgctagaattaacaagctggccccagaggaattccaaggcggcaccatctgtatctccaacatgggtatgaacaatgctgttaacatgttcacctcgatcatcaacccaccacaatctacgatcctggcaatcgctacggtcgaaagagtcgccgtggaagacgccaccgcagaaaacgggttctcctttgacaaccaagttactataacagggacctttgaccatagaaccattgacggcgctagaggtgctgagttcatgaaagaattgaaaactgtcgttgagaatcctttggaaatgctattatga

SEQ ID NO: 2201 - DNA, 183 bp, Saccharomyces pastorianus
atgaattttctaccatctttcattctaagcgatgaatccaaagaacgtatttccagaatcttaactttgactcataatgtagcacattatggctggattccatttgttttatatttgggttgggctcacacacccaacagaccaaacttccttaacttgttgtccccattgccaagtgtttaa

SEQ ID NO: 2202 - DNA, 2622 bp, Saccharomyces pastorianus
atgtcaaacagaaattttaacgagatgaacgaactgaacatgaccaacacaaattatggcaacacaaaatataccgctcagcagcatcaaggcgtagtgaatgccatcatctcttcgcttacagccccggaccagcccaccactgtgtctttacaatactctaacgacaagaatatggccactgaaatacaagcttatgctaaactatctgggcccacttggacatactacgtgaaagaattagaggtttctataggcagaaacgcggagcctatgagcaacccactacaggaaaattcagagggcgtgaagaactcgtaccgagtgaatattgatcttggaccagcaaaagtcgtctctaggaaacacgccataataaaatacaacatgaacattggcggttgggaattacacatattgggtcgcaacggtgctaaagtcaattttcaaagagcccacaatggacccaataatccacccattagattgtcttcagggactttattagacataggcggcacacaaatgatgtttatcctgcccgatagtgacccagtgattgcacccatatgtatggagcatttgatgcctaacctgataggtatgtacgggttggatggtaacaacaatcctttactaagagacatcatcaaacaatcaaactatgctaaacaaaaacaattcacttctaatcaacaaatcaaagggttcaagctttacggaagtggtactaatgttccctttggcaacggaacaaacttgggatctaacgagcaaggtgtcttcaacaacggtaacaacaagaacaaaaacggttatttcacatctacggatccaggttacgcagcatctgcaacggctgataccgtcaatcaaccatccggatcaccacaggggccttcaaatacaattatcgctgcaaactttgttgattcatacaaatctgcaaatgtttatcctcaagcgttagatttcacttccgatttgtcccatgatgaaaacagaaacgtgaaaccaccccattcatacgcgaccatgattacacaggccatactgtcagccgcggagggcgtcatttcattagccgacatttacagatacatctcttcgaattatgcctattaccggtttgcaaaatccggctggcaaaattccattagacacaatttgtcattaaacaaggcattcgaaaaagttcctagaagaccaaatgaaccaggtaaaggcatgaaatggagaattagtgaatcttatcagcaggaatttttgaataaatggaatacaggtaaggtggggaaaataagacgtggatcctcagtggcaaggcagttacaactacatatggccaaatttaacactttacccatggaaatggattataagttgtcactcaacatgacgcagccgccgaaacgacaactgcaatctcacaatattttagaaccatccagcaataacgttgtaggagggttcgtaccacatataccgtctcaaacagctctccccccaccgtcacaaccacaacctcttataccacagcagccgtcaccacaaccaccgcaacaacgccaagacattcagtttacatttaccgatccgcaaaatcgaaatacagcactcgcaagacccatcaagacaccgcgattacaaaatacaagctcaaactcaaattccttaaatgtctataaggaaacactccacccgcctgtagtatcgatagcacaaatgaatagacaatctccaaacaatgctctagtctccttcactaatgcatgcgctacttccaaagtaatacacaacaacaacgatagcacaagcaatctgacggataatagcaccagcagtaaaatgattctacctgcgatttctacgtctttgctagacgaaaatagtaattcagaaccaacaacgaccgcatcatccgggaattctaacctagcaccccattctggcacaacaacgtcgtcactcgcaccaaacaaccttcacctttcccaaccttatgacacactactacggtctcctactaaagcatttcatattacggcaatggaagcatatacaccagagagaggaagcgctaatcggaatagatcacccctccatagtaacaatatcaataacaacaacaacatcaacaacaacaacaacaacaacaacaacatcatcaacaacaacaacaacaacaacagcaatctgaacaattctaacttacaaactaatggaacggagaacaaacactcaggctccatattggattctaatgtgttgaagaacatggaatcaaacaatgacaatagacggcttactccatctacaaacaagtcacaaagcataaaaagttcccctggtgtttggaatctcttgcaatttagctctgtgaacaacacacccgctactaataccgtaagcaataagaagggacttcccacaaatcaagatatcaaaagtgctgatgaggagaacgctccttctgaaaaggattcagacacaaactcaaatgacttggagataaaagatgttaactcttcgcctttgaagaaccaaggtggaggtgccgcgaatgccaaggaactaatattagatacagatggtgcaaagatcagtattatcaataactaa

SEQ ID NO: 2203 - DNA, 576 bp, Saccharomyces pastorianus
atgaagtacattcaaaccgaacaacaaatcgacgtcccagaaggtgtcactgtcaacattaaatcaagagttatcagagttaccggcccaagaggtactttgaacaagaacttgaagcacattgatgttactttcaacagaatcaacaatcaattgattaaggttgctgtccacaacggtgacagaaagcacgtagctgctttgagaactgtcaagtctttggttgacaacatgattaccggtgtcaccaagggttacaagtacaagatgagatatgtttacgcgcatttcccaatcaatgtcaacatcattgaaaaggaaggtgctaagttcatcgaaatcagaaacttcttgggtgacaagaaaatcagaaacgttccagtcagagatggtgttgccatcgaattctccaccaacgtcaaagacgaaattgtcttgtctggtaactccgtcgaagatgtttcccaaaacgccgccgatttgcaacaaatctgtcgtgtcagaaacaaggatatccgtaagtttttggatggtatctacgtttcccacaagggtttcattaccgaagacatgtaa

SEQ ID NO: 2204 - DNA, 1230 bp, Saccharomyces pastorianus
atggttaaagaaactaaattttacgatattctaggcgtttctgtcaccgccaccgatgtcgaaatcaagaaagcttatagaaagtgcgcgctaaaattccatccagataagaacccaagtgaagaagctgctgaaaaatttaaagaagcttcatctgcatatgaaatcctatcagattctgaaaagagagaggtatatgaccaatatggtgaagatggcctaagcggtgccggtggtgccggtggtttcccaggtggtggcttcggtttcggtgacgatatcttttcacaattcttcggtgctggtggtgctcaaagaccaaagggtcctcaaagaggcagagatattaaacatgaaatttctgcttctcttgaagaattatataagggtagaaccgctaagctggctttgaacaaacaaattctatgtaaagaatgtgagggtcgtggtggtaagaaaggtgctgtcaagaaatgtactggctgtaatggtcaaggtattaaattcgtgacaagacaaatgggcccaatgattcaaagattccaaacagagtgtgacacttgtcatggtactggtgatatcgttgatccaaaggaccgttgtaaatcctgtaacggtaagaaaatcgaaaacgaaagaaagatcttggaagttcatgttgagccaggtatgaaggatggccaaaaaatcgtcttcaagggtgaagcagaccaagctccagatgtcatcccaggtgatgttgtcttcctagtctccgagagaccacacaagcatttcaagagagatggtgatgatttagtatatgaggccgaaattgatctattaactgctatcgctggtggtgaattcgccttggaacatgtttctggtgactggttgaaagtggccattgtcccaggtgaagtcattgccccaggtatgcgtaaggtcattgaaggtaaaggtatgccagttccaaaatacggcggttatggtaacttgatcgttaagttcaccatcaagttcccagaaaatcatttcacaactgaagaaaacttgaaacaactagaacaaattctacctccaagagccactccaactattccaaagaaggctacggtagacgaatgtgtactcgcagactttaacccagctaaatacaacaggacacgtgcttctagaggtggggcacattatgattcagatgaagaagaacaaggtggtgaaggtgttcaatgtgcatctcaatga

SEQ ID NO: 2205 - DNA, 594 bp, Saccharomyces pastorianus
atgaaatacatacccccattaaatttgtcaccagtggtaagcacagatgtatcgttataccgatcagggtacccaatgtcgctgaactatagtttcatcaaggaccaactacatttgaagacaataatatatatcggcgacaaagaaacgccgctggaggagtatcagagtttcttggacctagaaaggataaaataccaccatattttcatggattccagtcgtgatgaagggattcaagaaaggatgaaccaagtattaaacttggtactggacgttaggaactaccccattttagtgcattccaataagggcaagcatcgtgtaggagtggtggtgggaatcataaggaaactactacaaggctggaccactgcaggcatataccaagagtacgggttgttttccggtgggatgaaagatggagtggatttggagtttatcacgatgtttgaaaccaatctgaagataccaagagacattattcctgggtttgctagaagatgtttgtatttaaatgagctcgaaggtgaggaaggaagtggtgacgaatcgggaagcgaatccatacttaccgcgaagcagtcaatgtga

SEQ ID NO: 2206 - DNA, 3666 bp, Saccharomyces pastorianus
  modified_base (1093)..(1190): a, c, g, t, unknown, or other
atgaccgaagaagacagaaaactcactgtggagacggaaacagtggaggcacccgtggcaaacaatcttttactgtcgaataataatgtaacggttacgaaccccaatgttccctcagcttccacgtcaacttcccctctgcacagggaggcgatgggtgatgctgcgactaccgctagcaccacgaatagcaacgccgttttggagcataacgtatccagcatagataacaacctaatggacgccgatgctttgccacataaccttgcagatcattggcacccagatatcaacagggcgggtacttcgatgtcgactagcgatattccaatggacctgcattcggaccacatcccttctctgtcgtcgagcaacaacaatagcaacaacgccttgatcaaccataatcctctgtcatctcatctctccaacccgtcatcttccttgcgaaataaaaaaagctccttgctggtagcgtctaaccctgtgttttcttcagatatcgaactgtcgaaaaagaaggctccactcgtctccagtaatatccctacaggaaacactgctctgtatcaaacagcaagatcggcgaacgtccatgctccgtcttccacgtcggcaaccaaggctttcagaaaggcttccgctttctctaataatacagcccctagcacgagtaacaatattacttcaaacacgtcacctgctcctcttttacctttgccctctctctctcaacagaacaagccaaaaataatggaaaggcctacaatgcacgtcaccaattcgagagagatacttttgggtgaaaacttgctagacgatacgagaacaaaaatccctcttgtaaatacaaacactaatgataatgattcaacggcgaacgacgattcgcacataccgacccactcaaacacagataataacgaagacgatgataagacgaggaaaagcaaaaacaaaaatagcagcaatgaaaatagtaacaatgacgccaataacatatctactgcatccgcaaaaactgtacctccgacaacccctttcacgagtgctgataacacccaggccctcgctaccaatatacccagcaacnnnnnnnnnnnnnnnnnnnnnnnnnnnnnnnnnnnnnnnnnnnnnnnnnnnnnnnnnnnnnnnnnnnnnnnnnnnnnnnnnnnnnnnnnnnnnnnnnntaatagtaacaataagaagaaaacaagcaataatagcgcaagcaataacaacaccaacacggccagcaaagtgccgagtaatggtgccaagaaggccaattctgaagtaagtgcatccaattctaattctaataataataccacaagtgaagattcgcatgatatttcagaaaagccaacaaaggctgattttttcgctgcaagattggcatcagctgtgggtgaaaatgaaatcagcgactcggaagaaacatttgtatatgagtctgcggctaattcaactaaaaacctgatctaccctgattcttctactcagcagcagcagccgcaacaacaacagcagcagcagcagcagcaacagcagcagcaacaacaacaacagcaacaaaagcaacaaaagcaacaacagagccatggtataacttccaagatgagtgctccattattgaacaataataaaaaattattgagtcgactgaaaaactcgagacatataagcactggtgccatacttaataactcaattgcaaatctgagcacgaacttgaacttgaatcctagttcgatgctaaacactaacaacctgacgttggggcatggtcatttggacgagttgggcagcataaagcagcaacaacaacaacaacaacaacaacaaccaacagatgtacaatccgtagattcatacacctccgacaacccagacagcggtattattcccaaatctcctgacaagaggtcaagcttaatatccttgcctaaagtttctccacacctacttccatctactacaactaacagcaacacgagttcgtgccctaatgtagcaacaggatcacaggacatggaatcaaataacgatatttcaactaagaaatcgttttccaattcgaccttaagacactcttccgccaatcgaaactcggcttataacgacaataagagacctcttagaacaaccgtatccaaaatatttgattcaaatctaaacggcgcacctttacgaagatactctggggtgcctgatcacgtgaatttggaagattatatcgaacagtcaaacaactattcgacaatccccaatagtgtcaaaaaggatgaattttacagtagcaggaacaacaaatttcctcatggtctaaatttttacaacgatcataacatcattgaagaagaacataatggtgagttggtgaatcggcctcaacaccatcataatcttcagcatgaattcattccagaggacaatgaaagcgatgataacgatatacactctatgttctattataatcacaagaatgatttagagacaaagccccaaatatccgattatggtgaagatgaagacgcagacgattatgaccgtcaaaacgcgacttataatagttactatgggtccgaggccaacacacacgaattgccgttacacggtagaatgccatcaagatcaaacaatgactattatgatttcatggctaacaacaacacaggcaacaataaccaagtgaatgaatacacccccttaagaactaaacgtatccaaaggcacttatcaagagcaaacaacagcatgatgaatggtagcattcatatgaatgtcagcgatgatattgctcatcctaatatcatcaataatgataacgtcggctattcgccacacaacttttattcgaggaaatctccctttggcaaactgaagaatttcctctacgttgcctttgtaatatcatcattattgatgactgggttcatccttggatttttattggccacaaataaagaactacaagatgtggatgtggtggtcatggataatgtgatttcaagctcagatgaattgatatttgacatcactgtaagcgctttcaatcccgggtttttcagcataagtgtttcgcaagtcgatttggacatattcgccaagagctcgtttttaaaatgtgatcctaatggagactgtaccataatagagcaggaacaaaagattctacagatcacaacgaacccctcgcatgtagacgagagtttcaaaactgatgtcattggtgaaaatatagagacggtgttgttagggactgtcaaaacgctagaaacgccattaaaatttcaaggtggagcgtttaatagaaattatgatgtctctgtatcgagcatcaagcttctagaccctggatcctctgaagccaagcatgacaacgacgatggcgatgacaacaacggcagcgatgacggtgatgatgacggtgacggtgacgacgatgaaagcggcggtgaaggtatacaggggagacaatacaaactcaaaacaaatgtcagagatgacaaagaggacgataccaagaagtggaaactactcatcaagcacgactacgagttgatagtccgtggcaacatgaagtacgaggtgcctttcttcaacacgcagaaatccacggctatccaaaagaactctatggttcatcctggtaagaaataa

SEQ ID NO: 2207 - DNA, 462 bp, Saccharomyces pastorianus
atgttgcgtaactcttttactaaggctggtcgtttatcacgcgtcacatccgtcagattcgcccaaacgcatgccctttccaatgctgctgtaatggagctgcagtccagatgggaaaacatgccctccactgaacaacaagacatcgtcaccaagttgactgaacgtcagaaattgccatgggttcagcttaccgagccagaaaagcaagccgtgtggtacatctcctacggggagtggggaccaagaagacctgtcttgaataagggtgactcaggtttcatcgctaagggtgttgctgctggtctactattgtctgtggggcttttcgctgccatcagaatggcagctggtgaagactccaagactatgaccaaggaatggcaaatgaagagtgacgaatatttgaaatccaagaatgctaatccttggggtggttactctcaagtccaatctaaataa

SEQ ID NO: 2208 - DNA, 2652 bp, Saccharomyces pastorianus
atgtctcatcataagaagagggtgtacccccaggctcagatcccgtacgctgcgaatgttccaatagttgcagaacaacaacagtttcaacaacagatagatcaaacggcaaatgctataggcaatttccaattgaacgacaactcctactcgttcgcacagccagctgaacagcctcaacaacccagctctaggaaagtggccaatcaattgtaccctgtagacttgtttacagaattgcctcctccaattcgtgatctgtcattaccgcctcctccaattactgtctctccggatagcattgtggccctatcagagacatccaatgtcccatatcagtatgtcagatctactttaaatgcggtgccaaagacaaactctttgttgaaaaaaacgaagctaccgtttggaatcgtaataagaccatacttgaacttgcaagattcgaatgaatacgtgcccttgaacaaagacgggatcatagttcgttgccgccgttgtcgttcttatttgaacccctttgttgcttttattgaacaagggagaagatggcaatgtaatatttgtcgattcaagaacgacgttccatttggcttcgatcagaatttgcaaggtgctccgattaatagatacgaaagaaacgaaatcaaacactctgtcatggagtatttggcgcctgtcgagtactccgtcagagaacccccaccatctacctatgtttttattttggacgtttctcaaaacgctgttcgaaatggtttactagccacatctgccagaactattttagaaaatttagagtttttaccaaaccatgacggaagaactagtgtttccatcatatgtgttgaccatgctctgcattatttctacgttcccctagatgatgactatgaagaatcggatgacgatgatgatgatgatgatgaggaggaggatgatgaagaagaggaggaaggcggagacgaagaggatgatgatgatgaaagcatggctgaaacagtccaaatgtttgatgtcggtgatttaagcgaaccatttttgccaatgcccagtgaggacctcgtggttccattaaaatattgtaaaaagaatttggaaaaactactaaaaacgatacctgaagttttccaagacacacacataagcaaatttgcacttgggcctgctcttaaagctgcttcgaatttgatcaataacacgggaggtaaaattgaagtcatttcatcgactttaccagatactggtgtcggaaaattgaagagaagaagtgagcaaggtgtattgaacacaccaaaggagacctcccaattactatcatgccaggactccttttacaaaacatttacaatcgagtgtagcaaattgcaaataacagtcgatatgtttttagcgtccgaggaatacatggacgtagcgactttatcccatctgggccgcttctctggtggccaaacacatttctatcccggcttcaatgctactagtctgaacgatgttaccaaattcactagagagttatctcagcatttatccatggatatatccatggaagctgtcatgagagttcgtggttcgacaggtttgaaggctacatcgttttttggtcactttttcaacagatcttcagatttatgtgcattctccacaatgcctagagatcagtcctatctgttcgaaatttcgatcgaagattccataacggctgaacattgctacttgcaagtctcaactctattaaccttaaacaccggggaacgtagaattagggttatgacgttggcactaccaacaacggaatccgctagggaagtatttgcgtctgctgatcaactggccattactgattttgtcacacaaaacgcggtagacaaagcattgaattcaagcatggattctgcaagagatttaataacaaaatcactccaagatattttaaatgcctacaaaaaagaaatatccatgtcaaacatcactgctgtgacttctttgaatttgtgtgccaacttgaggatgttgcctttattaatgaatgcgctaggcaaaaacatagcctttagaccagggatggtcccaagtgactaccgtgccagttcactgaataaattagaaacagagccgcttcactacttaataaagagcatatacccaactgtatactctctacacgatatgcctgatgaagttggtttgcttgattccaatagagaaataaaattacctgatcctatcaatgctaccgcatccctctttgaaagatatggattgtatttaattgacaattccgcagagttatttttatgggttggtggggacgctgttcctgaattactgaacgatgtctttaacaccgataacatctctggcgttcccgttggaaaaagcgagctgcctgttttgatagattccccattcaatgacagattaagaaacataatcagtaaaattagagaaaacaatgatacgataactttccaatcgttgtacacaataagaggaccatctatcaatgaacccgctaatctaactgcagagagagagatggcttctctaaggttatgggtatcaagcacccttgttgaagacaagattctgaattgtgccagctatagagaatacctgcaaagtatgaaaacggctattaacagataa

SEQ ID NO: 2209 - DNA, 2523 bp, Saccharomyces pastorianus
atggactttgtcgtagactaccagacctatgcaatggctgattctgccactgcagaactaccagaaccagagccaagactgaacttgacctctgaatcacagctggaatctatgaaaaaagtggatctagactttaaattgcccaacctaaaaaaaaatttaaacaacagttcagacacaccaataaataatgatagtgcgagttcaaaagacttatacaaaagaatgacacattatgcaatgtcttctattgataaaatacaggcctccaatccaaacaaagcattacaacaaagcactttaaataacaagttaccgcggcaagagtctcataattttacaaattacgagtcgaaaaaccttgatttgtccaagttagtatcttcgtcaaacgaccctactataaatacaacaaaccttgttctttcgaacaaactttccaagatcctaaacaactatacgttagtcaattatcaagccacaatccaactgagaaagtcattgaaaattttggaagataataaagaaagactgttacttgatgaacagaagcttatgaatcctgaatacctagggactttggctagaaggactttgagaactgatttggagtcccaattactaaaggaacacatcaccgtgcttgaagaattcaaacctattatcaggaggattaaacgattgtcttcttcggtggaaaatatacaagaaacaagcgcgcatttaataagtgacgagaacggtaaaatacctactgataatgtgacacttcatgaaatagatcaatatcgtttaaaggctgagggattgaagttgaaaaagaaaatcctattatccgttagagacaaatatactttaagtcaggtggaagacgatttaattaccaatggtactatagacgagacatttttcagtgtaataaacaaagtgatcaatatcaaagatgggtcaagttttttattaacactccccaatttgaacgctgggaatgccttgattgtgggggttaatgaaatactacaaaagacaaacaagaaaattttcaattgtttgattgactttctatatagttttgaatccacctcaaacttgttgaatgaccatggcaccagtgaacaaaaaaaccaggtcgttttccaaaagagcctgatttttctgtcaaatgatttagaactcttcaatgaatttttgaaaagaatgaccacattaagatcaaagaatattttagatgaatttttgtcccaatttgatatgaatccagccaactctaaaccaatcatgctatcagcacatgacccaattagatatattggtgatgtgcttgcttcggttcattctatcattgcgaatgaagctgatttcgtcaaatcattatttaacttccaggatgaaaacttgaaagatacgccaatttccataattcgacagaatgggacatttttgaacggtattgacaacaaactactaaacgatatcatccagtctctatccaattcatgtcgtattcgcattgaacaaattgtaagatttgaagaaaatccaatcattaatttcgagatcgtcaggttattgaaactttatagagtcatgtttgagaggaagggcatccatgatgatagttctattatcaataatttgaaatcgttggaaaatatctccaaaaacagaattattggatactatgaggattacatcaaacatgtaacctctgtggaaacagcacactcttcggatgatctattaccaccagaatggttatcagagtatatgaataaattggttgagttatttgaaatatacgaaaaaacacatgcagctgaggatgacgaatccgaagatgataaactactagcatataagagtttacaaacaattgtagaacaaccaattaaggaggtattattaaaacatttacaaaaaactttccccttggcaaggaaaaatgagaacattagagcatcattgttgaccgtcgaaatcaattgctttgacttgattaaatctagaattcaaccttttaccaaaggagtctttgaacaggatgagaatacggaagaaattttcaactggatttctcataaactggacgagttcactaaacaaatgcaaactttacaaataaaattcttattcgaaaacacgggcctagatctttataacaatttggtaaatatgattttccccgtggactcagtaaaggacgaattggattatgatatgtacctgcctttgagggataattcgttgatgggattagagacaatcaaaaaaaatgtacatgatcaattgaatgagtatttgcctcaagcattgaccgatgttcaaagtaatttgctatccaaattaacctcaccgacaatagccgatcacatttgcgatgaatgcttcaagaaactatcgctcttctataatgttttcaggaaagtattggtccacttgtacccgaatgaagaagaccaaatttttgagattttaaacttttctaatgatgaatttgacacgttagtgggtatcaattactaa

SEQ ID NO: 2210 - DNA, 1083 bp, Saccharomyces pastorianus
atgcttaacagaacgattgccaagagatctttagctaccgctgctcaagcggagcacatgctgcccaagaagtacggtggccgtttcaccgtcactttgattccaggtgatggtgtcgggaaagaagtcactgactcagtgaagactatcttcgaggccgaaaatattccaattgactgggaaaccataaatatcaaacaaacagaccacaaggagggcgttcacgaggccgtcgagtctctaaggagaaacaagatcggccttaaagggttatggcacactcctgcagaccaaacaggccatggctcattaaacgtcgccttgcgtaaacagctagacatttacgccaatgtagctcttttcaagtctttgaaaggtgtcaagaccagaattccggacatagatttgatcgtcatcagagaaaacaccgaaggtgagttctcaggcctggaacacgagtctgtccccggtgtggtagagtccttgaagatcatgaccaagcccaagacggaaagaatcgccagattcgcctttgatttcgccaaaaaatacaacagaaaggctgttaccgctgtgcataaggcaaatatcatgaaattaggtgacggtcttttcagaaacataatcaccgaaatcggcaagacagagtaccctgacatcgacgtctcgtccatcatcgttgacaacgcctccatgcaggccgtggccaaacctcaccagttcgatgtcctggtcaccccttcaatgtacggtactatcttgggtaacatcggtgccgccttaattggtggtgcaggtttggtagccggtgctaacttcggcagagactacgccgttttcgaaccaggttccagacacgttggtctggacatcaagggccaaaacgtggccaacccaaccgctatgatcctttcctccgccctaatgttaaaccacttgggtttgaacgaatatgctactagaatctcaaaggccgttcacgaaactattgcagaaggtaagcacaccactagagatatcggcggttcttcctccactactgatttcaccaatgagatcattaacaagttatctaccatgtaa

SEQ ID NO: 2211 - DNA, 867 bp, Saccharomyces pastorianus
atgttttgctcgaaagaatcaaggatcgccgtccttgctattgcactcatatgctcgttgaccgtggtttctcactcaatagaggtcactaaagtgctgactatcacctccacgactactgacgtcgtcgttgtcactgccccaccgctccctccaaacaaagcggaaaccgttttgaacacagcaaccaacataatccagaccatgcagttcatattcaactgcgcgcccttcaaatggaagggccccctgaagatcacctcgtgcacactgaacttcatcgtcttgctactcacggcgtggggctacttactgaagtacctacaagactacaagctgaccaatgatgccgatatggaacgcatggtgagactcgactttggggagatggtcagcagggtcattgggaagggagtcggcaaggcttttacaaagatggacatcacccagaagctagtgtatcccttcgggggaaccaatagccagaaatgtctggtcatgaccgtaggagagaattcgatggtgccgttccacgctctgtccacggagatatgtttcgaccgcaacaccctcggttcgctgtctcgtcgtggccatggtcacggcaacgtgtttgctttggatacggactccgtgagcagtttggggttgttggcgaacatcccgtcaggaatgtccatggtaaatgaactatacgcccattttggagactatacggtagaggttctcggcggtgtcatgaagctggcgtcagccatcaacagagagggctggcagagggaaaagcacggtttcgtggtcccatcgagggaccgacccaacgaaacactgctaagcgttcacatgtatagttcagacctgttatag

SEQ ID NO: 2212 - DNA, 846 bp, Saccharomyces pastorianus
atggattcatatcaagcaagcaatgacaaagaaagtgagccgaagggtagcagcaagattgacgatctgatagagaatgaagcggagatcatacggtttatcaaagaggacggcaagttactgctagataacggtgatggtagagacatccataacataattcaggaagacaaactactcagtgtagaatataatgaggtattgaaacggtttcgcggccaaaaatcgtcactgaccacaacaggcgtggtggacgaagatgaagatgataaatatgactctaaagaacaccaagaaaagactttacaggccatgaacacgttgagacagatcatcaataaagaagtgattccgcccgaaaacttcagccatgtcgtgggggagatatatcgcagcagtttcccccgactagaaaacttttcgtttctgcatgaaagactaaagttgacatccatcttggtgctcatcccagaggagtatccacaggagaatttaaattttttgaagttgacgggcataaaactattccaagtgggaattagtggtaataaggagccgtttgtcaacataccgtccgacttgttaaccaaggcgctagaaatcgtgcttgatccggcaaaccaaccaatactgatacactgtaatagaggcaaacatagaacggggtgtttgatcggatgcataaggaaactgcaaaactggtcgttgacgatgatattcgatgagtataggcgttttgcgttcccgaaggccagagcgcttgaccagcagttcattgagatgtacgatgatgacgaaataaaaagaattgccaggggaaacagttggttacctctaaaatggtaa

SEQ ID NO: 2213 - DNA, 411 bp, Saccharomyces pastorianus
atggccagaactaaacaaacagcaagaaaatctactggtggtaaagccccaagaaaacaattagcttccaaggctgccagaaaatccgccccatctaccggtggtgtcaagaagcctcacagatataagccaggtaccgtcgccttgagagaaatcagaagattccaaaaatctactgaactattgattagaaagttgcctttccaaagactggtcagagaaatcgctcaagatttcaagactgatttgagattccaatcttctgctatcggtgctttgcaagaatccgtcgaagcctacttggtctctttgtttgaagacactaacttggctgccatccacgccaagcgtgttactatccaaaagaaggatatcaagttggccagaagattaagaggtgaaagatcataa

SEQ ID NO: 2214 - DNA, 312 bp, Saccharomyces pastorianus
atgtccggtagaggtaaaggtggtaaaggtctaggtaaaggtggtgccaagcgtcacagaaagattttaagagataacattcaaggtatcactaagccagctatcagaagattggctagaagaggtggtgtcaagcgtatctccggtttaatctacgaagaagtcagagctgtcttgaagtcctttttggaatccgtcatcagagactctgttacttacactgaacacgccaagagaaagactgttacttctctagatgttgtttacgctttgaagagacaaggtagaaccttatacggtttcggtggttaa

SEQ ID NO: 2215 - DNA, 1572 bp, Saccharomyces pastorianus
atgttgctagtacgaaggttgaggaacacgctactgcgatgcttccaatgcaacattatgatggtatgcatgttagttgccctcatcatcaccatatggatagtactggtctctgaaccggtatctacgagggattatatggacaatcttctttcgttttccaagatggatctggctacaaaaagggacaagccattttattcgaactgtgtggacacccaggattatttatcgaatccattgtatgccaaacagaatgcctcgtttgttatgctgacaagaaacgaggagctagaagacgttatcaagactatcaaaagtatagaggaacatttcaaccagtggtttcactatccatacgtgcttttgaatgaccagccgtttacagaagacttcaaaacaaaggtacgcgatgtgacaaatgattctattgtggaatttggcactgttgatgaaataacatggaatttccccagcgacgtgaaggacaccttcgaattttataacgccattgaaaaccaaggtgatagaagcatactgtatgggaacatggaatcgtaccataagatgtgcaggttttattcaggactgttttacaagcacccgctgatccaaaaatcagaatggtattggagactggagcctgatgtggaatttttctgtgatattacatatgatccgttctgggagatggcgcagaacgataagaaatatggatttactatcgtaattcctgagttgtactggacagtgccgaatttgttcagacacaccaaaagcttcgtcagacagaatgacgtgacacccgggtcattgtggaagttgtttacgaaggactatgacatttttgaatccgatgatcccgagttgcgtgactcgatcaattatgacttcgacgtcaaacccaaggtttccgagaagattgccatcgaacagttgctggaaaagggcaatgagtcggaaagaataaatgccgatgaagaggggataatgaatttagtcaacagggctcgctccaagaagcacatcgtggaggacaagttttcgaatgaagaatacaacctgtgtcatttctggagtaattttgaaattgcgcggctaagcgtatttgacaatgaggtttacaacagttttttcgaatttttagaaaaaagtggcggattttggaaggagagatggggggacgcccccgtgcattccataggactatcgctaaccttagacttggacgacgtgcattacttcagggacatcggatacagacattcttccatacagcattgcccgcataatgcgatggggggcgaggagtttccctacgtgacgagcgatccgaggttccagcgcaagaagaacgcagcatacgacatgggtaaggattttggatgcggttgcagatgtaagtgccccatgaacaaactcgatattgaggactccactgggttctgtctcaatgtttgggtcgacttgataaagcaagagaagggccgcgaacaccgcgccgagacgtttaacggtaaccagatcgaagcgaacgttaggaaagactacttgaaagagtttggaaactag

SEQ ID NO: 2216 - DNA, 2007 bp, Saccharomyces pastorianus
atgtctttcagtaacagtaatatggcatcctacatgaccggcaacaaggaaaaggacaagactataaatagtaataacggcagggacaacagtggtgctaacggtgccaacaggggcactaatatcagggacagtagcgaggcgagattgaatgcgtttcaattatcagactttgatttggacgtggatatgaagatggatttctctaatccatcgcaggatataacaaggaatttttcctctggcgtcgcagaaccgtttgatactaatgtaaacgctttattgtccccatcgagtggttcgtattccgcggacttgaactatcaaagtctatacaaaccggaccttccacaacaacaagtgcagcagcagcaaaaacaaacgcctactttaaaagttgaacaatccggcgtattccaatgggacgatgtcttaacgcccgctgtccgtcaacatcggccgtccctcaccaaccagttcctatctccaaggtcaaaccacgatgccgctaacagaagttcaggtaatgactccaattatagcgatactgaatcaagctatcatactccttatctgtatccacaggatatggtttcttcaccagccatgtcgcatttgaccgcgaataatgatgatttcgatgatcttttgagtgtcgcgtctatgaattcaaactatttactaccagtgaactctcatggctacaaacatatttccaaccttgacgagttggacgatttgctatctttaacgtattcagataccaatcttctgccagcatcgaataatagcgatttcagtaacagtaataataataatattgctactaatgcttacaatagtactattgagaataataccagtaaacctgccgctaatcaaaaaatgctgttgactataccaacatcttccacgccctctccttccacctacgctgccccagttacacccatcatttctatccaagaatttaacgagggtcattttccagtcaaaaacgaagacgatggaactttacaactaaagcttccggacaatgataattatagtggtaccaacaaaaacaatctacttcgtccgaacgagaatgactacgctaacgaagctcttagtgatatcgaccgttcttacgaagatattattaacggcagaaagttgaaactaaaaaaatcaagaagaaggtcttcccaaacttcgatttccaataatagtttcagtagtagaagatcttcaagatcaaggagtatatcgcctgacgagaaggcaaaatctatcagtgcaaacagagagaaattgttggaaatggctgacctcttaccttccagccaaaatggtgacgttgaccaggaacatcttgacgaagataataacactagctataacagcgctaccatcagtgttcataataacgacgacgaaagtaacaacaatttaccaacccatcacgcagaagttaagccagatattgttgatattaaaagtgagctggatgatgctaataacaatttcggtgtgcttctaaacatagatgacttggaccagtttgaaccaaaggtgaattttaaaaatgatgataatgatgaaaataacgataatagtgcattctcttcgaagaaaaacgacgatttagagaggctagacaatttaacgaataataggaagaatcctgcaaattttgcttgtgacgtttgtggaaagaagttcacaagaccgtataacttaaaatcccatttaagaacacatacgaacgaaaggccattcatatgttctatttgtggtaaggcatttgcacgccaacatgatagaaagagacacgaagatttacatacaggtaaaaaaaggtatgtgtgcggtggtaaactaaaagatggtaaaccttggggttgtagcaagaaatttgcaagaagtgatgccctcggtaggcatttcaagaccgaaagcggtagaagatgtattactcccctgtacgaggaagctagacaggaaaaatctggacaagacacttaa

SEQ ID NO: 2217 - DNA, 1455 bp, Saccharomyces pastorianus
atgacgttagcctctgaaatgagcgatgagatttccttggacaacccgacacctatatttaatgaaggtaatgcttcaaagccaattagggttgccggcgtcgtaacaacggggacatataatatcgaccctaccgtgctacaaagttacctagacgatactattttgaaatccattactttaggtcagctggtgaaaaatgcagacgtgctaaacaaaaggttgtgtcaacatcatattgctttggatgctaagcagtcgtttcacttccaagattacaaatatatttctgatgaaaaaggcatacacgacatggtacccttgatggaagttgtatcacaattggatgtactacctcctaaaacatttacagcaaagacaggtacgaattttggcaacgataacgatgcagaagcttatttacaattcgaaaagctaatcgataagaagtacttaaaattgcccacgagggtgaatttggaactactgagaggtacaaaaatacactcttctttcttgttcaactcttattcttctctttctccccaatcgattttgaacttaaaactcttcagtcagttctataattggaattcaaacaaaggtttggatatcggccaaaggggagcaaggttaagtttgaggtatgaaccactgtttttacacccacttttacacaatccatactcggatgaacgccctacgttgtttcatgaatggttcctagagtcttgttggagatcttccaagatatgttcaccaggaactagcgcaccatatatgtattcagatacaatgttatctcaagcaggcgatcaattaaggaccgtattgggtcatacattcgtcctggacaagaggaatcattttatgtgtcctacaaagggttcaatgctaaaatggagtaatgaactttcaccaggaaaacactggaagacccaactagaattgaacaacgtaaagagttggttaagtgacgatttcattactttctctaccacttttaaaacaggatacctgaaaaatatatcttcacaacaatctttgcctgtacatatatgtgataaatttcagaatggtggaccaaatgacatcagaagtttccaaacatttgggttaggcccaagagatttatatgatgccataggtggcgatgcttttgtttcatatggagttagtgtttttactcggttaccttggaagaaagtccaaaaatcgaactttaggttacattggtttttcaatgggggtaaattaatcaatcatggcaatatgtctctaagcaactgcatcggtcagctttctaaggaacattctacctctacaggtatcggacttgtgctaaggcatcccatggctagatttgaactaaacttcagcttacctattgccgcccacgaaaacgatttaatgagaaagggatttcaattcggaattggtttggcatttttgtga

SEQ ID NO: 2218 - DNA, 972 bp, Saccharomyces pastorianus
atgtcaggaagtttctggacatctacacagaggcatcactggcaatatacgaaggcatcgttagccaaagagaggcagaagttatggttgttagagtgccaattgttccctcaaggcttaaatatcgtaatggattccaagcagaacggtatggaacaatccattactaaaaacataccaataacgcaccgagatttacactatgacaaggactataacctaagaatttattgctattttctgataatgaaacttggaagaagacttaatattcgacagtatgctttagctacggcacatatctatctttcacggttcttaataaaggcttcggtgagagaaattaacctatacatgttggttactacgtgtgtgtatttagcgtgtaaagtagaggaatgtccgcaatacattagaactttagtgagtgaagcccgtactctatggcccgaattcatccctcctgatcccactaaagttactgagtttgaattctatttgcttgaagagctagaaagttacttaattgtccatcatccttatcaatccttgaagcaaatcgtccaggtcttgaaacagccaccttttcaactaaccttatcatccgaagatttacaaaactgctggtctttgatcaacgatagctatatcaatgatgttcatttactgtacccacctcatattattgctgtggcatgtctgttcattaccatttccatacacggaagatcaaccaaaggatcatcattagcgtctatggcttccgaagccatcagaggttctgaatcttctggttcgcctgctcaattagctttcaaccgttttatggctgaatctctcgtagacctggaggaagtcatggatacgattcaggagcagattacattgtacgaccattgggataagtaccatgaacaatggataaaatttttgctgcatactttatatttaagaccggcttcagcaatttaa

SEQ ID NO: 2219 - DNA, 219 bp, Saccharomyces pastorianus
atgtctgcgttgtttaattttcgttctcttttgcaagtgatattactactaatttgctcatgcacttatgttcatggacagtggccatctctgttagatcgctacaaaaaccatgaaggttttggtgctttctggaaaatggcacgtattggtgagagggccagtccgtatgtaagtttggcatgtattttgatggccatcagtcagtttaatagttga

SEQ ID NO: 2220 - DNA, 2121 bp, Saccharomyces pastorianus
atggattcggcaaccgttaagaatgaagtactggaaactccagaccaagatttaaaacatgggctggaagaaatgaaagaggagcaaaatagtctctctactacatctaagaataaaaggcaggtgatcgttcccgcgtgtacgccaaaggtccactatacaccactaaagactggtctttgttacgatgttagaatgagatatcatgcaaagattttcacctcgtacttcgagtacatcgaccctcatccggaagacccaagaagaatataccgtatatataaaatactggcagagaatggcctgattaatgatccaactctgagcggtgttgatgaccttggtgacttaatgttaaagatacctgtcagagccgcaacgtccgaagaaatcctgcaggttcatacaaaggaacatttggagttcatcgaaagcacggagaaaatgagccgagagcagctgttaaaagagactgaaaaaggagactccgtatacttcaataatgattcctatgcaagcgccagattaccttgtggtggtgcaattgaggcatgtaaggcagtcgttgagggacgtgtaaagaattctttagccgtggtaaggccacctggccatcacgctgagcctcaagctgcaggcggtttttgccttttcagtaacgttgccgttgcagcaaagaacatcttgaagaattatcctgaaagtgtaagaagaataatgattttagactgggacattcatcacggtaatggtacccaaaaatcattctatcaagatgaccaggtgctgtacatctcattacacagattcgaaattggtaagtactatcctggaaccattcaaggtcagtatgatcaaactggtgagggtaaaggtgaaggatttaattgtaacattacttggcctgtcggcggtgttggtgacgctgaatacatgtgggcattcgagcaagtagtaatgccaatggggagagaatttaaaccagacctggtaatcatatcgtctggatttgatgctgcagatggtgatactatcggacaatgccacgtcaccccaagctgttatggtcacatgacacacatgctaaagtctctagccagaggtaatctctgtgtagttcttgaaggtggttataatttggatgcaatcgcgataagcgctttaagtgttgcaaaagtgttaataggagagcctcctgatgaattacctgatcctgtaagcgatcctaagcctgaagtcattgaaatgatagataaagtcattcgtttacagtccaaatattggaattgttttagaaggagacatgcaaactctggttgtaattttaatgaacccattaatgactcaataatatcaaagaattttcctttacaaaaggctattcgtcaacagcagctgcattatttaagtgacgaattcaatttcgttaccttgcctctaataaacatggaactaccagacaacatcgtgttatgtactccgaatgtttccgaatcaagtactttgctagttgtcgttcatgatacttccgatgtttgggccaagagaaacgttatatctggtacaattgacctgtcctcgtcagttgtcatcgataattgtttagacttcatcaaatggggcttggataggaaatacggcatcattgacgtaaatatacccctaactttgttcgaagctgacaattattcaggaatgattacttctcaagaggtattaatatacttatgggataactacatcaagtactttccagccattgctaaaattgcatatattgggataggggattcttactcaggtattgtacatctcctgggccacagagataccagagctgtgaccaaaacggtaatcaattttctgggagacaagcaactaaaaccgctggttcctttggtcgatgaaacattaagtgaatggtactttaaaaattctctagtatttaccaacaacagtcatcaatgttggaaagaaaatgaaagtagaaaaccaagaaagaaatttggcagagttttaaggtgtgatacggacggactaagcaatactgttgaagagaggtttgaagaggcaacggatttcatactagattcgtttgaagagtggagtgatgaggaatga

SEQ ID NO: 2221 - DNA, 1884 bp, Saccharomyces pastorianus
atgaatcaaccgcaaatcggtacctacaacgtaggtacacaattaacggttggatcacatcaggtcgaaatcatcaaatacctaacaagcggcgggtttgcccaagtatattctgcgttaattagtccacctgatcatcatactaattcaaatattgcgtgcttgaaaagagttattgtaccggataagactagtttgaatacgttgagagcagaagtagatgctatgaagttgttgaggaataacaggcacgttgtgtcttacattgattctcatgctgctaaggctaccttacataacggttcatatgaagtatttgttttgatggaatattgtgaaaggggtggcctcatcgactttatgaacacaaggttgcaaaacaggttgcatgtatctgagattctgcaaataatgtgccaagttactcaaggagttgctgctatgcatgctcttcaacctccgttaattcatcgtgatataaaaatagaaaacgttcttatctcagcaaacaatgagtataaactttgtgattttggttccgtatgcggtgttataagacctcctaggaatccgcaagaactatcatacgttaagcaagacattttaaaaaatacaacggcacaatatcggccaccagaaatggttgacatattccgtggtctgccgatcaatgaaaaatctgatatatgggccctgggtatttttctatataagctttgttactacacaacgccgtttgaaaaaggtggtgaaccagccatattaaacggacagtttgaatttccattgtacccagattatagtaagcagttgcggaatttgatatgtaaattactggcacagaatccttcccaaaggcctaacgttttccagctattaaagcaaatagcaaacatgcaaaatgtcccatatccaatacaagacatacaagcggtacaaaggcctagtaatcatttgaatttaatggaactccatcaaaattctgccacgcaaaatattcaaagcttaaattcccactcaattatcgaaaattcgatgccgaacccaaaattccaatatggtatgcctgctaatgtaattacaacgcaatcccttccaactagagaaaactctcaagcatttattaatgcttcttcaagcagtttggcgagaaattcttcaatatttgaatcaggagtgtgcaatgccccaaacaatattaatcagcccaatgcgaattccgcgactaagttaaagcaggcgattgaatcagaagcgcatagcttcagagaaagcggtcccataaacgtatccctgcgaaacataattcctcaagacgatgattcttcgtcctcttcagatgaatcctatacaggaggcgtggatgaattaaagaaaactcgatctctaggttcttattccacccacgaaaacgctaagagaggagagtctgtcatagcatctcttacctcatcaagtactccaggaagtagctccgctcctacacctgcaaaaataaaatctaaacaccaaagtctacctgaatcggcattcgttggtatcgttgacagtggcaaagatagtcttccgagtgattcaaataggaatcaaccagtaaaagatggcgcgagtgtatctaaacaagatttgaaaaactctattcaacagcgtatgatcaacctgctcagttcttctgaggagtcattcaacgctagaaagttgtccagagcgaaggcaacaaaagacgagggtccaggcaagctaatagcatcgatatcaagagccccagttttgaaagagaaaaaagccaagccaattcctccgcccaagcctttccacttaaaacctaaaccgcctctaaaaccatcgtttttagcgggtcaaaaattattttcagaggaataa

SEQ ID NO: 2222 - DNA, 228 bp, Saccharomyces pastorianus
atgacaaacaactttatcgttactctaaagaagaacaccccagacgtggaaactaaaaagttcttggattccgttcatcgtgtaggcggttctatcgaacacgagttcgatattatcaaagggtacaccatcaagcttccagatgttctcaaattgaacaagttgaaggaacagcatagcgatgtcatccagaacgtcgaagaagataaagaagtccataccaattga

SEQ ID NO: 2223 - DNA, 1338 bp, Saccharomyces pastorianus
atgaatgtcgttgtatgctccggaggaactgccacaaactcgatcacaccttgcttttcaaacatttcaatctctaaagggcacgagctaacttatattttgcctatatcagataatggtgggtccacaagtgagattttacgaatagttggtgggcccgcaattggtgacattagatccagaatagtgaggcttcttcaagatgaacagctcgttaagctattcggatataggctacctaatgacaaaatgcaagcgaaaaaagaatggaatgaaatagtagaaggatcacatcctatatggaaaagcatttctatagaagtcaaagagatgtgtcgctcttttattattcacatgcaagcagaactgttgaaaaagatcaaacactcaaacccgtttcaattcgagagtgcatccatcgggaatttcttcttaacgggcgctagattgtttttgggatcccttgatgcgtccattgaactgatgatgagaattgggaggtgtagtcctctagtccacgtcgtcccatgcataaataccaaccacacgcatcatatttcagctttattgaccaacggtgatatgataactggccaatcacaaatatcacacccttcagcatctgtaccaaaggcaaacgacatagcgcattccgctaaatttgtccatctacttggttcttacgatgatcatttgaaaattctcttggaagacgaagacgaagaagaggctgaagaagagtatgccaacccaatctatattcttccagaactaaagaactcgcagttacatttcgataagattgacggatctcaaaatttacctgccccggtaaacagaattctatacattaatccatacggagaagagattaaaccaatgggaaatcccagagctatttctaaagtgaaaaaagcagatatggtcgtttattctatcggttctttaatgacaagtctactgccaatcctcattcttggtaatcttgccgaggtaatcttggaatcaaccagtacaaaaaaagttttgcttatgaataataaatatgatagagaggtatccggtctagatggttcacattatgtccaaataatcatcgattccatgaccagagcaataaggggttatagacaatctaagggtaattatttagaaaatacgaactttgagtggcaagactttattacagatattgtttatctgaaaaacggtgaaattaaaattgatgaaacaacgttcaaagagcataatattagatgccaccaaattgcttcttctgataagatggaaagtgaagaacttgaaaaggttctaaacgaaattggctctcaaaactga

SEQ ID NO: 2224 - DNA, 726 bp, Saccharomyces pastorianus
atggtcaaagctgttatctttaccgatttcgatggtactgtcaccctagaagattctaacgattacttaaccgatactttagggttcggtaaagaagaaagattaaaggtcttcgaaggtgttttggacggtaccaaatcctttagacaaggtttcatggaaatgttggaatccatccacactccatttcctgagtgtattaagatcttagaaaaaaaaatccgattggatcctggtttcaaggacactttcgaatgggctcaagaaaatgatgtccctgtcgttgttgtttccagtggcatgaagcccatcatcaaggttttattgactagattagtcggacaacattctattcataaaattgatattgtttccaatgaagttgaaatcgaggctcatgatgaatggaaaattatctataaggatgagagtccttttggccacgacaaatccagaagtatcgacgcttacaaaaagaaattcgaatctgctttgaagccaggtgatgaaagacctgtatacttttattgtggtgacggtgtttccgacttaagtgctgcaaaggaatgtgacctgctattcgctaagagaggtaaagacctggtcacttactgtaaaagacaaaacgttccattccacgaatttgatactttcgaagacatcttagccagcatgaagcaagttttagctggcgaaaagacagtcactgaattgatggaaaattaa

SEQ ID NO: 2225 - DNA, 1254 bp, Saccharomyces pastorianus
atgaacaaaatcaaagtagttaaccccatcgtggaaatggacggtgatgaacaaacaagagttatttggaaacttatcaaagaaaagttgatactaccatatctagatctggatttgaaatactatgatctttctattcaagaacgtgataagactaatgatcaggtcacgaaggactcggcttatgcgactttaaaatatggcgtggctgttaaatgcgctaccataactcccgatgaggcaagaatgaaagaatttaacttgaaaaaaatgtggagatcacccaacggtacaatcagaaacatattaggcggaaccgtcttcagagaacctatcattatcccaaaaatacctcgtctggttcctcattgggaaaaaccgataattataggccgtcacgctttcggtgaccaatatagagctactgacatcaaaatcaaaagggcaggtaagctaaagctacaatttgattcagatgacggtaaagaacacattgatttgcaagtctatgaatttcccgaaagcggtggtgttgctatggcaatgttcaacacaaacgattccatcaaagggtttgcaaaggcttccttcgaattagccctcaagaggaagctcccactattcttcaccacaaaaaacactatattaaaaaactatgataaccaattcaaacaaatttttgacaacttgtttgatgcagaatataaagaaaagtttaaagctttaggcataacatacgagcatcgattgattgatgatatggtagcacagatgttaaagtccaagggcgggtttataatcgccatgaaaaattatgatggtgatgtccagtccgatattgtagcccagggatttggctcccttggtttaatgacatcaattttaattactccggatggccaaacatttgaaagtgaggctgcccatggtacggtgacaagacatttcagacaacatcaaaggggcgaaaagacgtcgacaaattcaattgcatcaatatttgcctggacgagggccattatacaaagaggtaagttggacagtacaagtgacgttataaaatttggagatttactggagaaggttacattagatacggtacaaaaagatgggaaaatgaccaaagacctggctttgatgctaggaaagactgacagatcatcgtacgtaactacagaagaatttattgaggcagtttccaaaagactcaataagacgatccgtagctctactggaagtctgtgcaaactgtaa

SEQ ID NO: 2226 - DNA, 1092 bp, Saccharomyces pastorianus
atggtcaaggagacaaaactttatgatatgcttggagtatctccaaccgctaatgagcaggaattgaaaaagggatatagaaaagctgctttaaaataccatccagataagccaacaggggatactgaaaagtttaaagagatatcagaagcttttgaaattttaaacgaccctcaaaagagagaaatatatgaccaatacggtatcgaagctgccagatcaggtggtccaagctttggtgcaggaggtgccggaggtcctggaggcgccggtgggttccctggaggcgctggcggattctctggcggccatgctttcagcaatgaagacgctttcaacatattttcgcagttctttggtggcggctcctcattcggtggtgcagatgatggcggattcagtttctctggctacccatctggcggtggtgctaatatggggggtatgccaggtggaatgggaggcatgccaggtggaatgggaggtatgccaggtggcatgggaggaggcatgggaggcatgcccggtggtttcagatcagcatcgagctctccctcatatccggaagaagaaacagtccaagtcaatctgccagttagtctagaagacttatttgttggcaagaagaaatcgttcaagattgggagaaagggtccacacggagcatccgaaaagacgcaaattgatattcaattaaaacccggctggaaagctggtacaaaaataacgtacaaaaatcaaggtgatttcaatccacaaacaaatcgcagaaaaactttacaatttgttattcaggaaaagagtcatccaaactttaaaagagatggcgatgacttgatttacactttgccactatctttcaaagaatcactactaggcttttcaaaaactattcaaacaatcgatggtagaaccttaccattgtcaagagtgcaacccgttcaaccttcgcaaacttctacgtaccctggccaaggtatgccaaccccaaagaacccatctcagagaggtaatttgattgtaaaatataaagtggactacccaatatcgttaaatgacgcccaaaaacgtgctatagatgaaaatttttga

SEQ ID NO: 2227 - DNA, 912 bp, Saccharomyces pastorianus
atgtccgttattttagtatccgctggttatgaccacacaattagattctgggaagctcttactggagtttgttcaaggacaatccagcactctgactcacaggtcaatcgcttagaaatcaccaatgacaaaaagctattagccactgcaggccaccagaacgtacgactttatgacattcggacaacaaaccccaatcctgtggcgtctttcgaaggacatcgaggaaatgttacatcggtttcttttcaacaggacaatagatggatggtgacttctagtgaggatggaacaattaaagtgtgggacgtgcgttccccctccattcctagaaattataagcacaatgcgcctgtgaatgaagtggtaatacatcccaaccaaggggaattaatatcatgtgatagagatggtaatataaggatatgggacttgggagaaaatcagtgtactcatcaattgacgcctgaggacgacacctctctacagtctttatcaatggcaagtgatgggtctatgctggccgcagcgaacagtaaaggcaattgctacgtgtgggaaatgcctaatcataccgatgcatcacatcttaaaccagtgaccaaattcagagcacattctacttatataaccagaattttattatcttctgatgtgaaacatttggcgacatgctctgcggatcatacggctcgtgtgtggtctattgaagatgactttaaattggaaacgacattggatggtcaccaaagatgggtttgggattgtgcatttagcgctgacagtgcgtacttagtaactgcatcatctgatcattatgttaggctatgggatttatcaacaagagagatcgtcagacagtacgggggacatcacaagggtgctgtatgtgtagcactgaacgatgtataa

SEQ ID NO: 2228 - DNA, 1116 bp, Saccharomyces pastorianus
atgtggaattttgttttgttagatacttgtggtatttcgtgtcgaaaaaatgtttctggtgtattcatccaggtgcgtaatgccactaaaagagctgccggttcaagaacaagtatgaaggactctgcaggtaggagattgggcccaaagaaatacgaaggccaagatattacaagtggcgaaatcattatgaggcaaagaggaacgaaattctatcctggcgagaatgttggtatagggaaggatcataccatatttgctctagaacctggtgttgtccggtactatcttgatcctttccatccaaagagaaaattcattggtgtggctttaagccgtgatcttaaattaccgtctcctcactttgaacccacgttcagaagatttggtcgttgtgagctaactaacaaaagagcatcttccaaagaagagagttctctctctagaaaagattaccttgcgaagcctgatattttaaaacgtctagaaagtagagattctaaaaggaaggaactacagaaggaattggcaaaagctcttacagaagaacttaagttaaacgtaaaggacatcggcttggcaacatcatatttaactcgcgtaagagcttccctgaagaatgggttctccgttgaagatgcggtgtttaatagcagatactttttaaaaacagaagagagtttaagagcaaagagagaaaactggccaagtgagaaattgacagaaagtttgtccaaaatcgacgagtgtagcgaccttttgaactcatctacttctttcaataataaactagaattaatcgggtacatttctgaacaagagaaacaagctttgaaggtaaaactaatagagagcctagagaaaatcccaagcctacaaaccaaaaaagataagaatgccaccaaagctcttttcaaagatacagggaactttttaactttatctgaagaggtacatctgcgtagaaaatatttgaagcctgtctttccagaaacagagaataccatcgaaaccaaaatcggaaagaagtcaattgtttctaggcgttttgactatatcagaaataaggtcgaagtcatcgctagaagcaagcaagcctttttgagcaagctttga

SEQ ID NO: 2229 - DNA, 1290 bp, Saccharomyces pastorianus
atgagtgatgatcgtggatatgaaagagacaaacgctcctcccgcggctcagacaatttcaacaatagacatagggattcaaatgcgtacaggggaaacagatatggaagtggatatagaggaggtagagacaggcctggttacagagtaagagaacccctcaatggtagagaacctcccagatctagagaccgttatgacgacagattcggaggaagagaaggaagtggtcgttacggaggtagacgtgatgattaccctaggagcttcaagggtaggcacaatccacgcgatgacagtaggagaggtggctttaataacgatgcagcaaggggtgattacggtcctttgttggcacgtgaattggatagtacgtatgaagaaaaggtgaatagaaactattccaacagtatatttgtgggtaatttgacatacgacagcaccccggaagacttaactgagttcttttcacaaataggaaaagtggtccgcgcggacataattacatcaagaggtcaccacagaggcatgggtacagtagagttcactaattcagatgatgttgacaatgccatccgccagtacgatggggccttttttatggatcgtaaaatttttgtcagacaagataacccaccaccttcaagcaatacaagagaaagaaagggactcgatagaggagagtctaaacaaaatcgaaaaacgtacgaaattattgtcaaaaacttacctacttccatcaattggcaagctttaaaagacatgttcaaggaatgtggaaatgttgcacacgccgatgtagaactagataatgaaaaggcctctacaggatctggtaccgtgtccttctatgaccctaaagatctccatagatcgattgagaaatacaatggatatgaaatagagggcaatattttagatgtcaagaccaaggaaggcgtggatgagtatagtaacgggggcgatattgatatcccaatggaagattctccggtaaatgaagaagcccgtaaatttaccgaaaatgtagtcggcggaggcgaaagaaatagcttgatttactgcagtaatttgccattttctactgcaaagagtgatctttatgacctttttgagaccattggaaaggtcaataatgctgaattaaggtacgactcgaaaggagcgccaaccggaatatctgtagttgagtacgataacgtcgaagatgctgacgtgtgtattgaaaggttaaacaactacaattatggcggttgcgatctggatatatcttatgctaaacgcgtttga

SEQ ID NO: 2230 - DNA, 1440 bp, Saccharomyces pastorianus
atgtcagcgatattatcaaccaccagcaaaaatttcttatcaagaaaccccgccagacaatgtcagaatgcacaaaaggctctttttgcactattgagctctcgccaatatagtagcgccactgaacaaacgttgaaggagaggtttgctgaaattatcccagcgaaggctgaagaaattaaaaaatttaagaaagaacatggtaaaactgtcattggtgaagttctcttagagcaagcttacggtggtatgagaggtattaaaggcctcgtttgggaaggttctgttctggatcccgatgaaggtattagattcaggggtcgtacgattccagaaattcaaagagaattgccaaaggctgaaggcagtactgagcccttaccagaagcgttgttttggctacttttgacgggcgaaatacctactgacgctcaagttaaggccctttctgcagatttagcggcaagatcagagattccagaacatgtggtccaacttttggacagtcttccaaaggatttgcatccaatggctcaattttccattgccgtaactgctttggaaagcgaatccaaatttgccaaagcatatgctcaaggtgtatctaaaaaggaatattggagttacacttttgaagactcgttggatttgctgggtaaattgcctgtcattgcttcgaaaatctaccgtaacgtctttaaagatggtaaaatcaccaccattgatcctaatgctgattatggtaaaaatttggctcagctattgggttacgaaaacaaggatttcatcgatttgatgagattgtatttaactattcattctgatcatgaaggtggtaacgtttctgcccatactacccatttagtgggttctgcattgtcttctccatatctatctttagccgctggtttgaatggtttggctggcccactgcatggtcgtgccaaccaagaagtcttagaatggttattcaaattgagagaagaagttaaaggtgattactctaaagaaacaattgagaagtacctatgggaaactttgaatgcaggaagagtcgttccaggttatggtcatgccgtcttaagaaaaacagaccctcgttatatggcccaacgtgaatttgctttgaagcatttcccagattatgaactattcaagttggtgtccaccatttatgatgtagcgccaggtgttttaactaagcatggtaagacaaagaacccatggcctaatgtagattcccattccggtgttctattgcaatactatgggttgactgaagcctcattctataccgtattgtttggtgttgcaagagccattggtgtattgcctcaactgataatcgatagggctgtcggtgctccaatcgaaagaccaaaatcattttctacagaaaaatataaggagctggtgaaaaaacttgaaagtaaaaattaa

SEQ ID NO: 2231 - DNA, 858 bp, Saccharomyces pastorianus
atgtctgacagagagcaaaagagtggtaacaccgccttcgagaaccctaaggcgttcgactcctcagataatgaatctatctgtgaaaacaacgagcacaacgagcacagccgccattcgcaggagtccctgtgcaaaatctataccgcgggcaaaaacaacgagtacatttatatcggtcgtcaaaaattccttagagacgatttggcagaagcgtttggtggtactttgaatcccggtttagccccagcgccggtccataagttcgctaatcctgctcccctaggtctttctggtttcgcgctcaccacattcgtactttctctgtgcaacgctagggctcaaggcgtcaccacccccaacgtcgtcgtagggtgtgccatgttttacggtggcctggtgcaactgattgcgggcatttgggagatcgctctggaaaatacttttggtggaactgccctgtgctcttttggcgggttttggttaagttttggtgctatttacattccttggttcggtattctggacgcctacaaggataaggagtctgacctcgggaacgccctagggttttacctcttgggatgggcactattcacttttggtctctgcgtctgcactatgaagtcaaccataatgttttttgccttgttctttctcttagctgtcacgttcttactattgtcaattgcgaacttcacaggtgaagttggtgtcactagggctggtggtgtcgtgggcgtcgtagtcgccttcattgcctggtataatgcttacgcaggtatcgccaataggcaaaactcatacatcatggtccatcctttcccgttacccagtaacgataaagtctttttctaa

SEQ ID NO: 2232 - DNA, 954 bp, Saccharomyces pastorianus
atgagtggagtgatagagaatggactacagctgtcggacaatgccaagacgttacatagtcagatgatttcgcaaggtgtgggcgcactatatacacaacaggagcttcaaaagcagatgggaattgggtcattaacagacctgatgtctattgtacaggaactgctggataagaacttgatcaaattagtgaaacaaaacgatgaactaaaattccaaggtgttttggaatctgaggcacaaaagaaagccaccatgtcggcagaagagtcattggtatattcttatatagaggccagtggcagggagggcatatggtccaagacgattaaagcaagaaccaatctccaccagcacgtggttctcaaatgtttaaagagtttagaatctcaaaggtatgtaaaaagtgttaagagcgtcaaatttcccacaagaaagatctatatgctgtacagtttgcaaccgtcggtggatattacgggggggccatggttcacagacggagaactggatatagaattcatcaacagtttattgactatcgtttggaggttcatatcggagaacaccttccccaacggtttcaagaacttcgaaaatgggcccaacagaaacgtcttttacgcaccaaacgtaaagaactattccaccacccaggagatcttggagtttattacagcagcccaagtggccaacgtggagttgaccccgtcaaatatcagatccctctgcgaagttctggtgtatgacgacaagctggaaaaagtcatgcacgactgttacaaggtgaccctagagagtattctacaaatgaaccaaggcgaaaccgacccggattcgggaaacaaagccgaggagcatgaagaagagttttccatcttcaactacttcaagatgttcccggcctctcagcacgacaaagaagtagtgtacttcgatgaatggacaatctag

SEQ ID NO: 2233 - DNA, 441 bp, Saccharomyces pastorianus
atggctgatttatacagtggctccactttagaaagtttactagacggattaaccgacttgaatagaatcccgaaggagtactctccactattagaaccatactttcaaaatatagcaaaagatgagaatttgaaatccaaagcccttgaaatttgtcgttctaatttccataaatggaaggcagaagatgaaaaaggtgtcgatcctgaaattacaagaagatgtcttaacctgtggtatgtcatcaaaggtaaagagtacaaaaaattaaagaatcccccaccggctgataacattattaaagatgagattgatgtgtcaaatattgaggacctgaatgtgggcagactggagttcgatgaatatggtaaacctataactaatccactagataatctgaccttagaagaggtcgaagttagtgacttcataaaagagtaa

SEQ ID NO: 2234 - DNA, 1899 bp, Saccharomyces pastorianus
atgtccgtcagtacgccaggtgagttggacacgttaatagaaaaagccactagcgaaagcattccgaatggtgacctcgatcttcccatagcattagagatttctgatgtcttaaggtctagaagggtcagccctaaggattcgatgcgttgcataaagaaaagaatccttaatacagccaataatccaaacactcaattgtcttcatggaaacttacaaatatatgtgttaagaatggtggaacaccatttattaaagaagtttgttctagagagtttatggataccatggaacacgttattttgaaagaggacaataacgaagaattgtctgagttggtaaaaaccatactatatgaattatatgttgcctttaagaacgattcgcaactaaattatgtagctagggtttatgataaattagtctctcgtggcattaagttccctaaaaagttgacaatttcaaattcgccaactgcaatgttcgattcaaagacgccagcggactggatagattccgatgcatgcatggtttgctccaagaagttcactttgttaaataggaagcatcattgtcgttcttgtggtggagtattctgccaagaacattcatcaaataatataccattacctgatttagggatttatgaacctgtgagagtttgcgataactgctttgaagattacgacttgaagaaacatgacaatagtaaacaatcaagaaaacatcgtcacaacaaaaaaaaaaaggataaggacagttcaacccctgaagatgaagaggaattgataagaagagctatagagctctctctaagggaatctagaaacagcacaagtggagaacctatagtccctattgtggaaccaagacctgcggaacagtaccatgagccagaaagagaagaagaattagaagaagaggaagatttagatttaaaggcagccattgaagcaagcttgagagaagctgaagaagcaaaaaaacgtagcgagcgtcagcagacacaccaacaaccacaccaacaaccacaactgcaacgactcccacaccaaccacaacctcttcaatctgttgatttaacgcatgaagaagaagacagcatatacatgtttgcatcgctagttgaaaaaatgaaatctagacccgtgaatgaaattttggaagattccaaactacagaatttagcacaaaaagtatttgcctccaaagctagattgaattatgctctaaatgataaagctcaaaaatacaatattttgatagaaatgaatgggaagatctctgaggttatgaatatatatgatagattgttggagcagcagctacaaagcatcagcttatcacaacaatacactcttccacaagttccctctgatccttataattattcagcaaatcacatgccaaatcaacagcaaagttatcaactacctcctattcagcaaccatcctaccagtatcaaccgcaacaagaggtttcacatcaacgaccagaacgggtggacccaccttcaactactaattttgaccatttgaaaaccattaatatagtaccacaagcagagcaaaagccccagccgcaagttgaactcgcaccttccgatccaccttatccaaaggaagaagaggaggaaggagaaagccaaatagaacccgaacggaaagcttccacacaagagtcacatgaaagaccatatcctgtggagacagaaacggaggaaaactcaataaatgaacggcctcaaggtattacacgctatgatttcccgactgttcccgcacgtaaagtcgtcgaaccagagctggccacaccaattgctacaagctcctctgagactccgatcaaagaagaaaggccgccaactcctcaagaggagttattaatagagctttaa

SEQ ID NO: 2235 - DNA, 942 bp, Saccharomyces pastorianus
atgattaggtctacactaagtagctggagggaatatctaactcccataacacataagtccaccttcttaaccacgggtcaaataactcctgaagagtttgtacaggccggtgactacctatgtcatatgttccccacttggaaatggaatgaggagtctttggacgttagttacagagaatttttgccgaagaataagcaatttttggttattaggaaagtcccctctgataaacgtgccgagcagtgtgtcgaagttgaaggaactgatgtagacgtgaaagactttgaaggcgatgaagatgaagatggtgctttggaatatataggtgctagaaccgaacacgtaaaaagtacgccggaggggagaactgaggctgcacacattgacgatatcgatgagctgatacaggacatggaaatcaaagatgacgatgaaaatgaagaagcagaggggcataatgctgcgaaccccttagctacagatattgctcaggaaaggtactacgacctttatattgcgtactcgacctcttatagggttcccaagatgtacatagtagggtttaatgccgatggttcaccactaacacccgagcaaatgttcgaagatatatcagcggattatagaacaaaaacagccaccatcgaaaagctgcctttttataaaaattcggtactatctgtttctattcatccatgcaagcatgctaacgtgatgaaaattttgcttgataaagttcgtgtggttagacagcgaagaagaaaagagcagcaagaagaacaagaacataaagaggtggacggtgtgggagattgggaggatttacaagacgatatcgatgattcgttacgtgtggaccaatatttaattgtgtttttgaaattcattactagtgttacacctagtattcaacacgactataccatggaaggttggtaa

SEQ ID NO: 2236 - DNA, 1977 bp, Saccharomyces pastorianus
atgggaacactatttcgaagaaaagctcagaacaagaaggaagattccggtgaagaaaattctgctcacgataggggagagaagaagaaccacatccatcatcagcaaggactgagccataagaaaagaaggaatggtagtggcagtggtagaagaaaagatcatggtaaaactgttgatagagaaagggttgaggatggcaggaaacgttggagagattcccgaagactcatctttattcttggtgcgttcctaggtgtccttttgccgtttagttttggcgcgtatcacgttcataatagtaatagcgacttgtttgatagctttgtgaattttgattccctcaaagtgtatttggatgactggaaagatgttttgccacagggcttgagttcatttattgacgatattcaaaccggtaactactcaacatcgtctttagatgatcttagtgagaatttcgccgtcggtaaacagcttctgcgagatttagacattgaagccaaacatcctgtagtgatggttcccggtgttatttctaccggtattgaaagctggggggttattggagacgacgaatgtgatagttctgctcacttccgtaagcggttgtggggtagtttttacatgttgaagactatggttatggataaggtgtgttggttgaagcacgtaatgctagatccagaaactgggctagatccacctaatttcacgttacgtgcggcgcagggttttgagtccactgattacttcattgcagggtactggatttggaacaaagttttccagaatctgggggtgattggatatgaacccaacagtatgacaagtgccgcttatgattggagactggcgtatttggacctagaaagacgcgacaggtattttaccaagttaaaggaccaaatcgaactattttatcagttgaatggcgaaaaagtctgtctgattgggcattccatggggtctcagatcattttttattttttgaaatgggtcgaggctgaaggtcctctctatggtaacggtggccgtggctgggttgataaacatattgattcatttatcaatgcagcggggacgcttctgggtgcccccaaaagtgttccggccttgattagtggtgaaatgaaagacactgttcaattgaatgcgttagccatgtacggactagaaaagtttttctccagaagtgaaagagtgaagatgctacaaacgtggggcggtattccatcgatgttacccaagggagaggaggtcatctggggggacatggaatcgtctgcagaagatgctttaaacaacaacactgatacgtacgggaacttcattcggtttgaaaagaacacgagcagtgcgttcgacaagaacctaacgatgaaagatgccatcaatttgaccatggcaatttcgcccgaatggttacagaaaagagtacgtgaccaatactcgtttggatactctaagacagaaaaggaactgagcgacaacgagctgcaccacaggtactggtccaaccccatggaggtgcccctcccggacgctcctcacatgaagatctactgtatatacggggtgaacaaccccaccgaaagggcgtacgtttacaaggaagaaaaagactcgtctaccctcaacctgactatcgactacgaaagtaagcagccagtatacttcacggagggcgacggaaccgtgccactcgtggcgcactcgatgtgccacaagtgggcccaaggagtttcgccgtacaaccctgctgggatcaacgtcaccgtggtggagatgaagcaccagccagacaggttcgacatccgtggtggagccaggagcgccgagcacgtagacatcctaggcagtgcggagttgaacgactacatcctgaagatcgccagcggccacggtgatctcattgagccgcgtcagctgtccaatctgagccaatgggtctctcagatgccctttccaatgtaa

SEQ ID NO: 2237 - DNA, 753 bp, Saccharomyces pastorianus
atgtccataatgaagcagaggttaccactgggagagttttctagctcgaagatcaacaagttggcaattgccaacatcgcggatgccagtgaggctaggggtcgtggggagaacagcgtcggcgctgtgtgcctcccctccatcaagagtttgatggtcagccctgaagtatacgaaaacgtaaagagtctgcctgttcccttgatgagaggtggtggtggaggtatgccgtgtcccgggaagcaacctgtccaggacgatgtccgcacagaggagctggacaagaactattctgagttatcgaaaaaattgcagattcgtttacagtttgcctactacaagtacaagactaagcaaacaaacaagatgtttactgatttaaagttgaaccacagcatgacaaggccctataagggggccgctcacacgaggtcggaacccttgaccaagaggaggaaattggtgctgtctcagggccattacaagactcctgccaagtctaagatcaaaaccccatcctctatctacagctcttacggcaatgcatcttcttttacatgctcccatggtgggagcgaacccttgagttctaccgcgcacacggacatcacagataccacaacgcctatacgcaacatcataaacgcaaagcatttcaatagtcataattgcgccttgtaccaggggcaagaaaccccgatgagcatcaaagctgccaaatctttaattcatctttttacgagcaaccaatag

SEQ ID NO: 2238 - DNA, 453 bp, Saccharomyces pastorianus
atgggtctacagaacaacgtactgaagcagatacagcaggtgctgctacccaccagtcccaatatcgatgagtccaatgctgacattacaaaacaagaatcttcgtcaacggaaaatgtagatggcaaagaccactccgctaccccacagcaggccacaaatctgagtactccctccaccaattccaatggtgaattcataccgcatattttctattcattacaccaaataagaaaggatccaaacaacctctcgaatcagttggaaacttcaacaggttctatcagacatcgtttaaagctttgcaaatctttgatatccgaacatgaagacactaaaaatttactgagcaaaagcccatccgagtgggaagatttcatccagcaacgcgaacaagaattgcaaattaagagaaacgttttggatgatttgtatcgcaaattacaacgataa

SEQ ID NO: 2239 - DNA, 1515 bp, Saccharomyces pastorianus
atgtctcaccgtatagcaccatcaaaggaacgctcttcgtcgtttatttcgattctagacgatgaaacgagagacacattgaagtctgatgcggcgatgaatagtgaaactgatgtaaaaaagagcgagaactttgaggggaaaagctctcgatatatcccaccatggacaactccatacatcattggtataggtggtacttctggttcaggtaagacaagcgttgctgccaagatcgtatcgtcaatcaatgttccctggacggtattaatatccttggataacttctacaagccgttgaatgcagaagatagggctcgtgctttcaggaacgaatacgatttcgacgaaccagacgccattgatttagatctggcatataagtgcattttgaatttgaaagagggtaaaagaacaaatattccagtttatagttttgtgcaccataacagggttcccgataagaacattgttatatatggggctagtgtggtggtcatcgaagggatttatgcattacacgaccctcgattgctagatttaatggacttgaaaatttacgtggatgctgatttagatgtctgcttggcaagaagactatctagagatattgtgtctagagggagagatctggatggctgtatccaacagtgggaaaaatttgtgaagcctgatgcagagaaatttgtgaaaccaacgatgaaaaatgcaaatgccatcatcccatccatgagtgacaatggtactgccgtaggtttaatgatcaatcacataaaatccaaactagagctgaaatcggacgaacatttgagagaattgatcagattaggctcttcccattcacaatacctgatcaatcgcgacatgattcacgaattgccgcgcactaatcaagtcatttcattgcataccatgcttcttaacaaaaatctaaactgcgcagactttgttttttatttcgacagattagctacattattgctctcatgggcacttgatgatattccggtaactcatacaaacatcataacgcctggtgaacattccatggagaatgttatttcgtgtcagtttgatcaagtcactgccgtgaacattatacgatctggtgattgttttatgaagcctttaaggaaaacaatccccaatatcaccattggtaaactgttgattcagtcggattcacagactggggagccacaactgcattgcgaatttttacccccaagcatagaaaagttcgggaaggttttcctcatggagggtcaaatcatcagtggtgctgccatgatcatggccatccaggtacttttagaccacggtattgatttggaaaagattagcgtagtggtttacttagcgaccgaagttggtattagacgtatattgaacgcatttgataataaagtcaacatttttgctgggatgattgtcaccagggaaaaactgcaaactcatcaatacgagtgggcattaaccagatttcttgattccaagtatttcggttgtgattga

SEQ ID NO: 2240 - DNA, 1146 bp, Saccharomyces pastorianus
atggtcacgtacgcggggaaactggtcctggcaccaatggtgagagcgggtgagctgcccacgaggttgatggcactagctcacggcgctgatctcgtctggtccccggaaattatcgataagaaactcgtccagtgcgtcagaagagaaaacactgcgctgcaaacagtggactacgtcgtgccctccaaggtccaggcaagacctgagaccctggtctttagaacgtacccgaaattggagtcttccaagctgatcttccagctcgggtccgcctccccggcactggccacccaggccgctttaaaagtgatcggcgatgtcaacggtatagacatcaacgcaggttgtcccaagcacttttccatccactccggcatgggttccgccctcttacgcaccccagacatgctgtgcctcatcttgaaagagctggtcaagaacgtgggcaagccccacggcaagcccatcagcgtaaaaataaggctcctggacagtgaacaagacaccctgcaactcgtcacctgcctatgtgccacaggtatcagcaacctgaccgtgcactgcaggaaaacagaaatgagaaatagagagcagcccatcacggactacatcgccgcgatctacgggatatgccagtcaaacaacgtgtcgttgatcgtaaacggcgctatccgtgaccgcgcccatttccatgagctgcaatccaaccactggaacaacaccaagatcggtggcatgattgcagaatgcgctgaaagaaaccctgcagtcttcgaccaccctaccagcgagacgaaagatgtccttccctgggttgccgcctgtcgcgagttcctgcaatgggcaaccaagttcgacaaccatattggcaatacaaaatacatgctaagcagaatcgtccctgggaaatccaagtttttccagttctttgcccgttgtaagaccccagaagagatcgattacgtgctggagcaactcaccgacgatggcctcacactgaccgatcccttggaatacttggaaaagtgcagaaccctggagaaggcctcgaagaacgccaacgccaagcaaaagaggaaacaggctgatcatacaaatgacaacgttaaaaagcaaaaaacacctcttccatcagatatataa

SEQ ID NO: 2241 - DNA, 660 bp, Saccharomyces pastorianus
atgtcgtggttttccggaaacaacacgccagccgctgacgcggcggcggtcgccgacacaggcaagcccaaggagctgtcgctgaagcagagtctgggcttcgagccgaacatcaacaacataatagcgggtcccggggggctccacgtcgacagcgccaggctgcaccccttggcgggcctggacaagggcgtggagtacctggacctggaggaagagcagttgtcttcgctggagggctcccagggtctgatcccgtcccgtgggtggaccgatgacatgtgctacggcactggggccgtgtatctgctggggctcggtgccgggggcctttccgggatgatacagggtctgaagaacatcccgcccaacagcccggccaagctgcagttgaacacggtgctgaaccacatcaccaagcgcgggcccttcctgggcaacaacgcaggcatcctggcgctgagctacaacatcgtcaactccaccatcgacgcactcagaggcaagcacgacgccgcgggctccatcggcgcaggggccctcacgggcgccctgttcaagtcttccaagggcctgaagccgatgggctactcctccgccatggtggccgctgcgtgcgccgtctggtgctccgtcaagaaaacactgcttcaaaaatga

SEQ ID NO: 2242 - DNA, 675 bp, Saccharomyces pastorianus
atgaagattttaacacaagacgaaatcgaagcgcacagctcgcacacaataaaaggtggtatcgagggggcccttgccgggttcgccatctccgccgtgatctttaaagtccttcccagacggtatccgaagttcaagccctcaacgctgacgtggtcgataaaaacagccctctggatcaccccgcccacggtcctgaccgccatctgcgccgaacaggcgtcgaacagcttcgatgccaccatgtacgggtccggggcctcttccgaggacgccctggacgaacaccgcagatggagggccttgagcacgaaggacaagttcgtcgagggcctgtctaacaacaagtacaagatcatcacgggtgcgtgggccgcctcgctgtacgggtcgtgggtactcgtcaacaaggaccaaatcatgaccagggcccagaagatcgtccaggcaagaatgtacgcgcaattcatcaccgtcggtctgctgttggcctctgtcgggttgagcatgtacgagaacaagctacacccaaacaagcagaaggtcaacgagatgcgccgctgggaaaatgccctgaaggttgccgaagaagaagagaagcttgagaaggagggccgtaggactgggttcgtttccaacgaggagagaatcaactccaagatcttcaaatcgtga

SEQ ID NO: 2243 - DNA, 1956 bp, Saccharomyces pastorianus
atggacaagaacaaggatctactggagaacgagcaatttctccgcatccaaaaactaaatgccagcgatgccggcagaagacggtccatactagtggacaacgaggacgagctgtacgggctgggctccggcagcagttcatctggcagcgagcacgaggacgaacagcctgccaagagcactaccacgatcacgaccacgaccgcggctacgcagaaccacatcgccgacgacgttgcattcatcccgggcacgactgcggacaacacagaaacagtaacacaggtggttgaaacagacgacaacgtgtttaagacgcacgttcagaccctgagctccaaggagaagtcgaggtacagaaagggctcgtctgacttcatctctttcttcgacgacatggcattcgaaaacaggcccagtatactggacgggtccgtgaacgaccccttcaagaccaagttcgtgggacccacgttggagaaggagatcaggaagagagagaaggagctcatggccatgcgtaaagatctgcatcacggcaagcccgctccggatgccgacacaccgggcctggacgcctctaccacctccatcaccaccaccgcccctgcctcggtcgccagcccagagacggtcgttaccatcgagactaccatcctctcttccaacttctccgggctgtacgtggcgttctggatggcaattgcatttggtgctgtgaaggctttgatagactactactaccagcacaacggcagctttaaggactcagagatcctgaagttcatgactacaaacctgtccactgtcgctttgatcgacctcataatgtacttgagcacctatttcgtcgtaggaattcaatacttgtgcaagtggcgggttttgaactggagctcaactggctgggctttcacctcgatctatgagttactttttgtcgggttcttcatgtacctgacagaaaacattttgaaattgcattggctatcgaagatcttcctctttttgcattctttggtcctgttgatgaaaatgcattcgtatgccttctacaatggctacctgtgggggacaaagcaggaactgcagttttccaaaagcgctctggccaaatacaaggattctgtaaacgatccagaggttattgacgctcttgagaaaagttgcgagttctgtagttttgaactaaactcccaatccttgaacgaccagaagcagaaattccccaacaatatcaacgtgagcaatttcttcatgttcaccatgttccccaccttaatttaccaaatcgagtatccaagaactaaagaaatcagatgggcttatgtgctagaaaaaatttgcgccatcttcggtaccattttcctaatgatgatcgatgctcagatcttgatgcaccctgtcgcaatgagggccttagccgtacgcaattccgaatggactggaataatggacagactactcaaatgggctggattgctcgtagacattgtccccgggttcatcgtgatgtacatcttggatttctatttgatttgggatgccattttgaattgtgtggcagaattgaccaggttcggcgacaggtacttctacggtgattggtggaattgtgttagttgggctgatttcagcagaatttggaacatcccagtgcataagtttttgttgagacacgtttaccacagctctatgagttcgttcaagctgaacaagagccaggcaaccttgatgacatttttcttaagctccgtcgtccacgagttggccatgtacgttatcttcaagagactgagattctacttgttcttctttcaaatgctccaagtaccattggtggccttgaccaacaccaagtacatgaaagacagaaccgtcatcggtaacgttattttctggctgggcatttgtatgggacccagtgtcatgtgcacgttgtacttgacattttaa

SEQ ID NO: 2244 - DNA, 420 bp, Saccharomyces pastorianus
atgttccgttctacccgagtgctcctaagtgctctgacaaagagaactcacagagtgaaggtccaggtgttaagggacttcccacgatttcaactatttaaaggacaggttaccaaagtcaaaccatctttgatgaggaactacttgcataatttcaacggggccaaatacataatcgacgaggaacatgacgtaaacatggaactattaaaattgcaccaagcgcatgagttgaaaatggaggaagaacgccaacggctctccaaacaacaagaaatggaagcacaaaagagaaataaggtacagagacaagctgtgtttggtcaaaaggcaaaggagagtccaaaagaagaaaagaagggtcttttggattccgggatcactatcgaagaggtcaagattccaggtttggatatttga

SEQ ID NO: 2245 - DNA, 1701 bp, Saccharomyces pastorianus
atgtccaaagtgattaagcccagtagcggaaagggttccagaaggagttcgaagggtaatacgcctgatgctaaggcttctgcccatgcaaagaaaaaggattcggttaaccaagataagcccaataatgcttctcagattacaccggcagtgccgcattcccatccatcagatatggtaattcctgaccatttgactgaattggttcctgagctgtcttctttccagcatttgatggactccgagaaaagattggaccagtttattcatttacaaaatttacatatgaagcaaatagtagcgttatggaataaccccaaggtctctcaagaatcttcctatcttcatttagataaaccaaatataaaatatctccgaatttttatttcaaatgttagtgaaaaccaaccttggcaaatggacacggacagtgatcctagccttatggcattagagaatgctttctggacaatgagaattgaaggccgattattggacacagtacaagctaacgatccaacaagagaaaagtttagctcttttatacagtctatagttgtagacttcaaagacaaggaagataatagcgtgccacccaggaaggaggattctgcttctgccgaagaaaataccaccgaaatacctaacgataaaagtgtgaatttgagtttgcctttgcaattttctctgccgaatggtaataaccccacaacgagcaacatggctcaaaataatggcatgaaggaagaagagactgttgggaaagacggcagttccacaacgctcaaactagaaccagtgaaatggcaatacgacccaaataatcctgtagatttcgatggactcgatattaagaggccggggtctgaaaacgttgaatgtaccatacgcatactacgcaaatcgtcccctgaggagccgtttatgagttattcccccgaactggccaggattataggattaaagagggggacattgcatgacgcgattttttccatatacaaatatattcatttaaatgagttgctcaccggggatgactctgcatttgaaacttcgatgaatattagaaacagtcacagtagtaataccaacactaataggtcactcgatgcaaaacacaaccaaacatccattgtcaaattagactttcagctattgactctattacccagtggcatgaaagaatcttcacgagaaacaatgaagttaatggatttactagctctaattaatgcacatttacttccattagagcctattgagatcgattatttggtacgtgtagataaagcatccacatatggtgagttgattcttgatatcgaagtgcccgataccgatgctctaaaactcaatagtaaacagagggaaagtcaaattggggctgccgaattacatctaagcaataaggatttggaacaaatcagatcaaagatagattcgcaagacaaagaaataagatctatcttgacaaacttacacgaaagtaacaaacgatatcgttttttcaaaaagattagcgaggacccagttaagacgttaaatgattgcatttcttctacttccaataccctgaaggtgttatccggtgatgaaggctataatgaagatatggtaagaagagcacagttctacacagaaaacgaagccatgttgcgtgaaaacatagaagttatattatcaaacgggcgaatgtaa

SEQ ID NO: 2246 - DNA, 954 bp, Saccharomyces pastorianus
atgactagtacgttacgcacaacgaagaaagtgctctcgatccaatcgcacgtcatacatggctacgtggggaataaggccgcgactttcccacttcagtacagaggctgggacgtggatgtgttgaacacggttcagttttccaaccatccagggtacgcccattttacagggttcaagtgcagcacggaggagctggtagagattgtggagaaaggattggttggggccctagacatcaagtatgatgctgtgctcagtggctatttgcccaatgtacaggccttgcagaaaatggcaggaatagtgggacggatgtgtgaggaagacgacaacgtgcagtgggtgttggatccggtactgggcgataatgggagactttacgtggaagagcaatgcgttgcggtataccaagatattatgcacaggtctaagatcttcttggccacaccaaaccagttcgagatggaactactggttgggatgccaatccgcacgttggacgatgccaagcgcggcttcgagcagtttcacgaaaagtttcctagagtgacgcgagtcgtcgtcactagccttgaactgtctgactttttcaacgacaatgtatacgtagtggcaggatttgattcatcgcttagcgacgaagtgttcttttacaagatccccaagatcaacgcaaccttcagtgggagcggcgacctgatcagtgcccttctcacagactcgctactgaacggccacggccccatccagcagccactgagcacgtctttgggccaagtactgtggctcgtcaccaccatcctgcagaagacgtacgaattgaacgtggttgatcgggtcccgcatgacgaggccataaggatcaaagacttaaagctgattcagtgcaaagacattttgaagcggaacctggtgccctcgatcggcaagccagagaccatcaagatatag

SEQ ID NO: 2247 - DNA, 924 bp, Saccharomyces pastorianus
atgaagcctattttcctgtatatttatatggcactgactattgcctgcacaatggcctcgccattacctgtggataacaaaagggtttcctccgattccctggatctgactaagaagtatgcacctgaacctcccactacacatcacgttgttctcggaatcgtattcacgggtactgatcatgatcctaggacggagcttgcccccataggcatagatttatatggaaccatggttcccaggactgcgttgaatttctatcagtatgctgacactaaaaaatcttaccgtaatagcgagaacccgtgggaccgtgatttagacaggattttaccgactggagccatagaaagtgtacatttttctccctcccctgctgaagaaacatccgatatggcttctctgtttcaagaaaatttcggtttgactcacgatagaccaggtagggtttccatggccagcgatgacgagggttctaagtttatgatatggacgagtggaatgccttatgaaggcgacaatgttgtgttcggacaagttacttccggtttgaaagatttgatggatagagtggctaatgtgaaaaaggacgaaaatggcaaaccagaccaaccaattacaatatcctacacctcaatgagtgtaaacaaattgccagatccgaagagagcccatgagcagtatttggaaagcctccaggattatcaaaacggagagttggacaaaggtgtcactctaaaaacgtacctctactatgacaaccaaagagatttggaagacacagaatacaatcagctccaccatccattgcctagaatcatgcttggtatttcagccttaatagcttgctatgctgtggccaagtataggaagaggatatttggtagattttcatccaaaatcatatctattagagaggattga

SEQ ID NO: 2248 - DNA, 1656 bp, Saccharomyces pastorianus
atgcgttggtccgttctcgatacagtgttactggccgtgatttccttccatctaatccaagctcctttcactaaagtagaagagagtttcaatatccaagccatccatgatattttgaattatagtgtttttgacatttcccaatatgaccatttgaagttccccggtgtggttcccagaacgttcgttggtgctgtgattattgcaatgctttccagaccttacctgtacctcagttccctgatccaggctgccaagccctcttctatagacgttcagttggtcgttagaggtgttgtggggcttacgaatgggatttctttcatttatttgaagaatgctttgcaagacatgtttgacaagattacgcagaagaaaaaggaagagaatgaaaaccaggaaatatacgtttacgatagcgctggttcatggtttcttttatttttgattggtagtttccatttgatgttctatagcaccagaaccttacctaattttattatgaccttaccgttaactaacgtcgcattgggttgggccttgttgggtcgttacaatgccgcgatttttctgtctgcattcgttgcaattgtattcagactagaagtggctgctttgagcgcaggtattgcatttttttctgtcattttcaagaaaactttattatctgaagcaatcaaatttggtatctttggcctagggttaggttccatcattggtatcacaattgattcatatttctggcgagaatggtgtctccctgaagtggatggctttttattcaacgttgtatctggctatgcttccaaatggggggttgaaccagtaacggcttatttcacccattacttgagaatgatgtttatgccaccaactgtgttactactgaattacttcggctataaattggcccccgccaatttaaaaattgtttcattagcatctcttttccatgttgtcatcatgtctttgcagccccacaaggaatggagatttattatctatgctgttccctccattttgttgttaggcgccactggggctgcacatctgtgggaaaatatgaaagtaagaaagataactaatgtcctattcttgactatattgcccttgtccatattgacatcttttctcatttcaatggcgtttttgtatgtctcaagaatgaactatccaggtggtgaagctttggcttcctttaataatatgattgtagaaaacaatattaaaaatgtaactgtccatatgagcgtacctccatgtatgacaggtgttaccttatttggcgaattgaaccgtgatgtatacggtgtcatttacgataagactgagaacgctactatattggaagacatttggccttcgtttgattatttgattactcatgaaccaacggccgcccaattaccattcgaaaacacaaccacacatcattgggaactcgtcagctcaactaaaatgtttaccggattcgatccatcctatatcaccaactttgttttccaagagaatgttaacgttttgtccctaattaaacaaattattttcgataaaacacctgccgtttttttgaaggaattgactactaattccattattaaaagcgatgtatttttcacttacaagagagccaaacaaaatgaaagaacaaactaa

SEQ ID NO: 2249 - DNA, 1107 bp, Saccharomyces pastorianus
atggaattggatgaatgtttggaaaggctatacaaggcccaactgctgcctgaagtgactgtgagagcgctctgcttcaagttgaaggagatgctggtgaaggagtcgaacgttattcacatccagacgcccgtcacagtcgttggggacatgcatgggcagttccacgacatgctggagattttccagataggtgggcctgttcctgacacgaactacttgttcctgggtgattacgtggatagagggctatatagtgtggagacaatcatgctgttgattgtgctgaagcttcggtatcccagtagaatccatctgctcagagggaatcacgaatctcgccaaatcacccagagttacgggttttacacagaatgcttgaataaatacggtggtaattcgagagtttggcagtatttgacggacatttttgactacctggtactatgctgcattatcgatgacgagattttctgtgttcacggtggattatcgcccaacgttcaaactatagatcaaatcaaaattatcgacagatttcgagaaattccgcacgacggtgccatggcagacctggtttggtctgatccggaagaaagcaataaatccacgttggaccatccagataattctgggcagcatttccaagtatcgcctcgtggagcaggctacacgtttggtagaagcgtggtggagaagttcttgcagatgaatgacatgaacagaatctacagggcacaccaattgtgtaacgaaggttaccagatatactttgatgggttggtcaccaccgtgtggtcagcaccgaattactgttatcgatgcggaaataaggcctcgattctggagctatatagtaaggaccagttctacttcaatgttttcgaagaagctccggaaaataaagtgttgaaggaaaacagtcttaacaacaactacttggaagagaatactacgaatccggtggtgaacaggaaactgattgccgattatttcgagggcgactctgcctccaccgacggttctgcagatcctgaaatgtacatgttttcagacgtataccaagccagatccgcttctaatagacatgttgattacttcttatag

SEQ ID NO: 2250 - DNA, 222 bp, Saccharomyces pastorianus
atgattgaagtggtcgttaatgaccgattgggcaaaaaggtcaaagtgaaatgccttggtgaagacaccgtgggtgatttcaagaaagtgttgtctttacaaataggcactcagccaaacaagattgttttgcagaagggtgggagcgtactgaaggaccacatctctttggaagactacgaagtgcatgacgagacaaacctggaactgtactacttgtga

SEQ ID NO: 2251 - DNA, 2400 bp, Saccharomyces pastorianus
atgcttctcgatacagtcgacatacagcagcagcagcagcaacagcagcagcagcaacagcagcagcagcagcagcagcttcatgtcctgttcatcgactcttatgactcgtttacttacaatgtggtgagactgattgaacagcagaccaacatctcaccggaagtcaacgccgtgcatgtgactacaatccatagtgatacgttccaatccatagaccaactattgtcactacttgccctgttcgatgctattgtggttggcccaggacctgggaatccgaacaatggggcccaagacatgggcgtaatatctgaactcttcgaaaatgcgaatgaacatttgaatacgattccgatattgggtatatgtcttgggtttcaagcaatgtgtttggcccagggtgctactgtcagtgaattggacactatcaagcatggccaagtctatgaaatgcacttgaatgatgcggctcgaagatgtggcctctttaacagttatcccgatgcattcagatctaccagataccattcgttgcacgttaatgctgaaggcgtcgacacccttctacctttatgttcgactgaagatgagaacggaactcttttaatgagtgcccaagtcaaagatagaccatggtttggtgtacagtaccatccggagtcatgttgctcagaattaggaggcttgttagtaaaaaactttcttaagctgagccttgaaaacaacataagtacaggaaggtgggagagcaggcgacttaatggtaagttttccgatatcttatcccgattggataaaactatcaatagggaccccatatacaagatcaaagaaaagtatgccactggagatgacgtgatctacgtgaaacaattcgaagtctctaaagatccaaaattaacgttcaatatttgtgatatcattgaagagccaaaattcgttatgtcatcaccggttattagcgaaaatagaggcgaatggtccatcattgcattgccagattccaaatctcaggtattcacccattacggcgctgtcaacaagactacgattcataattggcaagataaacaaattagttattctctgttgaagaagtgtctggatggccaggatgtggacttgcctggttctctcacggttataaatgaggataagtctcaattttggattaccttgggaaaattcatggagaacaaaataattgacaatcgtaaggaaattccatttattggagggctggtaggcattctaggttatgaaataggccagtacctttcatgcagccatcgtactaatgatgaaaattcgcttgtcccagatgcgaaactggttttcatcaacaatagcgtagttatcaaccataaggaaggaaagctttattgcatttctctagataatacgttttctgagaccattgaacaactactggttcatagcttcgtggacaggaaggatatcaagcaagatctaccgtggccgaagcatttgccggaggggacagactttacgattacgatgcctgataagcaagattatgcagacgcatttgaaaaatgccagagttatatgcataagggtgattcctatgaaatgtgtcttaccacgcaaactaaagtggtaccatctacagtgttagagccctggaggatcttccaaactttagttcaaaaaaaccctgctccattttcgagtttttttgaattcaacgatattgcccccaataaagatgaaaagcctcccgttctatgcttcttaagcacctcgcctgagagatttctaaagtgggacgcagatacgtgtgaactacgtcccatcaagggaaccgtgaaaaagggaccgcagatggacctaactaaggccacaaagattttgaagacacccaaggagtttggcgagaatctaatgatcttggacttgatccgaaatgacctttatgaacttgttcctgacgtccgtgttgaagagttcatgtccgtggaggaatacgccactgtctaccaactcgtcagcgtggtgaaggcgcacggactaacctctgccagcaagaaaacaagatactcaggaatggacatcctcaagcattcgctgcccccgggatccatgacgggtgcgcctaagaagatcactgtgcaactgttacaagacgagttagaaaataaactaaacaaacacgtcaacggcggagcacgcggtgtctacagtggggtcacaggctactggtccgtgaactccaacggtgactggtccgtcaacatcaggtgcatgtactcctacaacggcggagctagctggcaattgggggccggcggagccatcaccgttctgagcacactggacggcgaactagaagagatgtacaccaagcttgagagcaacctgcaagtcttcatgtag

SEQ ID NO: 2252 - DNA, 969 bp, Saccharomyces pastorianus
atgactacgaccgttcccaaagtgtttgcatttcatgaatttacaggggtagctgaagcagttgccgatcatgttattcatgcccagaactcagccctcaagaagggaaaggcttcaaaatccaggcaaatgtccgggacgagcttgaacggaggtggaaacacttcagaatccaaagccatggagagagtaaattctgtaaggagtaatgcttccagccgtggtggtaatgacgacggcatcaccaagaaattgaagaaggagaaagagagaaggttcaagatcgctttgtctgggggttcgttaatccaggtgttgcacgaaggcttgttgaaaagagacgatgtacaatggggaaagtgggacatttatttcgcagatgaaagattggtgcccttcagctccagtgaaagtaactacgggctagctaagagagaaatttttgatttgatagatacagagaaatatggtaccccaagaatttatcacattgatgagtcgttgatagatgacccccaagaatgcgcagataactatgaaaagattctgattaaacggtttgccggtagagattctgtcaaactaccgatgtttgatttattcttactagggtgtgctcctgatggccatattgcgtcattgttccccaatttccaagaaaatctgcgtgaaaacttggcatgggtcataccagtggaacacgcccccagcggaccatcgaatagaatatcgctgactattccggtgatttgtcattctcacagagtaacgtttgtcgttgaaggtgctacgaaggcgcccgttatcaaaactataatggagagacctgaaaaggggttgcccagtagtattgttaatgaaggcgctgctggtcgtgtttcatggtttgtggacgacgatgctttgatagacgtctttgtgaccaagaagaagtacaagttttacgacgacgacaacttaacagagtag

SEQ ID NO: 2253 - DNA, 297 bp, Saccharomyces pastorianus
atgaagtctaccgctctaatttctgaaataaaaccaaaggcagtggggttttccacctttgacgaacacttccacttgttggatacatctggtgtagcaaaggccattgacaattcgccaatcgccgaagtggtgaagaaatcgaatgccgaactaggtaggttaggctattctgtttatgaagacgctgaatacattggtcatgcattcaagaaggccggccatttcatcgtttatttcactccaagaaacaaaaacagagagcccatgatccctcctgtaagaatagccaattag

SEQ ID NO: 2254 - DNA, 1029 bp, Saccharomyces pastorianus
atgctacacttacaaccacagaaccttctcattcaaaagacgcttaatgagtcgattgaggctctccaccaggactcgccgttgaccatggacagaatcgtgtccgacttcgactataccacctaccacatttcgaattctgccgaggacaagtccattctgctcttgagtatcaagaccaaggcctgggtcagtgtctctgagtgtcaattagacggctctttgaccttgttgaagttcttggccgatcactactcccccttgggtgggctgactattcccgctcaagtggagtccggctacgactatactcttcaactttcattgaacgagctgactcaggactccattttgcaattgtctgttctgaagaccgtcatattgagttatccctttgaattggccattgcaaagttcactgaattgagccagcagcaaccaacgcccatcgaggcagagattactggcggtgaggtcgctgccaatggagacaatacgttgttcacaatcaagtatcgtgacgaggagaatatcttcatcaagccttctaacgacagaatcactataattttcgaaactatcttccaagatgaaacggataaaatctttgggaaggtctttttgcaagaattcgtagatgcacgtaagagaaaccgccagatccagtccgctccacaagttctatattcgcacgagcctccattggagttgaagaaatcctaccagccacccaaagtcgcggaacaaagcagaagattcatcacgtttgttctgttcccacgtcattttcaaacaaaagagttgcaattccattcgatttgtcagttaacactattcagaaactacttccactaccacatcaaatgttccaaggcttacatgcactccagaatgagatttagagtggactcgttcatcaaagtcttaaatagagccaaagtggacgaagataatgaaaacgatgaatcaagtgcggatgccagacaacaggcaagaagaacttttactggtagaaagattgtttactaa

SEQ ID NO: 2255 - DNA, 276 bp, Saccharomyces pastorianus
atgcatcccgcggctagactgttatcacggtcggtgtggaagggccccaacattgtgccgctccccatcagagacgcaatggctaagggcaccccgataagaacaaacgcaagggccgccacaatcctaccccaatttgttgggctcaagttccagatccacaacggtaaggagtacgtgcctgtggaggtgtccgaagacatggtgggccacaagctgggtgagttcgcgcccactaggaagcggttcagctacactcaaaccaagaacaaatga

SEQ ID NO: 2256 - DNA, 1917 bp, Saccharomyces pastorianus
atgtttgcttcaagattcgaccctacccagctgtcttctgctgctcctgttactgtcactccagaggaacccgtcaaggcagccccagaagccattgtaccgttaaagagacaggctaccgcatctgacagtgaaagcgatgatggtaccgacgagagctccgacgagagctccggggaaggctcggataatgatgaccgtatgcaagtggactacggagtaagcgaggaagactccagcgaagaagaaaaagaagagaaggacaatcatgaggaagaagacacaccaagtactcataccaccgtactgtcaagatttaagcaaacagtttctttgcaagataagctggatgcgtctgatattgtcggaacaaaggaagacgagagcctcgaggaaaatgctactccgccacaccaattagaacaaattcctcaaccggaatttgttaaaaacccaatgaatctaaatagaaattcatcagaatacaagtccaccgggtggttaaataccgaaagagtgttttatgacaattccatgacgaagccgttctcagattacgaaagtcaactagaaccaaggcttttgcagaatatctgcaagaatttctcgacagacactttccccatccagtcgatcatcttggactccgtcttgccgatactgaactttaccttgaacatctccaagagaaacttcaccaagagaatcggtgacatccttgtaaacgccgctacaggttcgggtaaaactttagcgtactcaattcccgttgttcagactttatctaagagacagatcaacagattgcgttgtctaatcattgtccccaccaaactactgattaaccaagtttacactacattgtccaagctaacccaagggacctcacttatcgtcagtattgccaaattggagaactcattaaaagatgaacatagcaaatttttgaacctggagcctgacatcttgatcactactcccggtagattagttgaccatttgaacatgaaatcgataaacttgaagaaccttaagtttttgattattgatgaggctgatcgtcttctaaatcaatctttccaaggctggtgtcccaaattaatgtcccatttgaaaacagataaactagacacatctccaggcaatgtaatcaaaatgatctttagtgctacattgactaccaacaccgaaaagctaaatgacttgaatctttacaaaccaaaactattcttgaagcaaaccgataaattatatcatctacctaacaaactaaaggagttcaacattaacattcctacagcaaaaagtgttttcaaaccattgattctgttatattcgataaatcaattcatggcgcactcttccaacgcctccaagatcttagtgtttgtaaagtccaatgaatcctccatcagattgagtaaactgttgcaactaatgaacgaaactcgctcgcaatccagcattctaacaaacctccgtgacctggaaataataatcaattctatcaattcaaataactccaaatcagaaaataagaaaaccattgcagatttctcacacgagtcgaaaagctcaagaacaagcatattaattaccaccgatatcatgtcgcgtggtatcgatatcaatgatatcactcaagtgataaattatgatccaccaatgtcttcacaacaatacgtccaccgtgttggtagaaccgcaagagccaacgagatcgggtctgcctataacctactagttggtaggggtgaaagaacattcttcgacgacctaaataaagatctagatagagatgggaagtctgtcgagccatttgaattggacttcaccttattggaatctgattctgagttatatcactcatctttggaaagcctgaaaaactatcacaataaaaacacagaagcctga

SEQ ID NO: 2257 - DNA, 1821 bp, Saccharomyces pastorianus
atggagacgccacaaatgaatgctatacaggaggaggacaatttgtccccggaaactgctttccaaacgcccaaattaaatgattccgatgctttgtcgttctcactgtccaatatgaacggtgtaggaaatacggacggcatgccgtcacaaaacaggacgctttttgcatctcccagacccagctcgctcttttattctgctaaagaaggtaacaattcgagctccagcatcatctacaatccttccttcagctttggcgaaaacgtttccattaataataccgcaaatgacggcagtatgttgaaggggaagagcaatgatcatagaagacagtcactcaagtatataccgggaacaaagctggctccgcttccccctagaacaagatcgccggtaagaggcatatctccagacgctggaaacggtaaacgatcttctttgacgctggaatctccattcaactttacggcatctacgctacaaccgcatcaacagacacctccctcttctgctgcatcaaggacttcattccgtaagggacatcgttataagcattcttctgtttcgatgaattttttccaagagcctgaggtgaaaatccccctaaacatcgccaaatcccttcccataccggatttgagtgacttgacgtccaatttaccgtggccaaaggctcacatgcagttatctattgttggcctgcaaatcttggcatgcttaatcactttccaaatggggcacttatattcatggaataattttatcacgttatcgcattttatcacttacgatatcattgggtctctagttatcatatttgtggaaaacttgtcccaattccaggtctggttcacggggacaatcactttcccctttggcctaaatagaatagacgtcctattgagtttcgcacttgccgtttcattatgttttgtcgggttagacctgttatttcatatagtcgaagagttcattgttctatttgtggaagcaggtaacacgtcgacaagcaaccatgatcacaatgaaatcaatgaacaaattcctcattctcattttgctactgccaatgattcacaaaacgaaaacatcactttgtggtatggaatactagtgattaatttagtgctatcaacgttatcactctataaaacgttttatgctaataaatacagtaatttgaaaacgaagaatccaataattaccatcacgtacacaatgtatctgttcatttatcccttattattggacttattatcaagtatatctgattacttggccactttggtaatatcgattttgattttatggcatgggcttactatagcaagatggacctctacagttttgttgatggggttttcaactacatcgttatctaactcagcgttattcaataacaaccacaacgctgatgcaacaaccgatgctggagctgagtctaaatcaggcaaagaaagacccaccatacggccaaggtcgatgagctcattacccatagctacgataaataccaagaaagtagccactaaaactgggttttggaatcctatagcttccactgaaaacccaacaagcattaaaaacatgattaaagatcaaatcgagagactaaacgaatttaaatcaagatgcattttaaattacgatgacctaataataagtaaagtgaactttacgctttacgtggtactaattaagataacaatgaaaggtggctctaacgatgacgagttgatgttaaggttagccatcaacaagtgcattcaaacgagcattccgtcttgtgaaacgacaatagatatagaccgaatttaa

SEQ ID NO: 2258 - DNA, 1104 bp, Saccharomyces pastorianus
atgtttgtttggcagagaaatagtttattgctagggcggtcgatcgtgggcagcggcggagtcgttgttgctggaatcaacgggatcggtagaaagaggttcatgtcgtcgtcgtcgtcgtcgaaggagttaacaccagtgttcactccgaaggagctggaggtggcacgcaaggaaagactggacggactggggccgtttgtgtcccggttgcccaagaaatggattccgtatgcagagctgatgaggctcgagaagcctgtgggctcgtggctgttatatttgccctgcacttggtctattctaatgggggccacgatgcagggtgcctccttgggcgcaacagctggtatgttgggtatttttggtgtgggcgccctggtaatgagaggtgctggttgcaccattaacgactatctggatagaaaactggatcaacgggttatcaggtctgtcgaaagacccattgcgtctggtagagttagtccccgtagcgcgctaggattcttgggtgctcaaaccctggtcgggatgggcatcctgtcattgctgcctgcacagtgctggtggctgggtctggcctctttacccatagtgttcacctaccctttgttcaagcggttcacgtactatccacaggctgcattgagtgcatgtttcaattggggggcgttgctcggtttcccagccatgggtatagtgagttggcccacgatgatacccttgtacttgggtagttacctatggtgtatgacttacgataccatatatgcgcaccaagataaaaagttcgacattaaagcaggaatcaagtcgaccgcgctggcttggggtccacgcacaaagtccatcatgaaggtcatgtctgcgtctcagatcacgctgctggccgttgcaggcttaaacagtggattgttgtgggggcccgggtttattggtggactagggatcttcacctacaggctattaaacatgatcaagaaagtcgatcttgacaatcccaagaactgctggaagtacttcactgcaaacatcaacaccggattgtacttcacatacgcgttggcgctcgattacgtgctaaggctgtttgggttgttgtaa

SEQ ID NO: 2259 - DNA, 1191 bp, Saccharomyces pastorianus
atgagcattcacacagcatctgtcaccgcgcctgttaacatcgccaccctaaagtactgggggaaaagagacaccaaattgaatctgcccaccaattcttccatctcagtgactttatcgcaagatgacttgagaaccttgacctctgcggccgctgcacccgagtttgagagggacacattgtggttgaacggcgaaccacatagcatcgataacgaaagaactcaaaactgcctgcacgatctacgccagttgagaaaggaactggaatcaaaggacgcttcattgccccctctatcccaatggaaacttcacattgtttccgaaaacaacttccccacagccgctgggttggcttcttccgcggccggctttgctgctttggtctctgccattgccaagttgtatcaactaccgcaatccacttccgaaatctccaggattgccagaaagggctccggttcagcttgtaggtctctctttggtgggtacgtggcttgggaaatgggcacggcccaggacggtcacgactccatggctgtacagatcgcagatagctccgactggccccaaatgaaagcctgtgttcttgtcgtcagcgatatcaaaaaggatgtgagttccacacaaggtatgcaattgactgtggcgacctccgaattgttcaaagaaagaattgaacatgtcgtgcccaacaggtttgaaatcatgcgtaaggctattattgaaaaggattttgcaacttttgccaaggaaacaatgatggattccaactcgtttcacgccacatgcttggattccttccccccaatcttttacatgaatgacacttccaaaggtatcatcagttggtgccactccattaaccagtattacggcgagacaattgtcgcctatactttcgatgcaggtccaaacgccgtgttgtactacttagctgagaacgaactaaaactattcgcatttatctacaaactgttcggctctgttcctggatgggacaagaagtttactgttgaacaactagatgccttcaatcaacaattcgactccgccaagttcactgcccgtgaattggatcttgaattacagaagggtgttgctagagtgatcttgacccaagtgggttcaggcccacaagaatcaaaggaatctctgattgacgcaaagactggtttaccaaagaagtaa

SEQ ID NO: 2260 - DNA, 1470 bp, Saccharomyces pastorianus
atgcacttgaagaaggggaagagaagcatcggcacggtatggcgacttttatggaagcgactttattcggtacattacaagacaaatacatactcgaccagaagtaggaagaagttagtgacgaactttacgagggtgaacgggcttttactgagctgtaacggtgatacattcccctacatgcgcacgctgtggaggtatttcaatgcacctggcaatttgatgttcgtcacaaccaatatcatcacattcacgggcattgtcgcctataatacgatggtgactgtgagtaatgaaagggtcttcgaggagcagatgatagcagcacaaatgagcctcgcgaaacagaaagaagagcttgaaaccagagctctcgatttccccgcaaatcacgaacagataaaagaagcagatgatgctaactgcgagcagccagcgatcgagcgtagcggggaagaccgatcggttaaacagcagaatgaacagctagactctcccataagacactatagtctaacagacttggtgctgaacaaagaggcaagagtcgcagattatgactcgcagcgcgtgaaggcatctctattccatatgctatacgcttacatgctataccgagatactatacagccaaacagtgactctccaaatcataacagtgaggagtggcgtcatgaagtagagcttttgactagggacaaatggctacagggtgcccaccaaaggatagacgtgttctacgacctatggaacaaccaattagacaagatagtgacgtcgcctgagaaggtacagaatttccatctgccgaattggtccaaatacccaaccctattaaaattcatatgcaccgaactccacaacaacgaattgacgacgctggatgaattcaaacagttctatggtaaggtacgatcgaacgaggtgaagaagttactggggctctggctttacgaccactccttccttttccctcgcaacatttacgataacaaaaaccaagaggtcttctatgacactttgatcagcgactccatgcaagacaacaagatattccagaaatactcctccatagtaatgaacccagataacgaacggacccagctgttctttcccaacatttacgctcagcccgtcaacaaaccaatcccgagtatatctctggaaacctacacgcggctgctgagagggtacatcaccctgcaggaaaccaactgcaaatacgactacaacgacaatatattcaaactgatcagcatcctcaaaatgaactgcttcctacagcatgacaagaagatacgcacgggtgccagcgtcagaatccttctgccgagagatgaagaccgctccccagtcctcaacaccatcccacaggcagaaaagaaaacttgctaccagattctaagcaagaacagagacatccttgcactgctgaaacggatatccgacatccaaatagactcttcttaa

SEQ ID NO: 2261 - DNA, 408 bp, Saccharomyces pastorianus
atgaagttcttaacaaccaactttctgaaatgccccgtcaaggcttgtgacaccagcaacgacaacttcccgctacagttcgacggcggtaagtgccaactggtgcaggacgagtccatcgagttcaacccggagtttatgctgaatatcatcgaccgtgtggactgggccgcactgctcaaggttgctggcgaactgggcagcgtcaccttgccctccaaaaaacccaccttcccatgtagcgtcccggaactcaccgaagtcggcatggcagttctaaacgatctgcacgtcatgctgctgcaaacgtccatcaccgagggtgagatgaagtgcaggaactgcggccacatctactacatcaagaacggcatccccaacttgctgctacccccacacctggtataa

SEQ ID NO: 2262 - DNA, 2694 bp, Saccharomyces pastorianus
atggctggtcatcaccacgaacacgggcatgagcttcagcatgagcacgaacaagaacatgagcatgatttccttcaacggcctcccactggatcagagaggactagaagcatatcgttttctaaattactgacgcggtcgtggaaacggagtggcagctcctccaataacgtgagtgcatcgagtgtgaacttgtacggtgacgcaggggagacctccaaagaatcggatcacaataacagtggctcagacggtcagtcttcacgattttctaagttgaaaagtatgttccaatccggtaacaacagcaaaaatgctagtgcccataacagcagtcagagcagtatggaaggtgattccacgtcatcttcatccaaactgaggtacgtcaagcccatagcttctccagcaaatgctccttcgccatctccgcccctttctcccaccattccagaaaaggacattttgcagacacccagaatggtgcatatagatgaacacgagcacgaacgtgaacattcgtgtggcgggtccccaattctgctctcatcaccttctttaagtcccactatcgctagggccggaactggaagaaaaagatctccctccactccaataatgcccagccacaactcaaatgataatagcggcagctctgctgcaagaccaaataaccaccgacaccactcgagttctcaggggttttcttctaataacccgtttagagaaagaacaggcacggtgcgtgggagtaacccatattttgcataccaaggcctaccaacacacgccttgtcctctcatgaactagatgaaggccctcagtcatacccgaatgctggcggcattcattttttatctacgcccacctcaaaggcaaactctttgacaaacggtaggaacttaagtaacttgtcattaaacgaaatcaaagaaaatgaagaaatgcaacaattcagtaatgaagattccttttttcacgatattcccaaagacgtgtccttgaaagatactttgaatggctcccccatcagagattgttcaaagagcccagaaattgcccaatcgtttccgtcgattgttgtggggtacagcaatgagttcggcgaagatagcgacaaagatgatggcaatgaagggagagaacaaaagatgaagaccaagagcaaatccaaacataattcactcactaagccaaatgggaaatcagcccacccaagaacaaaggtacccctaagaagagcagcatcagagcccaatggtttaccactagtgtctcccgcatcggcaccctcttctacttcggcactgaagaagccggattccttcaaaataaacgataatagtcttggtgggtcggcgtatccttcaaattttcttttccctcaagaaccacctccgaagatttcagatttacaagagccaagaagatctcgacgtttaagaaccaagtcatttagcaacaagtttcaagacattatggttgggccacaatcttttgaaaaaattagattactaggtcaaggtgatgtaggtaaagtgtttttggtaagagagaaaaaaacgaacagagtctatgctttgaaagttttaagtaaagacgaaatgatcaaaagaaacaaaatcaaacgtgttcttacagaacaagaaattctcgccacaagtaatcatccgtttatcgtcacactataccattcatttcaatctgaagattacttgtacctttgtatggaatactgcatgggtggggaatttttcagagctttacaaacaagagaaaccaaatgcatctgtgaagaggatgcaaagttttatgctagtgaagtgacagcggcactagaatatttgcacctgctagggtttatatatagagatttgaaacctgaaaacatcctactgcatcagtctggtcacataatgctttctgactttgatctatctatccaagccaaagattccaaaatccctgttgcgaagggttccgcacaatcaacccttgttgataccaaaatctgttcagatggtttcaggaccaactccttcgtgggtactgaagaatatattgcccctgaagtcataaggggcaatggccatactgccgcagtggactggtggacgctagggatattggtctatgaaatgctattcggcttcactccatttaagggcgataatacaaatgaaacctttacgaatattttgaaaaacgaagtcagttttccaaataacaacgaaatttcaagaacttgtaaagacttaatcaaaaaattgctaaccaaaaacgaatctaaaagattaggttgtaaaatgggtgcagccgacgtgaagaaacatcctttcttcaagaaagtacagtggtctctattgagaaatcaagagccacctctcatcccagtgctatccgaagacggttatgactttgccaaactgtcatctaacaagaaaagacaaaccagtcaagatatccataagcatctcgatgaacaggaaaaaaacatgtttgaagaacgtgtcgagtacgatgacgaagtctcggaggatgacccgttccacgattttaactcaatgagtttaatggaacaagataacaattcaatgatttatggtaatagcaattcttatggaaaaatcgcatacactccaaactccaacagatcaaggagtaacagtcatagaacttttttcaaacggtaa

SEQ ID NO: 2263 - DNA, 1182 bp, Saccharomyces pastorianus
atggggctgatatcgaggtggaaaaagaagagacagctgtccagcaagcacaaggctcaaaaatcaagaaaacccgcgaacacatcgtttagacaacagcgacttaaagcgtggcagcccatcctgtcaccacagagcgtgctaccgttgcttatcataatggcatgcgtctttgcacccatcggtatcgggctggtggtcagcacgataagcgtccagaggttggtggtaaactacactgaatgtgatgcattagcatcagccacgcattttgagacgatcccttccaaatacgtggattatcgctttagtaagaaagttacaaccaaacctcaatggatggtactcacagatgctaagtcgggcaatcaaacttgccgaatacagtttgagattccacaccatattaagaaatctacttatgtttactaccagttgactaacttcaaccaaaaccatagggaatatgtagagtcctttgatttggatcaattaaaggggaaggcgttgattggtgatgctctagatcccaattgtgaccctttcaggaccgcaaacaacaagacggtttttccctgcggactaatagccaattcgatgttcaatgacacattttatacaacatttaggggtgttaatggcactccagattacctacttaccaaggagggtatcgcgtggaatacagatcgtcacagatacgcaaagaccgaatataatgcatctgatgttgtaccgcctccaaattgggctaaaaaattccccgacggctatacggatgagaatatccctaacttgcaagattgggaggagtttaaagtatggatgagaactgctgcattacctaacttttataagctggcgatgaagaatgagactaatggaataggtaagggtgtctacattgctgatatagaattaaactacccggtaacatctttttatggaacaaagtcctttgtactgaccactaacagcatcatcggtgcggggaacgaagcactaggagttgtgtatttaattgttgctgggattgccactctttttgccattctgttcctgataaaagtcatatttaagccaagacctatgcacgatcatagttatctaaattttggtactgacgatacccaatttgaagaaaatagtattacgagtattccactaagagaaattttgtga

SEQ ID NO: 2264 - DNA, 1545 bp, Saccharomyces pastorianus
atggtcgccacggtacaagacatatgttttgcatttttacaaaactattatgaaagaatgagaactgacccatctaaattggcatatttctacgctagtacagccgaactgacgcataccaattatcaatctaaatcaacgaacgaaaaagatgatgttcttccaacggtaaaagttactggacgggaaaacatcaataaatttttctccagaaatgataacaaagttcggagcttaaaactcaaattggataccatcgatttccagtacactggacatctgcacaaaagcatcttgattatagctactggtgaaatgttttggacgggaactccagtttacaagttttgtcaaacttttatcttactaccatccagcagtggctctacatttgatattaccaatgatattatcagatttattcccagctctttcaagccgtatcttcaaagagaggattatttgccccaacctgaaaaagacagctccgcaacaactgtagatgaaggagagaaaataaggcaggacttgaaggttgataaagagaaggagaaggaaaattctccggaggtaacgaaaccaaaggctaaaaaggaaatttccaaagaaccgatcgtagagcctaaaccattgaaccaggaaaagccaattgctgatcacaatcaatttcaagatttatctgctgttaaagaatccaagaatcacgcggagggtgtcgtatgtgaggcgaaaggaattgacaagcagaacgaacttctactgcaagaaaccattgttaaaccagacgaaaagccaccaaagtctgaaaagaaggcagtaccaactaaggcattgccaattaaggctaaagaagcctctgagattataagcaaaatcccacttcccaacagtaaagtcgataatgaagaaataacggtacaagaaattgtacaagaatcagaaaccgaaggcaaaccaatagagccccattgttccgaaactaaagaatccaacggtagtgttccagcactctcaccctctccagaacctgttgcaaacccaccaaaaatgacctgggcctcaaaattaatgactgagaattccgacaggatcagcaagaataatagtacagttgaatacatcagacctgaaactctaacgaagaaaccaagtgaaagaaaatttgaaatgggaaaccgcagagacaatgctagtagtagcaagaacaagaaaaaaccagtcttcagcactgttaataaagacggattttatccaatctatattaggggaacaagtggtttgagagaggagaaattgaggagtgctctagaaaaagagtttggaaaagtcatgagaataacggcagcagataactttgctgttgttgatttcgagacgcaaaagagtcagaccgatgctctagagaagaagaagaaactgatagacggtatcgaagtttgtctagaaagaaaaacagtaaagaaacccacccggcataactcacctagcgtgtttccaaatggagtgcgtcctcatagaaagcagccgctcaaaaggaaggaatga

SEQ ID NO: 2265 - DNA, 1308 bp, Saccharomyces pastorianus
atgcaatctatgaacgtacaaccgagagtcctagctgtgggaggcgagcaattcttttctcaaagacaggctccagagcagcagcagcaacagcagaacatgggaccacaggtgtattcgccacaggtcaatagagccaggatgtttcctcaagggatgcctgtaaatacaatgaacggctctgtgagtcaggaaatgaacaatgcctaccttttaaagcagaagggcgatccgctattaacgcagcagcagcatcaacagcagcaacagcaacagcagcaacagcagccatttactataggaacgcccgtatcagtgtctagcttgccgcccggactgaacgttcttcaacaacagcaacaacaacagcagcagcagcagcagggaatggggctcaatcgtcccttagcgtctcagttgcccaaacatttgacaaaccagagtatgcctccaatatttttaccacccccaaactacctatttgttcgtgacgtctggaagtccaacctctatagcgaattcgccgttataagacagctagtctcccaatataaccacgtatccatcagcactgagttcgtgggcactttggccaggcccatcgggaccttcagatcgaaggttgactatcactaccaaacaatgagagccaacgtagattttctaaacccaatacaactcggtctttccctaagtgacgccaatggtaacaagcccgacaacggcccatccacatggcaattcaattttgcattcgatccaaaaaaggaaatgatgtccacagagtcgttagacttactcagaaagtcaggtatcaattttgagaaacacgaaaactcgggtatcgacatattcgagttctcgcaactacttatggattctggcttgatgatggacgattccgtcacttggattacataccacgcagcatacgatctgggcttcctgatcaacatcctgatgaatgacgccatgcccaacaacaaggaagactttgagtggtgggtccatcagtacatgccgaacttctatgacttgaacctggtgtacaaaataattcaagaattcaaaaaccctcaactgcaacaatcctcacagcagcaacaacagcagcagtactcattgaccacgcttgctgacgaactggggatgccaagattttccattttcaccaccacaggtggccaaagtctcttgatgcttctatccttctgtcaattgagcaaactgtccatgcataagttcccgaacggaacggatttcgccaaatatcaaggtgttatatacggtattgacggggaccaatga

SEQ ID NO: 2266 - DNA, 945 bp, Saccharomyces pastorianus
atgagtgacaaagcaaacagcgatttcgaggatttttcctcagatgaagaaaatgaccagaacaacgtcttgcttcagaccaaaagaaaaatttccagcaaggacgatgtattcagtaaaaagatagacgaggtcgaaagtgagaacgaaccagagtctgaacaagaactagaacacgagcaacaaaaccaggacaaactcgagcaaaaggaagatcaagtggctgaagatgaaaaagagcaacctttgcccgtctctctagaagatctaaagacagaaaaattaaggcaactggttaaatccaaggctgaaaagaggtcccagcacaaaaccggtgtggtgtatttctccagtatcccaccttacatgaagcctgccaagatgagacaaatactaactcgttttggtgaaatagatagactgtttctaaagagagaggacgatcagaagtataagcaaagagtgaagggaggcggtaacaagaaaaacaaatacgaggaaggatgggccgagttcatcaggaaaagagacgccaagctgtgtgcggagacgctgaatgggaacatcattggcggtaagaagggtaccttttaccacgatgatatcctgaacgtgaagtacctcccaggcttcaaatgggctgacttgaccgaacagattgcccgtgaaaatgatatcagacaggccaagctggaaatggaaatttcacaggccaacaagctgaatgccgactttatcagaaatgtggagcagagtaagatgatacagaacatcaagaaatccaggaaacgtgctggccaagaagaagaatccgcggattctcacccccacagagagttcaagcagcgtcgcgtggaaactaaccgtgctaatgcccctaccgacatcaagcagcagccgtcgaaatcccaagctctgggcaacgtcctgactagcctactgtag

SEQ ID NO: 2267 - DNA, 1749 bp, Saccharomyces pastorianus
atggacagatataccaatagggaccatcctgaatacgttcctggtacatttaacatatactcctctcaaaatttggagaatggtattatatacgagtcgaaattgaaaaagaacccctcaggagttgttttgattcctcagccatcatattcgcccaatgacccgttgaattggtccggttggagaaagatggctcattttggtctaatggccttcataactgcgtttactgccgctacaagtaacgatgcgggcgctgctcaggactccttgaacgaaatttacgggatatcctatagttctatgaacacaggtgcaggtgttttgtttttaggtattggttggtctactctatttctggccccgtttgctaacttgtatgggcgaaaaattacgtacatcgtttgtatcacactgggcctcttcggagctctatggtttgccttagctaaaagaaccagcgacactatttggtctcaactgttcgttggtattagcgagtcttgtgccgaagctcaagtgcagttatctttgagtgacatttttttccagcatcaattaggttccgtattaactgtgtatattatgtgcacaagtattggtacgttcttgggcccattgatcgctggttacatatctgcctatacaaactttcgttgggtcggttgggttgcagtgatcatttcgggtggacttttagttgccattgtattagggtgcgaagaaacatactttgatagaggtaggtatatgactccgctgaccagcaagcaatctgggtacgaggacggtaccactttacaaaactcagacaatactctcgtatctcaaaaacaaattcatctcgacgctaatctagtcacacaagagaaaggcataaccgtgttagaaactgccgaatttgaagtcaacaacgaagaggaggtaactataccagaggcgcgcgaattgatcgatgggtccaaagagcctctaaagccttataacaagagagtagccatatttactaaggctacaaatttgaaagggtatggttttaaacaatacttcaaatatatgaagatcaacctaaggatgtttttattcccgcctgtgtggttgtcgggtatgttttggggtattcaagatgttttcttgtcgttttatctaactactcaagagaactcatactataatcctccatggaattacagtgattttggcgttgcaattatgaatgtccccacacttatcggagctgtggttggttgtatatgtgctggtattattagcgactattttgtcctttggatggcccgtcacaacaagggtattctggaggctgaattcagattgtatttctcagttgcaactgtgatcattgggcctgccggtttgttgatgtttggtatcggtactgctagacaatggccttggcaagctatttatgttgggttaggttttgttggattcagctggggttgttctggtgatattgctatggcatacttaatggattgttaccccggaatggttttagaaggtatggtttgtacagctattattaacaacactatatcctgcatatttaccttcacctgttccgattggttagctgcatctggtaccgagaacacctacatcgcattggccgttattaactttggtatcactgctttcgccttgccaatgtaccattatggtaagagaataagactgtggactaagcaatggtacttggaatctgtcaatttgagagatggtgtataa

SEQ ID NO: 2268 - DNA, 1443 bp, Saccharomyces pastorianus
atgtcttccgaaatcacatacacaccagctgttgcagagttactagagtttgataaaaaacacgtctggcatccttacacgtcgttaaaggccccattgaatgttttcccagtgaagagcgctcacggctgtaagcttgtgttggataccgactccccggtggacgttgaggtgattgacgctatgtcgtcctggtggtgcgtgattcatggctacaacaatccagaattaaatgaggccctcacaaaccaaatgatggatttttctcatgtcttgcttggcgggttcacccacaaggcagccgtgaaccttgttaaaaaactattgaaagtgatcgacgagccctccatgcaatactgcttcctagcagattctggctctgtcgcagtggaagtggctttgaagatggctctacagtccaacatggcggataaatccagaagcaacagaacaaagtttttgacgattaaaaacgggtatcacggagacacttttggtgccatgagtgtgtgtgatccggacaactccatgcatcacatctacaaagatcgtctcagcaaaaacatatttactcaagctcctactattctcgaaggtttgcctacgagtcagaacaaattcgaggatacatggaatgaaagtgaagccaatgacctcaaaaaacagtttgaactgcatagtgatgagatctgtgctgtcatattggaacccatcttgcaaggtgccggcgggttgaggctgtatcacccacagttcttggtcgaagtccaaaagctatgtaaccaatacgatatcctgtttatcattgatgagattgccactggatttggcagaactggtgagatatttgcattcaaacactgccaaaaatatcaggaccagctgggaatcagccctactaaacaagttaaagtagttcctgacatcgtgtgcgttgggaaggggttaactagcgggtacatgacaatgagcgcggtagtgaccaacgaaaaggtcgcttccagaattgcctccccaaacagtccaacaggtggtattttcatgcatggtccaactttcatgggtaatgctttagcatgcagtgttgcggaaaagtcgatggatatcctgctacgtggtgaatggaaacaacaagtgtcgagaattgaaaatcaaatctacaaagagttgtacgaatacatcaagaatccagacaatgggctaatgggaacccttgtcaaacgtgtgtcggttgttggagccgtcggtattgtggagctgtacaaaaagacagacccgaagtggttccaaaaggagttcatatccaggggcgttcatatcagacctttcaactgcttatgttacattatgccaccttatgtgattacaacggaagaattgacgcaggttaacaaagccctgattgaagtcctacaggagtggaaaacctattcgaaccagtga

SEQ ID NO: 2269 - DNA, 1734 bp, Saccharomyces pastorianus
atgggttttcgcgttcgaaggacaaaaaagctggtaacactagtcctcatatcatcattatttctagtagttcttttcagatgctctcgtaactatttacttttggataatttccgaacacagaaggagaatgcatcatccaaaacgattcaatgtctgtctgaactagctcaaactggaagtagtaaaagagcaaatgagttttatgatccaagcatatggaaaacatttttatccttcataaacggaggtcacggagatgtgaaaacgctaacacaatctctattcaatatccagttataccagcaatgtactaaaaacacctcaattgatcatgatgttccacttctccacgaggtggaaggcagcttatttccatacatggattttctaacgttgcataatggagacattcaagatttttggccgattcattcccgatttgatggaagcactcatcgtggacaggtattagaattctccacaacggataactcattcatagggacgtcacgcatcgagttcaacattagcaagccgttttgggagaactggttagtttcagctgttcaaaatggctcgaagggcttagtaatgagtgtgtcagattaccaagtagccgattcaatccgactcataagggtcttgcgactattgaataattcactgccgattgaaattgttcacaagtctgatttaagcgagaacgatcaacagcttttgatagcgtcagcaagggaatctgaatctcttgattatcctccacaagagctgtggtttctaaacgtaaagagcctgctaaaggacgactatatggccaagttcaagcggttttcgaataaatggttagcaattactttttgctcttttcaaacaccgattcttctagattctgatactgtaccattcgtctcattggatacattttatgaaatggacgagtttaaaagaactgggacactttttttcaaggaccgaagcttcccaacttccaaactgggatcgcaccaaatcaatgtcctaaagaaggtaattgataattgtctgggtatacccttggattcaaaaaaggatctcgacttgttgaataaacgtctgaaggatgacatggccatggatgccgtagaaagtttagttaccaagcatcaaaagcattacatggaaagcggtttactagttttagacaaacagaaacacttttttagtcttttagtttcaatgatgctgcagttctcacccattcaagaatacttctacggcgacaaagaatggttttggcttggtttattattatctaacgatacattcacttttcatccagtagaggcctcaaacgtgggagcattgaaggatttgagcacacctgatagcgcccagatgtgttcgatccaactatcccatacagacatccatggtaatgttctatggctaaatggtggtctatctgtttgtaaaaaagcatgctggggttatgactacactaaacgtaaagatattgcgtctagatttgaaagcgtagatgaactacaaaagcactatcgatcacccgtgaaactcgaaaatgtcattatccctgaagttaacaagtctccctggtcacaaaataccgaatgtgctgggtacaattattgcacaaagtataaaaagggagagtatggaacactgatagagtttacagaacaccagaagaaatcttatgaaggaattgtacaactgtggaatgacgttatataa

SEQ ID NO: 2270 - DNA, 3408 bp, Saccharomyces pastorianus
atgcaggtatatctgtcacttattcttttgctacgtttggtggaaagctcgtatataagtttcagagcggataatgccgacaatgtactagaagccgatgtgattgagactttatcatatgcaacagtaacggtgggtgagccttatgttgcacaatccaaagttataacaagagtatcagcatctccacaaagctcactaacaatcccatcgcataataaagcagttacttctacaaatacaccacaaagtggtattgattctactataggtacaacggttcaaagcttatcgtggctatcgaactatgaaagcaaactttctcaaacttttactatagattctggtagcaatcttattgcaactgggtcgagcacaaatccaattgctaccttagaaactacaggctctggtagagattatattgcaactggatcgggtacaaactcaattgatacctccgaaaccatcggctttgcaggtgattttactacaagttcaggtgtagcttcaaatgtttccagtgtatcgccaacgggtaaaattgccacattattatctcaaactggtacaacctcaacctcgacactattttcttcttattcacttgttacagggacgaagttaaatggtacttacttgacatctgtttcagtgggtacgaataatccattggtaacacaaatcccttcctattcatcccaagaaacggaaatcattacttcctcactgacatcaaataaaacaatatacacagtcactattagcacaaatacagctacagcggctaatgggacaacatccggtatagattcgactcaaatttcccccactcctctttacccatcaaattccacacaaatttctctacatccaacgtcgtcttcaacaaattcgtcttcgaaagtaaatcctctacgctcatctaattctactcaagttttgttctcttcattatcttcttcgactgtaagtcccctttatccctcaaattcgacacaaagcttgcattctcaatcatcatcttcgacagaaagtccctttccctcattttcgtcttcgacgctagcaactgtttatttgtcgtcttcgtctgcgctagaaactgttcaatcatcttcgccttcgtcgccagcaagcgttcactcatcatcgtcttcgacacaaacaaatactcacacatcttcttcgtcaacttcattgagcagtattatcaccactacgaagaaccctgcaactacgactattgtgaacctttttaatgctgtttcaacgaatgaaccacctaccgtttttgagagggctgcaaatcctatgtcgttggccgatggggtttcaaacagcgggcctattcaaacaaacaaattttatacaaatttgatcgttggtagtcaggaatccgctgcatttgtttatccttactcgttatggaagtatacatcctctaataactatggtttcgccgttcaacatacaactgttgaccaatataccttcggtaattacgacagttccggtaactcggaatacttgataaatcccttaggaattgcgcaggttgttctctctgcttccgattttgattcaagtatgacaatggaagtagacgaaatgactttttcttcaacaagagttcttctgtcggagtctaatgattcgtcaaattatctggaaattcctctggttcaaggtatggggtttgcgaccggtatatatcacggctctctgactgccaaaattggctctagtattggcttcaatacctttgtttccgaatcatccggcaatttagcccaaggagttttgaaatatcgtatcaagctcttaaatgatgtcacttggttatgctacgttatagggcctgacgatttaacttcttctgatttctccttgcaggtaacatcagagaatgaaattgaagctaacacgagtgtagatggtctcatcattcaactggcggttgccccttctgaaacagactatgaggtatattacgatcaagcggcaggtatgtacgtcactgatttccaagtccgtggtgtttcagatggctcttctgctacctatgaattctcatataccactcaaggtgagtcagcttcagcatgcacaatgatttttgctttgccccaccatgaatcttctttaagtgacataatgcaaaactcctacactggtattcaacttctttcaacaactaagggactaatgaagggttacttaactacagccttacaattttcagcatccttaaacaaacaagtatcgtggctaccatggtcctctcaacttggcaccactccattagagtactctgcagagcaattgcaactgctagctgaagtcgctaatactgaacttcaagtcagtatttcagaaagtataagtggtttgaacacctattatctgggtaaagtgattgacaagtactcttatattcttttaacagtgtctgaaattattcaagatgaagctaccaccaaaagtactctagaaaacattaaagccgcttttgatattttgctacaaaatgaacaattatatcccctagtttatgacacaaaattcaatggtttagtcagctcaggagacttggcgtcgactagcacacaatacgattttggtaatacctattacaatgatcatcattttcattatggttatattattcatgcagctgctgtagtcggctatgttgattctaaattgggtggcacttgggccactgataataaagattgggtcaattccttggttagagatgttgcaaatccatcagataaagaccaatactttgcacagtcgagaatgtttgattggtttaatgggcattcttgggcagctggactatttgaaaatggaaacggtaagaacgaagaaagtagtagcgaagactacaattttgcttatgctatgaaattgtggggagcaactatcggtgatatttcgatggaattgagaggtgatttaatgattagtataatgaaggactcgatgaacgattacttctattaccaagatgataatacagttgaacctgaagaaatcatcgggaataaagtgagtggtattttgtttgacaatattattgattataccacttattttggaacaaacacagaatatattcacggtatccatatgttaccaatcacaccagtttcttccaatattcgttcagaatcctttgtcagtgaagaatggcaaacgaaaatatcgccaattatcgcatcgctagaaagcggctgggcaggtatactaagattaaatcaagcactgtttgacccagtcgattcttatacatttttcagcgattcggactttgattcagccacatatctggataatggaatgagtcgcacatgggcattagcattttcgggtggactggcaaactctatcgcttag

SEQ ID NO: 2271 - DNA, 273 bp, Saccharomyces pastorianus
atgaagtactgcgaactcgatttatcagggcagtggctggatacagtatattgtgaaaaagacttctccgattttgtcttcgtaaagtttctaaatccttcacagtttgaagagaagatatattgctatactttacatatcacaaaaagaacactagaaaacaagagattgcttttgtattatgaagatgaatttaagaaacatggtcacgatgtcaatgagcttgttggcgacggtatgatcttgcgttcatgctggaaccctcgacagtaa

SEQ ID NO: 2272 - DNA, 1821 bp, Saccharomyces pastorianus
atgatggaaacagatccgtctaaaaatgacactttggacgataaaagcactgtcggttacagcgaaaaggcagaaattgatgttgataagcctaccccgtccggcttacgtcgtatagatgctgtcaacaaggtcttgtctgactatggctctttcacagcttttggagtcacgttcagttcactcaagaccgctctactagtagccctgtttttgcagggctactgtactggacttggtgggcagatttcgcaatcgatacaaacgtacgctgctaacagctttgggaagcattcgcaggttggatcaatcaataccgtcaaatcaatcgtagcttctgttgtcgctgtgccatatgcgcgtatgtcggaccgatttgggcgtatggaatgctggatctttgcgctcgtgctctatactgtgggggaaattatttcagccgctactccaactttcggcggactttttgcgggcatagttatacaacagtttggttattctggatttcgtcttcttgctacagcattgacgggagatctatccgaattgagagatcgtacgtttgccatgaacatatttttgattcccgtgattataaacacatgggtaagcggaaatattgttagctcgctggctggtgatgtcgcaccgttcaaatggcgttggggctatggaattttctgcattattgtacccttctctaccttaatcttggcccttccttatgcatatgctcagtacatttcctggcgcagcggaaagtcaccaccattcagattgaaagaaaaagggcagaatctgcgtcaaacgctctggaagtttgtggaagacataaatctgattggaattattctctttactgccttcttagtgctactactattacctctcacgatagcaggtggtgccacgtccaaatggagggaaggtcatattattgcaatgatcgttgttggcggctgcttaggctttatcttcctaatttgggagttacgatttgccaagagtccgtttatcccacgagtatatctgggcgatccaactatctatgttgcactggtgatggaatttgtatggcgtttaggtctacagatcgagttggagtatttggtcactgtgttgatggtagcattcggagaatcaactttgagagcgcagcggatagctcagctttacaattttctgcagtcatgcactaatattgttgtgggtattatactgcatttctatcctcatcctaaactatttgtggttgctggatcgcttctcggtgttcttggaatgggtcttttgtacaaataccgggtggtgtacgacggaatttcgggtcttattggcgctgagattgttgtcggtatagccggtggtatgatacgttttcctatgtggacgctggtgcatgcttcaaccacgcacaacgagatggcaactgtcacagggttacttatgtcagtttaccaaatcggagatgcggtgggtgcttctattgccggtgcaatatggactcagcgcctggcaaaggagctgatacagcgactcggctacaacttaggtatgtcaatctacaaatcaccactcaactatctaaaaaaataccctattggatctgaagttcgtgctcagatggtggaatcctactcgaagattcaacgcttattgataattgtgtcaatttcatttgcagctttcaatgctgttctctgcttttttttgcgtggcttcaccgtaaacaagaagcaaagcttttccacagaagaacgagagaaagagaagctcaaaatcacacagcaatcatggctccgtcgtgtaattggatattga

SEQ ID NO: 2273 - DNA, 750 bp, Saccharomyces pastorianus
atgaaattcagcaccagtaactacatggctttagcgatcattgctacttgcgctttggctgctccggttatttacgacacaaattctactgctgaattgatgtcccctctttctcaagaggttctaggttggagtcatgcaacatttccagccatttatcaaacttgtaatgaaactaataccaggatgttgaatgcagctttcaaggatactgctgaagttactgcttatggtaagagtagacttctaaactatggtattgatgatgcttattacaaaagatggtttggtaatggtagcattttcactgtcatgggtgtctttgatcaactaatggaagcctctaagggaagtatgcttatgagatgtgatgatgcggatggtttgtgcgcagctaatccaaattattacgccggtcaccatcgtgagtctgctccagcagaaactgttatttgtgattacttttacaattccaaaaagccgctttcaactatctgctttgaagggactattgttgatgttggcccaaaacattacgccggtattgatatgctacatcgctacttgcaccttctaaccatgaatatggatgagtatattagtgaatacgctgaaactcttgaagaagctattgactacgctcaaaacaatgccacatttgctgttaaaaacgtcgacaattacttgtattaccttgctgacgtttacagtacttccgttattcctggcgggtgtctgggtgatctatag

SEQ ID NO: 2274 - DNA, 510 bp, Saccharomyces pastorianus
atggcagttaaaggattaggcaaaccagatcaagtttatgacggttctaaaattagagttgggatcatccacgcccggtggaacagtgtcattattgacgcccttgtgaaaggtgccattgaaagaatggcctccctgggtgtcaatgagaagaacataatagtggagacagttcccgggtcctacgaattgccctggggaactaagaggtttgtcgacagacaagccaagctaggtgagccattggacgttgttatccctatcggtgtgcttattaaaggtagtaccatgcactttgagtacatttcagattctacgactcatgcattaatgaacctgcaagaaaaagtcgacatgcccgtcattttcggccttttgacttgtatgaccgaagaacaagctctggccagagctggcatcgatgcctcccactccatgcataaccatggtgaagactggggtgctgctgccgtggaaatggcggttaagtttggtaagaatgccttttaa

SEQ ID NO: 2275 - DNA, 723 bp, Saccharomyces pastorianus
atgtccactttcatattccccggtgatgccttgcctgtagatcccactgtacccatcaaactgggtcccggcatatattgtgaccccaatagtcaagaggtacgacccgtgaatacaggtatcttgcatgtttctacgaagggcaagagtggtgcgcaggctgtatatgtagactactccagcaaaagatacgttccctcggtaaacgattttgtaatcggcacgatcactggcacgttctcagacagttataaagttttgctacaaaacttctcctctagtgtctcgttatcatatatggctttccctaatgcctcgaagaagaacagacctactttacaagtgggagacttagtatatgcaagggtctgcacggcagaaaaggaactagaagctgaaattgaatgcgtggattcagctaccggtcgcgatgctgggttcgggttattagaggacggtatgattatagacgtgaatttgaatttcgcacgccagttgcttttcaacaatgatttccccttattgaaagtgttagccgctcacaccaagttcgaaattgccattggactcaatgggaagatctgggtaaagtgcgacgaattatctaataccttagcctgttataggacgattttggaatgttgtcaaaagaacgatgttgcaactttcaaagatatagcaaagagacaatttgaagaagtgcttaacgtcaaggaagaatag

SEQ ID NO: 2276 - DNA, 1272 bp, Saccharomyces pastorianus
atgtttagaagatatttatctagcacttcttctagaagattcaccagtgttttggaagaaaaggcatttcaagtgactacttactctaggcctgaagaactatgtattactagaggaaaaaatgccaagttgtacgatgacttaaacggtaaggaatatatcgatttcacggcgggtattgctgtgactgcattgggtcatgcaaatcccgaagtcgctgaaattttgtacaagcaagctaagaagcttgttcactcttccaatctttactttactaaggagtgtttagatttgagtgagaagattgtggaaaagaccaagcaatttggtggtcaacacgacgcttcgaaagtatttctgtgcaattcaggcacagaagcaaatgaagcagctttgaaatttgccaagaagcatggtataatgcagcatcccggaaaacaaggcattgtcgcattcgaaaactctttccatgggcgcactatgggtgctttatcagttacctggaacagtaaatatagaactccgtttggcgatctagtgcctaatgtatcattcttaaatcttcaggacgaactgacgaaattgcaggattacgtctcttccaaaaaggatgagattgcgggtttgatcattgagccaatacaaggtgagggcggtgttttcccagtagaaattgagaaattaaccgcgttaaaaaaaatatgccaagataatgatgtgattgtcattcatgatgagatccagtgtggattgggccgttcaggtaagttatgggctcatgcctatttaccaaaggaggctcatccagatatcttcacatctgccaaagctttgggtaatgggtttccgattgctgctactattgtcaataataaggtcaatgatgttttaagagttggtgaccatggcaccacttacggcgggaacccgttggcttgctctgtaagtaactacgtcttagacactatagcagataaagctttcttagaacaagtctccaagaagagtgaaattcttcaaaagcgtttacgcgaaattcaagccaaatacccaaaacaaataaagactatcaggggtaaaggtttaatgctcggtgcagaatttgttgagccacctaccgaggtcatcaagaaggccagagaattgggtcttttgattatcaccgctggtaagagtacggttagattcgttcctgctctaaccattgaagatgagcttatcgaagaggggctgaacgttttcgaaaaagcaattaaagccgtctatgcttag

SEQ ID NO: 2277 - DNA, 642 bp, Saccharomyces pastorianus
atgtctgttgaagaagttaccaagaagtttgaagaaaccgtttcagtagatgatgccacagctactccaaagactgtcttgagtgacagtgctcacttcgatgtcaagcacccattgaataccaaatggacgttgtggtacacaaagccagctgttgataaatccgaatcctggtctgatctattgcgtcctgtgacttcattccaaaccgttgaagaattctgggctatcatccaaaatattcccgaaccacacgaactaccattgaaatcagattaccacgttttccgtaatgacgttagaccagaatgggaagatgaggccaatgctaaaggtggtaaatggtctttccaacttagaggtaaaggtgctgatattgacgaattatggctcagaaccttactagcagttattggcgaaaccattgatgaagacgattcccaaatcaacggtgttgttttaagcattagaaaaggtggtaacaaatttgccttatggaccaaatctgaagataaagaaccattattgagaattggtggtaagttcaagcaagtcttaaaattaaccgatgacggtcatttggaattcttcccacattctagtgctaatggtagacaccctcaaccatcaatcaccttgtaa

SEQ ID NO: 2278 - DNA, 1497 bp, Saccharomyces pastorianus
atgggtgcctcctcgactcctgtaagcggagatgattatggtatgcattctactacaatctcgcatcataatacaatagaattaagaaatttgctatcgccatcagactccagaaatgacacacaagatttctctgatgaaccgcctggtaatacaagtttaattaaagaggttgattggaatggccacaaggtcaagacatttccgctaaattatcaaaccgttccaatagtcaagttgcaagtggtagcatgcttgactatgttcatagtctttgggatgaatgatcaagtgttaggtgcactgctccctacgctaatggattactatcacatatcgcaagtagaaatttcaaatgtctttatagtgcaactatgtggttatgtagtagcctcattactcaatgaaagattgaataggaatttcggtatgagaggtggtatggttctagcagccggtttgtgtctggtattctttactgttttagcaactggcccctccagtttccttatctgcatgttatgctgtctccctcttggtttaggaatcggcattttagattctactggtaatgttctaatgggcagtcttttggtacataagaatgaaatcatgggtattatgcatggtctttatggggctgctgccatgattactccacctttggtttcatattttgtcaaatggggtcattggcctctgttttttctaatccctctgttctgttccattgtgggtatatttattatacttccagccttcagacatgaaactgctaataaatatgattacctttgctctatggaaaacgaggagcatgaggatgataccataggacccgatgttgaattgacaacgggttcagcagaggctagcccagggttttttacacttttgagaaatcctggtatctttttttatgcgctatacttgtttggttatttaggtgcagaaatcaccactggttcgtggttcttcacttatttgcttaagactaaatcagataataagatggctatgtcatacattgctgcatcattttggactggtttaactgtgggtaggctatgcttagggtttgttactgagagattttttgagaatgaatatagagcaagtaaagcttacggttgtctaactctcttttcatacacgttatttgtgcttgtcgggttaattgattccaactccgtgttctattttgttgtcttatttttagttgttttctcctgtggtacgtttattgggcctttgtttcccaatgcaagtattgttgctttgcaggtgctacccaagagatcacatgtaagtggtgttggtgttgcggttgctgtaggtggttgtggtggtgcagctttcccatacttgactggtgtcattgcacattcaattggtatacagtatttgccactgctatgctggataattgttgcgttgttcacactagaatggtcactgtatcctaaattcatcaagggacatccagaatgtttttag

SEQ ID NO: 2279 - DNA, 366 bp, Saccharomyces pastorianus
atgagcaacgaaggtgacagaatggaagtagatgaagacgaatcgcaagtttccacgcagaatgagcaacaaaatacaccggtagagaccaaaaaaaaaagattcgagattaaaaaatggacagcggtggcgttctggtcgtgggatatagccgttgacaactgtgccatttgcagaaaccacattatggaaccatgcatcgaatgccagccgaaggctatgaccgacacagataacgaatgtgtggcagcatggggtgtttgtaatcacgctttccacttgcactgcatcaataaatggatcaagacgagagatgcatgcccgttggacaaccaaccttggcaattggcaaggtgcggtaggtga

SEQ ID NO: 2280 - DNA, 330 bp, Saccharomyces pastorianus
atgacaaccgagagagaagggcaagaagatgttcaatacagggtcttgcaacgagctgaacttgcacattcgatttggaacttgagatttaacctgggcaaagtcatcaaacggatccctccggaagggaccgttttccatgaaagacgagcaaaggaaccacaattaaatcttggacagcaaggcacccgacttttccatccggattatctgtctgaagaaaacttgccgttgattcgagagtttaagtgcttggattctcctccacctgttccgccaagctcatcacaagaagaagataaagagaccacagtcgactctcggtactga

SEQ ID NO: 2281 - DNA, 2574 bp, Saccharomyces pastorianus
atgtcatcatcgtccagttcgtcagagtcatcgcctcacttatcgaggtcaaactcgctggctaactctatggtttccatgaaaacagaagaccatacaggattatatgaccacaggcaacatcccgatttgttaccagtccgtcacgaagcgcctcgattgaaacgagaggaaacagccaaacactccaagcctaccgctcccaaaaagcagaagaaggcaacgaaacgcgacagccatgcggaggctgagaatccacctgctagaagccggatagattttgaagatgtggactcggagttggacgaaacagttgctcatcaccagttgagagcctctgcgattttaacttccaatgcgaggccatctaggttagcccattccatgccacaccaaaggcagctttacgtagagagtaatagtagccatataccaaaggatcagggcataaagaaagattataatatgtcgccatccacagtttcttcaagcaacaaatctaagttaagtgtgccttcctcggcaagccctattaccaaagttcgtaagccttcaatagtcagtccaatctctgaaacccctctagaaatgaaagctgatacacattccaagcaggcagaccccaagaaaagaacattttccacaacatccacgcattcgtccattaaccccatggctctgcttacgaaaagcgcaacccaaaaatcagatgtagaagatgatccacaggatagaaagccagtgcgtatgaacaccagggcctcttttgatagcgatgtttctcaggcctccagagagtcgcaagagacggaggaagatgtttgtttcccgatgcttccgcaactgcacacaagagttaatggtatagactttgatgaattagaagagtacgcccagtttgcgacagcggaaaagagccagtacctggcaagccttcaagggcccaatgaacaaaaatttggtaatatgtctcacgatattggatttacaagctctacctccacttcagggtcctcggcagccctcaagtacacacctagaatctcgcagactggtaatagtatcaatgaagcagacattcatgagaagaaggaagacgaggaagaagatgatagatttggaccacgtcctggcgtgtcatttggtaaaaataaggtggaaggagaagaagacgacaaaattccagctcatgacccagcatattcgtcatacgaaaatatagattttcaaattcccaacaggttttcatttttttgttcagaatctgatgaaaccgtgcatgctactgatatcccgtccttggtgtctgaaggccagtcgttctatgaattgttcagagggggggaaccaacttggtggttagattgcagttgcccaaccgatgacgaaatgcgttgcatagcaaaggcttttggaattcatccattgacggcagaagatattagaatgcaagaaactcgtgaaaaagtggagctttttaagtcgtattattttgtttgtttccatacatttgaaaacgacaaagaatcggaagatttcttagagcccattaacgtttacattgtcgtttgtagatctggtgttttgaccttccattttggtccaatttcacattgtgccaatgttagaagacgtgtaagacaactacgtgattacgtcaacgtcaattcggattggttatgttatgctttgatcgatgatatcacagatagttttgctccggtcattcaatccatcgaatatgaagcagactctattgaagattctgtattcatggctcgtgacatggacttttcggccatgctacaaagaattggcgaaagtagacggaagacaatgacgctaatgaggcttctaagcggtaaggccgatgtcatcaaaatgtttgccaaaagatgtcaagatgaagctaatggtatcgggccagcgctaacgtcacaaatcaacattgcaaatttacaagcaagaaaagataatgttaatcgctccaatgataatagctatgcaactttaccaaacagctacgtgcctacaacttcacaaccaagaggggatattgcactatatttaggtgatatccaagatcatttgctcacaatgtttcaaaatctgttagcttatgaaaagattttctctagatcacatacaaactacttgtcccaattacaagtagagtcatttaattctaataataaagttacggaaatgctaggaaaagttacgatgctgggtacaatgttagttcccttgaatgttattactggtctgtttggtatgaatgttccggtgccaggaggaaatactaaaactattgcgtggtggtttgggatattgggtgttctactttcattggctgttgcaggttggttcttagcgaacttttggattaaaagaatagatcctccgtccacactaaatgaagctgcggagagcggggctaagtcagtcatatccagctttttgccaagaagaaataaacgattcaacgatcgttctaaaaacgtcaatgtaagagccggcccttcaaacaggtcaatcgcgagtcttcctagtagatatagccgttatgattga

SEQ ID NO: 2282 - DNA, 555 bp, Saccharomyces pastorianus
atggacgcggatgatcatgccggattgtttcggttccccttcaaaatccctacttttcatggtataaggaaggccggggtatatctatcaggtgccctttatgctctagggttttgggtctttttggatgcggtacttttttctaggttctccaatgcttcggacgttcatgtgacatttattgattggattccatttctttgcagtacgctagggacattgattgtcaattccatcgaaaaaaatagattactgcaaggggctttatcagcagacggtggtgctttcggtagcagtggcggtgatttggactcgagcatggcatggcaagctcgtactattttattttttggctttgccttattagctggtggattatcaggttccattgttgtattgatcatcaaatttttagtcaaggattataatacttatccaacattggggatgggcatcaacaatgtattaggaaatgtatgcatattattgagttgtgtcgttctatggattgctcaaaatgtggaagacgagtattcatactctttgacactttaa

SEQ ID NO: 2283 - DNA, 1134 bp, Saccharomyces pastorianus
atgcttgtagcgaaaaaggttttcgggaatattcccaatataatgacaaagtcagagaatgaacactattttatcgatgacatcgtatctattaaaaacagacaaaagagcaagatgtatgtcaaggaggggaaacgaatagggcatggctcattcggcactgtaacacagtcgtatttgtcaaacaacagtacagaatggttggggccctatgcgataaaaagagtcgttaaatgtccaaaagtggagtctttagaattagagatcttgcaaaatattaaacatccaaatctagtcactttagagtttttctttgagagccaatatacaaccaaagatggtggacaagtacaccaaaaaaattttgttatggagtatattcctcaaaccttgagttctgaaattcatcaatatttcgataatggatacgagtttcctacaaagcatattaagctgtacgctttccagattcttcgagcacttctcaccctacattccatgaacatatgccatggtgatctcaagccgagcaacatactgattatacccagcagcggtattgctaaagtttgtgattttggctcagcccaacaattagggggcaatggagatctaaagacatacttctgttcgaggttttatagagcacctgaacttcttttaaattcaaagaattatacaacacaaatagatatatggtcacttggttgcataataggcgaaatgataaaaggtcaacccctttttaaaggagataatgccaaatcacaattagagaagatagcaattctattaggccggctccctgaacctaatacttcttcaagcgtatctcaagaattacaaagaaacttacatgaccaaaaatttaagaaatttatgcattggttcccgtatatcgagtttttcgacgttgacttcttaataaaagcattggtgtataactttgctgaaagatgggatgctaaacaattaatggctcatgaattttttgacgcgttaagaaatgaaacctattttttgccaagagattcgaatatgccagtgcatctaccagaattatttaattttagcgcactagaaaaaaaggctcttggagagtactacaactcaatcgtaccaccgtcgaattag

SEQ ID NO: 2284 - DNA, 1437 bp, Saccharomyces pastorianus
atgtcacaagataatgcaggaccggtgactaagaaggcgaagccttcagaaaggctgcaatgcgaatatttcatggaacaaaagaagcgaagatgcgggatgaccagaggctcgcaaaacctgtattgctctgagcatttgaacttgctgaggaaggctacgaattctcaggttcataacaagcatggtgcagatgccaaggcggggaaggaaagagaaagaattccctgtccactagattcgaatcataccgtttgggcagatcggttggatatgcatcttaagaaatgtaataagaccaagttgagccatctgaatgacggcaagtcgtactacgaacccggtttcaatgcaggtggtgcagtattgtccccacctgccaaaatagatcttacagcagagcattatattcaatccatccaattgctatataaggtcttcaaaatggagaccatggatgagctgccattgaaacaactaaacaatgaactgatgtctttgagaagattccctcagttgcagacaaacaccaagcatgctgttcaacagtcctcgctgattgaaaacttggttgctgttggagcctatgagaacccgacgagtttaagctttattgagtttggctgtggcagggctgagttctcgcgctatataagtcaatatgttcttactcaattggcgggctcgtccgaagaccaatcagaatcaaattccaatgaattcatattgattgacagagcagcgaacaggatgaagttcgataagaagataaaggacgattttttggaaataaagttgcgctctgaattaaaggctattaagtgtccgagtatcaatagggctaagatcgacatccgggatttgaagttagattcaattttaacttcaacgccaacggacaagagccgatacgtctgcgtttctaagcacctttgtggcgtcgctacggacctaactttgaggtgcataacaaatagtactgtcttacatggtggtgatgacgatggatctgagtctaaattaagggcgatttgcattgccatgtgctgcaggcatgtttgtaatggtggcgattatgtcaaccgtggttatatcacgtcacttcttgaaaagtataaagctgatggttccattctaacatatgaaagctttttctgcatgctgaccaaaatctgtacttgggctacttgcggaagaaaggcagacacgaacgttacagatacagtaaatgttgttgaatcgtttgatggagcagaaccatatacaatgaccatcaaggagagagaaaatataggactgaaggctagacgtataatcgatgagggcagactggcctatgtcaaggagacttttgaagggtatagtgcagaactgataaaatacgtagcctctgatgtatcccttgaaaacgtggccatgctagtttataaaaagtag

SEQ ID NO: 2285 - DNA, 1302 bp, Saccharomyces pastorianus
atgaagaagtacttgctgtatatggttcaagtccatttgaactttagaagagcagaattggaatcattagcagacctgtataatctttcaatagatttttctcagtatgacgtcgatagtccattttttgtcctagagttggagaatgaccagcaggccagggactggatcaaaagatctattttgaccagaggcatttacgaatactgggggcagggtgcaacgctggatgagttgcatcaagacatcaagtgtcagcctaattttgaacaggatttacaaagaaagttcaaacattccacttttaagttcgaattcgaatgctatagaggtaacagtaaggccaatagaataaaacagattgaatcgtttcattatcttgactttgaggggaagatcgatatgaaacaccctcaggaagtctttactgttgtagaagagtacactccggtatcggaaaacattagtggtaaaactcctacaaggatcttttttggtagacaagttcagatgagtaatagaagtgctatggagaagtatgatctgaagaaaagaccttacaaaggtacaacgagttttgaagcagaactatctttggttagtgccaatatagctcaagtgaaaccaggcactataatgtacgacccgtttgcaggtacggggtcctttttggttgcaggtggacacttcggcgctttagtcgttggctcggatattgacggtaggatgattcgtggtaagggcgctcaagtgaacatttcggctaacttcaaaaaatatgatgaaagctctcaattcctcgacgtgctaaccatggacttcacgcataatgcattaagaaacagtcttgtgattgatacgatattgtgtgaccctccttacggtattagagaaagtattaaagttttgggcgctaaagatccggaaaggtttgctggaaaggaagatatagagattgatggtgaaaaggcatttttgcgccgcgattacattccaacaaaaaagccttatgctcttgattcattgttagacgatattctacaatactcttcggaaagattgcccattgacgggagattggccttctggatgcccacggcaaacgacgcaaacatagaaacgattgtaccgatacatgagaacctagaattaaaatacaattgcgtccaagaattcaacaaatggtcaagaaggctactggtctatattaataggggtgacacttttaacgggccaagtaaccatggactaaaacgttcggagaataatttcagggaacgatacttcaataacttcaattaa

SEQ ID NO: 2286 - DNA, 1650 bp, Saccharomyces pastorianus
atgagttctgacgaagaagatttcaacgacatctacggcgacgataagccaaccaccactgacgaagtgaagaaagatgaagaaccaaagaaaactgacagcggcacttctcaactagatcaactagcggccttacaagcattatcttctagcttgaacaaactaaataacccaaatagtaacaacagtagtagtaataataatagtaacgaaagttcatcttctagtaagcaagatggcactgcaaataacaaaaaagaaggttccaatgaagagactaagaatgagaaatcactagaaaacactgcttcaaacgccaatgcaaacgttggttctgcgggaccttctggcttaccttgggaacagcttcaacagacaatgtcacaattccagcaaccatcttctcaatcaccgcccactcagcaacaaatgacccagactaaggaagaacgtttgaaagctgatttgtccaaagaaagttgtaagatgtttattggtggtttgaactgggatactaccgaggataatcttcgtgaatattttgttaaatatggtaccgtcacggatttgaaaatcatgaaggatcctgccactggtaggtccagagggtttggtttcttatcttttgaaaaaccttccagtgtcgatgaagtggtcaagacacaacatatccttgatggtaaagtcattgaccctaagagagccatcccaagagatgaacaagacaaaactggtaaaatctttgtcggtggtattggtccagatgtcagaccaaaggaatttgaagagtttttctctcagtggggtacaattattgatgcccaattaatgttagataaggacaccggtcaatcaagagggtttgggtttgtcacctacgactctgctgatgccgttgatagagtttgccaaaataaatttatcgatttcaaagatcgtaagattgagattaaaagggctgaaccaagacatatgcaacaaaaatcatcaaatggtggcaacaacaacgcaggcggtaacaacagcggcaacagcggcaacatgaaccgtcgtggcggtaatttcggtaatcaaggcgatttcaaccaaatgtaccaaaactcaatgatggggggttacaatccaatgatgaatccacaagcaatgaccgattactatcagaagatgcaagaatactaccagcaaatgcagaaacaaactggtatggactactctcaaatgtaccaacaacaaatgcaacaaatggcaatgatgatgccagggtttgccatgccaccaaatgcaataactttgaatcaaccacaacaagattcaggcaacgctcaaggttccccaacgccttcagattctgacaataacaagtccaatgacgtacaaactattggtaatacatcaaatacagactcaggctctccacctttgaatctacctaacggtccaaagggcccatcctcacaatataatgatgatcacaacaacggctatggctacaaccgcgatcgcggcgaccgtgaccgtggtgaccgtggtgaccgtggtgaccgtgattacaatcatcgtagtggtggaaaccacagaagaaacggccgtggtggtcgcggtggtggatataatagacgtaataacgggtaccatccatacaacaggtaa

SEQ ID NO: 2287 - DNA, 1752 bp, Saccharomyces pastorianus
atggtcaaggttggctcttctcatgctgcagttgacgttggcgttagcgaaacccatcaaagaaactatgtttccgaagaagtctttgaaatgaaggataaaaaagacacgacggtggcttttgaggaagaggctccggtcaagactttcacagccaactcatctgaccatgaaggagaagaagtatacgtgtcgaaaagacaggttatgagagacgtttttgccaagtacttaaaattcattggcccaggtctattagttagtgttgcttatattgatcctggtaattattccactgctgttgatgcaggcgcttccaatcagttttcattgctttgtatcatcttgttatccaatttcattgctatattcttgcaatgcctgtgcatcaagttgggttccgttactgggctagatttgagtagagcttgcagagagtacttaccaagatggctcaactggacactgtacttttttgctgaatgcgccgttatagccactgatatagcagaagtcattggtactgcgattgctttgaacattctgattaaagtgcccctcccagcgggtgtcgccattactgtcgtggatgtgtttttaataatgttcacgtacaaaccaggcgcatcttcgatcagatttgttagaatatttgaatgttttgttgcagtattggttgttggagtgtgcatttgtttcgccgtggaattggcctatattccaaagtctacctcggtcaaaaaagtgtttagggggtttgttccatcatctcaaatgttcgatcataatggtatgtatactgccgtctccattttgggtgccactgtcatgccacattccttatttttgggatctgctttagtacaaccaaggctcttagattacgatgttcagcacggtaactacacagtttcaagtgacgatgataataaaaagcaatcaaaaattgctgaagacgtcatggaggaaaaatacttcaactatagacccacaaatgctgccatcaaatattgtatgaaatactcaatggttgaattaagtataactcttttcacactggccttgtttgtcaattgctcgattttagttgtagcgggttctacgttgtacgattcatcagaagctgatggcgcagacttattcaccatccacaatttattatcaagaaatttggcaccagcagcaggtacgattttcatgttggcactattgctaagtggtcagtctgcaggtgtggtttgtactatggcgggacagattgtcagtgaaggccatataaactggaagttacaaccgtggcagagaagactagccacaagatgcatttctatagtcccatgtttgataatttctatttgcatcggtagagaagctttgtcgaaggcattgaatgcttcccaagtggtattatctatcgtgttgccatttttggtcgcacctttaattttcttcacctgtaagaaatctataatgaaaacagaaatcactgtcgaccatgccgaagaaaacaggaacgctcaaaagaacaatagtaacaattgtgaatccgagagtggagtaaatgcggagaatggagtcatggaaggcaatgtgagtgatatggagctagaaaatagcaaagatgtcaaaattgtttatatggcaaacaactggtttatcacagtgatcgccgttatcgtatggatctttttatcgttcctgaacatttatgccatagtgcagttgggtatatcccatggtgatgtgagttaa

SEQ ID NO: 2288 - DNA, 1506 bp, Saccharomyces pastorianus
atgctgaatatccccattattgcgaacaccaagaggttcttttctcccaaagaccacggatcccatcctacgctagacgatgatgttgaactggaagtgagggaaggtccgagttcaggctatcatccgaacttcaacggagatgacgctattttgaagaaaaataaagacgaggtggatcttgatactgcgaagttgacgactgtaacctcaacggtcttgaacacccccgagggctctcttatctatgatgatgacaaagagttcccagatggtggacttcaagcatggttagtagtcttcggcgcttttatgggtcttattcccgtgttcggtttaattaactccctaggggctattgaatcatacatttccaaacatcaactgaaaaatatttcatcttccactaggtcttggatcttttccttgtatctagctatcagctttttgagttgtatattatctggtggctattttgacagaaatggtagtgttggtttgatgtgtacgggtacagtcatatattctggaggtcttttcgcattagcaaactgtaactctgtttggcaattcattttagcattttccgtatgcagcggacttggtacagggattttgatgactcccttgataggggcagtagcaacctggtttttaaggagaagaggtattgcaacatccgtcagtaccatgggtggttcaataggcggtattgtatttcccattatgttgcgaaaattgtataaagaagtcggttttcaatgggctattagaatcttggcattcatctgtgtagcctgcctaatttgcgcttcagtttttgccagagaaaggaccaaacctattgtacaaccattccgatctaagtcggaagtagcgaagtggtacatttcctctgtgttcaattggaggtatttcctggagggcaagttcttgtttgtggcaataggtgcctcctttgcagagagctccctaacctcatgcgctacatatttagcatcttactctatggccagaggaaatacagaaaatgcagcctataccatgatcactgcttcaaatgctgtcggtatccttgggaggtatatcccagggtatttcgcagacaggttcgtcgggaggtttaatgtagaaatcattaccatatcaatggccgctctattaaattttatcatgtggttaccgttcggaggtaactctaaggttttatgggcatacgtttgcctctggggattttcaacaggttctatcctatcattgacgcctgtgtgcattggacagatatccaaaaccaccgatttcggcaaacgatatgccacagtgtacctgttgcaatccttggttaccattcctgttttacccattggtggtacattaattggcaaaggtagcgtagctaattataaccattttatcatattcaactcagcgctaatggcagcaggcgccgcatgctatataatatcaagacatttatgtgttggtgcaaaaatttgcaagttctaa

SEQ ID NO: 2289 - DNA, 1146 bp, Saccharomyces pastorianus
atggcgaataaccagcatatggggacatcgaacttgaacgagaatgaggccatcctaacgaaccgcgttgcagagctggaaaggagaatgacaatgtttgaaggcatcttccacgcgttgagtagccgtctggaccttcacttcaaaaaatacgatgtagtagtcaattctcaacagcaacaaattaacgaactaaccgcctttttatcaactctactaaatgaccagcagcgccacgctgaaatcttgagtgagaaattgtctggaacgttgcatggggtgtctgccacgtcgatatctttgagtcaaactcttgacccacaaggctttagtgatggaccttcggcaccaaacactcagagaaattatggaccggtatctttaaataacagtgaagctgcgaatacacagagtgaaggagccgttagcaacgaaacgctgttcgaggacattttaaatggcaattcgcaagaaaacgacaagaatcaacagcatcctaacagttcgaacccgataaaccaagaaagcaaccccaatccttcagtggatggtcggtttaacaaaccccaaaactataatcccaacttagtcactacgttggaagattatacaacgaacccgcctaataacgatggtggccaaagtcaagggctatacataagcagtacgtcttcccagtctcaacagtcccccaatttgcagaaaatatctcccgaacatgaaagtgcagtggaaccaagcgtgcaggagggcgtaccgacatttgaagaagaacagtatgaaactaaaacaggcctcaagaggaaacgaatagtttgcacaagaccattcgaattcatcaagtcaccacattcagtgatggaggtttggaaggagtatatcgaaggagtaaatggacagccctccataagaaaaatggaagccctgtaccaaacggcatggagacgggatcctgcagtgaataaaaggtactcgagaagaaaagtgctttggaaagccattcagacaggtcttaaccgtgggtattctttgaattatgtcattgaaattttggaaaactcaagatatgttaatgacaaacagaaagttaaacagccaattggttggttgtgccacagctctcatattccagaaatcttaaagtga

SEQ ID NO: 2290 - DNA, 1770 bp, Saccharomyces pastorianus
atgggagtcaaaagtataacaacttcttcttcaaagaagtcaaagaaacagcataatgggaaggtgaaaaagaacaagaaagttaagaaagtacggaagtcaaagaaacccaaatccacgagcgatgataatgaagcggagagttcggttaaggatgatggggaagacagcaagaaggcctctggtaatcatgtcactgccgatggaatccttgtactggaaaccaaatcagacgacgatgaaggatttgacgactatgatggtcactttgataatcctactgacattccctcaaccgctgacggaagtaaaacaccatcattagtaatccacggtaacgaaaatgacctggctaataatgatgactacattgccctttcagctagttctgaagatgaggatgctaaacagaaagaagaagagaagcagaaaaaagaagaagaaattctggaaaaaaagcaaaaagaaatccttaacaccgactatccgtggattctgaatcatgatcattccaaacaaaaggaaatctccgattggttgacctttgaaataaaggattttgttgcatatatctcaccaagccgtgaagagatcgaggttcgtaatcaaaccataagtacaatcagagaagcggtgaaacagctatggccggatgccgatttgcatgtatttgggtcttactctaccgatttgtacctacctggttccgatattgattgtgtggtgaatagcgaactcggtggtaaggaaagtagaaacaacttatactccttagcaagccatctgaaaaaaaacaacttagcaacagagattgaagttgttgctaaagcgcgcgttccgattatcaagttcgttgaaccacattcgggaattcacattgatgtctcgtttgaaagaactaatggtttggaagctgcaaagctaatcagagaatggttaaatgatacccctgggcttcgagaattggttcttatcgtaaagcagtttttgcattcaaggaggctaaataatgttcatactggtggtctaggtgggttcagtattatctgtcttgttttttcatttctccatatgcatccacgtataataacaagagaaatcgacccaaaagacaaccttggtgtgctcttgatagagttctttgaactttatggaaaaaattttggttatgatgatgttgcattagggtcatcagatggttatccggtatacttcccaaaatctacatggaatgctattcagccaatcaaaaatccatttgcactagccattcaagatccaggggacgaggcaaacaacatcagtcgaggaacgtttaacatacgagatatcaaaaaggcatttgctggtgcttttgatctattaacgaatagatgttttgaattgcattcagcaacgtttaaagatcgattagggaaaagtatattgggtaacgtgatcaaatatcgcgggaaagcaagagatttcaaagatgaaaggggcttggtgctgaacaaggctatcatggaaaatgaaaactatcacaaaaaacgtagcagaataattcacgatgaagaatttactgaagatacagtaacttccacggctactgccagcaccacagaagacgattatgacataatagaaccgcccactaaaaaggttaagacacaaccatccgaatcagaagctaaaaaagagccattgaaggagaaaagcgaagaaacttatattaccatttcaagtggcgatgatgacgatgaagatggatataacccttattctctttga

SEQ ID NO: 2291 - DNA, 609 bp, Saccharomyces pastorianus
atgacaacatacgtgggaaactatagacttgttaggtgctcctctacgtttgcactcatacgcacggggcactgtagggagccactatgcattacaggcgcagtacgattgattgtaaatgggaagaactggagggagctcgatgtttctcgtgcaaaagactgggtaaaaacacttagtgtaacgggtttacccttgaaacaatttgtcttgcgctacgatcgagccagtggtccaggaggacagaacgttaataaagttaatagcaaatgcacgttaacacttcatggcttgtcaaatttttcttggattcctcaggaagttaaaagtatattatgtagcggcaggtttcggtactataccaaaaacagtgactctgtagtaattcaatctgatgaaaccagatccaagcaaattaacaaactgaaatgcttcgagaagctaattcaggaaatcaaacaaacctgtcagttccctaatgacattcctatcgagactgcagaaaaatgggcaaaaatcaagaagaaatcgaatgcagaacggatacttaataaaaaggtgcatagcgataaaaagaagagtagaggtaaaattacactcaattactaa

SEQ ID NO: 2292 - DNA, 1962 bp, Saccharomyces pastorianus
atgaagggcataaaaagggaaggatggatatcttataaagcggatggaatgttttccttcttatggcaaaagaggtatctggtgctaaacgattcgtatttatcattttacaagagtaataggtttagtgaggaccccgtcttatctgtggcattgactagtataacaaatgtcagtaggatacagttgaaacagaactgttttgagattcttcgactaacagatcaaaaggagaatgtgtcgcctatgaattcgtatttttacgaatcgaattccaagagaccgatattcatctccacaagaaccgaacaagatttgcatggttggcttgatgcaatttttgccaaatgtccattattaagcggcgtttcatcaccaacaaatttcactcataaagtacacgtaggttatgatccgaaagtgggaaattttgttggagtgcctgatagttgggctaaactgctgcaaacctcagaaatcacctacgatgattggaacagaaattcgaaagcagttattaaagcattgcaattttacgaagattacaatgggctagatagcattcaaaccgaccaatccaatccaagtttaaatttgaagcctttaaagagcccgacaaagtatatcataaacaagaggactaactctatcaagagatcgctaagcaagacactcagcaaaagcaagacggattccattttaccagtatatcaatcagaactcaaacctttccccagatcggcggtaaataacaatagcatcatcaacttaaaagatgcaaaaacccatgaaaatgatatgcatgctagtagagaaaaggtgacagatctccgaacgacgcagttgaaaagaaaggagcagcaagctattcaacaccatttacaaaaacatgatagcaatgcgacattaaaacctcgccgtgtagcaccagcggcgcccgttgcaaaattgcataatggcaaagctataacacccaaagaaaatcttcttgagttaaaggacgcggatgactctgaggaaataataatgaagatgaaaacagtagcaattgatgtgaatccgagaccgtatttccagatgatagaaaaggcaggccaaggagctagcggtgcagtatacctatcgaaacgtgtcaagctgcctcaaaaaaatgattcgagatttttgaattctcattgtgatcgaatcatagaagaaagggtggctataaagcaaatccatctatctgagcaacccaagaagcaattgatcatgaatgagcttttggtaatgaatgactcgcatcacgaaaatatcgtcaactttctcgaagcctacattatttatgataaagaattatgggtgatcatggagtacatggaaggtgggtgtttaacggacatattggatcccaccgcggatatcaatgctagtaacaaatcgtcgccgctaaacgagagccaaatggcatatataataaaggagacatgccaaggtctgaagtttttacacgacaataaaatcattcacagggacattaaatctgataatattcttcttaattcccagggcttagtgaaaatcacagatttcgggttttgtgtagaactaacagagaaaagaagcaaacgtgccaccatggtgggaactccatattggatggcacccgaaatcgtgaatcagaaggggtacggtgagaaagtggatgtttggtcattgggaataatgcttattgagatgatagacggcgagcctccatatctaaacgaggaccctttaaaggcattgtatttgatagctaataatgggtcgcccgtattgcgtcgtgctgaattggtgtctaagaaaactagacaatttttggatgcgtgcttacaagtgaatgtcgaacttagagcatcggtaagggaacttcttatgtttgactttttattactggcatgtggtcctaaagagttcaaacagaccttaaagtggcactaa

SEQ ID NO: 2293 - DNA, 627 bp, Saccharomyces pastorianus
atgagcacatctattaatggcccagaacacgagttcgtcagtaaattcctgaccctagccacgctatccgacccgaagctgccaaaaagccacatcaggcctctaaaggatattgccaatttgggtgttccgttgcccacgttgaaatacaagtacaagcaaaaccatgccaagaaattgaaactgcaagaaaacgagaccgtccgctggacattgaagaaaatccaggcccccaaatttgccattgagcatgatttcggcccatccgacaccatcttacaactaaaacagcacttgatcaacgagggaaaagcctcccacgtaagcgagattaaactactgttgaaggggaaagtccttcacgaaaacctgttcttgtcgaacttgaaactcgactcggccaacagcacaatcactgtgatgatcaaaccggatccagccctcgcaagaacacccgaggccgataagcctgtgtctgcaccttcttcttcttcttctccggagcaagaaccggtcgtcccttgggacgccattgaggctttactaaacgacaagttcaagaacgataaacctgcggccaaacagatcatggaccgtctacaaaaaggctggtccctgaccaaatag

SEQ ID NO: 2294 - DNA, 342 bp, Saccharomyces pastorianus
atgtctgaattcgaaaacaaagctgaagctgccgctcaagacgtccaacaaaagctggatgaaactaaggaaaccctacaaaacaagagcaacgaagtgaaggaacaagcccaaacgtccatcgacaacttgaagaaggaagccaccccagaggccgaacaagttaagaaggaagaacaagtcatcgtcgacggtgccgagcaaaagaagaccgaagtcaccaccaaggtcgatgataccaagaaacaagccactgctgctgtcaccgagaagaaggagaccaagaaggaaggtggtttcttgaagaagttgaagagcaagatttcttccatcttcaactaa

SEQ ID NO: 2295 - DNA, 447 bp, Saccharomyces pastorianus
atgacgaaggatacgaaaatatcgactttgaaggtggatttgggcgagatcaaagaggtcaagagcgaactggctaatgtgaagaagagaaagcgcagaacaaagaagatcaataagttgactgatggacaaatacgtataaatcacgtatcctcagagaagaagagaagagagttggagagagcaatatttgacgagctagtggccgtggtaccggacttgcaaccgcaagagagccgatcagaactgatcatatatttgaagagtctaagctatttgagctggctatatgaaaggaatgagaagctgaggaaacaaatcatagcgaagcacggagcaatgcccggtggcagtaacagcatagagagacaacagaacagagacatgtccaatgtggtaccgaaggagttaatctgggagctaggtagtgaacagaatggtcaataa

SEQ ID NO: 2296 - DNA, 1029 bp, Saccharomyces pastorianus
atgcaatataattctaggttcctagaattgaacattccagactcttttctcaacattaacaaaattcccgatgctacgaagttcattgctatcatatatatatgtttgacaacgtcccttttctgcataagaagatcactgtataataaactatcccttgaagatccaaatgtggactacaacttaatcaccctgcccattttgcaaatggtgccttcacagatttggagataccccacatctttaattttatccaatttcatcgatacaaaggcttggaaggtgatagtaaatctgctcaatctaatcataggtggttcctttattgaacgcaattggaactcttcaaaagagatgtttaaattcatcgtagtgttaggttcggtaacaaatgtattgatcgtcacgttaaccttgttgatatctcttttctcaaataaagtaagactggatattcctttggatgggaattatacaatcctgattgggttccccatcatttataggcaactactgccagaaacaaccataatcaacctcaagactcctcattttttggccaaaaacttcagattcaaactactgcccatttttgttatgttcataatgacggtaactcaaataatatggtttcatcatttcgctcaacttttttccatctggattaccttttttgccagttggtcgtatttaagattcttccaaaagcttgtgccattgaattgtccatctttaccaacaactaactctcaagatattcaggaggcactaattggtgatgcatccgataccttccaattgatttatttttttcctgatctgatcaagccacttctaaggccgatcttcgattctatttacgatgtggttgttgtgaagctcagtattctgaaacctttccaaaatgtagacattgatatcagtaactccattgctgaaagcagaggtgctaaaaagatcacgactgtagaagaaagaagaagacaattggctctacaggtcctggaagaacgtatggtgcacccttaa

SEQ ID NO: 2297 - DNA, 1059 bp, Saccharomyces pastorianus
atgaacggagataacaggttagcgggcatccggctacaatcgatggggtcatccaccgaaaagtccattgacttccaggagcagaagttgcagagcttacaagaggcttccgagtgtttgttaccggaaggcttcatatcgaaggtcagccctccaatgttcagagaccataagagctatgtatttatattgtactgtttgaatcacgtggatctggtcacggatttgcaagactctacaaaatgtcattatccattgcaaatatttaaagactgcaaattgggttccttggtccaaagagatttcgcacattatttccagttttctcaacacggagagaataacgattacagcgatattgatactactttggtaaatctagccaatatgcgggatccgctcaataattcccatttgctaaaaatgaccattgttcctagggtctgctccttcgacaagcgcaattctaagacttataagttggtcttggaatatttgaaccgctttgaaactgttctgacaaaatttcgaccccaaaagaacttcactaaaatctactttaactggttgaaacttgttgaatcattcaccgagttagttttccgcgatttgttgatcaaatggcaacagtggctagaattaactatgaatgataccacggttcaactgaacatcccatttctgttaagaaaatttgtaacgcagctttggcagaagcactttaccttccagagctcaatgaatagttcagttgatagcttcacagaactattactcagtaaaaactctataagtctcttagaccttccccaaaagacaagagaatacaaactgaatttcgggctatggtttgattgccaaaatggcattttgatctttactaatggcatcgttcgtatgtcagatgagattatagatgaacgactaaagtcatttgttaggccagcacacgttttagtactggaagaccatccaagtgacgagatagtgaaaaaactggtttttttcattttttcggcaatactgcaatgtttcactgatgagattttggaatgttga

SEQ ID NO: 2298 - DNA, 3252 bp, Saccharomyces pastorianus
atgtattttgataaggacaactccacaagcctcaggccgttgctgccaacggatgaacaaaaacttagcataaacttacagacaaaaaaagagaagctattgcatctggatccgcatctcgacatcagaaccactcctcaaagaagtacttcaaataaaaatgttgctgatatacttttggaaaagcaaaggagcactaaacccattattcaaaaagctttaaccaacacagataattttattgaaatgtaccatgatcaacaaggaaaacgcctcaatgaaaatgctatagaagaagtaacgactaactataataacggtacaactagcgctagtgccaaagaatatggctatgattacgattacaactatggtagtaacgattctaatgatcagaaagctttagacaatatagcggaaagtcccagcatagaaaagagccaaaaccaaactataattgaaaataaaactgcgtctcacaataaactttcattgaaagaggcgcccatagttcagaagcaaatagttaaaaagggtattaaggacttcaaatttggtgctgtaataggtgatggtgcatattcaaccgtgatgttagcaacatcgattgataccaagaaaaaatatgctgcaaaagtgttaaacaaggaatatttagtacgccaaaaaaaagtgaaatacgtcagcgtcgaaaagatagcgctacagaagttaaataattcccatagcgtggtacgattgttttccactttccaagatgaatcaagtttgtattttcttttagaatacgcgcccaatggggacttcctttctttgatgaaaaagtacggctcactagatgaaaactgtgcttgttattacggttcacagataatagacgcaatcgactacttgcatgccagtgggataattcacagagatattaaaccagagaatattttgttagatggagaaatgagaattaagttaactgattttggaacagcaaaattacttgatcctacaaataacagttcttccaaatcgaaatatgatttgtcgaccagatcaaaatcatttgttgggactgcagaatacgtatctccagaattgttaaatgacagttttactgactatcgttgtgatatttgggcctttggatgcatacttttccaaatgattgctggtaaacctccgttcaaagccactaacgaatacttgactttccaaaaggtaatgaaagttcaatatgccttcacaccaggcttcccgttaatcattagagatttagtcaagaagattcttataaagaatttagaccagaggttgacgataaaccagattaaagaacacccctttttcaaggagatgaactttaaagatggttccatttggtcaagtactcctccagatattatgccatataaaattaacgccagatcgatgcaggcaatgccaggcataggcgataagaagcagacaaaaaaaccaatcagcgcactcgtcaaaacacaccaaacaacgcctagaccagcttcgaactcttcattagaggcaaccggaaattcgcctatgtatagtagtagtagccatgattctaccgagagcgagatatacataaagaagaggcccactgacgaaagaacagcgcaaattcttgaaaacgcaagaaaaagtatcaatagtaggaaacatcaatcaagcaagaaaacttcaagtagtgctgcttcggctgctctggctgcttcggctgccttgacgaagaagacgacacaaaatcatccaacattcagctccaaaagcagtagatcgagttcacctgccacaacaccaaaatctggacataataggcgtgctccatctgcagatggtaaaccttttattaagtattcatcttcggcgtctgtttcatcatcaaaaattccagcgccttcctacactcctccaatttcgccacctatgacaccatatgactcatataaaattactacaccatctttagcaagacagcaggggtattttgaaggtgagatagtggcacctaatctttctagcaggcaggatacaaaaaaaattctggaatcacctttagtgaacaaacgcgacatacaatggtctttttacctaaaaaatatcaatgagcatgtactgaaggtggaaaagctagattttgttgttgctaacccgatcaccttggaaaaaagattcactaaagttaatggttcattgctggatcctcaattgtttgggaagcctagacaaacttttttatctcaagtagccagaagtggtggggatgtgacaggctttaggaatgatccatctctaaccgcgcattcgcaaacagaagatgcttactttttaaagaacgctgtcgattcacagctcttagaagatgactatcgtgttgaaggtggtgacttgtcggaactgcttactgacgaaaacggagaggaagataaaggtaaccaaaataatctaccaacagaagatgatgatggcaaagccgaatctaacaacaaaggtagctcggttttttccggcaagctcaaaaagttgtttcaccccacaatggcaaatgaatcactttctgcatccaatgaaagatgcaaatatttcaaaaggaccgttgtgatgacatcttttggacgttgtctggtatttgcaaaaagaaagcaacctagccctgttaccaatttaaaatatgagctagaatatgatatcaacttacgtcagcagggaaccaaaattaaagaactagtcatccccttagaaatgggaaccaatcatatgattgtaattcaaacaccttacaaatcgtttctactgaagactgacaaaaggaacacaagcaagttattcgctgcttttaagaaaattctcaattcaaatacaaataaaatcgaaaaacaattattacagagaaatcaaaaaataacagaaagaagaacgtcatcatctgggagagtgttacctatagactcgccgtcttcaaaacctgcctctccaaaacctaggccgcacagccaatcatcatctatatcaaagcatgattcattttcggaatcggtgaatagtgcgaagacgaacagatctagtagaatctttgaaactttcgttagtgctaaggaacaaaattcaaagaaacacgccactatcccgttaacaagtaaattggttaacgggttgcccaaaacgcatgttgccttgggattgggtcttaacacaggtgcaaactcaaacaactcatctgcaaaatcgaagagatcataa

SEQ ID NO: 2299 - DNA, 3117 bp, Saccharomyces pastorianus
atggggttccataaggtcgtatcatttcaaccggattatgtcccacaatatcacataaccaaatacatttcgcaaaggaccaaattgcaacttgttcacataaaccacaagacctccacgttggttcatggttattttgctgttcctacagaatgcctcaacgattcaggcgctcctcatactttggaacatttgatcttcatgggttctaagtctcatccatataaaggtttattggatactgctggtaacctgtcaatgtctgtcaccaacgcttggaccgatactgatcaaactgtctatacgctggccagtgctggttggagagggttttccaagttattacctgtttatctagaccatattctgaatccaactttaactgatgaagcttgcttaactgaggtttatcatgtcgatccagaaaatttgagcgataaaggtgtggtttttagtgaaatggaggccatcgaaacccaaagttggtatgtttcagcccttgaaaagcaacgtttaatgtttcctgaaggaagtggttatcggtcagaaactagtggtttaaccaaaaacttaagaactttgaccaacggagaaatcagagaatttcacaaatctttgtattcttctgacaatatttgtgtaattgtctgtggtaacgttccaacggatgaactgttggccgtcatgcaagagtgggataatactctaccggagattccgtttactatgccaaagaaaaggccattcttagataacaaactgtcacatatacccgaatctagagaaaaaatcaccgaatccaccgtggaatttcctgaacttgatgaaagtcaaagcgacttgtttttctcttggattggtgtgccttatactgatttccgtaatgatttagcagtgtctgtactgatggactacttcacggagtcggcattggcagtttttactaaggaattggttgaaattgacgatcccatggcaaattctactgattactggacagatgattttatgagaaccataattaatttgggtattcacggtgtacctacagaaaaactggttgcaacaaaggatacggtaatggaaattatgaaaaatcatagaattgatctaccaagagtaagacaagtggttgaaaacaccaagtgggaatacctgttaaataatgaaaaaaatggcgagtctgcattatctaatgctgctatcacggattacatttatgggtatgaagacggctcttcgctggtttcctccttgaaagatttaagtgatttcgactctttactacagtggtctcaaaaggactgggagatgctgttaaatagaatatttgtggacaataaaccggttatagtcatgactaagccaagtgctcaaatgtatgaacgactagaaacagaaaagttggatatgataaaacaaagggaagctgaatttgatgaaaagaaaaaactggatttattaacgcaagtgaataatgcaaaagaaattaacgataggccaattccaagatctttgttacagaaatttgaaattgaaaatccttccaagagtgtcgaatttgtcaatacaaaaagtattgcgattgtcgattcatatgagaataatgatatgaatgatccaatgaccaaagaaattttaaagctgaaaccagataactttcctctttttatccacttaaaccatttcccctctcaatttatagagctgcactgtttagtcaattctacttccgtaaaagacacttcgcttttgccctattataacatattcgatgagttattttccatgccaatgaaaatctttgacgaagtaaaaaatgcagaaactacgctgtcatatgaagaagttgtcgctaagctaaaatcagagactgttgacgcgcaaattagtcaaggcttgcaaggctcttgccctgatttaatcgatatcagaattcaatgcaaagctggtaattattcccaatccgttcaatggatcaagcattgtttattcgatattgttttcgatgaaaaacgtgttcgtgttcttttagaaaattatttgaattctattgtggaatggaaaagagaaggtagtgttatgttagattctctaaccaacagaaacctgtattcagcaaggtcactgaaaaaatccactgatccattgtttgttgaaacgaaactaaaagaaatattggaagagattgaaagcggaaattttaagaaagaaatcttaccaagaatagaaacaatgaggaatcaactgaggtcaaatttcagtaagtttcacattttggtccttggtgacatttcaaagattccggacatttatgaaccatggaatcccttaatcaagtccttgaagattgaacatcccattgaaaagttaaaagttccccctgttccaagagccctaagctctgtctcaccaatatgcaaaaatcctggtgaaaaagtctttataataacaacacctgcctcagaatctgcttacatgaatttaataacttcggttccatttgatttaaattaccatgatcctgaatacgccatggtttctttagcttctgaatacttacagtgcgttgaaggtccattttggaagggaattcgtggtgctgggttagcttatggcgccaatatgtcgaaattgtgtgaagtgaactcttggggattcaacatctatcgtggtgctgatatcatcaagtgttatgaagctggtaaacagattgtccaagattatgcttccggcgccttggaatttgatgaacagctgattcaaggagccattagtagtattatcaacagaatggctactattgaatgtggatattttgaaacagctttgtctagatatacagatgaattttgtttgcaaagaggaaataatttcaatgagttgtacttggagaggttacaaaatgttactaaaactgatctgaaaaatgttatgcataagtattttgttaatttgtttgaccccaaaaagagtgttgcatttgtaagctgtcatccaggtaaattggaatccgttcaagagttccttgaaactcaaggtttcactgtcgaaatagaagaactagaagatgatgaggaagaagagcttgacagtgacgaagatgaaaaatcatga

SEQ ID NO: 2300 - DNA, 2148 bp, Saccharomyces pastorianus
atggacaagctaactccatcgcaatggaaagttgtaaacaagccgtacgagccagcatccacagtaaaagtcattgcgggcccaggttcaggaaaaacgttgacgctattacataaagtgcaccatctggtcaccgtggaaaatattaagcctgacgaaatactgatattttcgctgacaaataaagctgtcgacaatattatagagaacttgttgtccgtattcgaagacttgcatactaataaagagattattcgtcagattggatgttacactattcatggtttggccaatagaatcgtagtggaaaatgagggaatgataaacatcatagaggagataggctggagaggattaatgaaattgctgccgccctccaagagaagcccccatcattttcgatcgtacaaggagttagaaaaggttatcaaagattacaaactgaatggcagtaggaccggcaatgtcaaggcaaaaaatgatagtatcgttattgagcaactagtcgaactgatggataactgtaaagtaatgactaatgatgacttgattattcgtgcaaaaaaatacctagagctcgatcaacctatcctaggtgacgcctcgtcatctttcactcaagatcttcaaaacaaatacaaagttgttcttatcgatgagtttcaggatctttatccaagtttagcacctttggttgccactatttgtaaggggaaacaacttattatgttcggtgatacaaatcaaagcatttacgaattcttggggaataacaaacagatcatgtggcaattggacaatctacatccaaaatcgtccactactgttttaaaactgttcgataattttagatctacgcccgagattatctctttagcatcaagggtcatcaatcttccgccagcaaagaaacaagtattagataataccgacgaaactccatcagaactggttcgcaagctaccaagcggtgttttaccccaatcggcttcatttgatgatttgacaacagaaactgaattcatcatcgacaagattactcaattaatttgctcttctgccaaattttctgatattgccattttatcaagaaccaactcgcatttaacaacgttgggaaatgttttgaaaaaatatggtataccatttgaaaaattaaaaagtcagcccgattggatggacgacctgcgaattcagttcctcttggatatcatgaaagtgtgctctctagcgtctgacgagaagcatagccgcgagttcgatacgagtgccaaatggcaaagcgatttcagcatactggtcacaatgagtgctatcaagggagttggtgatgcttcaatacaagctttgtataaggcatgcggtttgaagaagctatcgatttggaagtacttaaccgtggtcccgaattttgaatggccattgggcctctccataaaaaaaaaaattgaaaactacacagctaatttatacgaactgattgaagacgaccaaattcaccaactggaagaccctttggaacttttggagaagatttccaatataacacataacttaaacctcaatcctacctacttccaatctgtgagcgactaccaatcatcactagagtttaaaacgcacttgcgagaaatggctcaagtaatgaaagtgtcacaatccaacaaaccttcaggaacttccttcgtcaaatggtttctagagacttatttcgatcaaacaatggttttccatcaggccaaacaggaattgaaaaccaacggccctggtacagtaaaactgtctacgattcattccgccaagggtttggagtttcccatagtgtttctgacgaatggaatcatgtccaatttccctatggacacgaattctctttacgtcggtatgactagggcaagaaacttattatatatgtccaacatgaaacatcagaatctaatcagtaagaccccactttactctagatctataatgtttaacgagtctttttggacctactacaacaaggatttaaacagatctctgcatggcgttacgatggcgcatgactacaacatacagcattacaatcggttacgtaaagactttggattttatagagcatattcttcactacggtgctgtaagaacatttttagacgtatatag

SEQ ID NO: 2301 - DNA, 1836 bp, Saccharomyces pastorianus
atgagcaatatattacacgcatcaaacatggaaggaacgtcaatgatgacggttacctcacatagttcggaagactccagtcgcatatcaagccacgaccaggataccgacgctcataacgatagtaacataagtggtgcggaaaaccataaaatgtcaaaaagaaaatggatgaaggaattctttaagctctctaaatctcccaatgcaaaaagcaatcagagtctaagttccatgaaaagcaatcaaagtttggtttcaatgaaaagcagtgataatggggatgtttctgccaatgattattcatttatttgcaacagcggccttcaatctggtgggttgagtcgttccaataatatcaaggaaccgcagagagacccagcgggaagccaaagatcaaaaaacaatgccctttccttaccaacacagacaacttcttcgtccacctcctcttcttcttcttcttcttcttcttcttcttcttatgattctgtaagaaggactgataatagcgttagaatgcaaaagaataaacactccagattcaacaaggaattaccccgcagcagggaaagctcaaatatgaattctggatctatcatcagtcaatacaatgtcgatactcaggcaaccgctataatgagcgatatgcaaaaacaatatgagtcgcagcaactgccttcgttgtttataaacgagactttactgattgatccaaatggtaaagtttcagaggttataaagttgatatttgaagaagtcggctacaaatttgatgattttagtgatatttccgttttccaactgatgcaagaaatgtatcaattaattaagaaggattctagtaataaaaagtcaaaattaactacttttgcctccaaagtaaaagaaaaagaaatgcaagtgaaaacccaaaacgataaaattattaaactagaaaccacaaacaaagcttataagactaaatacaaggaattatctttagaaaatagaaaaatgaaagaggcatttaaagagctagacagtgagtcatacgaccatgacgaagaaatattaaagaaatacaaatacactaaggaaacgttggatagagttaacagagaacaacaactggtcattgatcaaaacgagtttctaaaaaaaaatgttaacgaacttcaaaatgaggttaatgctaccaacttcaagttttccttattcaaagaaaaatatgctaaattagcagatagtataactgagttgaacacctccacaaagaaaagagaggctatgggggagaatttgacttttgaatgcaatgaattgaaggagatatgcctgaagtataaaaaaaacattgaaaatctaacgaacactaataaaagtttgcaaagttcatttaagaatgaaaggaagaaagttttagatttgagaaatgagaggaacttgctgaaaaaacaaatactgttaatcgaatgccacggctcatactccttacttttagtatctaacatcttaacatcttaccggttcttactaccaagcgaaactattatggaaactgaaaccttgataaaggaattgctgaacatgaacaattccctgtcgaatcacgtatgctcctccgaccagtctcctgccgagttctcaaaaaggctagaatccagatgtatagagttcgaggaaaagcttctttatttctatcaagaagttgtgacaaggaaaattattgatattatttataaatgctttatcagttattacaagaaaagcaggcaaaacgaaccgaaacccagccaaaactctaccacgccgtacaagcaaaaccaaagacaagttccacactctatcaaataa

SEQ ID NO: 2302 - DNA, 2895 bp, Saccharomyces pastorianus
atgtcatctaccagacctgatttgaagttttctgatgtatcagaagaaagaaacttttacaaaaagtatattgcattaccgaagaagccattaaaaaccatcagattggttgataaaggtgaatattatacggttataggcacagacgccatttttgttgctgattcagtatatcacactcagtctgttttgaaaaattgtcaattggactccataacggcgaaaaacttcgttgaacccaccaaatacgttaccgtttctttacaagttcttgctactctactgaaactatgcttgttggatcttggctacaaagtcgaaatctacgacaagagttggaaactactcaagagcgcatcgccgggaaatatcgagcaagttaatgagttgatgaatttgaatattgattcaagtatcgtcattgcaagcatgaaaattcaatggaattctcaggacggaaattgtgttattggcattgcattcatcgataccactggttacaaagttggtatgcttgatattgtcgataatgaagtgtactccaacctagaaagtttcttgattcaattgggtgtgaaagaatgtttggtgcaagatcttactttgaatccgaattcgaacaccgaattacaaaaactaatcaacgttatcgatcgttgcggatgtgtcgttacattattgagaaactccgaatttttcgagaaagacgtcgaattggacttgactaagctattaggtaacgatttggctttatcgttaccccaaaagtattctaaactatccatgggtgcgtgtaacgcattgatcggctatttgcaattattgtcagagcaagaccaagtcggcaaatatgagctggtcgaacataaattaaaagaatttatgaagttggatgcttctgccattaaggctcttaaccttttcccccaaggtccacaaaatccattcgggagtaacaatttagctgtttctgggtttaccagtgctggaaatactggcaagataacatctctttttcaattgctgaaccactgtaggacaaacgctggcattcggcttttaaatgagtggttgaagcaaccattgactgacattaaggagattactaaaagacatgatttggttgactacttgatcgaccaaattgaattgagacagatgctcaatactgactttttaccgatgatcccagatatccgtaggttaaccaaaaaattaaataagaggggaagcttagaagacgtcttgaaaatttaccaattcagtaaaaagataccggaaattgttcaaattttcaactcgttcctagaagacgaaaatcctagtgaagatgtaaaggaattggtccgttccatgtggttggctccgctgagtcatcatgttgagcctttatctaagttcgaagaaatggttgaaaccactgtggatttgaatgcttacgaagaaaataatgaatgcatgatcaagatcgagtttaatgaagaattggccaaaataagaagtaaactagatgacttgcgtgatgaaatccattcaattcatctggatgctgctgaagacctagggtttgatccagacaagaaattgaagttggagaatcatcatttgcacggttggtgtatgagattgacacgtaacgacgccaaagaattgcgtaaacataaaaagtacattgagctgtctactgtaaaagcaggtattttcttcagtaccaagcaactaaagttaattgcgaacgaaacaaatgttcttcaaaaggagtatgacaagcaacaatcagctttggttagagaaattataaacataactttaacgtacaccccagtttttgaaaaactgtccttagtcttagcacatttggatgtgatttcctcctttgcccatacttcatcatatgccccaataccttatatcaggccgaaattacaccctatgaattcggaaagaagaacacatctcgtaagttctcgccatccagtgctagaaatgcaagatgatgtgagctttatatctaatgatgtcacgttggagagtggtttaggtgattttttaatcataacgggtccaaatatgggtggtaaatccacttacataagacaagtgggtgtaatttctctgatggctcaaattggttgttttgtaccttgtgaagaagctgaaattgctatcgtggacgcgattctttgtagggttggtgcaggtgattcccagttgaaaggtgtttctacgttcatggttgaaatattggaaacggcatccatattgaaaaatgcgagccaaaattccttgattatcgttgacgaactgggacgtggtacaagtacctacgatggatttggattagcttgggccattgccgaacatatcgcaggtaaaattggatgttttgcattgtttgcgacccattttcatgaattaacagagctctctgaaaaattgcctaatgtcaaaaatatgcacgttgtagcacatattgaaaagaacgcagacgaacaaaaacatgatgacgaggacattacgttattatataaagtcgagcctggtatttcagaccaatcttttggtatccatgttgcagaagtggttcagtttccagaaaaaattgtaaaaatggctaaacgtaaagcaaacgaacttgacgatttgaagattaataatgaaaatatgaaaaaggctaaattatcattgcaggaagtcaacgaaggtaacatacgcttgaagaccctactaaaggaatggatacgcagagcaaaggaggaagggttggatgatccaggcaaaatctctgaagaagcatcacagcataaaatacaagagttattgcgtgctatagccagtgaaccggaatatgaaaatgacaattatttgaagtatataaggaagttattattataa

SEQ ID NO: 2303 - DNA, 3090 bp, Saccharomyces pastorianus
atggaaaaccaaaatggagactacaattcaaatggattttcaaactcgtcaaataatttgaatgcagtgttcaacaatgaaggtatgggtagaagtgacattacaagcttaaaccatcaacagaacccaacacgcctggttccagacactcaaatgtggtcgatgcccgtgcaagaccaactattgccgatgcctagtagagataatcatattatgtcgaacaatacagcgggctcaatgaacgttgtctatcccagcacgatgtaccccccaatggagcaacagtctcaactgcaagcacaacagcaacaggacgtcagcgttatgatggaacacactagtagtaatgatttgactgcctctagtaaaaatctgaaaaaacgcgtatcaaaggcctgtgatcattgtcgaaagagaaaaattagatgtgatgaagtggacccgcaaactaacaaatgttcgaactgtgtcaaattccaatcggcttgcacttttaaacatcgtgacgaaatactaaggaaaaaaagaaaactagagattaaacaaaattcggacaaatcacctcaggctcaaagtaacggtcccgatcctgtaatttcttctatgccaaacagtactgctaatgaaacgtttaaaccctttagtagtaatccgtccttggaaagtgatatcgtcaataaaatttctaatgctcaaaataacctgaaccgagacatgaactcaaagatagaaaaattagacaggaaaatgtctcatattattgacagtatggccagatttgagtggttattagataaagtggtcaaaaagcaagagggtaaacagagggaaaatagtgattcacctaaacctacaagaaagatatactccacagctctattaacctctcaaaaactttactggttcaaacaaagtttgggacccaaagtttcagacgaggaattcctttctcccattagtgagatattatgcatatctttgaaatggtatgctactcagatgaaaaaattcatggacttatcatctccagctttcttctccagcgaaattgttttatactcattgcctcccaagcagcaagcgaaaaggcttcttgaaaactttcatgcgaccttgttatcttctgtaacaggtataatatcgttgaaagaatgcttagatttagcagagaaatactatgacgagagcgccgaaaagctcacatatcctgaacacttattattgaacgtatgtctctgttctggtgcctcagcaactcaaacaattacgcgaggggattcgaagtatttaagaaaggacagatacgatccgacttctcaagagttaaaaacaattgaaaatgtcgctttattaaacgcaatgtattattatcataagctatccacgatatgttcaggcacaagaacattacaagccttactactattgaacagatacttccaagtcacgtatgataccgagttggcgaacagtattttaggaactgcaattcgattggcagttgacatggaactaaatagaaattcctcttataaatcgttagattttgaagaagccataaagagaagaagtatgtggtggcattgtttttgtacggataaactatattctttgatgttatctagacctcctattgtgggagagcaagatatggatatgctcaccgatcagaattattttgaagtgataaagaataacattttacctaccgttattcataaaaaggaagatctcgacaaaatcaatgatgtgaaatctgcattgaatgtagttgtaaatttctgccagcatatatcccttttcatatcctattatgtttcaaagttagttaatattgagagtagaatatattctacttgcttcgctgttagaagtactttggacctttcgtttgatgcaatgcttgacaaaattgtcgaactcaacgattccttaaacaattggaggaatgacttacatgtaagtatgaaactcaaaagttataagcaatacctatcagtactatacgcccaaaattctcaagaaaaccctgccttgagttttgagattgcgtgttgccgtgttttgcattgccactttaggtcactctattccattgttattttgagtatgctaaccacatcgctgcttattgataacaaactactgtacaaagattcgcgccatgagattccacaaatatttgtactattttcaaatcagtacttgaatgctagcaaggagatgttaacgctttttcaaggcattgattaccaagcacacatgtacaatgagattatgtatcaatttgccaccgccgtgtttgtcctttttttctttgttgtggacaatataaacaatccaaaaagaaaagttgaagtgaaagaaaccatcgatcttttgaagaaagcgtatgatcatttagtaggcgaaaatgacgagcagttgctttctgataatgtcaaatggaatactttgatagtgttttacagccatttcttgaaatatgttctgcagcgctatcatgagattggcgtctccatagccgagtttgatcccaaactctatgatgagataactgcgaaggttattaggcattcaagaaaagtaaaagacgagaccgtggatcaactgataacgagtctgaaatcgtatggatccttgcattctttacaaaaggataacgacgttggtatcacaagtaacgagttgaatacgagtaacattaattcagatgatctcccagaaagagcttcgataaatttgtttggtgaattatcagtcgatatattgaagatgttgaaatcacattctccaatctcacatattgcagatttatcgcctcttatgaaaagtaaaggattagcggatgactcttccctctacccaattcgatccgactcaaacagtcctgtttacccaatccatagctccgatgtatctgattccggggatacattttctacagacgcagaggttttggaccaagcctctggtaacgatgataaagtaatgaaagattttgaatcttttattacattattaccgttaggaaaattaatctatgatagagactattctttcgtaaatacttttatggattacaaatag

SEQ ID NO: 2304 - DNA, 834 bp, Saccharomyces pastorianus
atgaaattgagcagttttttaacttctgccttgtcgatatgcagttttgccgtaccggcgctagcgtacagtgatgatgtcataatggtcaagtcgattgagcagtactacgaaacgtgcaatagaaatgattcatacactatgattaaatattacacttcgtggtgccaacattgtaagacattagctccagtgtacgaagaacttggcgagctattcaccaaaaatgccaatgaagatgacattccaattaatttcctcgaagtcaactgtgaattttttgggccaacattatgcactgacttgcctggattccctatcattgaatttattaaaccacgtacaaagtcattaaaccttcctcagattgaccagtcttctatgaagttctatgaaagattgtggtacaggattaagaagtggttccacgatcccaaatggcaactggatccatctagggttgttcgatttgaaggaagtaggaacctgaagagtttaactaacttcatcgatggagtgagaagtaaagattcagagagaagactgattgaacaaatttttgatgattccaaagattgcggcgatgaattacgttctcaacagtcactatgcaaagctggtaaagaatactattcggcaaccctatctgaactatacgaagatatggatggattaagaaaggaacgattgaggttagaaagactggtcaagctaaatatggatgacccaggcgaagacaccaaagacaagctaaaaaccatccgcctgcaattgaacctcttgtcacacacagaagatcagttgcggtctacaactgaacatgatgagctttga

SEQ ID NO: 2305 - DNA, 3348 bp, Saccharomyces pastorianus
atgaaccaattgacggtgagttatggcctaatttccccggaatactgcacttcacaagatgcgcacatcctacctataacaaagattttatacccagacatacctgaaaggaactatttcctgacttcaggaagagatggttcgataattctgcacaagaacgcacacgtctttaacaatgtccaacctacatctaaggctaatcccgcatcagacgacgcgataagaatgcaagtccacagcgattgggcaagtgatttaatacacgtcaatatgaaatgtgcagatccctccactttagacacattcatatcggtaagtcatgatttttccatagtattaatcagtctgaatactgaactaaccacatgggataagaaaatcattggtgatcatgacgattatatcaaatgtatagtgcccatacatcatgatacgtcgcatgactttggaatcgatgagcgcgaggacaagtacaacaaatatgacgattatgaggaaagaaacaacgggatcgctactgatgaacaaaactacttcatttttgccacaggcggtctagataggaaaataaaagtttggtgcataaacaggggcccagagaaaatagctactctacttcacactttcgataatgctcaatcaaacgacacaggatcgatatattgcatgagccccataatatcgaaataccattctggtgacgaccaaacagcgcgtccctttgatttagtggccggagattgtaacggtgacctgattttctattcatgcaaagaccgcaaagaaataatgagaattggaaacgctcatatgacaaatattaaagtcgtaagaactgtcaacaattccacacgattagtaagtaccagttcagacggtgtaataaacgtatgggacttgaactgcatatgggatgaagctaacggtgttttccaagcacccaataagatcgggtcatggtcgtgggattcctccatatggtgcgttcaaggaacaagtctcgatcggctttattttggcgactcccaaggtaacgtgatgagggcaaacttatccagttatgaaaatgccaaactttcacgagttttcaaatccggtcaacatcaacgtcactacgaacatgaacaacaaaatacaccaaacaatctggatccaaaggtaaaaaagcatggcggtatcttggatattgcccttttacctgacgacaaactgttattttcattttgcacagactcaaatttgaatcaactcgatttagccaataataatttcagtgtaaacaagggggggttcgcgctaacaagaagttcattattaacaaacagaagacatgtaataacagaaaacactaagggggagacacagagatgggatattgtttcatgcgaactcttgaacacttttagctcgtcagaaggttcctttgatgatatcgtaatgaaatacacatcaaaggagattttatcccactggtgtaccgtttccgttaaggtgggtatgctatttgtgaaaataaatccaaagtttttgaaaacagaaatttatgggtctgcactgaaagattatgagattgtgaacgatattgaagtcagcccggatgagaggtataatttgggtaaaatcgttatcaattcattttttaatgaattcatatcctacgaagttcaaaaggataaacttctgaggaagagcatctttagttcgaaaaagaaaaatttaaacagcccacttacactggatacagggtacaactcagaaccaaaaaagaataataaagacaaaaagagaaaatcgacttttaaactaggctcaattggaagcgtcagcgcctctgtaactcctccaaattcggcccctgcaacgccactaacaggggaaactatagctctagaagagcaaccgcttttgcatttcccaactgataaggcaatggatgattctttggagctagtccaacctttgcctgtgtctaaaaagccatattttagaactcaaagttctggctctctattgagtagaaaatttaaatcatttagatctacctctagtcgtgccacaagcgggctaaacactccagaggaacctaggggaaatctgatagacactacacacgtcatcaatgatgactcccccgtggcgcatacgcataataccgctcaaccgtccaaggatgcaacaccggaatctatattatggaatcatccttttaagcttgatcaaaaattatctaatatttcatcacaagaatcaccctataataacgttcataataaattgaaatcggctgaaaattcaagagcaaattccacactaacattagaagggaacgaaaagaaaaatcccgaatttatgccggatctgcttgaccaaattcaagaatcttacaaacaacagtttatgaatacttcttccattaaatatttgaccaaaagacttcccgtcaccaagataattaaggctagttcatgtcctataataaaagttagatcaattactttaattttggtccacctatggaaagaagggtcttgtggtggcagagtattattttcaacctttttaccaccgtctcgaattgataatgaaattgttaacggtggcaaggaaaattctaagataccagacgatgaagaagattttcaaactgtagatgacgataagttaggacagtatgagcaaattgatggtgagttggggaaccggttaaacagaaggcaaatttttgaacaactggaggaaaatttaccttactggttcgcgaaggctttatttagggatattaagacggtagaagagcaaccaaagctgaacttcttaatcatgccatggtctgccgttggtgcaagcgaaacaaatgatagtggccaaaacaaaaagaaagataccaatagtccagattcaacagaatcttccaccaatgacagcagcgatagtagtgtagggaatggtaacggtaccgtttctccttcaacacagcaacaattccataatatgctaaagtttggacgttcaaagacaaatgagcaagaactaaatcccacggatttacctaagatatctgaggccaatgtcaaactggttgcgcctgggatgatcagagtgaagaagatcaaactatacgttgctgataggttcgagacgaagacccctgaaatgaaagccaaaattgaaccctatatatggttagatctattatgcaagggccaagtgttggataatgacatgacgctaagcaccgttagaacactttactggaaatcacagggagacatagttcttgaatacagaagaaaagtacatagttcgccattggtacacgaagtcaatggaaacgaaggaaaatga

SEQ ID NO: 2306 - DNA, 3021 bp, Saccharomyces pastorianus
atggctgatagtactccaaaagcatcgtcgacttcggcgtttgttacggcgctgattttcaacggcatcgtcgctattatattcgtgtggctttttatattattgcggcccaaaaacagaagggtctacgagccgcggtcccttaaagacgtgcagaccatcccggaggaagaacggacagagcctgtgcccgccgggtacatggagtgggttcattacttgctctccaagccacattcgttcctgatccagcataccagcgtggacgggtactttctgctgcggtacatcgggatcgtcgggtcggtttcgtttgtggcgtgcgtgtgtattctgcccattctgctgcccgtgaacgcgaccaacggtaacaacatggagggtttcgatctgctttcgttttcgaacgtcacgaacaagaaccggttctacgcgcacgttttcctgtcgtggctctttttcgggctggtcatctacgttatctacaaggagctgtactactacgttgtattcagacatgcgatgcagaccacgccgctctacgacgggttgctttcctctcggacggtcatcatcaccgagctggataaggacattgcgcaggaaggtgagatgcagatgcgtttccccaaggcgtccaacgtggtgtttgcgtacgaactttcggacctggagaagctgtgccaggagagagccaagaacgcggccaagtacgaggccgcgttgaacaaggtcctgaacaagtgcatgaaaatgaccaccaacaagacgcaggagcagctggacaagctgtacaataacggcaccaagcccaaggacgacttggagacctacgttccacacaagaaacggcccaagcaccgtttgggcaagttgccgctctgtctgggcggcaaaaaagtcagcacgctttcctactctagtaagagggtcggcgaactgaacgaagaaatccacgaaaagcaggccgactgggccagtaacgacaggctccccgcgtgcttcatccagttcgactcccaattggaagcgcagaggtgtttccaatctgcggacgccattttgggcacgaagcattttggtaagcgcctcatcggttactcccccgaagacatcaattgggaggccatgagtctcacttccaaagagaggcactccaagaggactttggctaacgccattctggtcttgttgattatcttctgggccatccccgtcgccgtcgtcgggtgtatttccaacgttaactaccttaccgagaaagttcatttcttacgtttcatcaacaacatgcccgatgtcctgatgggtattatcaccggtttggcgccctctattgcgctggccatcctgatgtcgctggttccgcccatcatcatcaagctcgggaaactgagcggttgtgtcactgcgcaggactcagatttgtattgtcaggcctggtactacgcattccaagtcattcaagtctttttgatcaccaccgccacctcctccgcgtcctccaccgttgatgcgatcatcaagaatccaagctctgcgatgacgctactggcaagtaacctgcccaagtcgtccaatttctacatcacgtatttcctactgcaaggtttgacagtgccctctggtatacttttccaagtggtcaatttggtgttgagcaaaatattgggcagattccttgactctacccctagacagaaatggaaccgttacaacattctgggcacccccaaattgggtgtcatataccccaccatcgaggtccttgtgtgcatctacatttgttactcgatcatcgctcctattctgctgtttttcagtacctttaccatgattcttctatatgtggcgtacttgtacaacttgaactacgttctagggttttcgttcgatcttaagggtcgcaattacccaagagcccttttccagatctttgtcggtctctacctaagtgaaatatgtttgcttggtttgttcatcatggccaagacctggggtcctctggtcttggaagtggtctgcatcgtcgttaccgccctggctcacatccacatgaaaaggaaatttttgccattgattgacgtggtccccctgagcgccattagatacgcgagaggtgaatctggctacgcctacccctcctcggatttgggtgcccaagaagtgaaaaatattgctgatgaaatgaggaacgattacgagaacgatgacactcatggtattttgtcacccgctaccaaggatgacttgaaaaaggccaatctactacctgaggatgacaacaattcagagaacagtgctccaagtaatccgttcgaatctggttctgaagaaagaagtgaacacaactcatcttctaggttcaacggggaagacgactccgtcaacaagaaaaagaacgatcccatcatcaaaaagtcaaacactatttcttcttccaccaaagacaaggataataacgggatcggaaatgagtcgacttttgttccagaagacgaaaaattccgtaagttccaatacagtgatgtggaggctctaagaaacaaccgtccatatgacgacgacgatcaaagccgtcatggacccgaaggggctgtgccagtcaatgcagatgcgggtgttatttacggcaacgcaggtgccgtgatgaaggagcctcaggcattcccaccagatgtcttggaaactaacacatggtcgcagagaattgcactatttttcaatccaaggaagtcgtatccgtttgacgaggtcagaacgagactcccacatgttttcaacactagtatcgaatacgatgaagagtatttgaacaccgcatacaccgatccttgtgttagagaaaaggatcctattgtgtggtgttgcaaggacccattaggtgtttccaagcaacagattcaagaagctggatccgaaggcttggatgtgagagacgactttacaagatatgatgaaaaaggtaaggccatgttcacttacaatcctcctgactatgagtttgaagccaagaagtaa

SEQ ID NO: 2307 - DNA, 867 bp, Saccharomyces pastorianus
atggcactttcatcgaactggcaagcattgttagcctcaaaaggcggccctgcttctggtaaaaagacgaagcagtcgaacaggaagatcacagataatagtaaaagtagcaagatagtaaaggttagcatcacccaagatgttcgcccgaaacgtaaaaattccagcaaaattatggatatggtttataacatgaacaaggaaatcagcaagcatgaaaaggaaaagctcgaggggaaattatttgaattcaacccttccaaggaaaagacagatgacagtgttgaagaaatagtacaggttggtgtctcagaaagcactcgtgctggtaacaacaagagtaaggcaattgggaagtacgttgcgatggattgtgaatttgtaggtgtagggcccgaaggtgaagaatctgctttggccagaatatcaatcgtaaattatttcggacatgttgttctcgatgagtttgttaaaccaagagagaaggttgtggaatggagaacttgggttagcggtattaagccagaacatatgaaaaatgcgataacttttaaagatgctcaaaagaggactgcggatattttggaaggtaggatcctagtaggacacgctttgaagcatgatcttgaagctttgatgctatcccatccaaaagcaatgcttagagacacttcaagacacctcccattcagacaagtctatgctaagggcaagaccccaagcctgaaaaaattaaccaaggaagttttgaaaatcgtcattcaagaaggggagcactcttctgttgaggatgcaagggccaccatgctattatataaaaaggaaaaaaaagaatttgaaaagattcatagaaacgctttcaattaa

SEQ ID NO: 2308 - DNA, 207 bp, Saccharomyces pastorianus
atgggtgctgcttatcatgtcatgggaaaggctatccctccacatcaattagccattggaacattaggcctgctaagtttattggttgtcccaaatcctttcaaaagtgcaaaaccgaaaacagtcgacattaaaactggcaacaaggaagaagaacagttcattgaaaactacttgaagcaacatctggaaaagcaagacgcttga

SEQ ID NO: 2309 - DNA, 876 bp, Saccharomyces pastorianus
atgtcttctatctacaaggccctcgcaggaaagagcaaagacaataaatcagaaaagaagcaaggtaatgtcaagcaattcatgaacaagcaaagaaccctactgatctccagtagaggtgtcaactacagacatcgtcatttaattcaagatttgagtggattattgcctcactctagaaaggagcctaaactggacactaaaaaggatcttcagcagttaaatgaaatcgctgagctgtataactgtaacaacgttctattcttcgaggctagaaagcaccaagatttgtatctatggttatcgaaaccaccaaacggtcccaccattaaattctacattcaaaatttgcataccatggatgaattgaacttcacaggtaactgtttaaagggttctcgcccagtattatcttttgatcaccgtttcgaatcttctccacactatcaattgattaaagagttactaatgcataactttggtgtgccaccaactgccagaaagtgcaagcccttcatcgaccacgtaatgtctttcagtatcgtggatgataagatatgggtaagaacatatgaaatctttcatagtaccaagaataaagacgaatacgaagatggtgaggaagacatatcgttagtggaaattgggccaagatttgtcatgactgtaattctgattttggaaggctcatttggtggtccaaaaatttatgagaataaacaatacgtctcaccaaacttcgttagagctcaaataaaacagcaagctgctacggacgcaaagtctagagccgacgctgctgtggagagaaagattaagagaagagagaacgtccttgcagcagatcctttatccaatgatgccttgttcaaataa

SEQ ID NO: 2310 - DNA, 2391 bp, Saccharomyces pastorianus
atgtccgagaagatagaggaggagatcctggaactaatcaataggtccaacttcaaacaatgctatgccagactgggacaattgcagaaacaatttcctaacgcggtatacttcaagatcctagagacatatgccaagttcaagcaatcgcccggtaaattcgactataagatactattggatgaaccgtacgggttgaaaggaaccacaattactggcgattctcgctccttggagtttctacacaatttcttcgtggaattagggagatacgatgaagccttgcatgtctatgaacgagggaacttcaagttccccagctacgaattgtcgtaccattggttcacgaaggctttggaagattcgaattttaatcaaatgagcaaggcgtctttacaactagccaagtacagtgacagtgggaacctgcccaagagggcatattatttttggaatgccatctcgattttagctgtgatgaggttccaagagagcactgtttctgagactaaaaagattgtgctggctaagcttgcacgtcaatctttgttagacctgaaaccgtttgaaaacgttcaagagatcattgtttattgtctagtattggacgagttgttccttgaatccaaagaaatctcggaagaaattgtcgagatcacccttataactttcgatacttcagtaaatttgtatttgaaaaactttatcttgaagcacgtcaagttattggattctccacagaagctttttgaagtttgctcaaaacttatcgaaaaaggtcttgatgattacgagttgatcataaacttaatcgaggctgcccataaactttccaaaccacaagaggaagtacagcactggcttgacggaaatttaggcgattcaaggaatacgagattggctcgtttgaagcttgatatggtatacacgaagtctgtttcggaaccatctttgtcttattacctttcgaagtaccataataaaccttgctgttcggtcgacctcaatcactacacagaccacatagacagagatatgctcaaaagcgttatgaccaagtatgatcgagacgatagagacttgattcatcattgcaatactttggaaatgggactaattgaaaataacccgatctgcgaatataacaggttcaaagaaaccttaaccaaaaagccaataaccgattattcatcctgttctacttttatattagaaataatcaaaggcgtatgtaaagaaactagtccaaacctgaaggatatacttttatgtatatcaatgttggaaaactaccaaaccaaggatcctcataactttgataccgcgtgctggctaattgttctatacatgtatctaggcttagtccccgacgctcatttccatttctcaaacttgaagatcaaaaacgttcaaacggattccatggattatttacaattcgcgaggttttctacttcatttcccaataaacaaagcgatttttactccaaaacttatcacgaacacaataatttatatgacgtatcgctagccaacttacctagatatatccagatagcatttgaaagatcttcgtatagtaaaatcttgggtatgttcgagatgaaggataaactaatgagatcttataccagatggatgaaaacgttagaaaacctacaattctcacgtttatgcaatgacaaacgcggaaatctgttacaaaaaatgcacgaagattggagatctttagaaatgacgggaaatatatcattttctgataatagagatttgtccatactagataaagatttcgttcaatttttcggttacgataaaatcctggaatttgcaaatttaaatgaaacctcaattttgttaagtttggtaagggaacttatcatcgaagctctgccaagcggtgagaaaatggaacaaataagcgaatttttagagaaactttcatcagaaaaccttaatgagctgttggctaataatttcaccgaagtcgaatcggtatcattccaaatcttttatgaaatttacgaaaatgacggtaaagagctgcatactttgatttcgaagttaatgaagattcctctaaatgcaaaacaaaactggaagatatctcatatttacctcaccaaaattgcaactctaaagacacttgacaatttgaaaaggatcaaaaataaagaaactcaaaaattagttaagaactcccttaaaaagctaagaggatgctgtgatactctttttaaggaatattctgatgcaataagcctagcattcgaagaactacaaaagggcgaacccatgaaattgctaaaagaacttgattttaaacttgaaagtcctaaaaacattaaaaattcattactgaacatacaaaagaatgtacggaatttataa

SEQ ID NO: 2311 - DNA, 3903 bp, Saccharomyces pastorianus
atggtacagccgattcatggcgatgtggccactggtttaaccgaaaatagactttcgttctctaggatccctagaataagcctccatgtaagggatttgtcgatcgttgcatctaagagtaacacgacgctggtcaactcattttcaatggacttgcccagcgggtcggtcatggcagttatgggtggttcagggtcagggaagaccacgctgttgaatgtgctggcatccaagattagtggtggtttaaggcatgagggttctatacggtatgtcttggaagactctgagtttggatctggctctgaggagcccttagatatgacggctaaaaacagccgtttggatggcgaagaccatcccattcaaaagcatgtaataatggcttacttaccacaacaagacgtgctctctccacggttgacatgtagggaaacccttaactttgcagctgatttgaaattgaactcttctaccaggactaagaagttgatggttgaacagttgattgaggagttagggttaagagattgtgctgatactttagtgggggataactcacacagaggtctctccggtggagagaagagaagattaagtatcggtactcaaatgatttcgaacccctccatcatgttcttggacgaacccactactggactggatgcatattctgcttttttggtcattaagaccttgaaaaaattagcaaaggaagatggcaggacatttatcatgtccatccatcagccaagatcagatattttgtttttactgagccaggtttgcattttatcgaagggcaatgtgatatactgtgacaaaatggataagaccatcccttattttgaatctattggttacagtgtgccgcagttggtgaatcctgcggattatttcattgatttgtcaagtgttgattcaagatctgataaagaggaatgcactacgcaaaagaggctggattcgttgatcgatcattggcatgattatgaaaaaaaccatttgcaactgcagacggaatcttgtatagataacgctgtcgaaattcacatccaaaatatgaccaccaggttaccattttggaaacaagttacggttttgacaagacgaaattttaagttgaacttttcagattatgtgactcttatatccactttcgcagaacctgtaatcattgctacagtttgtggctggatttactacaaacccgacaagacctccgtcggcgggttaaggacaattaccgcttgtctctacgcatcgaccatattacagtgctacttatatctgctgtttgatacgtatcgactttgtgagcaggatatcgcgttgtatgatcgtgaaagggcagaaggttcagtaacaccgctagcattcatcgtcgctagaaaattttctctttttctctcagatgatgttgctatgatcatgatctttgtgagtataacgtatttcatgtttgggctcgaagcaaatgcgagcaaattcttttatcagtttgccatcgtgtttctgtgccaattatcttgttctgggttgtctatgttatctgtggctgtttcaagagatttttctaaagcttctttggtgggtaatttgacatttactgtattatctatggggtgtggttttttcgttaacgctaaggtcatgccagtctatgttcgttggattaagtatattgctttcacgtggtattcatttggtactctgatgtcaagcacttttacggattcctattgtacctcagataatcttgatgaatgcttaggcaaccagattttaaaggcttacgggttccctaggaattggatcactgtacctgcagttattttattttgttggtcaatagggtattttgtggtaggagcaattatcctatatttacacaagattgatatcactttacaaaatgaagtaaagtcgaaaggaaagaaaattagcaagaagtcaccaagcgacgtgaaacccgaaatccaattgctagatgatattcaccatcaaaaggacttggaagcagaaaaaaaagatagaaaaaaatccattaccgtaaatctacaggacatagacctgcgagtaaatttctttaaccctttcacaaattggaaggaaagcaaattccaccacgaaaccaaagaaatcttgcaatcagtcaatgccgttttcaaacctgggatgattaatgcgattatggggccatcagggtcaggaaaatcctcattgttgaatttaatctctggaagattaaagtcctctctttttgctaagtttgccacttcaggttcaataatgttcaatgatattcaagtttcagagctcatgttcaagaacgtctgctcatatgtttcacaagatgatgaccatcttttggccacattaactgttaaggaaacgcttaaatatgcagctgcgctaaggttgcatcatttgaatgaggcagaacggatggaaagaaccgataatttgataagatccctaggtttaaagcactgtgaaaacaacatcattggtaatgagtttgttaagggtattagtggtggtgaaaagagaagggtcacgatgggtgttcaattactaaatgatccgccaatcttgttattagatgaaccaacttcagggctagatagctttacatccgccactatattggaaattctggagaatctgtgtacggaacacgggaagacagttatcatcactatccatcaaccaagatcggaattattcaaacgatttggtaatgttttgttgttagccaaatcaggtagaactgcattcaatgggtcacccgatgaaatgattacttattttgctgacttgggttttgattgcccatcttttaccaatgtggcagattttttccttgatctaatttcagttaatactcaaaatgaactgaatgaacaaagctcgaaatcaagggtagaagaaatactagcagcttggaaagagaatttagagaatgaaagtatttcatcatctcccatatctgaaaagcagcattactctcaagaatcatttttaacagaatatagcgagtttgtgaggaggccagctaatctgatgttagcatacatagttaatgtcaggaggcaatttactacgaccagaagaagttttgattctttgatggcacgtatcgcacaaattccagggttgggtgttatctttgcgttgttttttgctccagtcaagcataactatactagtatcaataatcgcttggggttagcacaagagtccacagcactttactttgtgggtatgctggggaacctggcatgttatccaactgagagagattatttttatgaagaatacaatgataacgtttacggtatagcaccctttttcttagcttatatgacattagagctaccactatccttattagcttcggttttatatgcagtgtttacagtgctagcatgtggattaccaagaacagcaggaaatttctttgtgacagtttattgttcttttgttgttaccacttgcggtgaagctttgggtataatgacaaatacgtttttcgaaaggccaggatttgttgttaactgtatttccattattttatccattggtacacagatgtcaggattaatgtcactgggaatgtcgagagtattgaaaggtttcaactatttaaaccctgtaggatatacctctatgatcattataaactatgcatttccgaggaacttgaagctaacttgcgaagatggcggaaaaaaccctgatggtacttgtgaatttggtaccgggcatgatgtattggtttcttatggattagaaagaaatactcaaaaatacttggggattattgtatgtgtagccattatataccgtcttattgcgtttttcattttgaaagccaaattagaatggatgaagtggtaa

SEQ ID NO: 2312 - DNA, 969 bp, Saccharomyces pastorianus
atgtctatggaaccaccagtagggcttacggctatgcccgttaccaaattagccatgatcacgacgcttgtggtgcccttgatggcctcgattgcaaattacaagcacatatttctattgcagtatgaccccttcctacagacgtaccatcaatactaccgtctgttcatattccagttctgcgccattaacgaatcagacgcaatcttactggcgctggtctggtatctgtttagacacctggaacggctattagggtcccataagtacttgacgttaattgtactatcatgggcgtacaccacgtttgtgatctgggggttgaacctgatctggaactcctttttaggacagtaccagtggctacagtggaacagttttactacgggttcgttgcccatcgtattgagcctagtgcacttttacaaagaatacactcctcaaatttacgaatggaacataagactactgggtcctcgtggagggtcgacaagtaacaccgataataaacaagaggaaaagggcgctgtgcagtggaaaatcaacgaccagtttcttttaaacggacttgtccttttgctactactgaatcaggggattgcagggatactatgcgggttcataagctgggtatgtggtattttcatcgataaaggattgcttccaggactagaccattggcgagtaccgtttgtatcccactggatctcccaaggcccacctaccagggccagcgtcgccatggctgccaatgcggctacgagtactgcagcagcaagagccagcgcagatgctgccattgccatcgcaggaagcagtaacacaaatggcactggtcctgtaagtatgccactacgtggttcaagcgcaactcccacggatacttccaacgctggtgatgacgaaccaggtgccgatgagcccgcaagaccattgggagttcaattcctggacactttcagaagatga

SEQ ID NO: 2313 - DNA, 1356 bp, Saccharomyces pastorianus
atgagtaggaatcaggacgtgttccctgtgttggacctagaggagctggttatatgtctacaaagctgtgattttgcgctggccacgcaggaaaacattgctaggccgacttcagactatatggtaactctttacaagcagatcattgaaaacttcatgggcatttctgtggaatcactgttgaatagcagcaaccaggaaacaggcgagaattacttgcaggacgagaatgagaatatttactctgacacattgaatgtgctggtgctgaataagatttgctttaagttctttgagaatattggtgtccaggatttcaatatgactgatttgtataagcctgagtcacagagaacccagcgtctcctcagtgcggtggtgaattacgctcgcttcagggaagaacgaatgtttgattgtaattcctttatcctccaaatggaatctttattagggcagcttcgatccaaattcgacgattataacttaatccaacaacaactgaaacagtatgaggatttaggcggggcaaatattcctgatggagaagagctgcaaaaattagaagaacaaaacaaagacctggagattcagttgaaaaaattgaccaagattcaagaaacgttatccatagattacaatgattacaagatctctaagcaaattatattcaaagagctggaaacgctgagcttccaaatagtagagctggagtccagccgagataaactgattaagatttccaatacagacaccaaagagttgactgaagggatcaaagagttgagtgatctgctaaaacaaaggaaaaagaccttgaacgatttgactgtgcagcaaaagagcttgcaggacacagtggcgacgttcgaaaccataatcagcgagctttatgacgtgctgagaataatttctagcgaagtgcaagaatctaatcgaacggaaacagaactgatgggattgaagcaaaacttaatcaacaataaactgaaactgttgaacgtgttggagactgggatcttatacaagttagagattttacaagagcaactggatttacaactaaaaaacttggagaaattatcaaaggatactgaagacgaatcgcgattgaacgattccaagttaaacgaaatgcaaatcaaatacgaaaatgaaatcaaacccaagattgacaagacagatgttttcattcaagatgaactaatcaatggtaaaattaataaattaaatgatgaaattaaacaattacaaaaaaactttgaaatggaaattaaagagattgaaattgagtattctttgttatctggtcatattaataaatacatgaatgaaatgcttggatatatgcagtag

SEQ ID NO: 2314 - DNA, 546 bp, Saccharomyces pastorianus
atgagcagcatcccagtcggcgcagatcccggatcgtgcggtgccaatttcaagaacgaccgtaaacgtcgggacaagatcaacgaccgcatccaagagttactaagcatcataccgagggacttcttcagggactactacggaaactccggcagcaacgatacgctgagcgagtccacgccgggggctcttggactatccagtaagaccaagggaacgggaaccaaggacggcaaaccaaacaagggccagatcctcacacagacggtggagtacatctcgcacctgcagagccaggtagacctgcaaaaccgagaggaggtggaactgatgatgaaggtttcgcagctggccaagcagacgggcaccatcgtcaacgacattaacctggagaacaccagcgctgaagtcgcactgtccaggatcggcgtagggcccctggccgcgacctcctcctcttcgaacgacgactcagcaaagcccccagccaataaactgagctcattcgagtacggagggtacggtgagtatagcgatggcacttag

SEQ ID NO: 2315 - DNA, 1152 bp, Saccharomyces pastorianus
atgagcacacacgattggaaggtatcggtaactacattcaattgtggtaaagagttccctgttgaaaattcaaaagctatcgttaagcaattgcttttcccctacgatgatggcatttcacagttagaactgcaggatatttacgttttggggttccaagaactagtgccaatatggcaaggttcgttccccgctgttaaccgtgatttaattgacaagatcacggccactgcaattgattgtttaaatgagaaagttataggtatccgggggggtgaacagtattcgtgtttaggggtgaatagccttggagccatcaccatgataatcctatacaacaataataagctgaaggtgagagaagatgttttgaagagaaacggcaagtgtggttggtttagtacacatttgaaaggtggtactttgattagctttaacatgaaacacaatggcgatgaaaattgggaaagatttagctttatttgtgttcatttaaatgcgaacgaaggtgcaaataataggaaccagagaataaatgactacaaacggatcatgagcgaagtgtgcgattccgcaattgttaagagtgaccacttcttcttcttaggtgatttgaattttagagttactagtgcttatgattcagccactgattactcttctgcgacaacattgaggcgcctattggaaaacgacgagttgaatctgctacgtaagaaagaggatgaaccgttgtgtaggggctttcacgaattggagataaagttcccaccgactttcaagtttaaagtgttcgaaaaggaaacgtataacaccaaaagaatcccatcatggtgcgaccgaattctatataaaacgtatgcgacacctaggttagaacaaggaggtacatatcattctgtaccaagatccaatgctctgatattcagcgatcatcagcctgtcaatcttacggtgaaattaccgaggtctactggggtaacagaaccttcattgttacccatcgaaaggtaccgtttgggatggagttctaatctagttggaaaaattggcgatgttgtcattggatactgtggttggctaataactaagaacgcacattattggatattgggttctgtattgctatatctactgataagaatcctctag

SEQ ID NO: 2316 - DNA, 1074 bp, Saccharomyces pastorianus
atggcattggaaagagaattattggttgcaactcaagctgtacgaaaggcgtctttattgactaagagaattcaatctgaagtgatttctcacaaggactccactactattaccaagagtgataattctccagtaaccacaggtgattatgctgcacaaacgatcatcataaatgctatcaagagcaatttccctgatgataaggtggttggtgaagaatcctcatcaggattgagcgacgcattcgtctcaggaattttaaacgaaataaaagccaatgacgaagtttataacaagaattataaaaaggatgattttctgtttacaaacgatcagtttccgctaaaatctttggaggacgtcaggcaaatcatcgatttcggcaattacgaaggtggtagaaaaggaagattttggtgtttggatcctattgacggaaccaaggggtttttaagaggcgaacagtttgcagtatgtctggccttaattgtggacggtgttgttcagcttggttgtattggatgccccaacttagttttaagttcttatgggggccaagatttgaaaggccatgagtcatttggttacatcttccgtgctgtcagaggtttaggtgccttctactctccatcttcagatgctgagtcatggaccaaaatctacgttagacatttgaaagacaccaaagacatgattactttagaaggtgtggaaaagggacactcttcacatgatgaacagtctgctatcaagagtaagttaaacatttcccagtctttgcatttggattcgcaagccaagtactgtttattagccttgggcttggctgacgtatacttgcgtttgcccatcaagctttcttatcaagaaaaaatctgggaccatgctgcaggcaacgttattgtccacgaagctggtggtatccatacagacgctatggagaatgttcccctggacttcggtaatggtagaaccctggctactaagggtgttatagcgtcaagtgggccacgtgagttgcacgacttggttgtatctacatcgagtgctgttattcaatctagaaaagcgtaa

SEQ ID NO: 2317 - DNA, 1476 bp, Saccharomyces pastorianus
atgattagtggggtgctggtatactcgtcacgaggcgagctaatattgaataagttctttaagaactcgttgaagcggtccatatccgatatattccgtgtacaagtgatcaacaatctggatgtcagatcgcccgtgttgacgcttggatctactacattccaccacattcggtcgaggcgtggggacaatttgtggttggtaactattacgaggagcaacgctaacagtgcggctatctgggagttcttatacaagctcgattccgtgatgaatgcgtaccgattggatagagaggaggcattaaaggaggagtttatgatagtgcacgagatgcttgatatcatgttaggtgggaacgggattcctattgacacggaattgaactctgtgatagctcagatgtctgtgaaacccgtgagaaacttggtcggattgttggagagtcctgatagcattgatgtgctgtcttcctcgtcgtctcccggttccgtggggggtgaattacatttccccaaatttctgaagaagagaagtagtagtttcctaggccagggagattcgcatcccgacttctccgatggtaacaagatcgcctggaggcccaagggaataatacacaagaaagatgaagtgtttttgtatgtcaatgagagaatgaacatactggtctctagagacggatccattttgaaatcatatgttgacgggaccatagatattaccacgcatctgagtgggaccccagtctgcagatttggattgaatgattctttgggaatgcaatccgaagaccagaaaaactggctatcacaacaggaccaacattctcataacgattttgaaaacaaaaattgttttcctaaggctgctgcaggcagtgttttattggaggattgtaagttccacgaatgcgtgtcaattgataaattcaacaaaaaccatattatcgaattcgtcccaccagacggttcaatggaattgatgaagtaccacgtacgagataacataaacttgccgttcaagattacacccattgtagcgcattctacaagagataacgaggttgattacaggataaccttgaaatcactattcccggggaaactctccgctaaggatgtgatattacatatccctgtgccaccaagcaccgtagattgtaaaataagcgtttctaatggtaattgtaaatttgtcccagaggaaaatgcaatgatttggagattcaacaagttcaatgggttgacggaaaatactttgagtgcggttactgtatctacaagtgacaccacccaattgagcctgcaacaatggacgagacctccaatgtctttggatttcgaagtgatgatgtttagtaattcagggctggtcgtacgctattttactatctcttccagagatagtaagcatcgtgctgtaaagtggatcaaatatatatcaaaatcaggttcttacgaagttagatactaa

SEQ ID NO: 2318 - DNA, 1476 bp, Saccharomyces pastorianus
atgattagtggtgtgctggtatactcatcgagaggtgaacttgtcttgaacaagttcttcaagaactcgttgaagcggtccatatccgatatcttccgagtacaagtgatcaataatctagatgttagatcgcctgttttgacactgggctcaactactttccatcacatcaggtcgaggcatggtgacaatttgtggttggtaaccattacgagaagcaacgctaatagtgcggcgatctgggagttcttatataagcttgatgcagtgatgaatgcttatcgattggatagagaggaggccttgaaggaagaattcatgattgtgcatgagatgctggatataatgttgggtggaaatgggataccaattgacactgaattgaactctgttatagcgcagatgtctgtgaaacccgttagaaatatgggcggattgttagatagtcccgatggaaatgatgtattatcttcctcttcatctcctacttcttcagcaggagaactacattttcccaaatttttgacaaaaagaagcagtagtttcctgggtcaaggagactccacttctgatttctatgataacaataagatcacttggaggcccaaggggataatacacaagaaggatgaagttttcttgtatgtcaatgagaggataaacattctggtatctagggatggttctatcttgaaatcatacgttgatggcaccatagatatcaccacacacttgagtgggacccctatttgtagatttggattgaatgattctttgggaatgcagtccgaagacgagaagaaatggttagcacaacagcagcgtcactctcgcagcgattttggaaacaagaacttcattcccaaagctgctgccggtagtgttttgttggaagattgcaagtttcacgaatgtgtctcacttgacaaatttaacagaaatcatatcattgaattcgtcccaccagacggttcgatggaattgatgaaatatcatgtacgagataacataaacctgccgttcaaggttacacctatagttacacattctacaagagataacgagattgattacaggataacattgaagtctttatttcctggaaaactttccgccaaggatgtggtactacatatacccgttccaccaagcactgtggattgtaagataagtgtctctaatggccactgtaagtttgtgccagaagaaaatgcaatgatttggaggttcaacaagtacaatgggttgacggaaaacactttaagtgcagttactgtgtccacaagtgatactactcaattgaatcttcaacaatggacaagacctccaatatccctggaattcgaggtcatgatgttcagtaattctggcttagtcgtacgatactttaccatttctggaaaagacagtaagcatcgtgctgtaaaatggattaaatatatatcgaaagccggttcttacgaggtgaggtactag

SEQ ID NO: 2319 - DNA, 1491 bp, Saccharomyces pastorianus
atgtcaatgagtaatattgttgtttttggaggggactcgcaccccgagttagttactaagatctgtgaaaatttggacattcacccatcgaaagtagaattagggaagttttctaatggggaaacgaacattgctcttcgcgaatctgttcgtgaaaaggatgtatatatcatccagagtggttgtggccaggtgaacgacacgttcatgcagttgctgattttaatcagtgcctgcaagtccgcttctgcctcgagggttacagccgtaatgccatatctctgctactcgagacagccagatattccatatactgccaagggtgctcccataatttccaagcctaaagaaaactatacttttgaatcgcatccaggcacacccgtgtcatcttctttaatgacgcaaagaccaggtgctgagagctcgttgaagagtttggatagtgcaatacgatcaactatcaacttagaaaatcctcaacctatcagaacaccaaacagcagtgctacggcgaataacaatttcgacatcaagaagacgctttctttttcaagaattcctatgattcccggtggtaagttacaaaatacaagcaatagcacggacgctggtgaattgttcaacgctcaaaatgcaggctataagctatgggtagtacaagccggtactttgattgctcatttgttgagtgctgcaggtgctgaccatgtgatcacaatggatttgcacgatccacagttccctgggttttttgacattccagtggataatctctactgtaaacccattgcacaaaactacatccagcatcgcattccagattatcaggatgctgtgatcgtttctccagatgctggtggtgcaaagagagctacggctattgcagacgccttggaattgtccttcgccctaattcataaagaaagaagatctcagttattgaagggccctccagatgcgacgttaacctctggtggttcgttaccagtatctccaaggccattagttactactttggtttcctcccaaaatactacttctgcaggtgccactggggttgcggcccttgaaatgaagaaaacaacttcaacatcttccacctcgtcgcaatcttctaattcgtccaagttcgttcaaactaccatgcttgttggcgatgttagaaacaaggtgtgtattatagtcgacgacttggtggatacttcatacactattacaagagctgcgaaattgttgaaggatcaaggatctaccaaagtttatgccttaataacgcacggtgttttttccggtgatgcgctagaaagaatcggccaaagtagtatagataagttgatcatttctaacacggttcctcaagatagaacactacagtacctaggtaaggacagagtggatgttattgatgtctcctgcataatcggtgaagcaattagaagaatccataacggtgaatccatttctatgttgttcgagcatggatggtag

SEQ ID NO: 2320 - DNA, 2151 bp, Saccharomyces pastorianus
atgtcgttattgtcgttaaggtccaggtcacgatctggcgcccctcattggctgtacatgttcctgtatcacatcttcaccattcccaagatatactcgctcccgttggtctctaggtcacacgggtttggtacaagagacgctgtcgactccggccctagccccggcggcgaggctggcgtgaccacgtactacatcatctctgtcatcctggttttgctgggtggggtgtttgccgggctgacgctggcgctgatgggccaggacgaagtgtacctgaaagtcatcagcacgtccggctcgcactcggagaagaagctggccaaccgggtgctcaacttgatatcgaagggcaagcactgggtcctggtcacgctgcttctctctaacgtcatcaccaatgaaaccctgcctattgttctggacaggtgtcttgggggtggctggcaagctgttttcctgtccacgattctgattgtcatttttggtgagatcatcccacagagtgtctgtgtcaagtacgggctgcaagtcggcgccttcttctgtcccttcgttctcgtcctgatgtacgcgatgtatccagtcgcgtacccgattgccaccttgctggactacatgctaggtgaggaccatggtaccatgtacaaaaagtccgggttgaaaactttggtcactttgcacagaaccatgggtgtggaacggttgacccaggacgaagtcaccatcatctctgctgttttggacctgaaggaaaaaaaagtcgaggaaatcatgaccccgattgaaaacgtcttcacgatgagtgctgacaccatcctggacgacacaactgtcgaaaagattttcaactcgggcttttccagaatcccgattttcttgcccaatgaaccaaacaacttcatcggaatgctactggtccgcgtccttatctcctacgatcctgatgattgtctgcccatctcccatttccccctggccacattgcccgaaacttctccaaagacatcttgcctgaatattttgaactatttccaggagggaaaagcccacatgtgtgtcgttagcaaagaaccaggttcctctcatggcgccattggtgttttgactttggaagatgtcatcgaggaattgatcggcgaagaaattgtagacgagtccgatgtctttgtggacatgcatcagcacatcatgaggcaacaaccgggccccttaagcaaaagacacatcacctcttatttgcatcatttgtacaccaactctcataaggaccatcgcaatgctgaccagatagacgagtcttcccctcttttatctccatctacttctaaccacccaaatgaacaccaacaattgtcttcggacaatagtaaacctgggaatcgaaaggtactcaatggcgatgtagataagcccaatccagccctgaatgccacgtcaagattggctttatcatccccgaccccacaaccaacggaacatagcgtcatcataccttcgaacctagcgtccaatccgctgaatatcaataaatccttcgtcaccatcaaaaagccttccaatgttccgaccattatcaccaccctaactccccgccccagcaaagaacagaacacaccacctctctccagcgataagtcactctccaccgaagaaaaccaactgttaagtgaacatgccgaactatctcgtcaagctatcctccatactcaaaagtcaggcgaaccaaccagagtcaccacgtcgacaaacactacgagaaacagtcccgatagcataacaattccgaattcgaattcgggtgcagaccatctcaacgaaaaccaaaacgtaacgatctcgtcctcttaccaaaacactaaaaacggtattgtggaatcagtgatcacagttaagggtgttccgaagacaatcattggtcccgctaaggactgggacgaatctagaagcgaacacgataattaccgttctgatcgagaaaattcaaatttgactgatgacagagacagttcaagttcagaaacgagtttattttccagtattaagaataaattcaagaacgagaataacaacaacgaccgttccaattacgtgagttcaagaggttccaatttcgaagctaacggatcttcgtctgccatgaaaaggtaa

SEQ ID NO: 2321 - DNA, 1320 bp, Saccharomyces pastorianus
atgcttgctctcagacggttaacaagatacacattcctcaagcgaacgcatccggtgttatctgctcatcgtgcatataaatttttccctttaagttccacttgctcaagaagaacatttcagatacaactgcgctcaaagatgactgctcatatcaaccacaaatcgcacaacggtaaccaagatgaccatccgttcaaaagatcagactctgcggtgtcgattatgcatttgaaacgtgagcctttcaagatcacagtgattggttccggtaactgggggaccaccatcgccaaagttattgcagaaaacacagagctgcattctcatattttcaacccggaagtgagaatgtgggtgtttgatgagaaaatcggtgacgaaaatctaacggatatcataaatacaagacatcaaaacgtcaaatatctaccaaatatcgacctgccccacaacttggtggctgatcccgatcttttgcattccatcaagggtgctgatatccttgtcttcaacatccctcatcaattcttacctaatatagtcaaacagctacaaggccacgtggcccctcacgtaagagccatctcgtgtctcaaagggttcgaactgggctccaagggtgttcagttgctgtcctcctacgtcaccgacgagttaggagtccaatgtggtgcattatccggcgccaacctagcccccgaagtggccaaggaacactggtccgaaaccaccgtggcctaccaactgccaaaggactaccaaggtgaaggcaaggacgtagaccacaaggttctaaaactactgttccacagaccttacttccacgtcaacgtcatcgacgatgttgctggtatctccattgcaggtgctttgaaaaacgtcgtagcactggcctgcgggttcgtagaaggcatgggatggggtaacaacgcctccgctgccatccagagactgggtctgggcgagatcatcaagttcgggagaatgttcttcccggaatccaaggtcgagacctactaccaggagtccgctggtgtggctgatctaatcaccacatgttcaggcggcagaaacgtcaaggtcgctacgtacatggccaagaccggcaagtccgccctggaagcagaaaaggaactgctaaacggccagtccgcccaggggatcatcacatgcagagaagtccacgagtggctgcaaacgtgtgagttgacccaagaatacccactgttcgaggcggtgtaccagatagtttacaacaacgtccgcatggaagacctaccggaaatgattgaagaactagacatcgaggacaaatag

SEQ ID NO: 2322 - DNA, 1263 bp, Saccharomyces pastorianus
atgtctaaaggaaaggtttgtttggcttactctggtggtttggatacctccatcattttggcttggttgctggatgaaggctacgaagttgtggctttcatggctaacttgggccaagaagaagattttgatgccgctagagaaaaggctttgaagatcggtgcttgtaagtttgttagtgtggactgtcgtgaagaattcgtcaaggacattttgttccctgctgtgcaggtcaatgctgtgtacgaagacgtttatttattgggtacttctttggctagaccggttattgccaaggcccaaatcgatgttgctaagcaagaaggctgtttcgccgtttctcacggatgtactggtaaaggtaatgaccagatcagattcgaactatctttctacgctttgaagccagatgtcgtgtgtattactccatggagattgccagaatttttcgaaagatttgccggtagaaaggacttgttggactacgctgcccaaaagggtatcccagtcacccaaacaaagtccaagccatggtccactgacgaaaacgaagctcatatctcttacgaagccggtatcttggaagacccagataccaccccaccaaaggacatgtggaagttgaccgtggacccaatggatgctccagaccaaccacaagatttgactatcgacttcgagcgtggtctaccagttaagttgacctacacagacaacaaaacctccaaggaaacctctgtgaccaagcctttggacgtcttcttggcagcatccaatttggccagagccaacggtgtcggtagaatcgatatcgtcgaagatcgttacatcaacttgaaatccagaggttgttacgaacaggccccattgaccgttttgagaagagcccacgttgatttggaaggtttgaccttggacagagaagttcgtcaattgagagactccttcgttacaccaaactactctaggttgatatacaacggttcctacttcaccccagaatgtgaatacatcagatccatgatccaaccttcccaaaatagtgtcaacggtaccgttagagtcagactatataagggtagcgtcagcatcttgggtagatctaccaagactgaaaagttgtacgacccaactgaatcatctatggatgaattgaccgggttcttgcctactgacaccactggtttcatcgccattcaagccatcagaattaagaagtacggtgaggccaaaaaatctagaagtgaagaattgactttgtaa

SEQ ID NO: 2323 - DNA, 2133 bp, Saccharomyces pastorianus
atgaatcagtatttcgcggatcatgatgctcctttgagcatgctttctgtaaaaacagaatattttcctcaattgactgaaaaagagcaaaaatatgcacatttcatgtcaaaggcatcccacgcaggttcaagggtggtgatgagacaagtctctcatgaaactgaaccgatctttgacctagtccttgctattcacgcaaacctaagtggtcagtacccagtggacgatagtactgaaaagcaacaaacggaattctatctagaatacgtatctcaatttttatccaatttgggtaattacaaatcctttggtgacagtaaattcattcctcgttgtggagtggaattcttccaaaaactgttgaagttggcgaaaattgacccttcttcatctccgtcgaccttgtcgcctgcagacgtcaaccataacttcacatctcataaacttttctccactatcaatgagttggttgcggttggtgtctaccacgtggacgaaaaggctgctctcttagggttcccttctcaaggttacacttcagcatattatctgggtcaacctgtaacacctgaagatatggccctcttaaaagagcaactattcgcagaacttgccatcttgcctgagaatacaagaatcaaaaaaatcgatgatcaatcttttcaaatctgggttgcttctgagaatgttaaaaacgaaatagcagagacttatcctaatggacagatcatattgctcaataatacaaccaaagtggaattcatattcagtgaccactcacgtgagatgcgtttaatagcttcgtacctaaaagaggctcaaaattacgcagccaatgatactcaaaaagcgatgcttcaagaatacatcgaccatttcgtcacgggctcatcgcattctcataaggaagcacaaaaattatgggtgaaggatatttctcccatcatcgaaacgaacattggattcatcgaaacatacagagaaccttctggtataatcggggaatttgaatcattggttgctattcagaacaaaaaacgtactgccaagttttctagtttggttaacaacgctgaagaatttatttcgttattaccgtggtctgaagattatgaaaagccgaactttaacccaccagatttcacctccctagaagttctaacattcacagggtcgggaataccagcaggtatcaatatcccaaattatgacgatgtcagattaaagattgggttcaagaatgtttctttagggaacatcttgagcgcggctgccaaaagctcatctaagcacccaccaagtttcatttccggcgaagatcgtttaatttttgaacagtatcagagtgaatcctttgaagttcaagtaggaatccatgaattattaggccatggatcagggaaactattgaccgaatttacagatgggttcaactttgataaggaccatccacctttgggtttggacgggaattccgtgaagacgtactacaagttgggagaaacttggggctcaaaatttggacaattagcgggtccctttgaagagtgtcgtgctgaagtaatcgccatgtttttgattactaataggaagattttggatatttttggttttcatgatgaggaatctcaggataatgtggtatatgctgggtatttacaaatggcccgtgcaggtctattggcgctagaatattggaaccctaaaactggaaaatgggggcaaccacacatgcaagcgagattctctatcatgaaaacattcatgaagcattgtaaagacaagaatttcctaaagttggaaatcaacgacacgatggatgacttcaccatcaagttggataaaactctcatcaagactgccgggcttgagtgtgtaaaggactacttacaacgtttacatgtttacaaatgctcaggtgacgtggaacaaggtagtaagtattttatcgatagatcaactgtgacaccagatttggcctctttgagagacattgttgtttccaagagattgccaagaaggcaatttattcaggcaaattcacatgtcaatggcgagaatgtttctttggtagaatacgaagaaactccgcgaggcatgttacaatccttcctggatagagaactgtaa

SEQ ID NO: 2324 - DNA, 1656 bp, Saccharomyces pastorianus
atgacctacgcttcagtcagcatcaacactcccccaccatatcttactttggccagcaacgaaaaattgccagtcgtgttatccatcgctggaacagaccccagtggtggtgctggtctggaagcagatatgaaaactatcacggcgcacagatgttatgccatgacatgtgtcacctctgtaaatgttcaaactccagcaaaagtctacagtattcacaacacaccaaaggatgttgtatttcaaatcttggaaacaaatttacaagacatgaaatgtgatgttatcaagaccggtatgcttaccgtacctgctattgaggttttgcacgaaaagttgttgcaacttggtgaaaatagacctaaacttgtggttgatccagtctttgttgctactgccggttcttcattagctggcgaagatgtagttactttgattagggacaaaattgctccttttgcagaagttttgacacctaatattccagagtgtttcaaactgctaggcgaagaaagaaaaattaacaaactgcatgatatttttgaaataggtaaggaacttgccaaaatcactaaatgtgccaatatcctagtgaaaggtggccatattccatggagtgacgaaggtgaaaaatacattaccgatgttctttacttaggtgcagaacaaaagtttatcgtctttagaggcaatttcgtcaataccacgcacacccatggtaccggatgcactcttgcttctgccattgcgtccaacctagctcgtggttattctcttcctcaatctgtttacggtggtgttgaatacgtccaaaatgccgtggccattggctgtgatgttaccaacccacaaattaaggataatggcccaataaatcatgtctatgctatagaaatcccactagaaaaaatgattaccgatgaatgctttaccgcactagacgtcttacctaaaaagcaaattgcaagtgctgctgacaaaattccaggcggcaattttttcgaatacttgatcaatcaccctaaagttaagccacactgggactcatatgtgaaccacgaatttgttgaaaaggtggctgacggtacattagagcgtaagaagttcagattctttattgaacaagattatgcatacttagttgactacgctagagttcactgtatcgcgggtagcaaagctccatgtctagaagatatagagaaggaattatccattgttgcaagtgttcgtaatgaaatgggtgagcatgaaaagagactaacggaagaatttggtgtcccagaccaagcatacttccaaaacattgctagaggaccagcattaaaggcctactctcgttacttcaatgatgtttccagaagaggtaactggcaagagttagttgccgccttgactccttgtttaatgggttatggttatgctttgaccaagatgaagggtaaagtcactgcagctgagggttctgcttactacaagtggtgtgaaacttacagttctccatggtactgtgctgccatggccgaaggtgaactacttctaaatcacatcttggaaacataccctccagaggaccttgatattttggtaagaatttatggtgaagtttgtgaattagaaaccaatttctggaccgccgctttagaatacgaatga

SEQ ID NO: 2325 - DNA, 1233 bp, Saccharomyces pastorianus
atgggtgacgaattacacaaccgtttacttcatcaaagtaatagtacgaaagatgaaatcctttacaaggtaatagaatccctaatttgctctatctgccatgattatatgtttataccgatgatgacaccctgcggtcacaattattgttatggatgtttgaacacttggttttctagcaacactcagaaagaattagcctgtccacagtgtagatcggatgttacgactattcctgctttgaatactacactacaacaatatttatcatttattctggataggttgagcagcgaagaagatgattccttcaagagactattagaaactaaaattaaggaggaaaatgattacaagcttgataaggaaaaggatacattattcgaaggagtatttaagaatagtgcgttagcggtggctgacgattctgatgacggtatcacacgttgtagtaactgtcattgggaattagatccagatgaagtagaagacgggaatgtctgccctcattgtaatgccagaataaggaattatgcgggcggcaatgacgaattcgatgaagaagaatatagtgaaggagaattgaatgagatcagagagagcatgcgtaggcgtagagaggagcggcccgcatctacagatccctttgccaatggagatgatgtgagttcagaagaagatagcagcagtggcgatgagcctatgcgggaacacatcccacaaggccgctgggctaggtcacacaatcgtagcatcgcggtggatgcagtggacgatgatgaggatgaagaagaacgggaagaagaagaagaggaagagatggattccgatatgaaagatttcatagaggatgatgaggatgaagatgaagatggcagtaggagagaactggtattgtccgcgctcaataacaggcaagtgattattactgatgatgaggaagaagatgcccaagagcaagctcctgcggaagaggaggatcatgacagcgatttttatgagcacaatgatgaaggatttgtaagcggcgacagtcttgatgaaggccagaaaaaagccgcagacatggattcgaattcagactctgaagatcgttccatttcttaccctagttctaatgaagttgatgaacaagatgatcaagatgaacgcgacaccgaagaactggacgacccacaaccgaaaagacaaaagcgattccgtgttgttctaggagacagcgacgatgagtga

SEQ ID NO: 2326 - DNA, 186 bp, Saccharomyces pastorianus
atgaaagtatcacaagttttcatttctgccatctctgtcttcggcctcgctactagcgtaaatgctcaaaacgcatccaacaccacgagtaacgctgctcctgctttgcacgctcaaaatggtcaactactaaacgccggagtcgtcggtgctgctgttggtggtgctttggcctttttgatttag

SEQ ID NO: 2327 - DNA, 1155 bp, Saccharomyces pastorianus
atggctgcaagtaagataatgagcaatgcgcccatgtattccctcgattcttctttaagggacctacttaacgatgacttattcaataatcatggcaaatcggcaaagtcagaaaatgatgaaagaaatgaagtattccaggagtgtttgaatttatttataaaaggagaaattaaggactgtctggaaaggatgtatgaggctgggtttattcaccttggtatttttaagtctaatcctatgatattggatttgtttgttagtgcctgtgacctcgtatcaaatttcaatgaactaggcttaactttaaagggagaggttttgaatacatttactttggatcatccgcgatgtattgaaatacaggaaatcattctcaaagacctcaataaacttttgatcatcaataaattatttcggtgctgtatcaaggctattcagtccggtgggacagaatatatggaacgtgaaagaaccattttggacgttgagtctgaaattagaaactttattctcgcgtatacaactaagatgaggactactgtggatgttttcggattgcaggagttgattgaaatattcatttttcaagtgcaggtaaagctagagcataagaaactctccccgaatttgtactgggccctttgtaagacattaccaaacctatctgcaaccttaaagggtcttcatttattaaagaacgagtccatagaggacgctattctcaactcgattgataccaaaatacaaaaaaatttgacaaaatctaaaacaaaatcaaaaggcatgaagcagaaaatacaccatttccaagagcccttgctacacgatgatgccaaggttcgcttaaaggctgacaatgcatacagaaagcgcaactctattgatattggtaaagttgatcacaatgaaacaattcctcgtaagccccaacatggcatcaccattctagttggctccttttggaccgctttaaaaaatcactttacaaaaagaatgctgaataaaaacgggcttttgcttggaggcttgttgtttttgctatgcgtcaaaagatataaatcgttaatggcaatctttagacacgttccgacggctttccgctctgtattccctcatattgttcagctgctaaagctcctagcgagtatatga

SEQ ID NO: 2328 - DNA, 1146 bp, Saccharomyces pastorianus
atgagagaagtaagcgggcgtaggaagagaaagtatatcccaattgatgttgaagaggtggaagttcggtctaagtactttaaaaagaaagaagataaggctgatgagtcactacaaaagcctaacgttaccaaagactcacaaagcaaatatgctgtaaacatcgactggatcaaggcactgaagccgatagagtatttcgagtggattgattcgaggacttgtgacaatccaaaagcttgggaacgagtaataactagagaagaaatggtcaacgattctggggcagaaattcctgaaacttttttacccatttataatagagtaagattaatgaggtccaaagtcaacacgccagtagattcaatgggatgtagtatgattcctgtcttaattgcagataagtgtgggataccgagtgagaaagtcaacccaaagaacttcagacttcagttccttattggcactatgctttctgcccaaacaagggatgaacgaatggctcaagccgccttaaatatcacggagtactgcttggacactttaaagatatcggaaggtcttactctagatgggttacttaaaatcgacgaatcgatattagcagacttaatttgctgtgttagtttctattctagaaaagccaatttcatcaagagaacagctcagttactggtagatgattttggctctgatataccgttcgatatagacggaattctatcattacctggcgttgggcccaagatgggctatttgacactgcaaaaaggctggggtttgatcgccgggatatgcgttgatgtgcacgttcatagattgtgtaatatgtggaattgggtggatcctatcaagtgcaaaactgcagaacacaccaggaaggaactacaggcttggttacctcattcgctatggtacgaaattaacactgttttagttggattcggtcaattgatctgcatggcaaggggtaaaagatgtgatttatgtctggcgaacgacgtttgtaatgctcgtaattcgaaactaattaaatcttccaaatttcaccaattggaagatgaggaaaacatggaaatcgtgtattcgcactggttggatacacttgcaaatggcattaaaacgcagaggtacaagaagaagtaa

SEQ ID NO: 2329 - DNA, 1092 bp, Saccharomyces pastorianus
atgttctctcgaaggtttattccagttgcacaatctactaagcagaacattggcaaatatgtgcgaaaagatgctagattcactttgttgacatacaatatgctctcaccgtcatatatgtggccgcaagtctatacttatgttgcggagcggtataaaaactggaattataggcacaaactgctagagaaggagcttctaactacttttaaggcagatattatgtgcctgcaagaaatgactacgggggattacgaaaactattggcgcaattccattggagttgatatcaattacgggtccaagttcatctccaagaccccacccaagtattgggagaaaccgatcaaagatatggatggtgtatccattttttataaccttgaaaaattcgactatatttcatcgtcagggatttacttgaatcaattactaaatgtttttaatgaacgtgaattgaaatacttgtacaataaaaaggtgactttaacagacggcgcttctaatgttattggcgaagacagtttattggatgttttgaagggcaagaatcaggtatgcttattcgtgtccttgaaacataaggaatcgaataccatatttgtcgttttaaatactcacctgtattggaaatatgacgaagtaaagctgacacaatgtatgatcataatgagagaactgtcaaaaataatcaaacaacttcttccaggtgatgcagatgctcaagagaaagtgaagattttattcactggtgatttaaattctacaagagattcattagttgttaattttttgcagggccagatagttaatcatggagatcttaatcttgttaacccaatgagaccgtatttggaccgttgtgtttatgacgacataccaagtgactatttcgtgcatacgtgctattcagggaaattgaagggtatttttgattatgtctggtatcacgactcagacttcttattaactaagattttaaccggtaacgaagtttcagatgaattgttagcatcaagtcaattaggtctacccaatgaaaaccatcccagtgatcatatacccctactaacagaattcaagatactatga

SEQ ID NO: 2330 - DNA, 429 bp, Saccharomyces pastorianus
atgtctcaagctgctaacgtcaagaagagagttttcaagacccactcctacagaggtgtcgatttggaaaaattgttagaaatgtccactgaagatttcgtcaagttggctccagctagagttagaagaagatttgcccgtggtatgacttccaagccagccggtttcatgaagaaattgagagctgctaagttggctgctccagaaagtgaaaagccaaccccagttagaactcacatgagaaacatgatcattgttccagaaatgattggttccgtcgtcggtatctacaacggtaagtctttcaaccaagttgaaatcagaccagaaatgttgggtcactacttgggtgaattctccatcacttacaccccagtcagacacggtagagccggtgctactacttcccgtttcaccccattgaaataa

SEQ ID NO: 2331 - DNA, 321 bp, Saccharomyces pastorianus
atgaagtacttagctgcttacctattattgaacgctgctggcaacactccagatgccaccaagatcaaggccgttttggaatccgtcggtattgaaatcgaagacgaaaaggtctcctccgtcttgtccgctttggaaggtaagtctgttgacgaattagttactgaaggtaacgaaaagttggctgctgttccagctgctggcccagcctctgctggtggcgctgctgctgcctctggtgatgctgctgctgaagaagacaaggaagaagaagccgctgaagaatccgatgacgacatgggtttcggtttattcgattaa

SEQ ID NO: 2332 - DNA, 765 bp, Saccharomyces pastorianus
atgagtggttacgacagagctttgtccattttctcgccagatggccacattttccaagtcgagtacgccctggaggctgtaaagaggggtacctgtgccgtaggtgttaagggtaagaattgcgtggtattgggttgcgaaagaaggtctactttgaagctacaagacaccaggatcacgccttcaaaagtgtctaagatcgactcgcatgtggttttgtcgttttcgggtctaaatgcagactccagaatcttaatcgagaaggccagagtggaggcccagagtcatagacttacgttggaggatccagtgacggtggagtacttaacacgttacgtggccggtgtgcagcagagatacacgcagtccggtggtgtcagaccattcggtgtgtccacgctaatcgccggtttcgactcaagagatgatgagcccaagctctaccagaccgaaccaagtggtatatactcctcgtggtctgcgcagactatcggcagaaactccaagacggtacgtgagttcttggagaagaactacgaccgcaaagagccaccagccaccgtggaagagtgtgtcaagcttaccgtaagatctcttttggaagtcgtccagacaggtgccaagaacatcgaaatcaccgtcgtcagaccagactcagaaatcgttgccttgaacagcgacgaaatcaacgagtacgtcacccagatcgagcaagaaaagcaagaacaacaagagcaggataaaaagaagaaatccagcaattga

SEQ ID NO: 2333 - DNA, 2295 bp, Saccharomyces pastorianus
atggaccaccaagacaactcgccacccagatacaggaactctggctctaacagggccactgcatataacagtactaccctgcctacgatgcccaaaagcgccacacccacatcgagttcgacgactgttaccacgcatttgcacaatatcaaagaagaggaggcaaatgatgacgaactcacccaaatagatcgttcttcgcctcgtgttttaggaagaatctcgtcttcatcttcgtcttcgtccaatatcgatctgcacgataacttggatatgctacacgatatggataaatcagccaccaacctctcactatccactcctaatttacatgaagaaatgggcttccgtggcgacaaaggtaatagtaaggaagaactgactttgttgccacctttaccccacacgggagaattagaaattgctccaaaatttgatatcaatgaagccatttttgagcaggatgacattagtcagtcctcaatgttggaaacagaaaatgtaatagcgaacctaacgagctctactccagatgctactaggaaatcacaggatttcgccattatgacgcatgacaacaacatgattgctaacgacaattctgaattaagtgatacaatcctagataatcagacctcgttcgatctttctaaagccctggagatgaccagccattcaaacattcgcaatattattaatcccggttccgatggaagaacctcaagagcctcaagaactccgataagcactgcgacattgaaaacatattcttcgtcacctgccagtggggaacatgacgaaaacacaactacattctcctctacgtccgatcaggcggctaccatactgtatgatcctaataaaatcctgaatcccatcccggtttcaccttcttctccctatgagcaacatcagagcgatagagcctcgagagatagaagtagatctaattctagcaccttagcttctactctgagagatactatcattttaggattgccccaaaataatagcactgtagaaagaaagctatcaagaaaattgagtaatttgagtaggaaaaatacaggaacctttgaagaacgtcttcaatcgttaccgcctttaagtaccgaaaattcaagcgagtacgccatggcagcgtccatagatatcatcggcttacaacctcctgtcatatccacgccagtgccaagtacccaaacaccaataccattccaatccgaatctgctttgactagcgaagaaaagagaatgccttttttgagaagagcctctagtgccattttaagaaaaaaatctgtcaagaacggccccagtttaactagaccaaatacaccaactttaccatcgtctcaaacgttcgattcgggatcaacaaatggtcagcatcccttgctaattcgacgatcttcgaatattgaatataaacaaccaagaagacagctttcatgttcgaagtcttattctcgtttggattccgataccaagtttgctaacagtagtcgaccttccaaggaagttttacgaaccacttcgaaccatgtggaggaggtatatagaaagatatctcttggctccaagatcaagagaggtttcactagaattttaagcgatagtaatagtagcagggacgctctcgctgcatcgcccaaaatagcagtagcaggaggaaccacagcatcttctttgtcccctatatccactgtaagaagtagtccgataacgccaagccctaatgaaaggaaacgagtttcaacggatagcgtaagtttggtcaaccgaacatcaacatcctacccaaggtcatcagcagatattattcccacactacacgaagaaccccaggctaacattccaaaaagatcagcaagtagaaatatgctgtctagaaatcttagcaggaagaacattttgtccgaacaggaaaccaagggaagtgaaatatatctggacaaagaggcgttacaaaacttagtcccggtgttttctgtcacagaggacacccaccacatcaaccgttcgtctttacaaacgcagtccactatcaaattgtgcatcgacaacctaagaaataaagaaggcttgagattggatgtcaaggaatacgtggacatcttgagtcagcaacaacgcaaggaagatgaaagatatgccattttggaaaagaagttcgcgtcttgtgcgtggtgtagcgataaagatctccagtacttgaaaaagaaacgaacttctatgaacaaaatatggtctgattacgtacgattttaccgtggaaaattaaacagcccataa

SEQ ID NO: 2334 - DNA, 1605 bp, Saccharomyces pastorianus
atgatcctgctgagaataccgacacggttttattgttcatcgctgaagctcacaaagggcttgtccccattgaagaaatccctattatccaagaaaagaaaggaagatgtccatccatctacacctgtaagaactaggtttgcgccttctccgactggttttttacatttggggtcacttagaacagctctttataattatttgctggcgagaaatactaatggacagtttctacttcgtttggaagatacagaccaaaaaagattagtacctggtgcggaagagaacatttacgaggttttgaaatggtgcaaaatagattgggatgaaactcctgtaaagcagagcgagagaaaattgatctatgataaatacgtgaaaatactattatcttctgggatggcatatagatgtttttgttcgaaagaacgactgaacgatttaaggcgctcagcaatgggattgaaaccaccttctatggcaagttatgaccggtgttgtgcacacttgacaaaagacgaaatagaatctaagctagtgcaagatacgcccttcactgtgaggttgaaatcgccagaacagtatccgacatttgctgacgttttacacggtgaaattaatcttcaaccccaagttaactataacgatagaagatacgacgacctcatccttgtcaagtctgataaattgccaacttatcatctcgcaaatgttgtagatgatcacttgatggggataacacacgtaataagaggtgaagaatggctcccttccaccccaaaacacatcgccttgtacaacgcatttggttgggattatccgaagttcatccatatccccctcttgacaactgttggtgacaagaaattgagtaaaagaaagggcgacatgtccatatcaagtctaaagaatgagggagtcttaccggaagctttaatcaatttttgtgcattatttggctggtctcctccaagaaatttagcctcgaagaagcacgagtgcttttcgatggattatttggaaaaactattcaatttgaacggtttgacaaaggggaacgccaaagttgatgacaaaaaactgtggttcttcaacaagcattttttgcaggaaagattcacagaccctgtgaagttgaaagaactcgtcgatgggatcatgccttcgttagagtccaaatataatgcatctacgttaaatcgcgagaaagtgtcaaaaattctactaaattgcggtagttgcttaactaggatcaacgacttttgtgacgagttttgttatttttttgagaagcctagatacaacgataatgacggtgttacaaaattcctcagcaagaatgaaactcaccatgttgttgaattattagagaagtttggacagtttaaagaaggtgccaatgcgcaagacgtggaatctatgatcgacacgatgtgccgtgaacacggcttctctaaaaacgtcatatatcaaacgatacgatttgctcttgcaggatgccattccggcgccaaattagcagtcatgattgatattctgagtgttaaagaaagtaaccaaagactagctgaaggtttggagttcttacaaagcaggaagcggtag

SEQ ID NO: 2335 - DNA, 735 bp, Saccharomyces pastorianus
atgtttgccgcaattgcttcaggaaatcctttgcaactttctgtagaagtccctaattcaagtggattacagcatacaattgtgctttctcgaaccaagcccaaactatattcacacatcacattatttatacttcctaatgtgacctttccacaggattttgtagccacggtttattttaaattgagccctcaagaagaattcaaattgtttggatatttgagcggagagaaacctagtgcaatattcaaagtgcaaataccgagctccaagagagaacctggagaagcaagtgatggattgggggagatagacatggatgtggacgatggttcgggagctaatgacatgtcagcagatggcaacggtagtaataatatatcagaattgattattggtatttccattgagcctcgagagcaagggatgatgaagctagaagagtggaaggctagtatgaatgcagaagcacaaaagaacaattcattggttctgtcgagacctaatttgggagtaattagaaatattaccacagcgggacaattagcacaggtgtacccctctttgacacaagaattggccgcgaagattgtacaacatgcatataactatctctcgggcttccttgatagtcagggcaatgtgcccattaaaagattcgatacgtggtgggacaaattcaagaacagacttgccaatgacgggacgtttttagatgaagtaaccaaaaattag

SEQ ID NO: 2336 - DNA, 1266 bp, Saccharomyces pastorianus
atggtccgagtccttcccgtcgttttaactgctttatctttggaattggtggcgagcacaatatctcaatctataatacagccggtgtaccctcgaagtgaaaccatgtctgtggacgatactggaaacctgaagatctcaggtaattcgatctgtggcaacggccgttgctatccgaagaccttcgaacctcgttacgattggcagcccatactaccgggccaagaactgcctggtggcttggatataagaatcaacatggaaactggctcgaaagaggcaaaattaaacgatgatgacagtgaaggtgaaaacagcacatatgacttagttgtttcatcggaaaacacggaaccatctaccgataactacgagttttccagcgattttcaagaaattagaagcatcctcgactcccattcgcccttatctccacacgatatcaccgtactggaagatacgttcgatagagtaatggagtttgctcatgattacaagcacggctataaaatcattgtccatgaatttccccttttagccaacgtcagtcttaacgaagaattacccctaacgttaagagagctaagcactagagtcattacaagttgcgtgagaaataacccacctgtggtggaatatatcagtgtgaatttttcgagtttaaaaagccaaataatggccactttgtcaaagttgaataattccaaccataaattctcaaatatcttgatcaagagatatttatccattttaaacgagctacccataacgtcccgggattttcccctatattctacaacagtcttacaaagtatttatgacgaaaacagtggggacaaacagttgcaaataaaagtcttggagctaattagcaagattttcaaaacagacgtgaaggaagacgaagtcacgaatctagcattgtataaaagggattcagaaaactggtcacaaaatttgcaagaatgggcaagtgcgtttcaagaaatggtccagaacaaggacatagacgagctgcacacgagaactttctttgagaccttgtacaatttgaaaaaggtattcaagaatgatatcaccattaacaaagatttcctgaattggttagcacaacaaagcgaacacagacaatccaatctggaaaatgggctacaagaaagagacgttgaacaagactcattcgataagaaactcatcgacagcaggcacttgctttttggaaatcctatggcccacagaatcaaaaatttcagagatgaattgtga

SEQ ID NO: 2337 - DNA, 1431 bp, Saccharomyces pastorianus
atgctactacgttctttaacaggtgctcttgccttgggtgccggtttggcccaggctgcaagcagcaacagctctactccctccatcacggttaagggcaacgccttctttaactccgagtcaggcgaaagattctatattcgtggtgttgactaccagcctggtggttcttctaacttgaccgatcccttggctgactccgctgtgtgtgacagagacgtccccgttttgaaagatttaggaatcaataccgtcagagtttatactgtagacaactcacaagaccattctcactgtatgaaactgctgcaggaaaacggcatctacttgatcctggacgtcaacactcccaccagtgccatctctcgtaacgatccctcttgctcctacaacgcagactacttacaaagcgtgtttgctacagtggacacctttgctgactacgataatgtgctagggttctttgctggtaacgaagtcatcaatagcgtcaacacaaccaatacagcaacctacgtcaaggccgtagtcagagacatcaagaaatacatcaaggctagaaaatacagacagattcctgttggttattcagctgctgatatcgtagctaacaggcaattgtctgctgagtatttcaactgtggcgatgatgcggatgccagaatagatatgtttggtgttaacgattattcttggtgtggtgaatcttcattcgttgtgtctggttatgccaccaagatgaaattataccaagattattcagttcctgtctttttgagtgaatttggctgtaatcaagtcaagacctcccgtcctttcacggaaatcgaagctatatattccactcaaatgtcttctgtgttctctggtgggttagtatacgaatattccaacgaaactaacaactatgggctggttcaaatcaatggtgacaaagtcactaaattaacagattttgaaaacttgaagaacgaatacagcaaagtctctgatccccaaggtgatggtggttacagtacttctaacaactactctggctgtcctgactacgaaaagggggtttgggaagctaacaataccttgcccgctatgccaagtgctgcttctgcctatttcaagtcaggagcaggttctccaatgggaactggaattgccacacaacaaagctgtgattctgacgatgatgaagacagtgacgatagctcctcttcctcttcttctgcctcatcttcaagctcttccgagtcatcgtcgtctacttcagaagcctcttcatctgcggcctccactagtgatgcaagcgtggtgaaatctgcttcatctgctacatcctctagccaatcttctacaaaatcaaaaggtgcagccgggataattgagattccattaattttccgtgctttagctgaaattcataacttgatcttataa

SEQ ID NO: 2338 - DNA, 1749 bp, Saccharomyces pastorianus
atgttgaactttgcatcgagaacgtcatgtgtcgcaagacgccaagcaagcttgcacctcatcaaatttcaaggccctaggctgatagcctccactgctcccatgtgccattggccctcgggggcgcaagaactacaaccttactgctactcgtcgttaaggttctactcttccgaaaagacaaagaccgccgtcaagcccgcagcttcgacgtccacggatgctcctgtaaagcccaaagaaacgcttatggtcaaggtgaagcatgcattgaagcattacgttaacggtacgaagcttttgggctacgaactgaaagtctccactaagctgctggtcaagtttgctcagggttacgaactatccagaagagaaaggaaccagctaaagaggacaatgggtgatgttttcagactggttcccttttcagcattccttatcattccattcgccgaactatttttgccctttgctttgaagcttttccccaacttactaccatccacttacgaatccggtaaggataagcaggctaagagaaataagctgatcgagatcagaaagaagacttctgagtttttacacgaaactttagaggaatctaacttgatcacttacaatactatcgaaaacgcagagaaaaagcagaaattcttgaatttcttccaaaagctttattctgcgaaggaaggtaaaatcatgtctttccaacacgacgaaatcagcgccattgcgcaaatgttcaaaaacgattccgtcttggacaatttgtcaagaccgcagctggcggcaatgtccaaattcatgtctttaagaccatttggtaacgataacatgcttcgttatcaaattcgttccaaactaaaagacataatgaacgacgacaaaatcatcgattacgagggcgttcaaagtctatcccaggaagagctataccaggcttgtgtatctcgtggtatgaaggcgtatggtgcgtccaaagaggatttaaccgataacctaaaagtctggttggaactgagattgagacaaaaaatcccatccgtcttgatggttttgagttctacattcacgtttggtgggcttccaaaggagaactactcaaaggccttctcgcccctggctgagaaaaaggagaccaagagcaagtatgatgacctgttagatttgtactacgacggtatcttgcaggtactaagctccatcccagatcccgtttataatgttgccaaactggacgtatctgaatccaagtcttcctccgctgaaactgaagctgaaactgaagctgaaaagcaggctgctgaaaagaaggccaaggaagaaggagaagaagaagcagttaaaccaaaagaaaccgccataccgaataaagatactacatctaaggacgctacattagtcaccaccagccccgcagtcgctcctaagctagtcaaaattaacgaaaaggaagaaacaactatgactgaggcccaagcagaagaaaagcaggaaaccgccgctgctgattccgctgaaaccgccgagacgagcgagaagaagacctctgacgacaatgaattcaaattaaacgtcttgaaggaacaagaagaactaatcaaaaaggaagaagaggaagccaagcaaagagcttcgagagaacacgtccctgatgatatcaatttagacgaggaggaagaagctaagtctgtgccccctatcccagccgatcaagctgcaaagacttctgttgtaaagaaagattaa

SEQ ID NO: 2339 - DNA, 342 bp, Saccharomyces pastorianus
atgacggaggttgtaagcttctgggaaagcagctcggatgacgagtcgcaagagaaacgcgacatggagatacagagaatgccggactccgacgagggccggctggtacaaagcctggtgtcttttatgggctcttgctctatcaacctgctcttaccgttcctcaacggcatgatgctcgggttcggcgaactgtttgcccatgagctgtgctggaggttcaactggttcaatcgcagaaacaaagggtacaaggtgtacccggaatcgcgcaaggtaactgcacttgacgagccttcaagtccagctgcccgcggcaggactgcgaccaagtttctctaa

SEQ ID NO: 2340 - DNA, 2040 bp, Saccharomyces pastorianus
atgcttaaaagacacggattattttggttaaagacatgtccccgtctaaatgttcttcaaaaatattcaatacttatacctcattcatttattattcgtaacgtttaccaacgaaggcagtacgcgaagggaagaagaaaccaggttgtaaagaaagagttaaagccacttaagttccccattccaaattatatctccgtaaataaattagccaatttgctaaactgtcgcgtggagaaactaatcaaagatttgacagcactgggctttgagaatattacaacaacttacatcctatcaaaagaatatgttgaactgattttacaagaatacaactttgcacttccgagtctctcaacatctactaatttggacaatgtttatgatgagctaaaatctcctgtcaatccaaagttattaacgaaaagacctcctgtggtgaccataatgggccatgttgatcatggtaagacaactatcatagattatctgaggaaatcctctgttgttgctcaagaacacggtgggatcacacaacacattggtgcctttcagataacaactccaaagtctggcaaaagaatcacatttctagatactcctggtcatgcagcctttttaaaaatgagagagagaggtgcaaatatcactgacatcattgttctcgtggtctctgttgaagattctgttatgccgcagacgttggaagccataaaacatgtcaaaaagtcaggcaatgaattgataattgcaataacgaaaatagacaggattcctcagccgaaagaacgtgaaaaaaaaattgagaaagtcatcaatgatttgattagtcaagatattgcagttgagaaaatcggtggagatgttcaggtgattcccataagtgccaaaaccggcgaaaatatggacctcttagaggaatcgattgtgttgttaagtgatgtgatggatattagagccgagaattcccctaaaactattgcagagggatggattatcgaaagtcaagtcaaaaagcaagttggaaatgtagctaccattctggttaaaaaaggcactctacgaaaaggcaaaattctgatttgtggtaacacattttgtaaaatcaaaaacttaatcgatgacaaaggtacacacattcctgaagcaacaccgtcctttgctactgaagtatttggatggaaagatgttccacatgttggagacgaaataattcaagtcaagagtgaagcgattgccaaaaagttcattagtaagaggcaagatcttgtcgaggttcagaaaaacagtagtaccgttgaaaggttaaacgaagagagagctttagccaaagagaatcaccacaacaaagataaagatgttgattcagaaagtcaagatgccacacaggacaataaactggacgccggacctaaaaatattaattttatcatcaagtgtgatgtctctgggtctgctgaggcagtctcagaaagtatttcttcgttggggaacaatgaagtgagatgtaacgtcatatcttcttctgtcggtatacctgctgaaagcgacttgaagatggcacaaataacggatagcacaatcctgtgcttcaatttgggtaatttacccagcgaggtaatcaacaatagggctggcatcaaaataaaacagtacaatgttatctataaattaatcgaggacgtaactgaaacgttgactgaaaatctcaaaccaatttttgaaaaaaaaataatctcaactgtagatattcgtgaaatttttgattttaaactgaaaaagaaaacaattaaaattgccggttgcaaagtaaataacggtatcatcaagaagaattcattgattcaagtagttaggggtcctaatgacgatgtcattttcgatggaacgctctcaactctaaaacataataaagatgatgtagcagaagtttcaaaaggacacgaatgtgggatcacatttgagaacgcttttgaaggtttcaaacccggtgataaaattctggcttatgaaaatgtgaaagttcctcgttatctgtaa

SEQ ID NO: 2341 - DNA, 1233 bp, Saccharomyces pastorianus
atgtctaaaattgaagagctgccgccatctgacattgaagatgaatcctattctagtaaacctggagacgtgtttttagcggttgtggatacacctgttaaagaaactgatgaaatattgattgaggacagttttattggcggtgagcccaaatggctgcatccagattcacaaccaccagttgaactattgaaatgtggtacttgtaaatcagccgataatatgaagttattgctacaagctttttcaccattagatgatgagcaaatgagtaccattcaacagcgagttggcgttaataatatgaattatgttaatccccaagatgatagagtgttatatgtcttcctttgtaccaaatgtcaaagaaagggcaattcagtgcgttgtataagaggtgtaaagaagaataaaaacgatgataagctttctgagaagatggcctcagcttcgttgggtaaaaatttcctaaataacccatttgacattacaaacaactctgactctacacctaatgcattttcaggtaacccattcgaaaatccttctacagctaccaacccatttggagttgatagcaccaaatcaggtatatcgcaaaaggaagggggaaataaagaagaagaatctgcaaaggcttctgcaaaggctgccagaaaactgcacgattcacaaaaggacaaagaatatgatcaaactagatgtttcaaaagttacctattatatgttgaggaagaaacgttcaagaataaaaagccagcacatttgcaactacctaagaacttaaagattgaccaggaagcattggatttaacaggtgatgaagatctcgaaaaagacccgatcaagttggacccaagaacggaaaagttatgcaagtttcttgacgatgacgtattccaaaagtttcaagaggtggtcggttacaacccattacaagtattgcgttatgacttaggtgggagaccattactatatgctgaaaccaaaattgatattttatcaacgctgccaagacctggttacaacccatcaagccaaagaatttttgaaatgcagctaatgccaaagatgatttttgatttggaggagacagtatctgttgaaaatggaatggaatggggcaccatccttgtttttaccgatgtcgaaaattacatacctaaatttgatgaacacggtgttggctatgtagaagaatgtgtcaaggtccaatgggaatcgagaacttaa

SEQ ID NO: 2342 - DNA, 1779 bp, Saccharomyces pastorianus
atggctggtgactttattccttccaccacgtatccgagtgaggagcttaaggaacggaaatccacatccgaattcgtaggctacaaatccaagcagttaacatcctcttcgtcgcacaattcggacacatctcatcacgatgacaactatcaatatagcaacaggaacatcttccagcggtgcgtcgactctttcaagccgcccctggacggttcgtttgacacaggtaacctgaaaaggacactgaagcccaggcatttgatcatgattgccatcgggggcagtatagggaccggtctgtttgtcggtagtggtaaagccatcgcggagggcggtcctctgggtgtcgtcctaggttggaccattgccggctcgcaaatcatcgggaccatccatgggttgggtgaaatcacagtacggttccccgttgtgggcgcgtttgccaattatggtacaaggtttttggaccccagtataagttttgttgtttctaccatatacgtgctacagtggttcttcgttttgcccttggaaatcattgctgcagccatgaccgtgcagtactggaactccgccatcgaccccgtagtttgggtggccatcttttacgtcatcattgtatccataaacctgtttggtgcaagaggtttcggcgaggctgaattcgcattttccaccatcaaggcaataacggtttgcgggttcatcatattatgcatcgtccttatttttggaggaggacccgaccatgaatacattggcgccaaatactggtacgatcctggttgcttggccaacgggtttcccggtgttttgtccgtgcttgttgttgcctcgtattccctgggtggtattgaaatgacatgtttggcatcgggtgaaacggatcctaagggtctaccaagcgctatcaagcaagtgttttggagaatcttgtttttctttttggtgtcgttgacgctggtcggattcctggtcccatatacaaaccaaaatctgctcggtggttcatccgtagacaactcgcccttcgtgatcgccatcaaactgcaccatatcaaagttttgccatccattgtcaacgtggtcattctaatcagtgttttgagtgtggggaactcctgcatcttcgcttcgagtagaacactgtgttccatggcccatcaaggccttattccgtggtggtttggttacatcgaccgtgccggcagaccgctagttggcattatggcaaactcgctgttcgggttactagcctttctggtcaaatcaggttccatggcagacatcttcaattggctcatggccattgctggtctagccacgtgtatagtctggttgagtatcaatttgtcgcatatcagatttagaatggcaatgaaggcccaggggaaaaaactggatgagctggagtttgtcagtgctgtcgggacatggggatctgcgtactccgcattaatcaactgcctgatcttgatagcccagttttactgttctttatggcccattggtggctggaaagatagcaaagatagagcaaagatattcttccaaaactacctctgcgctttaatcatgttattcatattcgtcacccacaagatttactataagtgccaaacaggccaatggtgggggattaaagctctaaaggacatcgatctagaaactgatcgcaaaaacatcgatatcgagattgtcaagcaggaaatcgccgaaaagaagatgttcttggattcatgtccgtggtatgtcagacacttccattactggtgctag

SEQ ID NO: 2343 - DNA, 1254 bp, Saccharomyces pastorianus
  modified_base (1047)..(1148): a, c, g, t, unknown, or other
atgttcagagatagaactaatttatttttatcgtaccgtaggactttcccacataatataaccatttcatctgggaaaggacccttaagcgatgatcgagatatcgaaatgggtacgtacccgatgactgatatgtcgcacgatatatccgccaggttaatggatgaacaggacggtaagcgtggaagtagtggtgatgctttaccacccatattcattgatatagcgcaggacgtcgacgattatcttcttgaagtgagacggttgagtgaacaacttgcgaaggtttacagaaagaactcgttaccagggtttgaagataaaagtcatgatgaggcgctgattgaggatctaagcttcaaggttattcagatgttacagaagtgctatggggttatgaagcggttgaagacaatcttcagctctcagtttgtagatgggaagcaattaagtcgagaagaactgatcatactagataatctacagaagacttatgcagagaagatacaaactgaaagtaacaagtttagagtattacagaacaattacttgaagtttttgaataaagatgatttgaaacccattcgtaacaataaactcaatacagaagacactctgttgttggacgacgaggaggaggcaacaagagaaaagcgggagggtcttgatattgaggattattcgaaaaggacgttacaaaggcaacagcaactgcatgacacttccgcagaggcgtatttgagagaacgtgacgaagagattactcaattggcaaggggtgtattggaagtaagcacgatttttagggaaatgcaagatttggttattgatcaaggaaccattgtagatagaattgattacaatctagagaacacagtcgtggaattaaaaagtgcggataaagaactgaataaagctacacattaccaaaaaagaacacaaaaatgtaaagttatcctactgttaacattatgcgtgattacattgtttttcttcgttatgttgaaaccacatagtagcggtggtggtggtagtggtagtcatggnnnnnnnnnnnnnnnnnnnnnnnnnnnnnnnnnnnnnnnnnnnnnnnnnnnnnnnnnnnnnnnnnnnnnnnnnnnnnnnnnnnnnnnnnnnnnnnnnnnnnncggagatagtggtagtaatagtaatagcagtgaggaaaacaaggaattgccaagcacaattgaggtgacagagccggataacagggctccaaatcatattctttga

SEQ ID NO: 2344 - DNA, 1758 bp, Saccharomyces pastorianus
atgtttatagaatattccaggttaccaggattcgaaagtatcaatgcgtcattttccagaggcatgctcagactggccaagtttaccaatttcgctactaatgaggagaaattggaatacctcaaacttttggcaggtcctaacaagcatgttcagagaatcagcgtcaaagatttcaaggaaaatccagatgagataaattatatcttcattatgctaatatctattttacaaatggaagaatgtttgaccgttcttgttcaatgtccgactgtttattggatacgattcggctggcctggaaaacaggccgtaagcactgtgaattctgcaaaccaaacactggcaagcgctttccatgctatttttactccctatttttcaataatgaagaaggttatggccaaaatcaaagacaacatgttgctttttgcccaaccttatgctaattcaaataatttgtttatcaagcatttccatgatctcattttcaagaactcaaaagaagaagctgcaagtgatacaatcctatatttaagaaacaacgtcaatattccaaatgttttttttagtaatagaaaagcagttttccatggtgatcgtgtgaaaattggaaaatttgatggccagtttttaagcttttcctttaaacgaaaagtgagttggtcgaagttggattcagtggattcatttgaaatcactgcagtgaactatagagtactcgttaactgggagaaaacgccaagaaagatttttcttcctttgaatagtgacacaagtaacctgcgctatatatcaaaaacaactttgaatggagaagaagggaaccttatcaaggcaaaaacaggaaaacctctccataaggatgaaaacgcttgcaccaacgaatcaccgtccatcgagtttccagttacgacatcagcaaaaacagaatatttgctaaaaagtgatttttccttacaaaggattaataagagcagagatcctacccttcaagagctcatgttgaataaggcgcatttgtcacgagaagacactttttacgccgaaaacatgtccaaaagaaagcattgctcttctgatgcagttgctcacgttaataagtgtgacagtgtgcctatgcttgtccagaaaaagcatactactgatctccctctttcagtaatcgaaccgctaaatccttctgcaactagtaatagggaagttgtcttaggggaaaccaaatatcaaccaagtgtcaaaactaaaaatgaagcctctggggctgaaaagattgtatcgagaagaagggcaaactggatcagctccaatccagctcctgacccctacagaaaagcttcaatgagcaaaagcattttttgccccagttttaaagacgtctcggaaatagcgccttccaaacgtattaaatcagcttctccaaattatacgcctgatttagagcaaagtccaagaagtctcattataaaaagcaagtctaaacctttccaaaagcataacatttccctgagtacttgtggacgctttcgaaacaaactgacgaaaggggcttttaaaatcaaatcttgctatcataacttggacgctgatgtacacaggaacaaaggaaataatttattacaaaaacgtctaattcttcaggataaaaccaggaaaaaattcgagcaattcaggaacgatttgcaaagagtttcacaagcgcttagagctgccagaaaaagctgggaagaacatggctcccacaatcccatctattga

SEQ ID NO: 2345 - DNA, 1644 bp, Saccharomyces pastorianus
atggtgcctgagaatagaaggaaacagctcgttgtattcatagccgtcacttatttgttgacattctattgtatatactctgctaccaagacaagtgtatcctttttgcaggtaacgttaaaactaaatgaaggttttaatctaatggttttatcaatattcatcctattgaactctactttgctatggcagctgttgacgaaattgctatttggagaattaaggctcattgagcacgagcatatatttgaaaggttaccgtttaccatcataaacactttgttcatgtcttcgatgttccacgaaagatactttttcacagtggcattcttcggattattattactatatttgaaagtgttccattggatcataaaggataggttggaagctttattacaatccattaacgattccaccacgatgaaaacccttatctttagtagattctcattcaacctcgtgctattggcgctcacagattaccagatcataacacgttgcatttcatccatatacacaaacaaaaatatcgatgtcgtctccacctccctctatctgatgcaagtgatggaatttaccatgctcttgattgacttgctcaatttattcctacaaacttctttgaacttctgggaattttatcgttcacaacagagccaatctactgaaaacaaccatgttgtccaggatgaactcgaagacgaagttgattctggagagccccatgcagtgctggataatgatgatgacgaagacgatgacgacgatagacaattcaccggtttggaaggtaaatttatgtatgaaaaggcaattgacgttttcacaagattcttgaaaacggcactgcatctatcaatgttaataccatttagaatgccaatgatgcttctgaaggatgtcgtatgggatgtcttggcattataccaaagtgctacgactctgtggaaaatatggagaaacaataaacaactggacgatactcttatcactgtcaccgtagaacaattgcaaaattccgcaaatgaagataacatttgtatcatttgtatggatgaactaattcattccccgaaccaacaaacgtggaaaaataaaaacaagaaaccaaaaaggttaccttgtggccatatactccacttgtcatgcttaaaaaactggatggaacgttctcaaacctgtcctatatgtagattgcctgtctttgatgaaaaaggtaacgtcgttcaaactacttttacgtccaactccaccacaaccgctaccactagcacaacaacgacagcaaggacgacagcaaatcaatatgtatctacaaatgagacagagttaattcctaccaggacaatttctcatgatgtgggaatagcgtctagtcagaacatgaatatgtcagcatcaatgccagcgtcatccaacacgtggtatacgttcccactgcaacaaaccgataatacttccggcgaatcaaaatgttccacctatgaatttttgatatccaattcaaatgaaaaggaaaatagtattccagtaaaactaacagtagaaagccacgaaccaaactctgagcaaggacgggaagaagaacaaggtgctcagaggagaattgtcataccagatcattttatccagcatatttag

SEQ ID NO: 2346 - DNA, 405 bp, Saccharomyces pastorianus
atgtccggaaaagctcatggaggtaaaggtaagtctggcgctaaagatggcggttcgttaagatcccaatcttcctcggccagagctggtttgcagttccccgttggtagaattaagcgttacctgaagagacacgccacgggcaaaacaagggtaggatctaaagctgccatttatctgactgctgtgttggaatatctaactgcggaagtgctggaactggctggtaatgctgccaaggatttgaaagtcaagagaattaccccaagacatctgcaattggccatcagaggtgacgacgaattagattctttgattagagccactatcgcttccggtggtgttttgcctcatataaataaagctttgttactgaaagtggaaaaaaagggcaataaaaaatga

SEQ ID NO: 2347 - DNA, 2049 bp, Saccharomyces pastorianus
atggtacgtctgttatgttcgagagttgttatcgcttgtatactcgtaatttctcggtttttagtagtgccgattaatgcatggtcgcccacagatagctatgtaccgggtacggtgtcgtgtcccgatgatataaatctggtaagagaggccacgtccatctctcagaatgaaaccgcatggctggaaaagagaaataaagtcactagtggcgctttgaaggattttctgacaagagccactgtaaatttttcagacagctctgaaattttatccaaattgtttgctaatgacaatagtgaaaacctccccaaggttgctgttgctgtttcaggcggcggctatcggtccatgttgacaggtgctggtattttagcagcgatggataacagaactgaaggcgcgaacgagcatgggctaggtggcctcttgcagagcacaacatatctatctggtgcctccggtggtaactggctggtcggtactttagccttgaacaattggacttctgttcaggacattctcaataacatgcataatgacgattctatttgggatttgtctgactctattgttactccaggcggtattaatatttttaagactgccaaaagatgggatcacatctccaatgctgttgaatcgaagcaaaaggcaggttacaatacttctttagctgatatttggggcaaagccctggcctataattttttcccctccctgaacagaggcggtataggcctgacctggtcttctttaagagatttcccggtttttcaaaacgctgaaatgcctttcccaatttctgttgcggacggaaggtatcctggtacaaaagttatcaacctaaacgcaacagttttcgaatttaacccctttgaaatgggatcttgggatccttctttgaattcattcaccaatatcaagtatttgggtaccaacgtttctaatggtatcccactggaaagaggaaagtgtactgctggtttcgataatgcaggtttcatcatgggtacttcctccaccctattcaatcagtttcttttgaggataaattccactcatctaccgggtttcatcacaagattagcaaggcatttcttaaaggatttatctcaagacttcaacgatattgctgtctatagtccaaatccattcaaggatacgaagtttttggacggtgactatactacaagtatcgtggattcagacagcttattcttagttgacggcggtgaagatgacgaaaacgtacctgttttaccacttattcaaaaggagcgtgatgtggatattatttttgctgttgataattcagctgatatgagaatggcttggcctgatggttcttctttagtccatacctacgaacgtcaattcgttaaacaaggccaaggtatgtcttttccatacgtcccagatacaaatacttttgttaatttgggtttgaacaagaaaccaaccttttttggctgcgacgctaataacttgactgatcttcaatacatcccacctttggtcgtctatctacctaatgcagaatactcttttgatagtaatcaaagcgctttcaagttatcttattccgaatctcaaagaagaagcatgattcaaaacgggtttgaaattgcgactagaaataactttaccgacgatcctgaattcatgggttgtgttggttgtgccatcatgagacgtaaacaacaagcgttaaatatcactctgcctccagaatgtgaaacctgcttctcgaactactgctggaatggtactctggacactaccccattaccagatatcgaaaaagatgttcatcactcctttatcaacgttggccattattctaatagcaccatggagcaacaagaagatcatctcattgggcctgaagcttctaaatcatcctcttcgtcttctccaatttcgtcagctacggcaacccttgagaaaaaggcaactgcaaattctggatcacattcatctggaataagtgcaaagttcgctgtcttaatgatacttgctgtgtccatctttactggaggggtatga

SEQ ID NO: 2348 - DNA, 1104 bp, Saccharomyces pastorianus
atgtcatcccctgcttccaggtatgtcactttccaagggtcgcaaaattttagattacggatcgtcttagcaacattatcaggaaaacaaataaaaattgaaaaaatccgttcaggtgacttgaatcctggtctgaaagattatgaagtctccttcctaaggctgattgaatcggttaccaacggtagtgtcattgaaatttcgtatactggtaccactgtaatctacaagcctggtattatagttggcggtgcatctacccatgtttgtcctagttccaaaccagtgggttatttcgtggaaccaatgttatatttagctccattttcaaagaaaaagttttcgattttatttaagggcataaccgcatctcataatgatgcaggtattgaagctatcaaatgggggctcatgcccatcatggagaaatttggtgtaagagaatgtgccctacatactttgaaaagaggctctccgccactaggtggtggtgaagtacatctggttgttgactctttgattgctcaaccaatcacgatgcatgaagtagatagacccataatttcttcaatcaccggagtagcgtactctacaagagtaagtccgtcactcgtaaatagaatgatcgacggtgccaaaaaagtattgaaggacctccaatgtgaggttaacataacagcagatgtttggagaggcgaaaattcaggtaagagtccaggctggggtataactttggtggctgaatccaagcagaaaagttggagctatttcgccgaagatattggtgatgcaggctctatacccgaagaacttggtgaaaaagttgcttaccgtttattagaagaaatatcgaaaagcgctgctgtcggtagaagtcaacttccactagcaatcgtatacatggtcatcggaaaagaagatatcggcagattaagaattaataaggaccagatagatgaaaggtttataaccctcttgagagatataaagaagatcttctgcacagaagtctttttgaaaccagttgacgaaatggacaatgacgacatgatagcaactatcaagggtgttggttttataaatacaagtaaaaagattgcatag

SEQ ID NO: 2349 - DNA, 1032 bp, Saccharomyces pastorianus
atgaaactgccaaaaatttccatttggaaagtgctgctactgctcaatttcttcgttctacaagactttcagtttgcctccgctgcgaacctgccttctttatcaactagtacaaaagcgaatgatagttctagtaagaccacttctacaacaaaggcaacgaaatcgtctagccgaaactcagtcaccagccaacatgttacctcaagtaacagtactacctctaaaaccaacatgcctaaaatcactacaagtgcaagttcgagtttatattcaaactctagcatagccagcaatcagagcggaatttcaatttcgtctatcacaccttctagtgtttatatcccaatcacagatggaaacggattcatctatcaggcgcgtcatcctgacggcactgtatttattgcatttgcaagctgtctaggtgctattctattgtcgctaacagctgtttggattgttctaactgtaaagtcatggcgaagtgctagaagggaaaacaagttgaggaatttggaaagccaataccaatacgaccccttctatttccaatcgaactctaatgatgacgacagcgaaacctcttctcattctggtgagagtgatatatcggaaaagattctaaaggacaagtcgtctcgtatgagtctatataccctaggatcctcatctgttctgaacctattgaacaatactacggacaccaatgaaaactttaggtcttctatgtttatctctccaactgagattctgcagcgcgatgccaataattctaacacatggtctcagcaaagcaatggtagtgagatgtttgagtccttatccagcactcctaaggaacgtactgctgcccagatagttggtaagttttcagataatactactaatccattcaactacacatcatataatttaggccctgattctggagacaactctacgccgaagtccaacgctagtcaaggaaaaaccaaaaaataccgtcctccgagtgttcatctggaccaattactggatggtaaggattag

SEQ ID NO: 2350 - DNA, 1137 bp, Saccharomyces pastorianus
atggctgtgaaattgaaatggccttggttagggatcgcaatcccgacgttcttaatatcgtttataggttatggggctcattacttcattttatcaaattttttatcaacattgaaacaaatagcattcgaatcatctttactgatgatatgggtatcctactatttggctatctacacgaatccaggaaggccttcgcctacttaccagccaagccctagtgtctggtcaaactactgtaagaagtgccaaaactataagccagaacgttctcaccattgtaaagcttgtaatcaatgcgttttaatgatggatcatcattgcccgtggacgatgaattgtgttggcttcaaaaattatccgcattttctaagattcgtattttgggtcattacaacaaccggtgttttgttttggatacaagttaaacgtgtatgttttatttggcagcaaagacacttgcctggatatttattcaaaaagtcagaactactatttttaaccatattaactcctatgaatttctttgttctttttacgataacaattcttttcctacgatgtgtattcaatcaaataataaatggaagatctcaaattgaatcctgggacatggataggctagaatcgctattcgactctcaaagattgattaagaaattgatcgaaaatacttggaagatccatcctgaggcgaaatcaccccaacttgaaagagatgctgaaaatttgctgacgcaacataggatccgttttgaggaagttgtaaacttcccttataatattgatttgttcaccaatgcaataatatatcttggtcccctccatctatggctatggccatttggtgctcctacaggagatggaaatagctttccaaagaatgatatttccaaatatgatgttaattcttcattagaagatattatgctctcgcttccctggccgccagatggcggtaaaattaaaactgtttctaatcatagcaatttagcaatagagacgttcaatgaaggtggcgagcaagtggtgagaagcagaattgcccaaagtggtagatctgctattcgtgaaaagtggtataacgattggggggaatctttagacgactttggagtcgacgttgatatggaatag

SEQ ID NO: 2351 - DNA, 876 bp, Saccharomyces pastorianus
atggaaagaccagtgagagaccaatccgaagatacacaagaggatcacagtattccaaaaataattctgccctccgagttcaaaaaatgttctagaacagatcttgtagtactcatatcacggatgctagtattactcatagcaattaacgaaaattcctcaaccaaaaaacctgatgaccaaataactttaacgagataccattccaagattccaccaaacatatcaatcttcaactacttcatacgactgactaaattctcttctctggaacattgcgttcttataacatcactttattatattgatttactacagaccgcgtatccagattttacactaaattctttgaccgcccataggtttttattgacagctactacggtagcagcaaaaggcttgtgcgattcattctctactaatgctcattatgcaaaagttggtggagtacgatgtcatgagttgaatatcctagaaaacgattttctaaagagagtaaactacagaataattcctagagatcataatattacgttatgtagcgtagaacaaaaacagaaaaaatttgttatagataaaaacgcattagggtctgttgatttgagttgttattcttatgctaatcgtttgaaaagcggttataatgttctagacaaatactatcaaagaatagttcagttggtaggttcttttaatgcttcaccagataaaagtaagagaattgactatgttctcccgtccaattttaatgaagataatgaaagtggtactcgacttcagcaacccaaagcatcacctgagtctcactattcacaaaaacgaatctctgaagcagaggacgcgagtaagtataataaacgctcaaagccagattaa

SEQ ID NO: 2352 - DNA, 1635 bp, Saccharomyces pastorianus
atggccattggtaaaaggttactggtgaacaagccagcagaggaatcattttatgcttccccgatgtatgattttctgtatccattcaggccagttggaaatcaatggctgccagagtacatcattttcgtatgcgccgttatagtaagatgcgcaattggacttggaccatattctggaaagtccactccgcccctgcacggtgattttgaagctcaaaggcactggatggaaatcacacagcacttaccactctccaaatggtactggtatgacttacaatactggggcttggactatccgccattaacagctttccactcttaccttttaggtcttattgggacctttttcaatccatcatggtttgctcttgacaagtctcgtgggtttgaatcccctgataatggcctaaaaacttacatgcgttctactgtcatcatcagtgacatattattctattttccagcagttatatatttcaccaaatggcttggtagataccgaaaccagtcaccaatagggcagtctattgcggcggcagcaatactgttccaaccttcgttaatgctcattgaccatgggcacttccaatataattcagttatgctcggtctcactgcatatgccataaataacctgctagacgaatattatgctatggctgcaatgtgctttgtcctgtccatctgtttcaaacaaatggcactgtactatgcaccaatttttttcgcctatctattaagtcgatcattattgttcccaaagttcaatatagcgcggttaacagttattgcgtttgcaacactcgcaacctttgctttaatgtttgcaccactttatttcctaggaggaggactaagaaatatttaccagtgcattcacaggatgtttccgttcgctagaggtattttcgaagacaaagttgcaaatttttggtgcgttaccaacatatttgtgaagtacaaggaaagatttagtattcagcaactccaactatattccctagttgccacagttctcggttttttaccggctatgatgatgacattattacacccaaagaagcatcttcttccatatgtactaatcgcatgttctatgtcgttctttctcttcagttttcaggttcacgagaaaactattttagttccacttttacctattacattactctattcttctactgattggaatgttttatctttagtaagttggataaacaatgttgctttgttcactttatggcctttattgaaaaaggacggtcttcatttacagtacgttgtgtcttttctactaaccaattggctgattggaaacttcagttttattacaccaagattcttgccaaaatccttaactcctggtccatccattagtagtatcaatagcgattacagaagaagaagtctgttgccctataatgtggtatggaaaagttttattataggaacgtatatcgccatgggcttatatcatttcttagatctatttgtagcgcctccaacgaaatatccggacttgtgggtgctgttaaattgtgctgtagggtttatctgtttcagcatattttgggtatggtcttactacaagatatttacatctggaaataaatcaatgaaggacttgtaa

SEQ ID NO: 2353 - DNA, 1437 bp, Saccharomyces pastorianus
atgaagctttcaaccgtcttacttgctctttgtgcaggttgtagtctatgtatgttcatccctggcttcgacgggatagttcattttactgaaagcaatggagatttccgcaatgcaaagggccagaaaggtttaggtcaacaggagactgggaactttcatttacaggaacaaaaggtcatccaaaaggcagagtcgcttccttatcgatatattatagccttccgtgaagatagttccttgcagtgcattgaatcgcacaaacgaatgatccaggagatgcagaaggagtctgtaagtaagcttgcaaaagacgatgcctttttagtgacaatttcaacttcagcaccctctcatttgcaatttggaggtattgatagcttttttgatataaacggtctatttcgaggttatactggctatttcaccgaagaagtcattaagagagctctccaagatccaattattaaatttatagaacaagaaagcacggtgaaagcttcaaattcatcatctcaagaggaagctccttggggattgcataggatttctcacagagaaaaagcaaaatacggtcaggatttggagtatttatatgaagatgctgcaggaagaggagtcaaatcttatgtcctcgatacagggattgacatcgaccacgaagatttcgaggggcgtgctgtatggggagccgttatacctgataacgatgaggcttctgatttgaacggccatgggacacattgtgctgggatcattggttccaggcattttggcgtgactaagaatacgaatcttgtagcagtaaaagttctccgttcgaatggagaagggacggtgtcagacgttatcaagggtatcgaatttgttgttcaggaccacatagattcatcaaagaaaggaggccccaagttcaaaggatctactgctaacctatccttgggaagtagtaaatcacctgcaatggaaatggctgtggacgcagccgtagaaagtggtgttcatttcgctatcgcagcggggaacgaagatgaagatgcctgtttgagctcaccagccggtgctgaaaaaagcattaccgttggagcttcaacattcagtgatgatagagcatttttttcggattggggtacgtgtgttgatgtgtttgctccgggtgtaaatattttatctacctatattggctcgagaaatgcaagtttgagtttatcaggcacctcaatggctgcacctcacgttgctggtattttgagttactttctttcattacaacctagctcagatagtgattttttcgatggcactgtttcacctcaacaattgaaggagaaaataataaattttagtacgcagggtgttttgggtgatgtcggtgaagagacgcctaatagattaatatacaatggagggggcaagaaattggataatttttggtag

SEQ ID NO: 2354 - DNA, 1041 bp, Saccharomyces pastorianus
atgtcagcctcaaaagaagaaattgcgtccctcattgtaaactactttacctccattgtggaaaagaaagaagtctcagaagacagtgctgattcattaaatgtcgctatggactgtatctctgaagcctttggcttcgagagagacgcggtatcaagcatcttaaacaagtccacattcaagggccagagtttaaacaacctactaagtttaggatcaaaatccccagaatcgggtaaaaaggatgatgctcaaaatgtcgaagttaacattccagaagaagatgccgaaaccaaggccaaagctgaagacttgaaaattcaaggtaacaaagccatggctaacaaagaatacgaacttgccatcagcaaatatactgaagccatcgacgttttaccaacaaatgctatctattacgccaacagagcagcagcccattcatctttgaaagaatacgatgaagcgatcaaagacgcagaatctgcaatttctgttgacccatcttacttcagaggttactctagattaggttttgccaagtatgcacaaggtaagcccgaagaagcccttgaagcatataagaaggttcttgacattgaaggcgataacgcaacagatgccatgaaaagggattatgaaagtgctaagaagagggtcgaacaatctttgaacttggagaaaaccacttcagaacaaccaagggatgctggcgccaatgctggccaaggtgctggtgcaggcggattaccagatctaggctctttactaggtggtggtcttggtggtttgatgaacaacccacaattaatgcaagctgcacaaaagatgatgagcaatcctggtgctatgcaaaatattcaaaacatgatgcaagatcctagtatcaggcaaatggctgaaggctttacttctggtggaggaactccaaatttgtctgacttgatgaagaaccctgcccttagaaacatggcgggcagtctatttggtggagcggatgccccatctaccgaagacactccagacagcgaaaacaaacaatag

SEQ ID NO: 2355 - DNA, 732 bp, Saccharomyces pastorianus
atggcttacattaaaatcgctttactagctgctgtcgctgcttttgcttctgcccaaactgaagaagaaattgacgaattgaacgttattttgaacgatgtcaaatccaatttggctcaatacatgagtttggctgaagattcatcttctggtttctctttgtccagtttgccatctggtgttttggacgttggtatggctctggcttctgctactgacgactcctacaccagtttatactctgaaattgacttcggtgccgtctcctctttgttgaccatgttgccatggtactcttccagattggaaccagctttggaatccttgttaggaacttctacctctgctgctgcctcctctactcaagctaagacctcttctgctgctgcctcttcatctgctgttgtcagctcctctgctgttgcttcttcgtctgctgctgcttcttcgtctgctgctgcttcatcatctgctgccgcctcttcatctgctgttgtctcttctgccgccagctcttctgccgctgcttcctcttccgccaaggcttcttccgccgctagttccgccaaggcgtctactactgcttccggttctgcttccgctatttcccaaatctctgacggtcaaatccaagctactaataccgtttctcaacaaaccgaaaatggtgctgctaaggctgtcattggtatgggtgccggtgtcatggctgctgccgctatgttattataa

SEQ ID NO: 2356 - DNA, 2274 bp, Saccharomyces pastorianus
atgatgcgtggttttaaacagagattgataaagaagaccactgggtcttcttcttcttcaaacagtaaaaagaaggacaaagagaaggaaaaagaaaaagcttcaaccgcaacgtcggcaactaaaaagccgacttcagctacctcttctacccacggtaccacaagcagcacgggatcaaagactacgactgacaagggcaaggtgtcaggtacggctcctgcgcagggaaagcatcaaggtagttctaccccaaaggcaaaaacaactgccactcctacttccagcagcagcagcagtaggagctcaagcgtcagtcgctccggttcaacttccacaaaaaaatcaagttcgagaaaagggcaagatcagaccaaacaaccacagcctcagaagcaagggccttcttcatcttctacatcatcttctaccactgtgataagtgctaccccggtacttactgtcacaaaggatgataaaagggtgtccggtgaaaaccatgcacaccccacattattaggtgcagcatcagctgttccatcttctccaattacaagtgctacaggaacagtggcttcctcacacgtggataacggtaatagcaacatcaacaacaacagtaatactagtagtagcaatactgcagatgcaaaccattcttcttctcaaagtattgacattcccagatcatcacactcgtttgagaggctaccaacgccaacaaaactaaatcccgatacggatttagaattgatcaagactcctcaacgtcactcttcatcaagattcgagccctctaggtacacaccgttgacgaaactgccaaatttcaatgaagtttcccccgaagaaagaattcccttgtttatcgctaaagttgatcaatgcaataccatgtttgattttaatgatcctagtttcgacattcaaggtaaagaaataaaaagaagtactttggatgaactaatagaatttcttgtgacaaacaggtttacctatacaagtgagatgtatgctcatgtagtaaacatgtttaaagtcaatctatttagacctattccaccgccagtaaatcctgttggtgatatttatgatccagatgaagatgagccggtcaatgaattggcttggcctcacatgcaggcagtttatgaattctttttaagatttgtggaaagtcctgactttaatcatcaaattgctaaacaatacatcgaccaagacttcattttaaagctcctagaactatttgatagcgaagacattagagaaagagattgcttgaaaacaacattgcacaggatatacgggaagttcttgtcactaagaagctttattcgtcgttcaatgaacaacatcttcttacaattcatttatgaaactgaaaaattcaatggtgtagcagagctgttagaaatattgggttcaatcattaatgggtttgctctaccgctaaaggaagagcacaaggttttcctggtgagaatattgattccattacacaaggtccgtagtttatcgttataccacccacaattggcttactgtatcgtacaattcctcgaaaaagatcctttattaactgaagaagtggttatgggcttattgcgttattggccaaaaatcaactctacaaaagaaattatgtttttgaatgaaattgaagatatatttgaagtaatcgaaccattggaatttataaaggttgaagtcccactgtttgttcaattggctaagtgtatttcatctccacatttccaagtggcagaaaaagttttaagttactggaataatgaatacttcttaaatttatgtattgaaaatgccgaagttattctgcccataatatttcctgcattatatgaactgacatctcagttagagttagatacagcaaacggtgaagatagcatttcagatccttatatgcttgttgaacaggctattaattcaggctcgtggaatagggcaattcatgcaatggcattcaaagctctaaagatttttttggaaacaaatccagtattatacgaaaactgtaatgcattgtacttatcaagtgcgaaagaaactcaacaacgtaaaatccaacgtgaagaaaactggaacaagcttgaagaatatgtaaggggcttaaaaattaacaatgaaaaggaccagtatgcagccaatgagagaatgaatccagaactaagaaatgactacaataaagacaaagaaaataacacattaaatgaagagaatgaaaacgaaagtgacagcgaaatacagtaa

SEQ ID NO: 2357 - DNA, 273 bp, Saccharomyces pastorianus
atgggtgccgcatataaaatatttggcagaactgttcaacctcatgtattggccatatctacattcgttgctacggctgctgtgacatcttactttacaatgaagccaaagagtaaagatgaaaccaaggaagtccctcacctgaaccaacagaatggtgagaaaccgtcaacagcgaatgctgatgggaaagatgatgatgttatgaaaagtattgaaggatttttgaatgacctggagaaggatacaaaacaggataaaaaagtcaactga

SEQ ID NO: 2358 - DNA, 642 bp, Saccharomyces pastorianus
atgaagtatattattgaacatatggaggaaggattcagtgaatgggtcattctagagtatagccaaattttaagagatgttggagctgaaaacttaattttatcgtcgttaccaaagaacaccactgaaaaggacatacctgaaaagctattatcgcttggtttgagatggacaacaagtgatctgaagaacattgatgaagatttcaaggatttggaacctttgaaagacggaagagtttgtttattggacccaagagctgcgattgatttacaacctgaagacgctgcagaattcgattatttcgtatttggtggtatattaggtgaccatcctccaagagatcgtactaaagaactaaagactacatatcctaatctgctggtgggtagaagacttggcgacaagcaaatgaccacagatactgcgataagaacaacccagttgattgtcaaaaacaaaaccaagtttgaagatatcaagttcattgattatcctgaatttaggttcaataaaaatgaagccacggagatgccgtttagatatgttcttgataaagaaggtagaccaatcctaccagagggtatgttagagttgatcaagaaggattctgctcaaagcttggatgatctgctaatgtaa

SEQ ID NO: 2359 - DNA, 1713 bp, Saccharomyces pastorianus
atgatgaatcccagccaagataaacagcaacagcagcaccaacagcactatcatcatcataatccgtcgtcgtcgtcgtccaggattaccagtgtgtaccaggtcacgacgcccaagtctccgcaggacctcgaaaacagcatggacgtgccctacaaaatggacgccgccaccggcgatgcggacagggacagcgaaaacacccagcggttgaagtacgagtgtgccaagcgggaaatcctgagcgctctgaacctgcacattatgcttaaccacaagcacgttagtcggctgcacaggaacgtccagaaggtcgacgccaagttggttcttctggaaacgctgcatgacgataccggtttgctgggcaaaatcgagcaaacgtaccagctgaagataaagcagcaccagcaacatatcggcttcaacaacaacaacaacaacaacaacaacaacagcatcagcatagaaaatataaacgcatccacggactttggcgcctcatatcccgtgctgtccgactacaacatcaactgccagcccctgtcttccagcagcaacgctacgctgtcggcaccacacatggccccccaccactaccagaccagaagcaagagcaacgggttcctgcttgagccctccgtcctgcgtccggcaaactcgaacataatagactacaggatcaccggctccaagtccatagcgcatgccacggccaagcctgccgacgtgtcctcgccccgctcctcctccatttcccccacggacgagcaacccgggttccagatactccccttcaagccaagccagatgcacctgaaccacaggcgcaactacagcagcacctgcttgaccagcaacagcggcgtcatcggtaaaacggaggacaacgagcccatcttcagaagatacgacgggatcctgataataataacgtgctccaagtgcgaccgctccggcttcacctccgcgcagggcattgtcaaccatacccgtctaaagcactccaaactgtactcaagccagcccctggcggtcctgaacaaccaaaaactgctgcccgacgacaagcaggacccgaaaatcctgtccagcttcaaggagttgggcttagacccaaacaaagactacctgccctctgagatcgccataccgaaaccgcaatcaccaatcagcacctcagacaaccatgcgcggacccacaagtctgtcaaggacatcccgcacctggaaaaactataccagaataaggacgatttcaaaaaattgatcgatatggtcaatgagacgccgaatgacttgaaagagttcttgaatcagcgcgaaatgcagctgaaagaacaggacgaggacgaggacgaggaagaacgagaggatgactcttctagaactgataacgaagcttcgtacgtgccatcgccatccctctcggcaacagcgaccacaacaacaacaacaacaacagacccgccctccccaccggtattgtcctcttcgttgcaaagaaaacttttgcgtaaaagaagactggacgtggatactgccactactactggagatttgcccttaagagaaaggctgagaccaagccccaccgataagaagccaagaaaggccactcttttgatgaacaaagatgctagcagtgcgggaaggccttcgtcctactacaacctcaggtcaaaatcaaggcttcgcgggtcccatacatag

SEQ ID NO: 2360 - DNA, 1029 bp, Saccharomyces pastorianus
atgcaagtagtagaaatcgagcaggccccgagagactatataagcgatatcaagctagtcccttccagatcgttgctcttaataacttcatgggatggttcgctctcaacctacaaagtagacaaacaggcgaagaaagtcgatctttcgcaaacgctacaatacaaacacccgttgctgtgttgcgacttcatcgataatccagacctacaaatatacgtgggggctgtacagggcgaaattctaagggtagatttgacagctacgccccacttccaagccctagcaaacaatgaggccaacctgggcatttgtcgaatgtgcaaatacggcgatgacaaacttctcgccgcctcatgggacggtctgatacaggtcgtcgaccctttccactacccccaggaagtcggccccaccacgaagaacctgaaccccatcggtgcggaggtaaagaacaagatcttcgccatggatgccaactcttcccgtttgatccttggtatgaacaacagtcaggtccgatggttttacctgccccttcgcgaagacgacgacggaacgctggcggagtctggactgaagtaccaaataagagatatcgctctcttacctcaagaccaagacggttatgcatgcagcagtatagacgggcgagttgctgtggaattcttcagcgacgggggcaacgaagatgacttaaccaagagattcgcatttagatgccaccgcctcaacttgaaggacacaaacctggcgtaccctgtaaattccatcgagttttcccctgtctccaggttcttatacacagctggctctgatggtattgtttcgtgctggaatctacaaactcgcaagaaagtaaaaaactttcccaaatttaacgagaacagcgtggtcaagatggcttgcggagataacatcctatgtctggccacctcagacgataccttcaagactaacgcagccattgatcatgccatcgaactggaagcaagctcagcatacataatattcgactatgagaactag

SEQ ID NO: 2361 - DNA, 1761 bp, Saccharomyces pastorianus
atgtcattaactgctgacgaatacaagcaacaaggtaacgccgcttttaccgctaaggattacggtaaggccatcgacctcttcaccaaagccatcgaagtctctgaagctccaaaccatgttttatattccaacaggtctgcctgctacacctctttgaagaaattcactgacgctttgaacgacgctaccgaatgtgtcaagatcaacccatcatggtccaagggttataatagattgggtgccgcccatttagggcttggcgatctagatgatgctgaaagcaactacaagaaagccctggaattagatggcactaacaaagcagctaaggacgggttggaccaggtccatcgtagtcaacaagcgagacaggctcaacctgatttagggttgacccagttatttgctgaccctaatctaattgaaaatttgaagaaaaacccaaaaactagtgaaatgatgaaggaccctcaattggtggccaagttgattggctacaagcaaaacccacaagccattggccaagatttattctccgatccaagattaatgaccattatggctacattgatgggtgtcgacttgaacatggatgacgtaaatcaatcaaactccatgccaaaggacccagccactgacgccaacgctgaacaaaagcaagacgctaaaccacagactacaaagagcgaaagttcttcaaaggctccacaacaagaggaaactaaggaagccgaaccaatggaagttgacgaagatgactctaaagtcgaagcagacaaagagaaagccgaaggtaacaagttttacaaagcccgtcaattcgaagaagccatcgaacactacaacaaagcttgggaactacacagggacatcacttacttgaacaaccgtgctgccgctgaatacgaaaagggtgattacgaaaccgctattgcaactctaactgatgctgtggagcagggtagagaaatgagagctgactacaaggttatttccaaatcatttgctcgtatcggtaatgcttaccacaaattaggtgacttgaaaaaaaccatagaaaattaccaaaaatcattaactgaacatcgtacagctgatatcttgaccaaattaagaaacgccgaaaaggaactgaaaaaagctgaagccgaagcatacattaatcctgaaaaagcagaagaagctcgtttagaaggtaaagaatatttcacaaagagtgactggcccaatgctgttaaggcttacacagaaatgatcaaaagatctcctgaagacgcaagaggctattctaatagagccgctgccttagctaagctaatgtcattccccgaggctattgctgactgtaataaagccatcgaaaaggacccaaatttcgtaagagcttacatcagaaaggctaccgcacagatcgctgttcaagaattcgctggcgccttggaaacgttagacgcagcaagaaccaaggatgctgaagtgaacaacggcgcaagtgccagggaaatcgaccaactatactacaaggcgagccaacaaagattccagtccaacaccggtaacgactccccagaggaaacctaccaaagggccatgaaagatcctgaagtagctgccatcatgcaagatcctgtcatgcaaagtattttgcaacaggctcaacaaaaccctgctgctttacaagaacatatgaagaacccagaagtatacaaaaagatccaaactttaattgcctctggtattatccgcactggccgctaa

SEQ ID NO: 2362 - DNA, 1863 bp, Saccharomyces pastorianus
atgaacataagtttgcttttctactacttcatcattttgatctacaatctaggactgacagatgcacggggaaaacaagcaagagaaagactcccacctttacagctaaacccagccccaccgagacatagagatgcagatagaagaccaccaccgtttgatcatgggccatactcttacggaaaactcattaaccattttccggcgtacaatcttactgatttgataaatgacagaatactgaataaatacggtaattcatgcagggcaaatgtcttgacaggtgggtttgtttcatcaggaaataattcgtcacattcgaaacttttcaaccacactttaaattatcctacttttttaatccgttgtgataatggcagtaacaattctaatttctcgcacatcctacaagacttcgtccacgatatcaaccacaatgtacgtatccaggatgatagtaccgaatatatcgggaaggatccatttcacttgggaatgatgatggttacttttgcttgtgggtgcatatgcgtcgcaacttggatgctttttttggttgtgttactactcccatctgataaccataatagaaggaaaaaacttgtgcatatttacgtgctcttttttgcggttgtaagaacggtattccttaataacactatatccgtaatctttaacaagcagtatcacgacgactatcaggattctagccagtttgagtcatctattttagaggctaatccctataaaatattcggattaatctgcaatattttgagtaatataaactggatttatattgttcattacttacagtgtacttatgggaagcccacttggaattgggtcccatttaaaatgaaaaggggaactcgggtcattatcattgtgggtaccctcctttcattcattgacaatcttttgttcgggttgcttctttggaataagaggcctgttgtcttgagggcttttttcaagggaatggaactcttgatgtacacaatttttatttcagttatctgttatttcacatggcacaattttgcttacgtacttttaccaaaaactgccgaaattagtggggatagcaaatacaaaacgaaacttcgaatactttgggagaactaccacgaaacgattccgttgctgacgtacaatatcctgatctttgtattattttatattaccactatttttttcgctgccttcacttttcaccttagaaaatggacttttagctttgttcaatttttgaaagttttgataacggtgaacgtttggggtttaattggggtgttggagaagagggagctgcatataagcaaaaaaactgtactcggacggaaaattaacaacaaagataagttttttgctaatccaacggtcaattattacgaggacgacttaggcaagcgcataagttccatgacattagaccgggacctaaacactacccaaagcaaagatacctcacacggttcatcgagcttagtggtttccccctcgcccacttggaaatcaccaatcgaaagaataaaggacagaagaaaaagacacaagataatgaaatccaaaaacaaattcgaacaaaagcacggtacaggaagtaaacccagtttcagtgctgccacaaaagcaacgctctctaaataccgaaagctgttaggaaagtctgagcgaaaaactgatttgtatgagcccaaacttgaggtcgggccaaaaaaggagcgcacgagagctaagacgagaagtgctgcccattctagaggttcaattcaccatgctacgtgccttagtgatgatgaaagtgtggagacagaacttcgaacgaaccacatttacaattacgaaagcagtgattaa

SEQ ID NO: 2363 - DNA, 2370 bp, Saccharomyces pastorianus
atggtatcaaacgagagaaaaaagaatcaaatagatatcactcccattgataatctatgtgctgcgttcgataagactttgaagtctacccctgatgttcagaaatacaatgatgctgtggatacaatctttcagttaaggcagtactctgagcctggaatgctggcgaataatctagcaggtaatgaaatcttcaaagacgtccagaaaattgaagacatattaaccagatcttaccaggaccattctgagtcccgcgcacatttgtcgaagcgcattcaagaagatatcccattcgcactcgatttgtatgaaatgctatcaagatcatctgtgcacgttcttgttggttgctttccttccgaaaatgcaacggctccattactaaatgagctgcaagcgagaatacattatggtgaagatcttcatgttacatatctactcagtgtggtcctacaactgttaaataagttcaagtatgacttcaaagatgtccgatttttagtgaaggagctttgtttacgcataaacgaagacggggtgaaatcgatgatgctgataatttttgctgaattgcaatcgagttttcagaaagattttgataaaacgtttatggatttcatgagcagtttgatcgtagaggcagaaatcgatgtggggaacgacccactatcaatcattgtcaaagttctgtctgaactgtacccttccttaactgtactgtgttccgaaatatttctaagcaatgggctaactaagctttttaaaaaaagagttttcgaacaacaagatttacagtttacaaaggagcttttgcaattgttatctgcagcatgtattgatgagaccatgagagtgtacattactgaaaactaccttcaacttttggaaacatcactaagcctagaagatataaaaatatactctgccttagtactagtcaagacgtggtcattcactaaattaacaaatataaacataacacaactatcagagattttgataagtgcaatttcaaaatgcgaaatgcctaaaatagaaagtgtggataagggcacggtgagacctgatgaagtcaagaaagtagaaatgtgcgttgaagggttagcatacctgagtttgaagccgtcagttaagaacatgatcagaaacgatgaaaattttgtcaaaatgctaataaccatggttcaaaaccagaaaatgacgcactctttatatggtctgctagttatggtagctaatttgtccaccctgccagaggaaaacaatggcagcgctcaatcgataaatgacctgagagtttatgcggacttaaaagccccaagcacgaagaatacgggaaatgacaaagaatcaaaagaggatattactttgtttgtcgaaaagtacgtattgaaggcagagttaatttcctatttgaaaaccaaaatgcaaactctgagccccaattgcaaacagcaggtagtaagagtcatctataacaccacacgctcgaaagggttcatttccgaatgcattgcgcagggtggtaccgctgtcgtcttagaatatctagtcggtaagcaagacgttggggaaccgatccgaattttgggttgccgcgccctgtcaagaatgttaatattcaccaatccggccctgatatttaaaaaatactctgcgttgaacgctattcctttcctattcgaattgctacctagatccacacctgtggacgacaatccgttgcataacgatgagcaaataaaactaacagataattatgaggctttgttggctttaacaaatctagcctcgtcagagacttctgacggtgaagaagtctgcaagcatattgtgtctacaccggcctattggtcgacaatcgagaatctgatgttagacgagaatgttccattgcaacggtcaacactggaactgataagcaatatgatgagttatccattaacgattgctgcaaagtttttcaatttagaaaacccgcagagtttgaagaacttcaaaatactggtgaaactattacaactgtctgacatcgagtcccaacgcgccgtcgttgctatctttgccaatatcgcaactactatcccgctgatagccaaagaactcttgactcaaaaagaactaatcgaaaacgccgttgaagtcttcgcggagcaagtcggcgatatcgagctaagacaaagactaattatgcttttttatggactttttgaaatgattccggacaccagctctaaggagaattatcccttgctacaagaaaactcaaaactgaagaatgctttgaacatatctctagagagaaaggactcgggaccggagttctcggcagccatccctatcatccttgccaaaattagagtctaa

SEQ ID NO: 2364 - DNA, 867 bp, Saccharomyces pastorianus
atgtcaaagaacgagttttttggtaacgaaaatgatgtaatctggagtggcccaagattcagtgattcgcctgagttccaggcaatgaaagaagacgtcgctgcagaactgtttgaaataaatggccaaataagcacactacagcaattcaccacgacgctaaagtcgtttatagataagggtgatgttagcgcaaatgtagtggagaggatcaataagaggtctgtggcgaagatagaagaaataggcgagctaatcaagaaggtcaacacatcagtgaaaaagattgatgctctagaggaagcaagtctggataagactcaaataatagccagagaaaaactggtaagggatgtgagttattctttacaagagtttcaaggtatccaacggcagtttaccggggtaatgaagcaggtcaatgacaaggcgagagagtctcttgaagcaaccgaaatggcaaacaacacagctctaatggatgaagaacaagggcagaaccaccaaatgagtaaacgaatatcaagcaaccaaatagtcatcgagagagatccaataaataacgaggaattcgcctaccagcaaaatcttatcgaacaaagagaccaggaaattagcaatattgagagaggtataacggagctgaacgagatattcaaagatctgggaagcgtcatccaacagcaaggggttttggttgataacattgaagcaaatatttatacaacatctgataacacccaaatggcttcaaatgagttaaggaaggctatgcgataccagaaaagtacgagcagatggagagtatatctgttggttgttcttctcgtgatgcttttctttatttttctcattatgaaaatttag

SEQ ID NO: 2365 - DNA, 777 bp, Saccharomyces pastorianus
atgggcagcagatcagaggatgtaggagcagtggatagagggagctccagagttgaacaggacgatgttcttatggatgatgactctgattcatcggagtacgtggatatgtggatcgatttatttcttggaagaaaaggccatgaatacttctgcgacgtagatcctgaatacattacagatcgttttaacttaatgaatttgcaaaagacagtttctaaattctcttatgtggtacaatatatcgtggacgatttggatgacagtatcttagaaaacatgactcatgtccgtttagagcaattagaatcagattctcgtaagctgtatggcctcattcatgcacgttacatcataacgattaaaggtttgcagaaaatgtacgccaaatacaaagaggctgattttggtaggtgtcctcgtgtctactgcaacctacagccgttattgcccgttggtttgcatgatgttccaggaatagattgtgttaaattatattgtccatcctgtgaggatctttatataccaaagtcttcgaggcatagctcgattgatggtgcatactttggaacaagtttcccgggtatgtttttgcaagcatttccagacatggtgcccaaacatccaacaaaaagatacgttccaaaaatttttggttttgaattacacaaacaagctcaactaacgaggtggcaggaactacagcgactcaagatggtcaagaagcttgaattcaaaaatgtggatttgacaaaaagtggtggttttaaaacctag

SEQ ID NO: 2366 - DNA, 1464 bp, Saccharomyces pastorianus
atggacgatataattactcaagtctctccaggcaatgctgagcccgcgcccattttacaagagcagcaccaacaacaacaaaactcgcaatatgagggtaatgaggaggattatggtgattctctgattcacttgaacattcaggaaaaccattatttcatcaccagagatcagctaatgtccctccctgaatccctattactatgtttatttccctcaggtgtatttttggaccgttgtggtcaagtcatcaccaatttaaccagagacgatgaagtttatattgttaatttccctcccgattgttttgagtacatcatggagatctatacaaaggcgcacgacgatttatataatcatcccgtggagaggtttttcgatagaccatcaagtagttttgtctctaatgcaaaagggtttttcggactaaacaataacagttcaatctcaggcaacaatgaacaagacattttacatcaaaagcctgctattatcgttttgagagaagatttggactattattgcgtccctcaggaacaatttcgctttgattctaccaacgaagaaaataatgaggacttgttgcgacattttatggctcaagtgaaaatggctgctggcagttatttgacttcaaagacatcgatttttcaaggtttgtattcttcgaatagactaaagcaacaacagcaacaaaatctaattgagaaggaaacagactctacttcaaaggcaaaatccatttctaaaaaactggggcccgccgaacagcatctgatggatatgctatgctcttccgggttcacaaaggaaacttgctggggcaacagaactcaagaaactggtaaaacagtcataagttcattatctctttgccggttggccaatgagaccaccgaagagtttaggaagaaattcaacggggcaagggccaagtgggaagccgagcataaaccctttcaagacaaccccatcaccccaatgcaatcaaacgtctcagtcaactctttatctgtaagtaaatctaacagtaccctttccacggctagaaatactaccagtggaggttccttaccttctgctggacgcgataagagaaaatcaagactttcgaaactagccgataacgttcgttctcattcctcatcaagacatagttcgcaaacaagaaacaagctgccagaattgcccaaattgtacgacctcgtacccaagcccaatatcaacgctaagctgctactcttttggagaaaaccagctcgtaaatgttggtggggtgaagaggatatcgaattagaagtggaggtttttggctcttggaaggatgaagcaaacagagttatcgaactggtattgccaacgaacgcggaccccgaagcagaactaaataagatcactgtacccgtccgattacacatccgtagagtatggactttagagctaagtgttattggcgtacaatga

SEQ ID NO: 2367 - DNA, 474 bp, Saccharomyces pastorianus
atgatagacgccgttaaaatcgttctgctactcgttatacagtcccttcagtacatttgtcgtacatgcataggatttttattgataccatttttgggcctgtatacgtttgatttcttcttatacctctatcggacagcgctatatctatcacaaatgtttaactacaaaagaaaattaggactctctaaaagaaatagtagaccgtatagtgcaagagtgcaaacaaaatacaacagctgggaatgcagggagattctagttggtcaaataagggatctgaggacatttttgttgtccgtaattcacagcaatgcaaagagatttttctccgcaaggtttcaaacgaaatcgaccatcaattccagctttaacgcaaatgatgctgaaacaacatcagacacatccggtttcacaaatctgcatttagcaagatcatccgaagaggcatattacatcgcaggatcgatataa

SEQ ID NO: 2368 - DNA, 186 bp, Saccharomyces pastorianus
atgaacggtatgtttgctatgccaggtgcaggtgccggtccagccgccccacaacaaccaaagtcaagattccaagctttcaaagaatcgccattatatacaattgcactaaacggcaccttcttcattgctggagtggcattcattcagtctccacttatggacatgttggctccacaattataa

SEQ ID NO: 2369 - DNA, 1449 bp, Saccharomyces pastorianus
atgagtgatacaaagaaggacccagctgatttactagcctctttgaagattgataacgataaaaaggaccccagtgcaacttcaacgaaggagaccgctgaaagtaagctagacaacaccatcgctccagtcaaggttgaggaaaaagcagttcctaaaactgacgagaaaaaggaagatgaaaaggacagcaatttggtcagctcggcatatgaagttaaggtcaaacttgctgatatccaagctgatcccgattcaccactctacagcgccaaatcctttgatgaattaggactagcgccagagttactaaagggaatatatgccatgaaatttcagaaaccatccaagattcaagaaagagccttaccattactattacataacccagctagaaatatgattgctcaatctcagtcaggtaccggtaagactgccgctttttctttgacaatgctgacaagagtaaacccggaagacgcatccccacaggcaatatgtttagccccctccagagaacttgctagacaaactttagaagttgttcaagaaatgggtaaatttacgaaaataactagtcagttgatcgtcccggactcctttgagaaaaacaaacaaatcaatgctcaagtgattgttggtactccaggtacagttcttgacctaatgcgtagaaaattgatgcaattgcaaaagatcaaaatatttgttttagatgaagctgataatatgttagatcaacaaggtcttggtgaccaatgcattcgtgtcaagaggtttttacccaaggatacccaattagttctattcagtgctactttcgctgatgcggttaggcaatatgcgaagaagattgttcctaatgcaaatacactagaattacaaacaaatgaagtcaacgttgacgctattaagcaactgtacatggattgtaaaaacgaagccgataaatttgaagttctgactgagctttatggtttaatgaccattggatcttctattatttttgttgctaccaagaaaacggcaaatgtcctatatggtaaactaaaaaacgaaggccatgaagtttctatcttgcatggtgacttgcaaactcaagaaagagatagattaatagatgatttcagagagggtaggtccaaggttttaatcactaccaatgttcttgcccgtggtattgatatccctacagtttcaatggttgtaaactatgatcttccaacacttgctaacggacaagccgatccggccacttatattcacagaatcggtagaactggtagatttggtagaaaaggtgttgccatttccttcgtacatgacaaaaactctttcaacattttatcttcaattcaaaaatactttggtgatatagaaatgacacgtgtcccaacagatgattgggatgaagtcgaaaaaatagttaagaaagtattaaaggactag

SEQ ID NO: 2370 - DNA, 1329 bp, Saccharomyces pastorianus
atgtttgtttcaccgcctccagcaacagcgaggaatcaagtattgggaaagaggaaatcaaaaagacgtggtagcaattcaaagaatgttcagcctagcgctgatagtgtagatatagataaaaacgtctcttttgtgccgaacaacaatccttcatataatgaccaagaagcaaatacaccgaatcactacagtctgaatgctagtccagggagcagcagaagcaatttcgttagcacacctccagaatacgcagacagagcaagaatagaaattaggaaaagattattgccgaccggagggaataagcccgtcaatgtaaacagtgtctttctcgacaatgcaaacattcaacaggtaacctcgccagacagccaaagttttgtttcagatcatgcatcttcatacgaatccagtatattttcacacccatctactgttctcacacatgtcaccacagatagttcgttaattgatttaaagacgccgaagttcgtgacagaagtaacgcttgaggatgcactacccaaaactttctatgacatgtattctccagaggtgcttatgtctgatccagcaaatatactttacaatggacgtcccaaatttacgaaacgtgagttgctcgattgggacctaaatgatatacgatctttgttaatcgtggagcgattaaggccggaatggggatctcgattaccgagtgtaataacctccggaataaactttccacaattcaggttacagttgcttcctctctgctccagcgacgagtttataatagcgacattggttaactcggacttgtatatagaggcgaacttggatcgcgatttcaagttaacgagtgcaaaatatacggtagcatcagcaagaaaaagacatgaagaaatcattggatataaagaaacaatcatgcacttgtctaagcccgaatggagaaatataattgaaaactacttactgaacgttgccgttgaagcgcaatgcagatatgattttaagcagaagcgctctgaatacaagaaatggaaacagctcaattccaatttgaaaaggcccgatatgccgcctccaagcctgataccccccggtttccatgctcatgaacatatttcctcaggtagtcttttgaaaaaggctttaatgaaaaacttgcaattaaaaaactataaaaatgacaccaaaacattaggtgctggtacacagaaaaatgtcgttaataaggtgtcattgactaaagaggagagggcaggtatttggttacaatgccaaacacaagtttaccaaagattgggcttagactggacgcccgacggaatgtcctag

SEQ ID NO: 2371 - DNA, 453 bp, Saccharomyces pastorianus
atgtctgacataaacggaatggaaattccatccagaaaggatgaaattagacaagtcactccaaaggatccagtgcaagaaatggaggataagagcatctaccacgcaaagataaaaaaatccgattccgggaccggcctgggtggcataccgttgcattcaaggtcttctagtaattccagcataacatctacaggccaaagcagtaggcgagtgaccaagaaaacaacgaagaaaaagaaaaagaacgcttgctatttcgataagtgttcaagtgcagcatcaaaattcattggtgactgtaatttttgcaaaggccatttttgttcgaaacacagattaatggaaaaccacgcttgtgacggcttaacaagctgcaaggaacaactacatcaaagaaacgctgacaagctagaggcagaacaaaccaaagctccaaagatacaaatttaa

SEQ ID NO: 2372 - DNA, 1398 bp, Saccharomyces pastorianus
atgactgaaaaccagacagctcatgtaagagcattagtactagatgccactccattgattacgcagtcatatacacattatcagaattatgccgaatccttttacactacccctacagtgttccaagaaattaaggatgcccaagctaggaaaaacttagagatttggcaaagtctcggaactttgaaattggttcacccaagcgaaacctcgatagctagaataagtacattcgctaagttaaccggtgattactccgtcctaagtgctaacgatttacacattcttgccttagcatacgagttagaagtgaaattcaataaaggtgattggaggctgaggaaaaaaccaggtgatgcactcgacgagttaaaaaccgaagaagaagcagaggagaaagaaaaggagactgaaaacaacgaaaaggaggagaacactggaaacataccaaagaaaaaaaacagaagaagaggaggaaagaagcaaaaggccaaaagagaggcaagagaaactgaaaagtcatcaccaactgagaacgaaaacaaggtacaccttgaccaagacactaagacagaagaacacatcgaagaaacagaaaccaaagagggagtatctaatgatgaagggacaaaggaaacatccgaattgaatgaagagttcgagaacgctgatgacgatggtagttggattaccccagataacttgacagaatcaataattagggataatggtgaagatactactggttcgttaggcgttgaagcgtccgaagaggatcgccatgttgctttgaaccgtccagacaaccaagtggcattagccaccggtgattttgctgttcaaaatgtagcactgcagatgaacttgaatctgatgaactttatgtcaggcctgaagatcaagcgacttcgtaattacatgctaaggtgccacgcctgtttcaagatgttccccttaccaaaggatggcaaaccgaagcatttctgtgcctcgtgtggtggacaaggtaccttattaagatgtgcggtttctgtggactcgcgcacaggcatgattacaccgcacttgaaggccaatttccaatggaacaatagaggtaacagatactccgtagccagccccctatccaaaaactctcagaaaagatacggtaaaaagggacatgtacattccaagccacaggaaaacgtgattctcagagaagaccaaaaagaatacgaaaaagtgataaagcaagaagactggaccagaaggcacaatgagaagattctaaataactggatcggtggcggctctgcagacaactacatctctccgttcgccattaccggcctgaagcaacataacgtccgcataggtaagggaagatatgtcaatagttccaaaagaagaagctag

SEQ ID NO: 2373 - DNA, 1203 bp, Saccharomyces pastorianus
atgcctgtggaaaaggatttgaaaagtgcttacaaaaccttgtacgatgataaagaacctttgaaagcccttcatctttatgatgcgattctgaaggactctcccacaaacctgatcgctcttattttcaaagcagcatgtcttgaaaaactctattttgggttttctgattggcataacgatgaaaccatggggaatgctaaagctctcttagacaaggcattgagaacggctgaaggtagaggcaaccgatcgaaaatagcccttgtttacttccgttactttgttcatttcttcaataacaaggattatgaacaggcgtactcatacatggagaaggccaaacaattcggttatgttgatggtactttgcccctatgggagagtcgtctggaaataaaattgaaaaggaaaagtaagaagcagaaggatactagcactacggatatagtttcaacagcagaaaatgctggagacgaaagggagaaattgccagttcctggtaaaacaactcttccctttgaaagtgaggttgttatgcaaagtcaagaacccccaaagtttagagtggattggtaccaatccaataactctgttactatatccttattcactgccaaccttcccgagtctaaagataagataaatttaataatctctccaaaggatggaagaatgttatcagtatcgtatgaagttccgataaatgggtctgaattccaattcaatgctaaactttctcacaaggtagatttacaaccactctcattaaaagttttttcgaaaaagctggaaattactttaagcaaagcagacaaagtacaatggaaaaacttagaaggagactctcaaaaggaattttcaagagctcccaagataagcgagagtttggactcttcagcattgactgcatcggcagaaacactctcgaaagagatactttcttatccatcgtcttctaaaaaaaacatagactggtctaaactcgatatcgatgatgatgatgccggtgaagaagatgcgggatctcctgatgcctttttccaaaagctttacgccggagctgatccagacactaggagagctatgatgaaatcatttatagaaagcaacggcacttcattaagcacagactgggaggatgtatctaagggtgaagtcaaaacttcacctccagaaggcatggaacctaaacattggtga

SEQ ID NO: 2374 - DNA, 774 bp, Saccharomyces pastorianus
atgtcacagaaactatgtacattaaattttgtgcttagcggaaagcagggcgatttggtcattagagatgttcaactttggggggatcacctcgtggtctgtaatccagttccggagtggaaagggcaattcgttcagtatgttgagcttggaaagctgccattgtggatccgctccaaggacatccgcacatacagatgttacagcactagcgcaaccacattagcttattttaaatcaaagcttaaaaacgcgagtcgaggcattgtcatagaactgtccgacaaggttgaccagcggtcaaacgagccagcatatgtgattctgtttcgagagaacacggaactaagttgctttcgggtggacttagcaatgaagcatgaattcgatagccaaattttcaaattaaagcaagagcttgggaaaacaagggcttctgtctcgaaagaaggtagcatcgatataataatacaacaatctcaacaaaggaagatcggaacaaaaaccaaagtgtaccgcaacgtccaaattaatgataagcgcctccagttcaatgaaacgttatccaagcttatattaggtggcctccggcttcgaggcattcccaactccactacagattttcagaggctatacaagacaactttcgataccgctgagttcgcgcacagagatgaactaaaacgcatctctatgggatctggcgaagatatttcattcgaatcattgcaggaaacagtggagactttgctaaggctatttacaaaatcatga

SEQ ID NO: 2375 - DNA, 1020 bp, Saccharomyces pastorianus
atgccactacctccgtcaacactaaaccaaaagtcaaacagagtctactccgtagctagagtatacaagaatgcctgcgaagagagaccacaagaatattgggattatgaacaaggggtgaccatcgattgggggaagatttccaattacgagattatcaacaagattggaagagggaaatattcggaagtgtttagcggtagatgtattgtaaacaaccaaaaatgtgtcattaaggtcctgaaaccagtcaagatgaagaaaatttatagagaattaaaaatcctaactaatttgacaggtggccccaacgttgtcggcctttacgatatagtacaagacgctgattccaaaatacctgctttaatctttgaggagattaagaatgttgattttaggactctatatccaactttcaaacttcctgacatccaattttacttcacccaaatattgattgcgttagattactgccattcgatggggataatgcatagagatgtaaagccacagaacgtgatgattgatcctacggaacggaagctaagactgattgattgggggctagcggagttttaccacccaggtatagactacaatgttcgtgtcgcttcacgttatcacaagggaccagaactactagtaaacttgaaccagtacgactactccttggacttgtggtcagtaggctgtatgttggctgcgattgttttcaagaaggagccatttttcaaagggtcttccaatcccgaccaactggtaaagattgccgcagtactgggaaccaaggaattattaggatacttgggcaagtacggcttacatctaccatctgaatatgacaacataatgagagacttcaccaaaaaagcatggactcatttcatcactcctgaaaccaaactagcagttcctgaagtggtcgatttgattgacaacttattaagatatgatcaccaagaaagactaacggcaaaggaagccatggaccataagtttttcaaagccaagtttgagtag

SEQ ID NO: 2376 - DNA, 807 bp, Saccharomyces pastorianus
atgactagtctagatgacactgttttaaccaagaaaaatttagctttgttggacaatgctaccaactacacgcgtcccgccctggattatttccactatgcatttaactatgataatttggatgtctccaccacatggcggttgctgataaaaatgcgcaagcatagattgctgcgattacccagttgttcctctgaaaacgagatcgactataatatatatatggctaggctgcatcattgcatgtggagacgttggtccatacaccagttcaagctggatgatttaaaaattgatccgctgagtataaactggaagaaggaaatagacgttactctcctttacggcccggacttggctgaagtaaatgagagagaacaagcttcttcaccaagtgtttctgtaaacgatacaagccgacaacaaaagcattatagaaacacagaaaggcacaggaatggctcgtcctcatcatttcaaacaaaggtgtttgccgtaaaaggtaaaccgtcccctcagcggacaatatcgttcgacgacaccgtcaataggcgagacattgataaacgtgggagatttcacgaatcgtgtagtctcataaacgatagaaatccgtttcaagattactctattgtttgggacgaaagaacacatcgctaccatcgccgagcacacacagatgcgaacgattacaatcatatccgttccaccgataatgaaattccccggaacgcgtctttcgataacacaataattcaacaaaacctgcatagcatcacggagggctcctatatctatataaagtga

SEQ ID NO: 2377 - DNA, 1164 bp, Saccharomyces pastorianus
atgtctcacagaaagttcgaagcaccacgtcacggtcatttaggtttcttgccaagaaagagagctgcctctatcagagctagagttaaggctttcccaaaggatgacaaatccaaggccgtcgctttgacctctttcttgggttacaaggctggtatgaccaccattgtcagagatttggacagaccaggttccaagttccacaagcgtgaagttgttgaagctgtcaccgttgtcgacaccccaccagtcgttatcgttggtgttgtcggttacgtcgaaaccccaagaggtttgagatctttgaccaccgtctgggctgaacatttgtctgacgaagtcaagagaagattctacaagaactggtacaagtccaagaagaaggctttcaccaagtactcttctaagtacgctcaagaaggtgctggtattgacagagaattggccagaatcaagaagtacgcttctgttgttagagtcttggtccacactcaagtcagaaagactccattgacccaaaagaaggctcatttggctgaaatccaattgaacggtggttccatctccgaaaaggttgactgggctcgtgaacatttcgaaaagactgttgctgtcgacagtgtctttgaacaaaacgaaatgattgacgctatcgctgtcaccaagggtcacggtttcgaaggtgttacccacagatggggtaccaagaaacttccaagaaagactcacagaggtttaagaaaggttgcttgtatcggtgcttggcatccagcccacgttatgtggactgttgccagagctggtcaaagaggttaccactccagaacttctattaaccacaaggtttacagagtcggtaagggtgatgacgaagctaacggtgctaccaacttcgacagaaccaagaagaccatcaccccaatgggtggtttcgtccactacggtgaaatcaacaacgatttcgtcatggttaagggttgtatcccaggtaacagaaagagaattattactttgagaaagtccttgtacaccaacacttctagaaaggccttggaagaagtcaacttgaaatggattgacactgcttctaagttcggtaagggtagattccaaactccagctgaaaagcatgctttcatgggtactttgaagaaggacttataa

SEQ ID NO: 2378 - DNA, 660 bp, Saccharomyces pastorianus
atggaacagtctgccatcgagtatccggactcggacatcaggtacagcttcctgagcactttggatcatctgccgtgcgagcttataaggtctttacggttgatgcagaccatcgatctgtctaaaaacgctggtgataagcatgagctagaaaatgcttcgacgaatctgatgctggtagctaattatgtagacgatttagttgatgaccagatccgcttcttgacacagcataggaaagaattggaaatacagaaatcagtaacgaaatctttcaatacctctgtagataatatcagatctaaactgatactggaagagccgaaagtttacaaagaaccaaagttgctgttaaagattagcctgaaaaaagcaaaatcgagggagagaaaacaaagtataaccagccccaatgttgggattaccccgagaagggctgcagctaataccactgatcaagaagaggtttattgtttttgtagaaacgcatcgtacgggcccatggtggcatgcgatcgttctgactgcccctttgagtggttccactacggttgcgtaaacttgaaacacgctccaaagggtaaatggtattgtagtgaggattgtgaaaaaatagcgaaagaaagaacgaaatcaaaacgacaaaagaaactaaagtga

SEQ ID NO: 2379 - DNA, 927 bp, Saccharomyces pastorianus
atgttttcaaatttgtctaaacgttgggctcaaaggaccctctcgaaaggattctattctaccacaacaggtgccgctaaatcaagtaagctcactcaaagattgattgccggaggtgttgctgctgccggtatcactgcatctactttactctatgcagactctttaacagccgaagctatgactgcagctgaacatgggctacatgccccagcacacgcttggtctcacaacggtcctttcgaaacatttgaccatgcatccattagaagaggttaccaagtttaccgtgaagtctgtgcggcatgtcattccctagacagagtggcctggagaactttggttggtgtttctcacaccaacgaagaggtccgtgttatggctgaggaattcgaatacgacgacgaacctgatgagcaaggtaaccctaaaaagagacctggtaaactatctgactatatcccgggtccatatccaaacgaacaggccgcaagagctgccaatcaaggtgctttgccaccagatctatccttgatcgtcaaagctagacatggtgcttgcgattacatcttctctctgttgactggttatcctgacgatccacctgctggtgtcgcattgccaccaggttccaactacaatccttatttcccaggtggttctattgccatggcaagagtattgtttgatgacatggtcgaatacgaagatggtactcctgcaacaacctcccaaatggctaaggatgttaccactttcttgaattggtgtgccgaacctgaacacgacgaaagaaaaagactaggtttgaaaaccgtaataatcttatcctctttgtacttcctatctatctgggttaagaagttcaaatgggccggtattaagaacagaaaattcgtgttcaacccaccaaagccaagaaagtag

SEQ ID NO: 2380 - DNA, 1737 bp, Saccharomyces pastorianus
atgccgaaaagaaaagtagtctcaaacaaggagaatggcaagcgtactttctctcacgatgacttaaccccgcaaatccaggagtttcaaaacctaatggacctcgaatctcagaaagtggagaccattagacagtcgtattcaaggcagaactccctattggccaaggataactccatattaaagatcaaagtaaatggattggagaagaaaataagtcagctggtacaagaaaacgtggctcttcgatctaagacatctataagcgaggctatttacagggaacggttgaacaaccaactacagactatcgaaaatgggattatacaaaggttcgatgagattttttatatattcgacaatgttcgtaagaatgaaagtctacccagttcaaatttgaaatccatgctaaaaagaaccagttccagatcgagatcatgctcactgtcgtcacccacgtacttgaaaagctgcacagagccattgaattgtcagaacaatccgtcaaatgattcaagctttaataaagacgacggccaggaccaagagcacaaggctaaaaaaaggaaaagctctaggcggcaatccatgtttatttccacaagtttagagccagacgatgacgctgacgaaaaggaaccaacaatagacgaaccttccataaacctacccagagaactgcacgagactttgcaagtaaaggacacaatgggccaactagatgtagacgaagatattgagtcaaccagtaattttactaactctattattgaatattctatacctgaggaaaactctacggaacccgagcattcatcttccaaactagaaatatttaatgatagtacaaacatgctaggtacggcatcgtcgaatccattacccttacctttacccttaccggttctctcgactactttaccggctacaaccacgtctgcgcctaattcttcaacgaattcgcattcgaaaaccaaaatcaaacattccatgaagccacctaggatagaactgaagaaaaaaatcattgatgaagtcatgcctgtaagtaatatgagcaatagcagtgatatcacttttagtaggacaagaagaactcggggcaaagctgtagattatacgttgccttcattaagggccaagatgaggaggccttcggaaaaactagtagatgccactactatgattgatatacacgacttacaagtttccaaaaaaaacagcatcactgtaagtaacaggaagagtctctctcccaatccaatacccgacgaaccgcagttgaaagaagtggtcgtttctaaagattatggaactccaaaggaaaagataatagaaaaccaagtaacaaatgagatcatcccgcttactaatattaacaacaataataacaacaaaaaaataaccaataattatagcgtcaaaaaagcatcgcccttacttgatattaccaacagatccgagaataagagaaaagtagtaaaaactaaaaaattgttcaaaaatgcaattgtcaacaatctatccgatgaaaactctacttcgcgacgttcgaagttgccaaatggaaccataaacatcaacagaaacagtaataattgcgatcctaatgccaatagtgctaataataaatccgttagcttcagattaaatgaggatgatttagcgatatttgatctatttggaaatgacaagacaatgaaacatcaaccgaagacatatcgaaccaagaaatga

SEQ ID NO: 2381 - DNA, 915 bp, Saccharomyces pastorianus
atgacaatgaaagagcaaaacaaagaagaacagcaataccttgatttatgtgaaagaatcatcaaagaaggtgaatttagaccagatagaacaggcactggtacattgagtctctttgcaccacctcagttgcgttttagtttgcgtgacgatactttcccgttgctgacgacaaagaaggtcttcaccagggggatcatactagaattactatggtttgtagctggtgctacagatgctaatatcttatctgaacaaggtgttagaatttgggacggtaatggatctcgtgaatatttggacaagatgggactcatggataggaaagtaggggatctgggtcctgtttatgggttccaatggagacattttggtgccaaatacaagacctgcgacgatgactataccggacaaggtatcgatcagctgaagcaggttatacacaaattaaagacaaacccttatgatagaagaatcatcatgagcgcttggaaccctgcagattttgacaagatggccttaccgccatgccacattttttcacaattttatgtcagtttccccaaagagggaagtggaagtggtaaacctcgcctttcgtgcttgctgtaccaacgttcctgtgatatggggctcggtgtgccatttaatatcgcctcatatgcgctactgactagaatgatagctaaagtcgttgatatggaaccgggtgagttcattcatactttgggggatgcacatgtgtataaggatcatattgatgccttgaatgaacaaatttcaagagatccaagaccattccccaaattaaagattaaaagggacattacagaaattgatgactttaagttagaagatttcgaaattgaagactacaatcctcacccaagaatccaaatgaaaatgagcgtataa

SEQ ID NO: 2382 - DNA, 708 bp, Saccharomyces pastorianus
atggcagaacatgatagtgccaaatactgggctaaacagggcgttcgtcgaggattacagaagactcgctactactgccaaatatgccaaaggcagtgcaaagatgcaaatggattccaatcacataataaatcgccctcacacttaaggaaagttggccaggtgacagcggaagacgctaaacgatacaatgatcagtttgagaagggttttctgcagttgctgaagcagcggcatggagaaaaatgggtcaatgctaataaagtttacaatgagtatgtccaggaccgcgaccacatccacatgaatgcaaccatgcatcgctctttgacgcagtttgttcgtcacctgggtcgagctggaaaagtggacgttgatatagacatggatgacaaatctgagaatgttgaaggccccttgctcatcagggtgcattcatcctctctattgccaccttcagaggaaagtttcctacaagatcaacaagaggaacaagaaacggtagccgccgagcttttgaaaagacaggttgatcgtgccaagcgacaaatactagagcaggacgaactgccccaacccaagcttaaagcggaaataaacgaagacatcaccttagagccggtgcgagtcgctttccacggtgtcgggcgggtaaacaagaagaaaaagaaggctcttccacggaaggacgggatcaagttccgatga

SEQ ID NO: 2383 - DNA, 942 bp, Saccharomyces pastorianus
atgaatttttggggagtaatattattggctggtttccttttgattgctactttcctcattgggctaatcccgctatactatattgataaacagagaagttctatcgtgattgatcaagaaggtgatgattcaaactccgatattagcacaaatgcaaacatgcaaacgagtagcagtggaattagtggctaccgtgtcaaaattgccgttctatcccaatttggtatagggatgttgctaggaacctcgttcatgttggtaataccagaaggtatcaaagcatgtgtagaacataatggtaatatcggactaattttgctaattgggtttttaggagtttatattatcgacaggttggtgacgttatggatttccggaaagcaaacaatatatacacatgatgctgtaaagtttcaaagttggaaagacataataaatcatccaaaacaaatatggataaatttaatacaaaataatgtggtattcgcattattcattcatggattgaccgacggaattgcgctcggtaccacaacaaataacgattcgttacttattgtggttttgattgccatcgtgattcataaggtccctgcagttctttcgttaactagtttaatgatatcaagacagaatttattaaaatgggaggtcatctgtaatgttttcttgtttgcatcatccacaccaattggatacatagtattatccgttttgaatttgagtcaatcctcaacaatggatcggattagtggatatcttttgttaatgagtggtggtagtttattgtatgcctctttcacagcatttgttggtggaggctcacacgatcatgacttgagcgtagaagaggaagttgttttaccccatgatgaatccatttatgtgttgctaggtgtgagcattccgttagtgatatcgttttgcatttctgaagactag

SEQ ID NO: 2384 - DNA, 633 bp, Saccharomyces pastorianus
atgaacacatccgtcacttcaataaagttagtactattgggtgaagcagcagttggtaaatcctcaatagttttaaggtttgtatcgaatgatttcgctgaaaacaaggagcccactatcggtgctgcattccttactcaaagagtcactataaatgaacataccgttaagtttgagatatgggatacagctgggcaagagagatttgcatcgttagcacccatgtactatagaaatgcacaggctgctcttgtagtatacgacgtgacgaaaccacaatcttttatcaaggcacgccattgggttaaggaactgcatgaacaagcatcgaaggacatcattatcgctttggtcggtaacaagatcgatatgttacaagaagacggagaaaggaaagttgcaagagaggaaggtgaaaagttggcagaagaaaatggcctactgttttttgaaacaagtgcaaaaacaggagaaaacgttaacaacgtatttttgggaattggtgaaaagataccattgaaaaacgctgaagaacaaaataacgctaataatgaacgtgaatcgaataatcaaagagtggatttgaatgctattaataacggtgccagtgcgaacagtggttgcagttgctag

SEQ ID NO: 2385 - DNA, 1710 bp, Saccharomyces pastorianus
atgtcccccctaacaagaaccgtagctataaggaaaacgattaaggtcttatccaaatgtcaatctggtaaagagtacactcaaaaatttctccaacgtgcgtactcaacgtcgcatgcaaatagctcgtactgctcaaggaccaaaatatttgtatcttcccattacaaagccctaaatattgctttactaagcgggtccctgcttttaacctattcttactattctcctaaaaagattctttctctagatacgataaacggaatcaaggattactccacaagcactcgtggaaataccggtatgcgcacgcctaattcaaaggaatcacaaggaccaaaagatcaacaaccccagaatgatcaatccgtacctatcttgaacgatgctaaaatagaggctaaactacacgatagggaggaaagccatttcgttaaccgaggtacaggtattttcaggtacgatgtggcccagctgccctctaaccacccaatagaagacgaccatgtagagcaaatcatcactattccaataacgggtgaagatgggaagtcctcggaaaaggacctatacttttttgggatctttgatggccatggtggcccttttacttcggaaaaactttcgaaagatttgatccgttatgtagcttaccaattgggtcaagtttatgaccaaaacaaatcaatcttccactctgatcctaatggtttaattgactctgcaatttctaaggggtttttgaaattagatgacgatatcgtgatgaaatcatttaggaagctgttccaagatccaagcaactcgaatatcgcaaatacgctacccgccatctcaggatcttgcgcactgttgagtttgtacaactctacaaactctattttgaaagtggccgtgactggggactcaagagctttaatttgtggtttggatagcgacggaaaatggaccgtcagatccttatccactgatcagaccggtgatagtttggaagaagtgcaaagaattagaaatgaacacccaggtgagcctaatgtcataagaaacggaagagttttgggttcgttgcaaccctccagagcatttggagactaccgctataaggttaaagaagtcgatgggaaacccttatcggatttgcccgaagtcgctaaactttattttagaaaagaaccaagagacttcaagacgcctccatacgtgactgcagaaccagcaattacatctgctaaaattggtaaagactccaaattcatggtgatgggttctgatggtttattcgaattattgactaatgaagaaattgcttcattggttatcagatggatggataagaatatgagtttgccaacaccgtttaaggcagaaccggggaagctaccgaaggtcgttgatgtgtcggatgacaaagaagctcaaagaccggcattcagatacaaggatgataaatcgagttcaaacacggagtatcttttggaagacaaaaacgttgctactcatttaatcaggaatgctttaagcgctggtggaagaaaagaatacgtctcggcactagttagcattccatcaccaatgagtagaagatacagagatgacttgacggttacagtggcgtttttcggggattctggaacaccttctaacgtatcgaacgccacttccattgtgatgaacccagacgcaacgacaaagccaaagcctaggttatga

SEQ ID NO: 2386 - DNA, 552 bp, Saccharomyces pastorianus
atgggtaattcaatttcaaaagctctaggcaaattattcggctcaaaagaaatgaaaatattgatgctaggtttagataaggccggtaagacgacgatactgtacaaattgaaactaaacaaaattaagacagctacccccactgttggattcaatgtcgaaaccgttacttacaaaaatgtgaaatttaatatgtgggatgtaggcgggcaacaacgactaagacccctctggagacactatttccctgccactactgcattgatatttgtggtggactctagcactgaaggccgtatgcaggaggccaaagaggagctatatagtatcattggggagaaagagatggagaatgtggtactacttgtatgggcaaacaagcaagatttgaaagatgcaatgaagccccaagaggtttctaattttttggaattgaagcaaaacttgaaaaatcaaccctggtgcgtaatcggtagtaatgctttgtccggacagggtcttgtggaagggttatcttggatttccagtaactcagacgttcccagaaaatag

SEQ ID NO: 2387 - DNA, 777 bp, Saccharomyces pastorianus
atggctgctggcgttcctagaattgatggattagagtccttaggtaaccctttggaggatgccaaaagagctgctgcatacagagctgtcgatgaaaatttaaagtttgatgagcataaaattgtcggaatcggtagtggtagtacggtggtctacgttgccgagagaatcgggcagtatttgcacgattctgaatattccgaactggtgtctaaattcatttgtattccaacaggcttccaatcaaggaacttgatcctagataacaaattgcaattaggctctattgaacaatatcctcgtattgacatagcttttgacggtgccgatgaagtagatgaacatttgcaattgattaaaggtggcggagcctgtttattccaagaaaaattggtcagcaccagtgccaaaacgttcattattgttgctgattcaaggaagaaatctccacagtatttaggtaagaactggagacaaggtgtacccatcgaaatcgtaccttctgcgtatgttagagtcaaggacgacttgttagaacaattgcatgcagacaaggttgatatcagacaaggcgggtctgctaaagcaggtcctgttgtaactgacaatagcaactttattatcgatgcggactttggcgaaatcaaggatccaagagcattgcatacggatatcaaattgttagtcggtgtagtggaaacgggtttgttcatcgacaatgcttcgaaagcttactttggtaattccgatggcactgttgaacttgtaacaaaataa

SEQ ID NO: 2388 - DNA, 777 bp, Saccharomyces pastorianus
atggctgccggtgtcccaaaaattgatgcgttagaatctttgggtaatcctttggaggatgccaagagagctgcagcatacagagcagttgatgaaaatttaaaatttgatgatcacaaaataattggaattggtagtggtagcacagtggtttatgttgccgaaagaattggacaatatttgcatgaccctaaattttatgaagtagcgtctaaattcatttgcattccaacaggattccaatcaagaaacttgattttggataacaagttgcaattaggctccattgaacagtatcctcgcattgatatagcgtttgacggtgctgatgaagtggatgagaatttacaattgattaaaggtggtggtgcttgtctatttcaagaaaaattggttagtactagtgctaaaaccttcattgtcgttgctgattcaagaaaaaagtcaccaaaacatttaggtaagaactggaggcaaggtgttcccattgaaattgtaccttcctcatacgtgagggtcaagaatgatctattagaacaattgcatgctgaaaaagttgacatcagacaaggaggttctgctaaagcaggtcctgttgtaactgacaataataacttcattatcgatgcggatttcggtgaaatttccgatccaagaaaattgcatagagaaatcaaactgttagtgggcgtggtggaaacaggtttattcatcgacaacgcttcaaaagcctacttcggtaattctgacggtagtgttgaagttacggaaaagtga

SEQ ID NO: 2389 - DNA, 567 bp, Saccharomyces pastorianus
atggatttaaacagaaactggttacgatggaaaattgcaataggtgggccaaacggcattgtacttgattttccatcgtttttagtgggttgcatgtttacaacaatgattgggccacttttacaaaaactcataggtaggcttttagtaggtttggtatccgtaatcaaatttctccttattattggaagcattgtctttattactggtgtggtatcaaataaatacacttacgatgatttcaaaataagtataagaaaatctggagaagaagtgactgaaccaatcaaaacagcgaagaagaagactatgccaatggaaaaagatgataccgtaggatcttttaattactttgaaatccccataacaaaggaagtaccaacaattccttatattgacggtggtacaagggctcttaaaaatccacccaaggatcctttaacaacgattccttatattggcagtggtacaaaggcttgtaaaaaccctcctaaggatgcatcgagagcagctttatctaactcgaataggtacgaaaactttataaacatggcgcaacataagtag

SEQ ID NO: 2390 - DNA, 3270 bp, Saccharomyces pastorianus
atgactgcgagcacttcttccgtcatgtcttctccacgcgaaggaaagagatctttttcttccactatcaaatcattctttttgaattcgaataaaaaacggctatcgaataagaagcttttcacttcagacatcccatacgcgaatcatcttgatgattcggatccagagactacattacatgttagaaagagaaagaggatggccggtacatcacaacacaatgagcgcgttattaatgacaatagtaatgtaccaattataatatacggagctgaaggaacagagagaccgcccgttctacccatcttgcccatacaaaggttgatgttgttaagggaaaagcagaagcttaggaatatgcgtgatcttagattattacaagcctttagatctccttccgtttcatcttcaatgttcgtagatcctcagaatgaagcgggtgacaaagagtcatacatacgtacatccactacaccttctccgatcaagaagacggttttcacagaacaaattcccggagaaggcgttgacaatacaggcattaaactgcctctgctaaaatctttgaagaacaaggctagtagagagaagtttcaaagccaatcgaaggggactgtatggtcagctaactttgaatatgatttatcagaatatgacactatgcaaaaacaacagaatagcaaaaatgttattactaccactgctgatgagaataaaattgacacgagtaacaatgataacaagaacaatgatgtgaatggcgatttcgcgggaggtcccacatcagcaagtaattttgaagacctaagatcagatatcaactctagtaggctgtcaaactctcaaaaaaatttacttttgaatggttctacttctacagttacaaaacatgccgcagtgccgaaggattttgctgttactataaagccactagatacgcctacactaaagaaaattgccgaaaccaaaaaggacaaagaaagcattgtcttgcctactattggattcgactttatcaaagacaatgaaactccctcgaagaaaacctcccctgtagcaaacgtttctacagacacagtcatcaatgcaaatctatccgacatccataaaccaaccaatatggcagagatccccaagctatcattcaataccggacagaagatcaatgaacctaaaaaaactgaacaatctgcctcttcctccactttattcaactttggtggcaaatcagatgcttcttcaattaaaaaacctttctcattcggaaaagcctctgagagagaagagatgcctatgaaaccacaggcgcctgcattttctttctcaaaaccagcagctctctcagacgtcgctccaaaatcaactgctgcggcattttcttttggtaaacatgaaaaaaatgatgaacaagatggcgatgatagtaatgatgataatgaacccagaagaaaaaggcgtgctcaaactaatgaatccgtgaacgctggttcattgtttagtcttgataaccaaggagaagctaacaaaggggagccgaaaatcggtacgtccgaaaaaccaagctttccttttggttcaagcaataagcaagtggaaagcggaccgtcatttgcattcggtaaaaagcccgatgaaaatggccagactaaatcccccattgcatttacatttggcaaaccagtggtcgccaaagaaccggaagtgaaatcatcagaaacgctcgcttctgtttctgggaaacctagttttacatttggtcaatccacaagtgaaaatgaagcttctggagcacatggcaagccagcattttctttcggcaagtcagcaatggaaccgaaaagtggtccaacttcgaattcagcacccaagccattatttacatttggcagcaagcctgctgacatccaaacattaccagataacaccacatcgaaacccacactttccttttctaagcctgtccaagaagactcatccaccgccccagattccaaaatgccctcgttcgcttttggagcatcttcgaacccctcacaacaaaagtcatcgttctcatttggcaagccagaagcggcaaaagaaccaacggattccaaatcttcatttacttttaccaaaccttcttttgaaaagactgagactaagggtgcaccctcttttacattcggtgcgccagcaacgaatcgcatcacagaaaatagtacaaagccatctttcagctttggagctcccaagccgactgagccctctgcagttgtgatagcaggaagtactaacaagacatccggtggattttccttttcaaaatttgatgacaagaaggaaaattctgcaactgcaactcctttattcaaacggtcagcttccacaacaccagtttccgctttgggtaagccaattggtactaataacaatacatcatctaaaactgcattttcattcggcactgccaataccgaagctaccaacgccgccccaacttccacaccattctcttttaatggtccaactaccgacaacatcacaagcaatacgatcagcagtatctcaggtactaacatagtaggtggatttaatttagggaaacgagcccaaagtagcgctgctaatagtgatgccagtggtgaaagctcaagatttagtttggctagaccaggaaccactgtaaatagcataacttcagatcagccctcttttaattttggtagcaatagtacggcaggccctaaccctttcacatcggccgctccatcgaataacactggtctctttaataaaccggtttctacgggtgcacaaagtactaatgcgccttccagtttcaactttactggaaataatcccgcgtcaggttctgtattcaacatgaacaacaatactggtgctactaccatgtttggcggatctagtactaacttatcgcagcaaccgcagaacacatccttcaacgcaaataattcattcacaccgtcaacagttccaaatatccattttggcggatttgatggtggtaacagtaatagtgccacgggtgctttgaagccaagtgatatatttggtgggaattctgcatctggttctaatgtaaacggaattaacccatcatctgttttcggaggctcagatggagcaccttcctttggacagccacaagcggctccaaatcaaatgggcatgaataccggcatgaagatgggcatgaaccttgctggcaatggtggtatgacaaacaggaaaattgcaagaatgaggcatacgaagagataa

SEQ ID NO: 2391 - DNA, 1182 bp, Saccharomyces pastorianus
atggcgaaaattatgatccctgctagcaagcagcctttgtacaagaagctagctcttcttttggtcgctgtgtttactgtctatgtgtttttccatggcgcccaatacggcattggctcttcaccaacacccaagtacagtaacgttgtatcgtcggacacgggtttcaaatactcaagagtagaaacacctaaatatacaggtgctcgtgaaaaagcaacttttgtcactctggtgcgtaatagagacctttattcgttggccgaatccatcaaatctgttgaggataggttcaactccaaattcaattacgattgggtatttttgaatgacgaagagttcactgaagaattcaagaatgttaccactgctttagttagtggtacaactaaatatggtgttatcccacatgaacattggtcttttccagattggattgatgaatcaaaagccgctcaagttagaaaggaaatgggagataaaagaattatctacggtgattctatctcttacagacacatgtgtcgttttgaatctgggttcttttacagacaccctttgatgaatgattatgattggtattggcgtgtggaacctgatatcaagttgcagtgtgatatcaattacgatgttttcaaattcatgggggaaaataacaagaagtacgcctttgccatttccatcaaggagtatgaagcaactatccccactctatgggaaacaactcgcgagtttatgaaattaaatccagggcttctacatgaaaacaatatgttagactttgtcagcgacgatgagggtctttcttataatttgtgtcacttttggtctaattttgagatcgcctcattggatttatggaggtcaccagaatattccgcatactttgattatttggataaagcaggaggatttttctatgaaagatggggcgatgctccagtgcattctatcggtgcttcattgttcttagatcggtctgaaatccaccattttggtgatattggttattaccatgtgccattctactcttgtccaattgacaccggtatcaggttggccaacaaatgtagttgtgatccacaaaccgatttcacatggcacagttactcatgtacaaataagttttacaccgtgaacaagctgcaaaaacctgcaggctggcaaaaccatattggttag

SEQ ID NO: 2392 - DNA, 984 bp, Saccharomyces pastorianus
atgtcctctgacacttcattatcagaatcttcgttgctcaaagaggaaagcggcagcttaaagatgtctcctccgcctgtaacaccaaatccagtacgtgataatctcaaatctttcgtggctggtggtgtcggtggtgtatgcgcagtgtttacaggccatccgtttgatttgatcaaagtgagatgtcaaaatggtcaggcgaactctgcgatgcacgcagtcgcaaacatcttaaaagaagccagaactcaggtgaatggttctatgttcaccaactccataaaagggttctacaaaggtgttattccgcccttattgggtgtcacgcccatctttgccgtttctttctggggttatgatgtgggtaagaaactggtcacctataataacaaaagtacgggcaccggtgagttgaccatgggacagatggccgcggcaggcttcatcagcgccatccccaccactctggtgactgcccccacagaaagagttaaagttgtcttgcaaacctcttccaaagggtctttcattcaagctgcaaaaactattgttaaggagggcggcatttcttctttgttcaaaggttcattggctaccctagcaagagatgggcctggctcggcactatactttgcatcttatgaaatttctaaaaaccacctaaataataggcaaccccatccaagtgcgggcgaagaccagccagtcaacattatgaatgtttgtcttgctggtggtattgcgggtatgtctatgtggttggctgttttcccgatagataccataaagacgaaattgcaggcctcttccacgaagcaaaatatgatttctgcgacaaaggaaatctaccttcaaaggggaggcattaaggggttcttccctggtttaggccctgcattattgagatctttccctgctaatgcggctacgtttttgggtgtagagttgacgcattctttatttaagaaatacggtatatga

SEQ ID NO: 2393 - DNA, 951 bp, Saccharomyces pastorianus
atgccgataaacaaatcaaccataagagaatataagttagtagttgttggtggtggtggcgttggtaaatccgctttaaccattcaattgattcagtcgtacttcgtggacgagtatgacccaacaatcgaagactcttacagaaaacaagttgtcatcgacgataaggtgtccatcttggatattttggatactgctggccaagaagagtactcggccatgagagaacagtacatgagaaccggtgaaggttttttgttggtttactctgtgacttctagaaattcctttgatgagttgttgtcttactaccagcaaattcaaagggtcaaggattctgactacattcccgtggtcgtggttggtaacaagttggaccttgaaaatgaaagacaagtttcttatgaagatgggttacgcttggctaaacaattgaacgcacctttccttgaaacttctgctaaacaggccatcaatgtagacgaggcattctacggtctcattcgtttggtgagggacgatggtgggaaatataatagcactaatgaccaaccggatagttctgctaatgcaaaaaatgcgagaaaccctaatgctacttcatctcaaacccagaatggaagcaacgttaatcgcggggcttatggccctggtagtgtattgacaaatggtgacaccaactctagtcctaattcaaatcttgaacataatgttgagacttctagaagagctgatgaaaaaaataatagtaacaacaacaataataataataatgatgatgacaatgataattatgatgcaagtaacgacaatgaggatagaaatggaaataatggtggtaatggtgataatgcgccaaaagcaagaacaaaacaatctactgtaccacaaaaaaatgcaagttcaaccacgaaaaaggaatccagtggcggttgttgtacaatttgttga

SEQ ID NO: 2394 - DNA, 852 bp, Saccharomyces pastorianus
atgagtatttgcaagttgaaaaatgctgtttctctttttccgagatcatcttttacagatggtgtagtaagcacaagtaaaagtttccgtagttgggacacctgcatggacaacaaagcatgtaaaattattgcaattgtgggtatcgtattggctagcatactagtgatttggctaatcggaggactactgacatgtttcagacagggggtaacaggtattggccagttcgtttgttggtgctgtcattgttctggtaaccaaaataggaataacggaatgcccgtaaatgagggctttaatagagtcaatatgggtgcggtacctccttctacagttatctaccaacccattcaacaacctgaaaacgcatattatagaaacgatgcgaaacccgacacattttatgatgaagttaaaacaccaagtaatgaagtttatgaattagaagaggatttcgatttagagaagcaaagagaaaagaccagaaggaaacaaaggagacagagaaacaaagaaggacaaagccctagtagagtggcgcctctagtttacgatgaagatcctactgaaaatgatattcctcagcctcaatacgatgcaagaggctcattcattcaaaacgcaaaccataccaataccaatagcaatagcaacactaacctcaccggtcaacccccaatatttgatatcagcgattacggtgaaaactattactataataacaataacgctcagggcaacagcaacaatgcacacatcccagatcacaggagtccgtacccgactgaaagtcaccaaccataccaaggctacaatccaaaccaaaaccaaaatggaagatattactga

SEQ ID NO: 2395 - DNA, 3327 bp, Saccharomyces pastorianus
atgattatctttgtttcagaagagcctgaaagaaggttagccattgtgtccaactcatttgctcttgttcttaaaccagtgggaaaaaaactatcagataaacccctttgtgctattgaacttcttcaaaaggacgatttgaaaaaatacggtttcaaaagactcacctcgcatgagatctttggtgtcatcggtctaatcgaagttaatggcctgttgtttgtaggtgctatcactggtaagtcgaaagttgcacagccatgtccaggagagacagtgaacaaaatttttgccgttgatttcttctgtttgaatgataacagctgggactttattgatgtcgactcctcaggctatcctgtacaacctgagaccgcttctacggaataccaagaagctttgcccaaacacccatgttacgaattgaagaagctattatctaacgggtccttctattacagttcagattttgatttgacatctaccttacaacaccgtggatttggccaacactcattgagtacggatacctatgaagaagaatatatgtggaactcttttctaatgcaagaaatgataacctacagagaccacttggatattaatttgaaacaagtcttggatgatgaagggtttttaactaccgttattcgcggatttgcagagacgtttgtctcttatgttaaaaaattgaaagttgccgttaccattatctcgaaacaaagttggaaaagagcaggaacaagatttaatgcacgtggtgttgatgacgaagcaaatgttgctaattttgtggaaacagaattcataatgtactccagccaatactgttatgcatttacacaaatcagaggcagtatacctgtgttctgggaacaaggcacctctctgatcaacccgagggtacaaattactagatcatttgaagctactcagccagtgtttgacaagcacattatgaagtcagtagaaaaatacggccccgttcacgttgtcaacctgttatcaacaaaatcttcagaaatagaactttcaaagcgatacaaagagcatctaacgcactcaaaaaagttgaatttcaataaagatgtattcttaacagagttcgattttcacaaagagacttctcaggaagggttttccggtgttaggaaagttattccactaataatggactctcttctttcatctggctattactcctatgatgtccgagaaagaaaaaacatatccgagcaacacggtatatttagaactaattgtttagattgtttggataggacaaatttagctcagcagattatttcgttagctgctttaagaacttttctagaagattttagattgattagttcaaactccttcattgatgatgatgatttcgtttccaagcacaataccctctgggcggaccacggtgatcaggtctcccaaatatatactggtaccaatgctttaaagtcttcattttcaagaaagggtaagatgtcacttgccggggccttatcagacgcaacaaagtctgtcagcagaatatatatcaacaactttatggataaggaaaagcagcagaatattgatactttgttgggaaggttaccataccagaaagcagtacaattatatgatcctgtgaatgaatacgtcagcaccaagctacagagcatgtctgataaatttacatcctcctcgaacatcagcttgctaataggttcttataatgttaatgggaccaccaaaaaagcagatttgtcaaagtggttatttccgataggcgaaaaattcaaaccagacatcgttgtgttaggtcttcaagaagttatagaattatctgctggatcgattttaaatgcggattattcgaagagttcattttgggaaagtttagttggtgactgtttaaatcagtatgaagacaagtacctattgttgagagtagagcaaatgacatctttattgatcttattttttgttaaagcagataaagccaaatacgtaaagcaggtagaaggggctaccaaaaagacaggttttagaggtatggccggaaacaaaggtgctgtatccattagatttgagtatggtgccacttcattttgttttatcaactctcatcttgcagcaggtgccacaaatatcgaagaacgtcgtagtgattacgaaagtattgtcaaaggcattacatttacaagaactaaaatgattcctcatcacgactctatattctggttaggcgacatgaactatagaataaatttaccgaacgaagacgttagaagggaactttacaaccaagaagagggatatatcgaaaaactgttgcattttgaccagctcactcaaggaataaatgccggtaatgtctttaaagggtttaaagaaccaacattacaattccgtccaacatataagtatgacccaggtacggatacttatgattcttctgaaaaggaaagaacaccatcatggacggatagaatcatttacaaaggggaaaacttacttcctttatcttattcggatgctcctctaatgacgagcgatcaccgcccggtctatgcggcatatagagcgaaaataacttttattgacaataaagagagactgtccctcaagaagcgtttatttactgaatataaacaagagcacccagaagagccaggttctttgatatcagaacttctcaatcttgatatagatgacaagagcaccgataggcttggaagcccttccgaagcctctttactggatattgacccgatatcaacacaacctacagcgtccagctccgcttctccatcatctgtttctttaacatcagcttcgctacaatccatcagaactcaagataataaccagacgcccacttctgtcaaaaaaccaatattacgtccccctcctccacctgctcataaatctgtgtcaccacctgcttctgcaacagtagagggaaaagcaataccaccacaggcctcatcagccccaatatcatctccaggaaatattatacaagagaacaaaccgttggcacaaaatagacgaatcccgcctcctggatttagccaaaatattttaactccaaaaagtacgagtaatttggcctcacctgcgtcatctaaaattgatctaaataacaacgtggtagaaactacgcatccgacgcaagctacaagacaactgactcctacatcatcattttcaatatcgatggatgcgaataatcagtccaagggcttacaatctaatgaagcttccattaaaccggagacaaaagccaaactgaaccacatgactttagattcatggcaaccattaactcctaaataa

SEQ ID NO: 2396 - DNA, 1314 bp, Saccharomyces pastorianus
atggtagtgaacacaatatacatcgcaaggcacggatataggtccaattggctccccgaaggcccatacccagacccacttacaggaattgacagcgatgtccctttggcagaacatggcgttcaccaggctaaagaactggcgcattacctcttatcattggacaaccaaccagaagcagttttcacttctccgttttatagatgtcttcaaacaacacagccggtagctaaattgttagaaattcctgtttatttagaaagaggtattggtgaatggtatagaccagacaggaaacctgtcattccagtgccagctggttatgagatattaagtagttttttcccaggtatcatcagctcagaatgggaatccactttaataccttgtgaaaagggtgagactgagcaggagatgtacgaaaggtgtaaaactttttggcctttattcattgaacatgtagaaaaagagtatccaaacgtcgaatgtattttattggtcacacatgctgcatcaaaaattgcccttggtatgagcttgctggggttcgcttatccacgaatgtcattagatgaaaacggtaatataataagaagtggtagttgctccttagataaatatgaagttctcaggaaaagctacgatactacaggagaagttgacaatcaagaccaaaccgctttgtcgtacattccgtttagtgatagaaaatgggttctaactatgaatggaaacactgaatttttgagtggaggcgaggaaatgaattggagttttgattgtgttgtagaggctggatctgatgctgatatcaaaagtagacaagagacaaagaaaacgagttcaccggtaccagaaatgggtgaaaatcccgaattggaaactgtctacatcagcgttgatatacctagcgacagctataaagagaaaactgaaataatgaatagcgcaattttgcaatattccggtttagacactgatgctccactgttcaggattggagataagctgtatgagggaagttgggagagactggttggcactgaacttgcgttcccaaatgctgcacacatacataaaaaaacagtcagcttactggcatctactgaaggcaataagtctgtaacgattaatcaaaatacagagttgtctgctaatagcgactcagacgcacctaaacaggaaaacgatgctacagtaccgaattcaactaacgaagacgataatcgcttggaagataaagaaaaaatccaacccgagaagatttatagaataaaagaacgaatcgtactaagtaatgtccgccctatgtag

SEQ ID NO: 2397 - DNA, 699 bp, Saccharomyces pastorianus
atgtccactgatagccaattaccatctggcataatagattctctatgtttgaagtatgacattattttggctagctcttctccccgaagatatgaaatcttacatgatataatgggaatcactgatttaaaaacaatggtttctacattcgaagaagacctcgataaaaccaaatactctatagacccaattggatatgttcgggataccagctggtgcaaagcgcaaagcattattgaaattttgactgactacgagaacgaggaaacatatcaaatgggcaaacccaagctcattgtatgtgcggatacaatcattatagacaaagacggaaagatctatgagaagcctaagacgaaagaagttcaaacgagattcttaatgaagttttgctatgaagatgacgaacctgttaacgttgtcacagctgtgaccttgataaaatggtacagtaaggagaattttgaattggtaccatttcaagatgagaccaaggtatacttcgataacaaggttccattagaagtattgaaagagtacgtaaagagcggagatggtcttaacgttggtggcggattcaagatacaaggacggagtgctatatttattgagaaaattgaaggtgattattataacgtagttgggctgccccttaacaagacattcaaaggtctctatgcggaggctagtgtagtataa

SEQ ID NO: 2398 - DNA, 882 bp, Saccharomyces pastorianus
atgaaggccactttattgttgaaggcacatttgtcttctgttagctatacaaccaaaaaatcattccaaaaacaacttgatcgctcaccgtatacagccttccaatacttcttccaaattgaagtccagaaattacacaacgtctcaaagtacgacgatattacaaattacgtaaaaggcaacagtaattttaaaagatttacaagaaatgaatgggacaacatgtcattgaccaagaagaggctgtactatgcatcattttgccagtctatgaacattgatgtttggaatgtcagtaaagttgaactcgccaaaaggctagagattcctataccagcgatgagtgaatacttgttttttagaaacaagttcaagttgaagtttgactctcactggagcgctttgaaacctaataactataagggtcactcgaaaccatctaccgctaaaaaaaatgttacagaaccatactcaagaagccgcaccatcacatctatgaacaatacgaaacctcggaaacggttggtcgcgatgaagagaatttcttgttcagagaactttccaaatggtcagtctcatgacgctcagaagcatctttatgactacatgaaaaggtttcagctaatgtgtaaagaatgccggtatgcttggaacgaaaaggttgactataaccaaaaattggaaataagaaagaaattacagctatggaggttgaaatttgaggagatgatggataatgaaatacaaatattgcaaaacaacatggatactatgtcaaaatttggacacagaagcgaagcatacttcttaacgtcggatcctgatacaaatgcattaccaaataatattcttcccatggcgtttttgccaaaaaaaaaataa

SEQ ID NO: 2399 - DNA, 807 bp, Saccharomyces pastorianus
atgtcatcgacacataataacaatgtagaaggttctcaatctgtaccacaaagttcgctgacagagcagcaaagagcacagcagcaatatcaaatcttcgaaaactcattaccgaaaataagtcaatcggcttaccagatgctgttaaatgagatggttccaatggcaatgggaatcgaaaaacagttatcaggtgatattgttagttctgaaagcaatgtggcttcggaaaacggtaatatcaacagcatgatgaagaaattgaaaatagaggaaaatcatactgtagacatcatgtcttcacacaatttgataaatgaattgtataaagcagaagaagtggaaagggaaagagttctagcaaggctgaggaatatggggttccagattggatcaaagctgtcagaacttttgatattttctaacaatccaaatttacaattcaaagaaatggaccttttattaataatgaagttcgtgtgtagagacgtctggaaacaaatattcggtaggcagattgacaatttgaaaacaaaccatagaggaactttctatctccttgactatgactatcgacctatccaatcattctctttaagtgaagaagcaaaagacgaggaattaaagatgatcgaaccctttttagaaatacctgtgggtattattagaggcgtgttatcttcattgggttattcctctgaagaggtcatctgtttggcatcttttatcgataggcctacagagcgacctaaaacaacttttcctaagggagtcagtttccatgttcaaataacaatgtcacaataa

SEQ ID NO: 2400 - DNA, 4383 bp, Saccharomyces pastorianus
atgaaggaagtcgtcgttagtgaaactccgaagaggatcaaagggctggagtttagcgctctaagcgctgccgatattgtcgcccaatctgaggtggaagtctctactagggatctcttcgatttagagaaggatcgtgctcccagggctaatggtgccttagaccctaaaatgggtgtttcatcctctagtcttgaatgtaccacctgtcacggtaatctggcgtcgtgccatggtcattttggccatttgaaattggccctacctgtcttccacattgggtactttaaggctactatacaaatactgcagggtatttgtaaaaactgttctgcaatcctattatcagagacagacaaaagaaaattcttgcatgaattacgtcgtctgggcgtggataatttgagacgtatgggtattctgaagaagattcttgaccaatgtaagaagcagagaagatgtctgcactgtggtgctcttaacggtgtcgtgaaaaaagctgctgctggtgctggttcagccgcattgaaaatcattcatgatacattccgttgggtgggtaaaaaatctgctccagaaaaggatatttgggtcggcgaatggaaagaagtccttactcataaccctgaactagaacgttatgtcaaacgttgtatggatgatctaaatccattgaaaactttaaatcttttcaagcaaatcaagtccgcagattgtgaattattaggtatagatgccactgttccctccggtagaccagaaacctacatttggagatatttaccggcacctccagtttgtattagaccctctgttatgatgcaagattctccagcttctaatgaagatgacttaaccgtaaagctgacagaaatagtttggacttcgtctttgatcaaagccggtcttgacaagggtatttccatcaataacatgatggagcactgggactatttacaactaacagttgctatgtacatcaactcagactcggtcaatcctgctatgctcccaggttcatccaatggaggcgggaaagtaaaaccaatcagagggttctgtcaaagactgaaaggtaaacaaggtagatttagaggtaatttatctggtaagcgtgtcgatttttcaggtagaactgttatatccccagatccaaacttgtctattgacgaagtcgccgtcccagatcgtgtcgcaaaagttttaacgtacccagaaaaggtcactagatataacagacataaattacaggaattagttgtaaatggccccaatgttcatccaggtgctaattacttactgaaaaaaaatgaagatgcaagaagaaacctaaggtacggtgatcgtatgaaactggcaaaaaatttacaaattggtgacgttattgaaagacatttggaagacggtgatgtggttttattcaatcgtcaaccatctctacatagactatcgattttgtcacattacgcgaagattcgtccatggagaacttttagactaaatgaatgtgtttgcacaccttataacgcagattttgatggtgacgaaatgaatttacatgttccacaaactgaagaggctcgtgcggaggctatcaatttgatgggtgtgaaaaataatcttttgactcctaaatcaggtgagcctattattgcggccacccaagattttattaccggttcatatttgatatcgcataaagattccttttatgaccgtgctacgttgacgcaattgttgtgtatgatgtccgatggtattgaacaatttgatattccacctcctgctattatgaagccgtattatttatggactggtaaacaagttttttcattactgataaagccgagtcataaatccccagttgttattaatctagacgcaaagaacaaagtctttgttcccccaaaatcaaaatccttaccgagtgaaatgtcccaaaatgatgggttcgtagttattagaggttcacaaattttgagtggggtgatggataaatctgtcttaggtgacggtaagaagcattctgtgttctatacaatactaagagactatggtccccaagaggccgctaatgccatgaatagaatggcaaaattgtgcgcaagatttttgggtaacagggggttttctattggtattaatgacgttacacctgcagatgatttaaagcaaaagaaggaagagctggtagagatcgcgtatcgtaagtgtgatgagttaatcactttattcaataagggtgaattagaaacgcaacctggttgtaatgaagaacaaactttggaagctaagattggtgggttcttatcaaaggttagagaagaagtcggtgatgtgtgtattaatgaattagataattggaatgcgccattaattatggcgacgtgtggttctaaaggttccacattaaatgtgtcacaaatggtggctgttgtgggtcaacaaattatttctggtaaccgtgttcctgatgggtttcaagatcgttccttaccacattttcccaagaattcaaaaacgccacaatccaaagggtttgtcaggaattctttcttttcaggtttatctcctccagaatttctgtttcatgccatttccggtcgtgaaggtttagtcgatacagctgtcaaaaccgcagagactggttacatgtctcgtagattaatgaaatctttagaagatttatcctgtcaatatgataacacagtcaggacctcagccaatggtattgtccagtttacatatggtggggatggtttggatccactagaaatggaaggcaacgctcaaccagtgaatttcaatagaagttgggaccacgcatacaatattacttttaataaccaagatgaaggtctattaccatacgccattatgaataccgcaaacaaaatattgatgccactagaagacagactagttagatatgataacagaggatttttggttaaggacgaagacaaggacaaagcagaacatgtcgaccagtatgatgccgaaagagatttttaccgttcactaagggagtatattaacctgaaagccactgctttggctaatttaagaaaatctagaggaatgctagaactagtggatgctccacctacagaattacaaggtatggatccagatgaagccgttccacaaaatgttagaacttctgtgagccaactatatagaattagtgaacaatcggtgaaaaagtttttggagattgcccttttcaaataccgtaaagctaggcttgagccaggtactgccattgatgccattggcgctcaatccatcggtgagccaggtacgcaaatgacattaaagacttttcatttcgctggtgttgcttccatgaatgtcacgttaggtgtgcctcgtattaaggaaattattaatgcttctaaggttatttctactcctattatcaatgccgtactagtcaatgataaggatgaaagagctgccagagttgttaaaggtagagtggagaagacattgttatccgatgttgcctattacgtccaagatgtttacaaagataacttatcatttatccaggtgcgtatcgatttaggcaccattgacaaactgcaattggaattgacgatagaagatatcgcagttgcaataaccagagcttccaagctaaaaatacaggcgcctgatgtcattattattgggaaagacaaaatcgcaattaacgtgttcccagagggatacaaagcaaagtccgtatctacgtcagcgaaagaaccaagtgaaaatgacgttttctacagaatgcaacagctacgtcgtgctctacctgatgttgttgtgaaaggtttagctgacatatcccgtgcggttattaatattcgcgatgacggcaaaagagaactgttagtagaaggttacggactgcgagatgtcatgtgcacagacggtgttattggttctaagactacaactaatcatattttggaagttttttccgtccttggtattgaagctgcaagatacagtatcgttagggaaatcaactatactatgagtaatcacggtatgagtgtcgacccacgtcacattcaattgctgggtgatgtgatgacatataaaggtgaagttctaggtattacaagatttggtttgagtaaaatgagagattctgttttacagttagcctcctttgaaaagacaacagatcatttattcgacgccgccttttatatgaaaaaggatgctgtcgaaggtgtttctgaatgtatcattttgggtcaaactatgtcaatcggtaccggttcattcaaagtcatcaaaggtaccaacatttctgaaaaagacttgatgccaaagccatgtttgtttgaaagtttgtccaatgaagcagctttgaaagctaactag

SEQ ID NO: 2401 - DNA, 1305 bp, Saccharomyces pastorianus
atggccactttagaagaattggatgctcaaactttaccgggagatgatgaattagaccaagagatcttgaatctctccacccaagaacttcaaacaagagctaagctcctggacaatgaaatccgtattttcaggtccgaattgcaaagattgtcccacgaaaacaacgtaatgctcgagaagatcaaggacaataaagaaaaaatcaagaataatagacagttgccttacctggtggctaatgtcgtcgaggtaatggacatgaacgagattgaagacaaggaaaatagcgaatccaccacgcaaggtggcaatgtcaatttagacaacaccaccgtgggcaaggcagccgtggtaaagacgtcttccagacaaaccgttttcttgccaatggttggcctagtggatcctgataaacttaaaccaaatgacttggtaggtgtgaataaagactcatatttgattctggatacgctaccttccgaattcgattctcgtgtaaaggctatggaggttgacgaaaaacccacagaaacatactctgatgtgggtgggttggacaaacaaattgaagaactagtggaggccattgtgttgccaatgaaacgtgcagataaattcaaagatatgggtattagagcaccaaagggtgccctaatgtacgggcctccaggtacaggtaaaactttattggcgcgtgcgtgtgcagcacaaaccaatgccacatttctaaaattggcagcccctcaactagtgcaaatgtatatcggtgaaggtgccaaattggtgcgtgatgcattcgcattagccaaggaaaaggcccctactattattttcattgatgaattggatgccattggtacgaaaagatttgattcagaaaaatccggtgatagagaggtgcagagaactatgttggaactattaaaccaactggacggtttcagttctgacgatcgtgttaaagtcttggctgccaccaatagagtcgatgttctagaccccgctctgttgagatcgggtagattggacagaaaaatcgagttcccattgccatcagaagattcaagagctcaaatcttacaaatccattcaaggaaaatgaccactgatgatgatattaactggcaagaactcgctagatcgactgatgagttcaatggtgcgcagttaaaggcggtgacggtagaagctggtatgattgccttaagaaatggacagtcttctgtcaaacatgaagatttcgtcgaaggtataagtgaagttcaagcaagaaagtcaaaatcagtctccttttatgcataa

SEQ ID NO: 2402 - DNA, 1704 bp, Saccharomyces pastorianus
atgggacagtcttcctcgactccttccagtaatgaagaaaaatcttctagttcaaggaaattcactaataatagggatgttttagcgtatttcaacaataaagcacagaaacaagttactctacccgagttggttagcttgaagggaaatctgcaaattgaagacatgaatacgccaatttccgacaagtccttatgtagcgtacttcattttccacagaaacatactctactcgtgggaatagtgactaatatgttaagagttctgagtaatttcccactaatgaactcatcttatgaaccaattacagggtacgggctactgaaatgtgttttgttattaaacaacacacgatgcgggaagtacctaaaattcaaatcatacgatcaactaaaattactattcatatcgttatcacttcaaaaaactgacaaagaagaaatacctgaagaaaatgaggacactgtaaaaaaggagagaaacataaagcaaattataacaaacttcgatgatgtcgaccctgaagtactgtatattcccgctgactttatgcttcaattcttgagttggcttttaatcctgagtaccgaatgtcctactagcaattctaagatgggtaatgataaaatctatgaccagtgggatagtttcaaaatttcagcaatgaatcttcttagaacaatgaatccagatgtggtgaacaatacggaatcacatctcataacatttgatcaattctcaacttcaattaaaactgtaatgccaaatctattaaagcctttagaaaatttaatggaacactttttttatttggacaatgatctagtgaattatgacaccaacttgtcgaatatccaagattcgagaataatgacaccagcattgctagcacagctatccacgggactaccaaaggaattgttcattcagaagttacaaagtttatatattgggagaaaaagtgggttctcaatgaggtcattgcaagctaaagtttttaaatggatggctccttcaattttgattgtcagcggaacgagaattacaaattctgatgaatatgcagctcagaaaaatccaaggtatcgtcattttcttgaagaatttcctaaattaaaggattcagaccaaaaaatggatgcatcgtacataaataagaagaagaccacttttgccgtatatatagacgatccatggaaagtgacaaacaaagactattttggtgatctgaacacaagaataatccaaatatcgccagtgcaagatatctataaagtaaaccgaaagggcacaatttatttcaatacaattggtggtggaattggaatcggagataagcaaccattaataaagcccgcatctaaaagatttgtaccaggaaacgtgtcattaactttcgatagcaccttagagttcgctgtttttaggcacactggctacggaggatcattggagcctggatctttatcggtagaaagaaaagaagaggactcattttttgaattacacttcttgattcaagatgtcgaggtatggggatgtggtggcgaaaaggagttagaggaacagatgaaacaaatggcatgggaagaagctgagtctaagaggagacaacaaattaatttgagaagcttaggagaagaccgtgccttgctggtaatggcaggtttagtgggacaaaacagaggcggtggttctatgtga

SEQ ID NO: 2403 - DNA, 1464 bp, Saccharomyces pastorianus
atgtcatttgaggataagtttgaaaagttatctgtgtcgcagagggcttcagaccatatcaataatcagctcttagagaagtttagtcacaaaattaaaactgatgaactatcattcagcaaagccaaaacttcgaaggataaagctaaccgggcaactgtggagaatgtcttggatcccagaactatgagatttctgaaatcaatggtcaacagaggtgtcattgcggatctgaacggttgcttaagtactgggaaagaagccaacgtctaccatgcttttgcaggtacaggtaaagcgcccgtggtagatgaagaaacagggaaatacgaagttttagagacggacggacttcgtgcagaatacgccattaagatctataaaacatctattttagtttttaaagatcgtgagaagtacgttgatggtgaatttagatttagaaatgccagatctcaacataatccaagaaagatgattaaaatttgggctgagaaagaattcagaaatctgaaaagaattcaccaaagtggtgtcattccggcgcctaaaccaatagaagttaagaataatgtcctggttatggaatttctaagtaggggaaatggatttgcgtcaccaaaattaaaagattacccatacaaagatcgtgaagagattctacattattaccatacaatggtagcatatatgaggttgttataccaagtctgtcgtctggtacatgctgatttgtcggaatacaacactatcatccatgatgatcagttgtacatgattgatgtttctcagagtgtagaacctgagcacccaatgagtttagatttcttgagaatggatatcaagaacgttaatttttattttgagaaaatgggtcttaatatttttcctgaaagggttattttccagtttataatatcggaagccttagaaaaatttaaaggtgattataagaatgttactgatttgattggatatattgcgaagaacttaccaataaaatccacggaacaagatgaagcagaagatgagatattcaggtccctgcacttggttaggtcattaggtggcttagaagaaagagattttgatagatatacagacggtaagttcgatttgttgaaaagtttaattgcccatgacaatgaacgaaatttcgctgcctctgaacagtttgatttaaatgacaatgatcacggaagtacttcagaatcagaagaatcttctggaagtgaagacgaggatttaagtggaagcgaagagaatgaggaaagtgacagtgatgatcgcgagtattatgacgacgatgagccaaaaatactaaagggtaagaaatatgaggacaaagacgttaaaaaattacgcaagcaggaagctaaagacaccaaaagagaaaaaaggaaaaccaaggtcaagaagcacattaaaaagaagttagtgaagaagactaaatcgaagaaataa

SEQ ID NO: 2404 - DNA, 939 bp, Saccharomyces pastorianus
atgtctgcaattttacactactctacgaaaactttatctctgaatactggtgccaaaattcctcaagtgggtttaggtacgtggcaatcgaaggacaatgatgcttacaagtcggtcgtggctgctttgaaagacggctataggcacatcgacactgctgctatttacggtaatgaagaccaagtcggccaagctatcaaggactcaggtgttcctcgtgaagaaatcttcgttaccacgaagttatggtgtacgcaacaccatgagcctgcgaaggccctagatcaatccttaaaaagactaggtttggaatacatcgatttgtatctgatgcattggcctgtccgcttagacccaaactatgttaaagatggtaacgtcttgagtgtaccaactaaagcagatggctctcgtccagtagacatcactaattggaattttatcaagacctgggagttgatgcaagagctgcccaaaaccaataaggtgaaggcggttggtgtctctaacttttctataaacaacctgaaggacctactggcatccccaggtaaccagctcacgccagctgctaatcaagtggagctacacccattattgcctcagaatgaattaatcgatttttgtaagagtaaaggtattatggttgaagcttattccccattgggtagcactaatgctccactattgaaagaaccggtggttcttgaaattgcaaagaaaaacaatgtacaaccaggccacgtggtcattagctggcatgcacagaggggttatgttgtattgcccaaatccgtcaatcccgatagaatcaagacgaaccgtaaagtgttcactttatctgacgaggactttgaggccataaataatatctcaaaggaaaaaggcgaaaagagagttgtccatccagactggtctccatttgaagcatttaagtag

SEQ ID NO: 2405 - DNA, 717 bp, Saccharomyces pastorianus
atggaatacgagaagtttctattgttcggggattccatcactgaatttgcattcaatactaggcccacagaggatgataaagattattatgctcttggagccgcgttggttaacgagtatacaagaaaaatggacatccttcagcgaggattcaaagggtacaactccaagtgggcactgaaggttcttcctgaaatcttaaacaatgagcccaacattgccatggccaccatctttttcggtgccaacgatgcatgcttagctggccctcaatgtgtgcctctcttagaatttgtcgataatataggtcaaatggtgtctgtcatgaaagctcatcacgttcttcctattattgtaggcccggcactggtggatagagagaagtgggaaaaagcaagggctgacgaaacagctctcggatatgtgcgtaccaacgagaactttacagtctattctgatgcgttagcaaagctggccgacgacgaaaaaatccccttcgtgaacttgaataaagcgtttcaaaagatagacggtgatgcctggaagagcctactaacggatggactacacttctctggggaaggatacaaaatcttccatgatgaattgatcaaagccatcgaggcacactatcctcaataccatcctaataacatggaatacaaactaacagactggagagatgtgttggatgacggctccaacattttgtcttaa

SEQ ID NO: 2406 - DNA, 1716 bp, Saccharomyces pastorianus
atggattctagaactgtcggtatattaggtggtggacaattgggtcgtatgattgttgaagcagctaacaggctcaacgtcaaaacggtcatattggatgctgaaaattctccagccaaacagataaccaattccaccgagcatgttaacggttctttttctaatcctcttgatatcgaaaagatagccgaaaaatgtgacgtgttgactattgagattgagcatgtagatgttcctacattgaagaatctgcaagtcaaatacccaaaattgaagatctatccttctccagagactattgagttgatccaagacaagtacgtccaaaaggaacatttaattaagaatagtattgccgtcaccaaaagcattcctgtggaacaacctagtgaagcgtcactgttaaaagttggtagtgaattgggcttcccatttgttctcaagtctagaactttggcatacgatggaagaggtaactttgttgtgaaaaataaggaaatgatcccggaagctttggaagtattgaaaaatcgtcccttgtatgctgaaaaatgggctccatttactaaagaactagccgtcatgattgtaagatcagtcaacggcttggtattttcctatcctattgtagaaactatccataaggacaacatatgtgacttatgctatgcaccagctagagttccagactctattcaacttaaggcaaaattattagccgaaaacgcaattaagtcctttccaggttgcggtatatttggtgtggagatgttctatttggaaactggggaattgcttatcaacgaaatcgcaccgaggccccacaattctggtcattataccatcgacgcttgtgtaacttctcaattcgaagctcatataagatctgtcttagatctgccaatgccaaaaaattttacatctttttcaactatttcaactaacgccattatgttgaatgttctcggagataaacaaacgaaggatagagaactggaaacttgcaaaagagcattggctactccaggctcctcagtatatctgtatggtaaagagtcaaagcctaacagaaaagtaggtcacataaacattatagcttcaagtatggatgaatgtgaagaaaggctgaattatattaccggtagaactaacatcccaatcaaaatatctgttgctcagaagttagacttagaagcaatggctaaaccattggttggtatcataatggggtctgattcagacttaccagtaatgtctgctgcctgtgcggttttgaaagactttgacgttccatttgaagtcactatagtctctgcccatagaactccacacagaatggcagaatatgccatctctgctagtaagcgtggtatcaagacaataatcgccggtgccggtggtgcagctcatttgccaggtatggtggcagcaatgacaccactacctgtcatcggtgtacccgtaaagggttcctgtctagacggtgtggattcgttacattcaatcgtacaaatgcctagaggtgttccagtagccaccgttgctatcaacaacagtacaaatgccgcattgttggccatcagactgcttggtgcttatgattcaagttacacaacgaaaatggaacaatttctattaaagcaagaggaggaagtccttcttaaagcgaagaaattagaaaccataggttacgaagcttatttaggaaacaaataa

SEQ ID NO: 2407 - DNA, 879 bp, Saccharomyces pastorianus
atggacgacagtggaaacaaaggttggttagaaggtgccattcgcgatatagtaaatggttccatcgcaggtgcatgtggtaaagtaatcgaatttccattcgatactgtgaaagtcaggttgcaaacacaagcgtcaagtgtctttccaacgacttggtcgtgcataaaatacacttaccagcatgagggtatagcgcgaggattcttccaagggattgcttcgcctctggtgggggcatccctagagaacgccatgttgttcgtttcatataaccaatgtcacaagcttttagagaagcacacaaacgtttctccgttaggagagatattaatctctggtggagtggcgggctcgtgtgcaagcctggtactgacacctgtagaattggtaaaatgtaaactgcaagttgccaacttacagagtacctctactaaagtgaagcatacaaaggttctgcctacaataaaggcgatcgtaagcgagagaggtgtaacaggattgtggcaaggacaatcagggacttttattcgagagagtcttggaggtatcgcctggtttgcgacctatgaactaatgaaacagtctttgaaagacaggcatactcttgatgacccgaaaagaaacgaaaataagatatgggaacttctcgttagtggagggagtgctggtttggcattcaacgctagtattttccctgcagatacggtgaagtcaataatgcaaacagagcatataagccttaccaatgcggtgaagaatatatacgccaagtttggtataaaagggttttatagagggttgggtataacactctttagagctgtgccagccaatgcagctgttttctacatctttgaaactctttctgctctgtaa

SEQ ID NO: 2408 - DNA, 1656 bp, Saccharomyces pastorianus
atggcgtcggctgtaccttatgatccatatgatgatctggataacaatccatttgctgaaccacaggaagatcaccagccaattgcagcaaccgctgatggatcttcctctatgaaggaagagcaagcaagtgctgaagaagccactgtttctgaccaggctaccagtgtggtcaacagtgctcaagaggaactgggcggagaagaaaattcaacactgtcaaaaccagttaccaaacgagacggagataaccctatactggcacaaccccttcaacgtgatatacttcctgaaagaaatgacgaaaagaaaaaatacactatgcttgtcaaagtatcagggctggaacgcttcggatctaccactggtaagaaaggtaatccaactatcgtatttgactgctcaacaaacctacccacatttcgcaaaaaacaatataagaacgtcaaaaaatcatacgaagaatttcatcaactgttcaaatatttaaatgctgctatacaagaatcctttgttcccacccttcctcccgcatacacatcatttggtattaatagcgaagaagataaaactaaagtttcacggaatttccagctctggttcaacagagtatcacaagacccgctgattcttcggaatgaagaagtggcttttttcatcgaaagcgacttcggtacgtacactcccatcaacaagtacaaatcacttgcatcagggttgaggagaaaaactttaaagcagttggcacctccttatgatgaaaccacagaactagcagagttccggccattagtcaaatctatatatgttgtctctcaaaatttgcaagaaaaactgctaaaggtttcaaggaaccgtaaaataatggttcaggaagaaaatgcatttggccaggacttcggtaatttggatgaacacaacaaactatacaagagatacggtaagattttgactgctgtgggtgatattgatagcattatagccactatggatatggcgacattatacgatggtttggaatgggttgttagagatagctatgtcgtgaaagaggcattgactaacagacattttatcatgcgaaatctaaaccaagcacaacagaattcaaaggctaaacaggaacaagctcgcagattcaggtccagaagagacattaatcccatgaaaatcgatgaagcactacgccagttgaaaacagcaaccaaggatgaacaagttttgactttaaagcttcagcggattacatccaacatgcttattgagaggaagcaatggctcgcctggtacgaggaatggataagaaattctattaaagaatttacactgcggaaaatagaatacgaaaggaagaagctaacgttactggaacgagtccgctccgatatcaggaaggctgacgagaacggtggtttatcacgtctgggacgccaggctgtttctgccaacagcaccgatacttctcagactgtcaagggcgacagttggactggagagagtaatcgtaaaagtcaaatcccgatcaataagattgctcataccgaatttgacaatgaactgttcacagaagacgatggatgtgcctcccaagactctgacactacatcgctgaacgctcgtcatgctgcatcgctgttgggtatgtctactaaatag

SEQ ID NO: 2409 - DNA, 1110 bp, Saccharomyces pastorianus
atgttgagaaacacttttctaagaaacacctcgagaaggtttttgtctaccgtcaagcaaccttccatcggaagatacactggtaagccagatccttccacgggaagatacacagtctcattcatcgaaggtgatggtatcggtccggaaatttctaaatcagtgaaaaaaatctttagtgcagcagacgttcccataaattgggagttttgtgatgtaagccccatcttcgtgaacgggttaactaccatcccagatcctgccgtacaatctatcaccaagaatttagttgctttgaaaggccctctagccacaccaattggtaaaggtcacagatctttgaacctgaccctaagaaaaacattcggtctgtttgctaatgttcgtcctgccaaatctatcgaaggtttcaagactacttatgaaaacgttgacttagtccttatcagagaaaatactgaaggtgaatactccggtatcgaacacatagtttgccccggtgttgttcaatccatcaaattgattacaagagaggcctccgagagagtcatcagatatgcttttgaatacgcaagagccattggcagaccaagaatcatcgtggtacataaatctactatccagagactagctgatggtcttttcgttagtgttgccaaagaattatctaaggaataccctgatattacctttgaaaccgaacttatcgataacaaagtgttgaatgtcgttactaacccatcttcctacactgatgctgtctctgtctgtccaaatctttacggtgatatcctatctgacttgaactctggtttgagtgccggttctttgggtttaactccttctgcgaatattggtcataaagtctctatctttgaagctgttcatggttctgctccagatattgccggaaaagacaaagccaacccaactgcgctacttttgtcctcagttatgatgttaaaccacatgggcctaacttctcatgctgatcaaattcagaatgcagttttgtctaccatcgcatctggttcagaaaacagaaccggcgatttggctggtactgctactacttcctctttcactgaggcagtcatcaagagattataa

SEQ ID NO: 2410 - DNA, 990 bp, Saccharomyces pastorianus
atgttgagatctactgttaccaaaacgccattaagaatatgtcgttccttccacagagaatctgttccttacgataagacaatcaaaaatctgttgcttcccaaggaaactaaggtgatctttcagggatttacaggcaagcaaggtacgttccatgccagtatctctcaagagtacggtaccaacgtcgttggtggtacaaacccaaagaaggcgggccagacgcatttgggccagcctgtttttgcttctgtgaaagatgccattaaggaaactggcgcaactgcgagcgccatttttgtccctccgccaattgctgctgctgctatcaaggaagctattgaagctgaaattcccttggctgtctgtatcactgaaggtattccccagcatgacatgttatatgttgcagaaatgctgcaatcgcaaaacaaaacaagactggtcggacccaactgccccggtatcattaacccggagacaaaggtcagaatcggtattcagcctccaaaaatttttctacctggtaagatcggtattatttctagatccggaactttgacatatgaggctgtccaacaaaccacaaaaactaaccttggccaatctctagtcatcggtatgggtggtgatgcattccctggtactgatttcatcgatgctttgaagttattcatggaagatgaaactacagaaggtatcatcatgctgggtgaaattggtggtaaagcggagatagaagccgctcaattcctgaaagagtacaacttcagcaagagtaagccaatgcccgtggcatctttcattgccggagctgttgctggtcaaatgaaaggtgttagaatgggtcattctggtgccattgtggaagggtccggtactgatgcagaatccaagaagcaagctctaagagacgttggagttgctgttgtcgaatctccaggttacttaggacaagctttgctagaccaatttgccaaattcaaatga

SEQ ID NO: 2411 - DNA, 2364 bp, Saccharomyces pastorianus
atgaaaagacacgtgtctttatctgacatattgacaggcaacaagaaaaaagtaaaaagacaagatactcttcagattaccattgatgaggataatgatactaaacctggtactttcaatgccaaaacgaccaatcatgtcaactctccagtaatacttctgaatcactctatggtcaagccaattgacgccacgcccactacgcacctctctgccaaagagtttttgatgatgaaacacgccaaagaaaaaagcgatgataccaacgatgatcttattgtcatcgatgaaaatgtctctaaacatgcgaaagttgtttcttcaccagaacaggatgatgatattgctataatatccacatcaagaataaaatcatcgctgcttatcgaacgagctgcaagactaaaaaatctactcaagtatgaagcaatagatacttcgaagagatttaatagcatttccaaactaaaagaaattgagccaccactatcaccgtgtcaatcatttcacccagatgatgatttggatttattatatgagtctgttgaaataccactcctttcccgcacaataccgtcactagaacaccatttcactccgcatgattatgaaacactcagtaaaggtaagaagttgaccgcctctaccccggtccgttaccaaacttctaaattatttgacacaaatgtcaagagaaacaaaaacgtatggccacaactattcaagccagctacattaaggcaagttttgattgaacctaaatcaaaatcgcaaataaaaaattggattaaaacatctttccacatactagagaagcctaccgcaagaaatcgtttattaaacatattaagacccaacaaacaacaagggattgacgacgaaattgctagttttatcgtacctgacttcgaagaaaacgaaaagttacgcataaattcccacgaagatggcgaaataaatcttaatttgcgtgaatttgtgcccttaatgatcatacatggtaacgcgataggaaagaagacactggtacaaacaatcatgaaagaagttgccggtgatgataaatcgtaccaaatatttgaagtaaatgcaaacatgaacaggagtaggaaagatctatttgaaactctactagatttcacaactacacattatgtcaaggactcttcgaaaaggaaatccgattatgggctcgtactattcaatgacgttgatgtattatttaaggaacatgacaaaggattttggtcaatgatcaacaaactctgcgaattctcaaggagacctctggtattggtctgtactgatttgtcatttgtccctaatgagtttattaccttggcaagcgagcaagactctttatttcatactaagaaaattagttcatctacgattcatgcatttttagcaaaatatatgaaatcgttacaaatagaagtttgcgacaattggcttcaagatatgataagacaaaataacgcggacattagaaaatgcttaatgtgtttacagttttggtgcgttgataccgagagtgatttgatactatacaagaacgaaccgccggcttcaacatcaatgtgcggtttgagtattgaagaaatgttaaaaataacagaaatattatccctaaacgatgtcgttggccaagcaacgcaaaatcactcactgataagacaggaagtagattccactataatgacaccagaaaacatttgtgctttccaagatccaaacatggatgatgaagcgaaactaaaagctgattacatgatagattataaactgcatttaaacgacctcaataagcagaaattattaccattcgaattgaatgtttaccaatatatccaagaactactggaagcccactttcattacaatcaggagttgtcaccaaagcttgacgacgagttgcttattaataagttcaaaaaaatgactggatctacaataaattttctagcctctagggtaccgaaatatgaccaattacagtcaacaagaagaacaagaaactctaaaaaaatttctgacatcctagaccaattcaggggaatttataacgtcgatactctagacgaagatgtcgagtttcatatgttaagcagcactacccaaaaaatgagagcagaaatcaatccctacgttttcgaaatcgccaaaagtgatgccaacgccaagaatgaaaacaaacaaatatttaagtgtcatagcggcaacgtatcagaaagacgacacaaggacttgatctaccagctatcacaagatggaatcttgagaaatatttggtttaaagctgatccaaacatagtggtaagtaattggaaccattttcgttcagcaatttcgaaacacaaataa

SEQ ID NO: 2412 - DNA, 825 bp, Saccharomyces pastorianus
atggttgcacctactgctttaaagaaggataccatagtgagtgttaacggggaagacagcagcaaaagcagaattataggaataaataatactgaaagcattgaagaagacgatgacgatgacgttctattggaggatgtcagcgataacacaacaaaagatgagggaaatggcgaagatgaaagtgagaaagtgagggaatccaaaaccgtagtggttgatgaccaggggaagcctcgtttcacttcagctaccaaaacacaaggtaacaagataaaatttgaatcgagaaaaattatggtcccaccacacagactgactccattaagaaataactggaccaagatttatcctccattggtagaacacttgaagctgcaagtcagaatgaacttgaaaaccaaatcggtggaactgagaacaaacccaaaatttaccacagaccccggtgccttgcaaaaaggtgccgatttcatcaaggcctttgctttagggtttgatctcgatgattccattgcgctactaagactggatgacttatatatcgagacttttgaagtcaaagatgtcaagacactaacaggagaccatctgtcgagggccattggtcgtattgctggtaaagacggtaagacgaagttcgctattgagaatgccacaagaacaagaattgtcttggccgactccaaaatccacatcttgggcgggttcacccatataagaatggcaagagaatttgtagtcagtttaattttaggttccccaccaggcaaagtttacgggaacttgcgtaccgttgcatctagattaaaagaacgttactga

SEQ ID NO: 2413 - DNA, 3675 bp, Saccharomyces pastorianus
atgtctgacgttgaaaactcagaaaagtattatgaagaggatccatatggatttgaggacggaagtgccccaattactgccgaagattcgtgggctgtcatatctgcgttttttcgggagaaaggtttagtctcacagcaacttgactccttcaaccaatttgttgactatactttacaagacattatttgcgaggactccactttgattttagaacagctggcacaacacaccaccgaatcggataatataagtagaaagtatgagattagctttgggaaaatatatgttacgaaacctatggtaaatgaatctgatggtgtaactcacgcattgtatccacaagaagcacgtttacgtaatctgacgtattcatctggtttgttcgttgatgttaagaagagaacatatgaagctgttgatgttccaggtagagaattgaaatacgagttaatcgccgaagagtctgaagatgatagcgagagcgggaaagtcttcattggtcgtctacctatcatgttaagatccaagaattgttacctaagtgaagctaccgaatcagatttatacaagttgaaagaatgtcccttcgatatgggtggttattttatcattaatggttctgaaaaagttttaattgcacaagagcgttccgcaggtaatattgtacaagtgttcaaaaaggctgcaccatctccaatttctcatgtggcagaaatcagatcagctcttgaaaagggatccagattcatcagcacccttcaagtcaaactttacggtcgtgagggtagttcggcccgtaccattaaagctactttaccatatattaaacaagatattcctattgtaattatattcagagctttagggattattccagatggtgaaattttagaacatatttgttacgacgtaaacgattggcaaatgctagaaatgcttaaaccgtgtgtggaagatgggtttgttattcaagatcgtgaaactgcattagattttattggtcgtcgtggtactgcccttggtattaagaaggaaaagagaattcaatatgcaaaggatattttacaaaaggaattcctacctcacattactcagttagaaggttttgaaagtagaaaggcatttttcttaggttatatgatcaacagattattattatgtgctttagatcgtaaagatcaagatgatcgtgaccacttcgggaaaaagagattagatttggcaggtccattgttggcccaacttttcaaaagtttattcagaaaattgactaaagatattttccgttacatgcaaagaactgtggaggaagcccatgacttcaatatgaaattagccattaatgcaaaaactataacatctggtttgaagtatgccttggccaccggtaactggggtgaacaaaagaaggccatgtcttcaagagccggtgtttctcaagttctgaaccgttatacttattcatccactttatcacatttaagaagaactaacactcctatcggccgtgatggtaaattagccaaaccacgtcaactgcataatacccattgggggttggtctgtcctgcagaaaccccagaaggtcaagcgtgtggtttagtaaaaaatttatcactaatgtcctgtatttccgttggtacagatccaatgccaattatcacttttttaagtgaatggggtatggaaccattagaagactacgtgccacatcaatcgcctgatgctacaagagttttcgttaatggtgtgtggcatggtgttcacagaaacccagctagattaatggagacattaagaactttaagaaggaagggtgatattaacccagaagtctctatgatcagagatatccgtgaaaaggaattgaagatcttcacagatgccggtagagtttatagaccattatttattgttgaggatgatgaaacactcggtcataaggaactaaaggtgagaaagggtcacgttgctaaattaatgactacagaatatcaagatattgaaggtggttttgaagatgtagaggaattcacatggtcatcattattaaacgaaggtttagtagagtatattgatgctgaggaagaagaatccattttaattgctatgcaacctgaagatctcgagccaacagaaggtaacgaagaaaacggtctcggtgttgaccacgctaaacgtattagagtatcccaccatgccaccactttcacacattgtgaaatccatccatctatgattcttggtgttgctgcatcgatcattccattccctgaccataatcaatctccacgtaatacttaccaatctgcgatgggtaagcaagccatgggtgtatttttaactaattacaatgttcgtatggataccatggccaatattttatactatccgcaaaaaccattaggtactacacgtgctatggaatacctgaagttcagagagttacctgctggtcaaaatgcgatcgtcgccattgcatgttactcaggttataaccaagaagattctatgattatgaaccagtcttcaattgatcgcgggttattcagatccttatttttcagatcctatatggatcaagaaaagaaatatggtatgtctataacagaaacttttgaaaaaccacaacgcacaaacacactaagaatgaaacatggtacctacgacaaattagacgacgatggtttaatcgcgcctggtgttagagtttcaggtgaagatgttattattggtaagaccacaccaatttcacctgacgaggaagagctaggtcaaaggacagcataccattccaagcgtgacgcttctacaccattaagaagtactgaaaacggtatcgttgatcaagttttagtaacaacaaaccaagatgggttaaagtttgttaaagttcgtgttagaaccaccaaggttcctcaaatcggtgacaaattcgcttctcgtcatggtcaaaagggtactattggtatcacatatcgtagagaagatatgccatttacagcagaaggtatcgttccagatttaattatcaatcctcatgctattccatctcgtatgactgtggcgcatttaatcgaatgtttattgagtaaggtggctgcattatctggtaatgaaggtgacgcttctccattcacagacatcacagtagaaggtatatctaaattattacgtgaacatggttaccaatctcgtgggtttgaagttatgtacaatggtcacacaggtaaaaaactgatggctcaaattttctttggtcctacatattaccaacgtttaagacatatggtggatgacaagatccacgccagagcccgtggtccaatgcaagttttaacaagacagccggtggaaggtagatcgagagacggtggtttaagattcggtgaaatggaacgtgattgtatgatcgctcacggtgctgcttcatttttaaaggaaagactaatggaagcatccgacgccttcagagttcatatctgtggtatctgcgggttgatgacagttattgccaaattaaatcataatcaatttgaatgtaaaggatgtgataataagattgacatctaccaaatccatattccatatgctgcgaagttattatttcaagaactaatggctatgaacattacgccacggttatataccgatcgttcaagagatttttaa

SEQ ID NO: 2414 - DNA, 774 bp, Saccharomyces pastorianus
atgttcaatttaattttatggccattatttttgctcacctctgttgccgttcctttgcaactgacactggaagtaatttatctgacctcttccgtaaacttctcagaggcgagtgctgccaagaccgctacttctttggggcaatctccagtggtcatcactgtctataaatcactgttgaaatattggagtctttatgaattcttacattttatttacctctatactccgatcgatgcctttttgaatttcttaccattttcctccttacttatgtcgtttgggagtatttgcctgacaagagagttgatgtacgatttcattagcttcatggaatctcaaggcaagctcaccgggttccttaataaaataacagaacctaacttcaacagttaccggctattttcctcggtttacaatatctggtttgcagaagacgccaacgacaaatttctattcggtaaactgacccagattctaatttccttaaccaagagatacgaatttccaagaacctactacctgtcaaaggcttccgatttccttcaaaacctaatattgacgaggctgaggccctttgttacagaacaaacacaagatgacacatttaagcatcaaaacggtaaccgtgattcttcagatagtggtacccagtacaataagacttcacaacaatcatcctcttcttatgagaataatttcactagtaccgaatttcccaatgattacgattttatggatgacatcctcgaagaaacaacagagctagattag

SEQ ID NO: 2415 - DNA, 4536 bp, Saccharomyces pastorianus
atgtccgagacaaagctcactagtaacgtcaatggcgtcagcagctactcctccgcatcttcctctactgaaaacgatgcggatctgcatgagtacaatggatttgatgagcagacagaagctcgcatccagaaactggcaagaactttgactgctcagagtgcgcagcactcgactcaatcggcgtccaacaaacaagacgttcaatctatcttctccagtggcgtggaaggtgtcaacccggtctttatcgaccctcaagccccaggctataatgaaaaattggatccaaattctgaaaacttctccagtgctgcttgggttaaaaacatggcccatttaagtgcggctgacccagagttttataaaccgtattccttgggttgtgcctggaagaacttaagtgcctccggtgattccgctgatgtcgcataccagcccaccgtgctcaatactccattcaaacttattcgaaactccatgagaatgttacaaaaatcaaacgatggtaacaccttccaaatcttgaaacccatggacggttgtctaagcccaggtgaactattggtcgtcttgggtagaccaggttctggttgtaccactctattgaaatccatttcttcaaatacccacggtttcgatgttggcgaagacacagaaatcacttacagtgggtattctagcgaagatatcaaaaaacattatcgtggtgaagttgtttacaatgcagaagctgatatccatttacctcacttaacagttttccaaactttactcacagtcgctagactaaagacacctcaaaatcgtataaagggtgtagatagagaaagttatgctcagcacttggctgaagttgctatggctacctatggtttatctcataccagaaataccaaggtcggtagtgatttagttagaggtgtgtccggtggtgaaagaaaacgtgtttctatcgcagaagtctccatttgtgggtctaagttccagtgttgggataatgctacaagaggtttggattccgccaccgctttggaattcatccgtgctttgaaaattcaagccaacacttcgaacacatctgctactgtggctatttaccaatgttctcaagatgcatatgatctatttaataaagtgtgtgtcttagatgacggttatcagatttattatggcccaggtgataaggccaagaaatatttcgaagatatgggatacgtgtgtccaagcagacagacaaccgccgatttcttgacctccgtgaccagtgtctcagaaagaacactgaacgaagacatgttaaaaaaaggcattaccattccacaaacaccaaaggacatgaatgcttactggatgaagtcccaaaattacaaagaattaatggaagaaatcgatcaaaaaatcaatggtaatgatgaggccgcccgtgaagccatcaaagaagctcacattgctaaacaatcaaagagagcaagaccctcttctccttacactgtcaattatatgatgcaagttaaacacctactcgcgagaaatatgtggagaatacgaaataatattgggtttacattattcatgatcttaggtaatgccagtatggctttgattttgggttccatgttttacaaaatcatgaaaaagggtgacacctctactttcttcttccgtggttctgctatgtttttcgccattttgtttaatgcgttctcttctttactggaaattttctcgttatatgaagctaggccaattactgagaagcatagaacttactcattatatcatccaagtgcagatgcctttgcatcagtgctttccgaagttcctacaaaggtcactattgccatatgtttcaacatcatcttctacttcttagtcgacttcaaaagagacggtggcattttctttttctacctactgatcaatatcgttgctgttttctctatgtctcatttgtttagatgcgttggttcactagcaaaaacattatcggaggctatggttcccgcttctatgttactgttggctctttctatgtacaccgggtttgctattccaaagaagaagattttaggatggtctaaatggatttggtatatcaacccgctggcttacttattcgaatctctgttaatcaatgaatttcacgatagaaaatttccatgtgctcaatatattcctcgtggtactgcttacacaaatgcaacgggcacagaaaccatctgcagcgtcgtcggtgctattcctggccaagattatgtgttgggagatgatttcattagagaaagttatcaatattaccataaccacaaatggcgtggattcggtattggtatggcgtatgtcgttttctttttcttcgtttatctattcctatgtgaatataatgaaggtgctaaacaaaaaggtgaaattttggtttttccacgtagtattgtgaaaaagatgcagaagcaaggctctttgaaagagaagaatgctaatgatcctgaaaatgttggtgaacgtagcgatttttccagtgataaaaaaatgctacaagaaagttctgaggaagaatccgaaacttatgcggatgttggtttatctaagtctgaagctattttccactggagaaatctgtgttacgaagtccagattaaaactgaaacaagacgtattttgaacaacgttgatggctgggttaaaccaggtactttaactgctttaatgggtgcttccggagctggtaaaactacgcttttggattgtttagctgaaagagttaccatgggtgtcatcactggtgatatctttgtcaatggtattcctcgtgatcaatctttcccaagatctattggttactgtcaacaacaagatttacacttaaaaacttctactgtgagagaatctttaaggttctctgcatatctacgtcaaccagctgaggtctccattgaagagaaaaatgcctatgttgaagaagttatcaaaattttggaaatggagaaatatgccgatgctgttgtcggtattgccggtgaaggtttaaatgtcgagcaaagaaaaagattgaccattggtgttgaattaactgccaagccaaaactattagtctttttggatgaacccacgtctggtttagattctcaaactgcttggtccatttgccaattgatgaaaaaactagcagaccatggtcaagcaattctttgtaccattcatcaaccttccgctattttgatgcaagagtttgaccgtttgctatttatgcaacgtggtggtaagacagtttactttggggacttaggtgatggttgcaagactatgattaattatttcgaaagccatggttctcataagtgtcctcctgatgccaacccagctgagtggatgttagaagttgtgggtgctgctcctggttctcatgctgaccaagattatcatgaagtttggagaaattctgatgaatacagagctgttcaatctgaattagattggatggaaaaggaattaccaaagaagggccctattaccgccgaatctgaccaacatgagtttgctcaatcactcagttatcaaacaaaattggtcagtgttcgtttattccaacaatattggagaaccccagaatatttgtggtccaaattcattttgactattttcaatcaattgtttatcggtttcacatttttcaaggctgggacctcattacagggtttacagaatcaaatgttagcagttttcatgttcacggttatcttcaatcctattttgcaacagtacttaccatcctttgttcaacaaagagatttatatgaagctagagaacgtccttcaagaactttttcttggctaccatttatccttgctcagatctttgtggaggttccatggaacattctagcaggtacaatcgcttatttcatctattactacccaatcggcttttacgcaaatgcatcagctgctcatcaattgcacgaaagaggtgctttgttttggctattctccattgctttctatgtttacgtgggttcaatgggtttgctcgttatatctttcaacaaagttgctgaaagtgctgctaacctcggttctctgttgtttactatggccttgtctttctgtggtgttatggtgaccccagaaggtctacctaggttttggattttcatgtacagagtctcaccattgacttacttcattcaagcccttttgtctgttggtgtcgcaaatgtggacgtcaagtgtgacgattacgaactattaagatttacacccccatccgatatgacttgtggagaatacatgaagccgtatctactgcaggccggcactggttatttgactgatgaaagcgctactgacacttgtaagttttgcccggtttctacaacgaacgcttacttagccagcgtcaattcatattacagtgaaaggtggagaaattacggtattttcatttgctacattgcctttaattacatcgcaggtgtctttttgtattggctagcaagagtacccaagaagaacaagaaaatctccaagaaatag

SEQ ID NO: 2416 - DNA, 1764 bp, Saccharomyces pastorianus
atgactaatcgtctcctcatatacggacttattctttggacaagtataattggatcttttgcattagatagaaacagagctgcgcaatatgcgagggaaaatctacataacgccaccctgaccaccaatagtacctccacgaatgtacaaaaagaactatcttcgttactatcaagtggttcctcaaccagccgagattttagacagcctactaaagttgatatacggcaggctgaaatacgagaaaacagtataaagacagagaaaggagcattggtacaatacgcaagcgcggtaagctcgagcgattcgagcaattcgtttttatcattcgatgaatggaaaaaggtcaagtcgaacgagcactcatcgaacccggaaaggcattctgctcgaataagagagccaatcgatccatcatgttataaggataaggaatgtataggagaggaattagaaattgatttgggatttttaactagcacggatgaaccgaatgaaagtgaaggacatccaaaaaattttcaagaggaagaagaaagtataggcaaagtatacaaaaaaagattcaactatgcgtctttagactgcgctgccaccattgtcaaaagcaactctgaagctgttggagccacatccatcctagttgaaagcaaagataagtatttgctgaacccttgttcggcgccgcaacaatttgttgtcatagaactctgtgaagatatcttagtcgaagaagtgagtattgctaactatgagtttttttcgtcaacattcaagaaattaagattttcggtttctgatagactcccggtagtgaagaacgactggaccatactgggagagtttgaagcagaaaattctagagatttacagagatttaaaatacataatcctcaaatttgggcaagttatttgaaagttgaaattttatcccattatgatgatgaattttactgtcctatatctttaattagagcacatggtaaaacgatgatggatgaattcaaactcgaccaacttaaaacccaagaagataaggagcaatccataattacaacggagatagataactcggaggatgacgttgttcaagacaaatgcaataacatagaaacacatttggaagccttcaacacaagtgcgatgacagatatagctggtttattatcgtgcacttccaagcttgcccctttgaaattcgatgagtttttcaaagaggttaacgcctccttttgtcctccaaagcaaatggtatcgtcctcatcttctgtagttcctgtgatcccagaagagtccatttttaagaacataatgaaaagattgtcgcaattggagacaaattccagtttgacagtgtcctatattgaagaacagagcaaattgctatctcggtcatttgaacaacttgaaatggctcatgaagcaaaattcggtcatcttgtcacagtcttcaacgaaaccatgacgcgcaacttagatctactaaacaactttgctaaccagttgaaagatcagtcactacggatattagaggagcaaaaactggaaaatgacaagttcactaatcgccatgtgttgcatctggaaaaattggagaaggaagtaagttttcaaagaagaattgtgtacgcttcattctttgctttcgttgggctaatatcctatttattaataacaagggagctctattttgaagatttcgaagggaacaaaaacgaaagtattggaaaatcggacattattcagcaagcaattaggtaa

SEQ ID NO: 2417 - DNA, 1353 bp, Saccharomyces pastorianus
atgtcttcaagatatagggtggaataccacctaaaaagccaccgcaaagatgaatttatagattgggtaaaaggcctactggcctcaccctttgttctgcatgcagtttctcatgaaggtgactacaatgatgacttggcaacaactcagcgtgtaaggtcacagtacgctgacattttcaaagatattgagggattaatcaaggacaagattgaatttgattctagaaacattatacaagacgaaattgaagatggtgcctcttctcaatctttgaacgtattggggcaatcacgcttaaaccttttggtcccatctattgggacatttttcaccgagcttccgttagagcaagcctttttatgggatgattcgcaaagagccatatctgcacgcagaatggtggcaccgagcttcaacgatgtcagacatattttaaatactgctcaaatttttcattttaagaaacagaaaattttacgcaatggcaaagttttgaggttggtaacttttgatggtgatgtcactctttatgaagacggtggctcccttgtttacactaatccggtaataccttatattcttaagctgctacgatacggtatcaacgtaggcatagtcacagcagctggatatgatgaagccggaacttacgaaaacagattgaagggactgattgtagctttgcatgactcaaccgatatatcggtttctcaaaagcagaatttgactattatgggtggtgagtcgagttatcttttccgttattatgaagatcccgaagaagacaaatttggatttaggcagattgacaaagaggaatggttacttcctaggatgaaaggttggtctcttgatgatgtggaaaagacattggactttgctgagagaactttgaacagactcagaaaaaggctaaatttaccttcagaaatctctatcattcgtaaagtaagagccgtaggcatcgttccaggtgaaaggtatgatgaggcctctaaaaggcaggtcccagttaaacttgatagagaacagttggaagagatagtgttgactcttcaaaatactttagagtcctttgcgccttctagaaggattcaatttagttgttttgatggcggtagtgatgtttggtgcgatattggaggtaaagatcttggcgttcgctcattgcaacaattttacaatccggaagccccaattaaaccctctgagaccttgcatgttggtgaccagtttgccccagtcggatcagcaaatgattttaaggcaagattagccggatgtacactttggatagcttcccctcaagaaactgtaaactatcttcatagattgctagaaactgattag

SEQ ID NO: 2418 - DNA, 2172 bp, Saccharomyces pastorianus
atgacaagtgtcatgaccgacaacaatagcgatattaatgccagccagatcttcacaactcctttgtctagtacggggggcggtctcattaacgaaatcaaagatgcaataactgagatggaacaactaaaagttttagagttaaagcaaatatgtaaatctttggatttagcaataacaggtaaaaaatccatcctacaagaccgaataaaacagtttctgagaaaatcctgtgatattggccatatagatccttggaggcccaagacaataaagatcctcattgccaaagtaaggataaactcatcgttacctaaatactctattctttgggaaactttgaaaacaggtgcatttaagcatcctgtagcatcgggagaactacccgtaactgctctccagaatactgtaacaccaacttcttcccaacaacaagtcttaccgtattccttcacgtcaccgttttacaaccccatagcacaagttccggatgctagtaaaaagataaagcaatttataggaagaagttgtgcaaagatgaagtttaaaataggcaagtcaaatcacgatcttttgaaatccaataaaaatcacaaactttacttgttttgtgggttctcgataccatttatatatgacaccgtaggtcacgaagctgtagatttcccatacccttgtgaattagtcttcaatggtaccaagctagaggacaatgtgaaaggtttgaagaagcagaatgggaccggaagccctgccaacttaacgccttatgtcaaatcttcatctgagcttaatcagttggacttacattatctcagtgccgaaaaagattactctataagttgctttatagtggaggcttttccacctgaaactcttttgggaaaaatcctagagaagcccaagattatcaaacaagctactattgcatacatcaaaagaactttgaatgaacaagatgacgaagatatcataactacttccacagtgctgaccttgcaatgtcccatatcatgtacgagaatgaaatatcctgcaaagacggaaaaatgtaagcacatccaatgttttgatgctctttggtttcttcattctcaatcccaagtacccacatggcaatgtcccatttgtcaacagcctgtgaaatttgatcaattgaaaatttccgaatttgtcaacgacattattcaaaattgtaaagaggatgtggaacaagttgagatatctgttgatgggtcgtggaaaccagtgcatgacagttccgcgattacggcggacgatgctaatcaagatttccaagggaagagtgagcaattagatgctgtcaaacaagaacaggataatgacaacaggaatgtgttcgacattaacatggatgatggcgtgaaccataatgagcctgaaatcatatccttagatagctcagacgatgaaccctttgttcccgctaatggaacctacccaacacatgcaggctctagaaattatcaattaagggcagacgtatttccatctgaatcagaaggctcaagtgagtacaaccctaaccatacttcaacgccgaaaggttcccctactgtagatcaaaatgaatgtcaagatcctttccaaatgagatcgattctcaatcaaggtataaacccaagcgtgaatgatacgcccacgaataacagtagtatcaattcctttgttacagctacgaacggtgatagtaggatattctataacagagggccatcgacgccgctacttccgaacgttttacaaaatttaaccaatcaaacagaagctcaaaggaatctccataaccccaattataatactgtagagagtgatgtcaatttgttgggtatatccggcggttttccccctatccccacgatggaaccaaattctgaagcagaaactggagtagcgccaagagccacatcagccactcagccgccaccattcatacctgtgagcactaccggccatggtgatgatggcaagagcagaaaaagaaggtattctaatgtctctatttacattccaaagaacccgtatgccaccctaatgaagcggagaccgcaagcaaatcgcaccgtaatcaataaaccaccagcccaacctaatgactctaacgcaacaacccaagataactcagaagtgatcgatctaacctctgattga

SEQ ID NO: 2419 - DNA, 786 bp, Saccharomyces pastorianus
atggcaggtttatcatttgacaattaccaaagaaacagcttcctagcagggaactcgcacacacagcccaaggccacttccacaggtaccactattgtgggggtgaagtataaaaacggtgttgtgatcgctgcagacacaagatccactcaaggccccatcgtggcagacaagaactgtgcgaaattacacagaatctcccccaagatatggtgtgctggtgccggtactgccgccgatactgaggctgtgacacagttgatcgggtccaacattgaactgcattctttatacacttcgagagagccacgggtggtgtccgctttgcagatgcttaagcagcatctgttcaagtaccagggccacattggtgcctatttgattgtcgctggtgtagaccccacgggagctcacttgttttcaattcacgcacacggatccactgatgtgggctactacttgtccctgggttctggttctctcgcggctatggccgtgttggaatctcactggaagcaagacctttcaaaagatgaagccatcaaattggcctccgatgcgatccaggctggtatctggaacgatttagggtccggttccaacgtagacgtctgtgttatggaaataggtaaagatgcggagtacctgagaaactacttgactccaaatgttagagaatcgaagcaaaggagctataaattccctagaggcaccactgctgtgcttaaggaaagtatcattaacgtttgtgatgtacaagaagaacaaatcgatataaccgcataa

SEQ ID NO: 2420 - DNA, 285 bp, Saccharomyces pastorianus
atgtcaaataacaatagaagcaaggcgatggtgccaccaatcaactgtatattcaactatttacaacaacagacattagtaacgatatggttatttgagcaagttggcataagaatcagaggcaaaatagcagggtttgatgaatttatgaatgtagtcatcgatgacgctatagagatacctgttaatagtgcaaacggtaaagaagatgtagaaaagggcacgccgctcgggaaaatactgttaaaaggtgataatataacattaataacatcagtagattaa

SEQ ID NO: 2421 - DNA, 1611 bp, Saccharomyces pastorianus
atgttatccaacgaaaaatatcaaaggcctgtacagccacctccagtgtacgagccgaagcgctcatcgctcggctcgtccgagaactcggtcacggctgacggaccaacgccgtaccacttcagacaggaccagtactacaacctgaactccaagtctagtggcgcacccattgggagctatgaggaagcctttcccacggctaacaacaacaagcctaagtggaatgactggcccttcaccattttgttcctaatcacggtaggcgggttcatcgccattgcaggtatcactttaagagcatggaccaaggaatacagtagcacagggtccgggatctacgatggtgtggcaactggcactctgaatacgaacgcagttatcttgctgattttctcgtgcgtcattgcgatgatcttttcccttttttatatcatcctttgccggatgcacccgaagtacttcatatattgcggtatgatctcgaacatcgtgacttctttgggtaccgccatcttgtacatggctttgaagtactggtctgcgggggtcgtgtttctggtcttcacctttttgaccgcctggagttactggggcatgagatccaggattcccctctctgtggcagttttgaaggttgtcggtgatgcagccaagaaatgtcctcaaatgtatattgtttcgcttatcggatccattgttgccagtgcatttgggcttttattctcagcggtcgtcgtgtccacgtatatgaaatatgatccagccgattcaaacggtggttgtgacgtctctggtggcagctgttctcattcgaaactggtcggtgtcttggttgtggtgttttactgtgggtattacatctctgaagttataaggactgtcatccattgtgtcatttccggtatctttggtagctggtactatatgtccaagtccgatcaaggcatgccaaggaggcccgcattaggatcgttcaaaagagccatgactcgctcgtttggttccatttgcttcgggtctttactggccgccttaatggatcttttgagggcaatattaaaaatgcttagaaagaacgtcacctccaaaagtagtagcaggtttgttctccagattgtgttctcggtgctggactggattattgggtgtgtagaatgggtggccgagtactttaaccgttatgcctactcatttgtctcactttatggtaagtcttatttgagatccgctaaggaaacttggcatatggtaagagaaaagggtatggatgcattgattaacgataatttgattggtgctgcactggccttattttccatgttcaccagttacaccacctgtttgtttgctttcctatacatgagatttacgaaacctgaatacaactcgaataatggtattaagggtgccttgatggctttctcgtttatgatagctcttcaggtttctaatatcacaacagaggcaatcagatcttgtacatcaactttctttgttgcactcagtaacgatccagaggtcttccaacagtcctatcctgatagattcgatgaaatatttagagcctatccagatgtccttaagaaattgaaccatcaggacatctaa

SEQ ID NO: 2422 - DNA, 939 bp, Saccharomyces pastorianus
atggcctcagcagaaaccgatgctgtacaagcaaaattggctaagaccctacaaagattcgaaagtaaaatcaaagccggagattattacgaagcacatcagacattgagaactattgctaatagatatgttagaagtaaatcatacgagcatgccattgaactgattagtcagggtgctctctcatttttaaaggcaaagcaaggcggttcgggcacagacttgatcttctatcttcttgaagtctataatttagcggacattaaagtggatgacgtctcagttgccagattggtcaggttaatagccgagttagatcctagcgaacctaatttgagagatgtcattaccggtatgaataactggtctatcaagtttagtgagtataagtttggagacccatacttacataatgttattggaatcaagctattagaaggtggcttcgtttatgaggctgaaagatactttatgttgggcacacacgattcaatggttaaatatgttgatttgttatggaattggttatgccaagtggacgaaattgaagacagcacagtggcagaatacttcagcagattgattttcaattatctattcatctgtaacatatcatttgcacacgaatcaaaggatattttcttggcaagatttattgagaaatttcaacccaagtacgaggaaattgaaaagaacggttataaaatatttttcttcgaagattattctgatttaaatttcttgcagttattgctaattacatgtcagaccaaggataaaaactacttccaaaatttgaagaatcactatttggatttctctcaagtttacaaaagcgaattggaattcttgggccaagagtatttcaatattgttgctcccaagcagtccaacttcttacaagatatgatgtcaggtttcctaggaggatcaaaatga

SEQ ID NO: 2423 - DNA, 1368 bp, Saccharomyces pastorianus
atgactgatgaaaaacaatcctcttcacaagacagcgaccatatgatacgagaccctctgaatggctcactattttacaaaatatctgaatctataaagaatattgctgatacaagaccacagggcaaatacactgttcaagatatcgataatatcatagcgtttacatctgaaggtgcagatactgttcaaccaagtgtcattagcgcaagtacaggacacgacgaagacggcgatatgccaatgtttgacttgaatgacgaaaccgatgttgaaatgatttctaagtatgtttcgaatcaaagagggttgggcgcacattcaataacgccttccatgcaacagattgacgatagtataccctcattaaatccggcaactttgaaaacagtttttgttgtggacacaaacttcattatttcgcacctgaatactttggaaactctgaggtcgttttcaagtacttatcatcatttaatcgttgtgccaagcactgttattcaagaattggatgggttgaaaaaaaactccaatgtcattaaggatggtgacactgataaggaacaaggtagaacaataggcgtattggccagatggggtaatgaatggatctataaaaatctagccaatttagattctggtttaatgggtcaaaaactgaagcagagattgaacccaaactgtcggaaagatgactcgatattggactgttgtttgtatttcaaagaagtactaaattgctttgtgattttgttgtctaatgataaaaacctttgtacgaaggcgttgactgaaggtttattaactgtatcttttaggaaaggcatggatgcgaatctaattgcttcaaaagcatatgaagagaatcagttgagattcggtagttcacctattcctatcgctgttacacaccacgatataatattacattctcatacgcctaatccagaaactacctctttgccattagatgagcttttacaaaatatttttgagcaagtaaaggacacaattttcttcgccattgaccacgctttgagaaaagagtatggtgaagatattgaatttattgattacaacccagataaactaaccacaatagcaatcgcttcacattacattcatacgttttgggtatctgtcttttcagattttttcaagcactcaaaaatcaagaagaacgactggaaaaatttacccaatatcttagtatcgaaaccaacgaacctgaatgacttgagaacgttcgaacaattttgggaaaatgtgttaaattttctattcaccaaattcacgaatgagcacaaacagctactagaggaacaaattcaccgatggcaagcgtctattaatgccacatctacttga

SEQ ID NO: 2424 - DNA, 204 bp, Saccharomyces pastorianus
atggataacaaaaccccagtcactttagccaaggtcatcaaagtcttaggaagaaccggttctcgtggtggtgtcacccaagtccgtgtcgaatttttggaagacactaccagaactattgtcagaaacgtcaagggcccagttagagaaaacgatattttggttctaatggaatctgaacgtgaagctcgtcgtttgcgttaa

SEQ ID NO: 2425 - DNA, 2430 bp, Saccharomyces pastorianus
atgtcgtctgtggaagaattgactcatctcttttcccaagttgggtttgaagataataaagttaaggagatcgtcaagaataaaaaggtttccgactctctttccaaattgattaaggagacaccttccgattaccaatggaacaaatctactagagcactagtgcacaatttagcttcccttataaaaggtgctgaccttcctaagtctgacttgattattagtggtattatcaatggtaacttaaagacgtctttgcaagtcgatggggcattcaaatatgtgaaagctaatggcgatgcatctaccgtggacggtatgaatgaaaactctggtgtgggcattgaagtcaccgaggatcaagtcaggaactatgttatgcaatacattcaagaaaataaagaaagcattatgaaggaacgttacaagctagtacctggcattttcgctaatgttaaaaacttaaaggaattaaaatgggctgacccacgtagctttaagccaattattgaccaagaaattctaaaacttttaggcccaaaggacggaagggacttagtcaagaaaaaggtcaagaataacgaaaaaaagaaaactacttctgccaagaaaacttcagatgattccgccacaaccggcccaaagagaaccatgtttaatgaaggtttcttgggtgatttgcataaggtcggcgaaaacccacaagcttacccagagttaatgaaaaaacatctggaggttacaggtggtaaagtccgcactagattcccaccggaacccaatggttatttgcatattggtcattctaaagctatcatggtcaacttcggctacgccaaataccacggtggcacttgctatttaagatttgatgataccaacccagaaaaggaagctcctgaatattttgaatctatcaagagaatggtctcttggctaggtttcgaaccatggaaaattacttattccagtgattactttgacgaactatatggattggctgaagttctgatcaataatgacaaaggttatatctgccattgtactgcggaggatattaaaagaggacgtggtattaaagaagatggtaccccaggtggtgaaagatttgcttgtaaacatcgtgatcaatcgatagagctaaactttcaagagttcagaaacatgagggatggcaaatataaacctggtgaagctattttaagaatgaaacaagacctaggttcaccaagtccacaaatgtgggatttgattgcttatagagtcttgaatgctccacatccaagaactggtactaaatggaagatataccctacttatgactttacccattgtttagtagattctatggaaaatatcactcattctttgtgcaccactgaattttacctatccagggaaagttacgaatggttatgtgaccaagttcatgtctttagacctgctcaaagagaatatggtcgtttgaacattactggtacagttttatccaagagaaagattgctcagctagtagatgaaaaattcgttagaggctgggatgatccaaggttattcacccttgaagctattcgcagacgtggtgtcccacctggtgccattttatcatttattaacactttgggtgttacaacaagtactacaaacattcaagttgtcagatttgaaagcgccattagaaagtacctagaggatactacaccaagattaatgtttgtcttggatcctgttgaagttgttgtagacaatttaactgacggctttgaagaattggcaactattccattcagacctggtactccagaattcggcgagagaactgtaccatttacaaacaaattctatatcgaaagatcagacttctcagaaaatgtcgatgataaagaatttttcagattaactccaaaccaatcagttggtttgatcaaagtttctcacacagtttccttcaaaagcttggaaaaagatgaaactggtaaaatcataagagtccacgttaactatgataataaggttgaagaaggtacgaagccaaagaaaccaaagacttatattcaatgggttccagtctcttctaagtacaactctccgttaagagttgttgaaactagagttcacaaccaattgttcaaatctgaaaatccatcgtctcatcctcaaggtttcttaaaggatattaatccagaaagtgaaatcgtttataaagaatctgttatggaacacaactttggccacgttgtcaaaaacagtccatgggtcgttgattctgtcaaaaattcggaattttacgtcggggaagataaggaagctaaggaagtttgtagattccaagctatgagagtaggatattttactttggataaagatagtacagctgataaggtcgttttgaatagaattgttagtttaaaggatgccgcttccaaataa

SEQ ID NO: 2426 - DNA, 1887 bp, Saccharomyces pastorianus
atggcagcgcaaaagaaactgagagctattttgaccgatgaaggtgtgctgatcaaatcacaatctcaccatatgttcagtaagcatggtcaacttagaagcggcgattcgttatctttgttgagctgtctgtcctgtctggatgatgggaccctgagctctgacggaggttcttttgacgaggacgattccctagaactgctacctcttaatactaccatcccattcaacaggattttaaatgcaaaatatttaaacgctgatcaaacaagggctaataacggaaaaattctttccgatctttctcaaatcgagaatacgggctcctcatcagaaaatgatgaagtagagaaccgtagtttgagtaatgataaaggtcaacagttccaatcatctctaaatgaactaaactcatcctcgaataaggataagtggaactcgaagacgagcaacatcgtaccatctaccgatgtttcacgggatgcctctccaatgtttggaatgagagacaatcaacacttgatcgaattgacattcgctgtacccaagggtcatgacattgtaccacaaaaattaacgctattgatagaccacgtctctaaaaaatcaaaaacgaattccgggttaaattcaagctcatctggtgtcgtggaagaaatcctggaaaaaagttatgagaattccaagaggaacaggaaggtcttagtcatcatcaacccctatggtggtaaaggtaaagccaaaaaattatttttaaccaaggcaaggccaattctgctagaaagtggttgtaaaatagaaatcgcatataccaagtatgctcgccatgccattgatattgccaaagatttggatatcagcaaatacgatactattgcatgtgcatcgggtgatggtattccatatgaagtgataaatggactctacagaaggcctgatagagtagaagcattcaataagctagctgtgacgcagctgccatgtggttccggaaacgccatgagtatttcttgccactggacaaataacccatcctacgctgctctatgcctcgttaaatctatcgaaacaagaatagacctaatgtgttgttctcaaccttcttacatgaatgagtggccgaggttatcgtttttaagtcaaacttatggtgttattgctgaatccgatattaacactgaattcatcagatggatggggtccattagattcaatttgggtgtagcatttaatatctttcaaggtaaaaagtatccttgtgaagtattcgttaaatatgctgccaaatctaaaaaggaactaaaggttcattttttggagaacaaagataaaaataaaggatatttggccttcgaaccaaacactgatccagactcttcactcgattctttatctaaaaacgacagaaataatagaaatgatgagctctcaccgacttttcttaccgaagataattttaagctaaaatatccaatgactgaaccagtgcccgatgattgggagaaagtggattctgagctaaccgataatctaacaatattctacacgggtaaaatgccttatattgctgaagataccaaattttttcctgcagctttaccagcagatggtactatcgacttaatcatgacagatggaagaacttcagtcgcgaaaataacaccaattctattgtccttagataagggctctcacgtgttggaaccagaagtcgttcactctaaaattttggcttacaaaatcataccaaaaatcaagtctggtttgttttcagtcgatggcgaacggtttccgttggaacctttacaggtcgaaattatgcccatgttatgtaagacattgctcaaaaacggcagatatattgataccgaattcgaatctatgtag

SEQ ID NO: 2427 - DNA, 870 bp, Saccharomyces pastorianus
atgtccgttcaagatactaaagcggtcgagctttctatgggtcacattagatcatcatccgtatcgttggtagcagaggctacctcaaatatgaatagtgaacacaaaatttctaaagtccagatttatgaggatttgtgccgatacgaagatatattgggtaaattagtggaatcagtagatcgttttaagccaaacctagaaatcgctaaggatttgattagaaccgacgagagtctgtttaataatgtcaaactgctcgctgactatgataagattgatcttgatttgcgaaaaatagacaaagactccgaagaactggattctaaaactagaaagatattagaaattttgaatgaatgccatgatgaattgagtgcactaccgatgctagaacaagtggagttcgagaaaaagacaatcttacaacagagatccaaaatcaactctactgcactattggattacgctacaaagttatccaagtttactagaataccaccaacgttcgataaaggaacggtgggtcccaataattttatatggcctgcagaagacgcactacggagaggtatgcttgctatggcctcattacacagtaaagaattaactagaatgccaggcgaagaagagcaaggagctgaagaagtgccgaatgacactctctctcaaaatggacgccagaaggagaagaaagagagcagggaaaattcacccgaaaatttaccggtgaaggactcatttatattcaatggtgccgctaataaagacactgagcaagcaggtgatgacaaagacaaaactgaagaagataacaatgaagatgccctagaccttgatctagatttatttgatccagaagatttctaa

SEQ ID NO: 2428 - DNA, 1857 bp, Saccharomyces pastorianus
atgtacaatccggtggatgccgtcttaacaaaagtaactactcactacgggattgatggttttactctaagatatgccatttgtctattaggctctttccctctgaacgctattttaaagaggatccctgagaagcgtgttactttgaaatgttgctttatcatctctatgtcaatattttacttatttggtgtgcttaacctagtaagcggatttcggaccttgtttattagcaccatgttcacgtacttgatctctagattctaccgctccaagtttatgccacatttgaatttcatcttcgttatgggtcatttggcgctgaaccatattcacgcccaattccttaatgagcagactcaaacgactgttgatattacaagttcacaaatggtcttagccatgaaactaacttcctttgcctggtcatactatgatggctcgtgcaccagtgagagtgatttcaaagacttgactaaacaccagcagtctcgtgccgttaaaggccacccatctttattgaaattcttagcatacgcctttttctattcaacgttgttgactgggccaagttttgattatgctgactttgacagctggctgaattgtgagatgttccgtgacttacctgaaagtaaaaaaccaatgagaagatatcattctggaaaaagacaaattccaaaaaatggtaaattggcttcatggaaagtggttcaaggtctcctgtggatggctttaagcgcactagggatgaaatacttccctccttcatatgttttggatagaaagactttcgggcaaaggtcctttattttcaggtcacattacttattcttactaggttttattcacagatttaagtattatgctgcctggaccatttccgaagcatcttgtgtattatgtggattagggtataatggttatgatccaaagactcaaaagatcagatgggatcgtgttagaaatattgacatttggaccgtagaaacggcacaaagtacacgtgaaatgttggaggcatggaatatgaacactaacaagtggctgaagtactccgtttatttgcgtgttactaaaaagggtgagaagcccggtttccgttcaactttgttcactttcttaacttcagcattttggcacggtaccagacctggttactacctgacgtttgccacgggggcgttgtaccaaacatgtggtaaaatttacaggcgtaatttcaggccaatgttcttacgggaagatggtgttacgcctctaccctccaaaataatttatgatctcatcggcatatacgcgatcaagttagcatttggctatatggtacaaccattcatcatacttgatttgaaaccatccttaatggtttgggggtctgtttatttctatgtccatatcgtcgttgctttttcattctttttgttcaagggaccttatgctaaacaggtcactgcattttgtagatccaagcagcctaaagagatcttcatcagaaaacaaaaaaaattggaaaaggatatcagcgcaagttctcctaacttgggcgatatattaaaggcaaaaatggatcacgaaaagaataaaacacctgaagaagatgaaatgaatttaggtattccgcctatagaattgggcaaatgggacaatgctaaaaaagactgggacgatttctgtaatgattataaagattggagaaataaaaatggtcttgaaatagaggagaaaaatctatccagagctttcgaaagatttaaacaagagttttctaatgctacaggaagtccaggtgaaggcgtgaggaagatgagtttcagtggatactcaccgaagcccattccaaagaaagagcagtag

SEQ ID NO: 2429 - DNA, 1182 bp, Saccharomyces pastorianus
atgctatctagaacaattcgtgcccaaggtacagccctgaaaatgtcgcaactaactgttacaaggtcattgtcaagtacactcaacttgcagaatgtcaaaaccaggccccccacaggaattgttttgatgaatatgggaggcccatccaaagtggaagacacgtatgattttttgtatcagttatttgctgataatgacttgattcccattagtgccaaataccagaagacaattgcgaagtacattgcaaaattccgtactcctaagattgagaagcagtacaaggaaattggcgggggctctccaattcgtaaatggtcagagtaccaagcctcagaagtttgtaaaatcttggatgaaacttgtccagaaacagcacctcataagccttatgtggcattccgctatgcaaaaccactgaccgaagagacttacaagcaaatgttgaaggatggtgtgaagaaagctgtggccttttcccagtaccctcatttctcctactccactactgggtcgtctatcaatgaattatggaggcaaatcaagacattggattccaagagatctatttcttggtccattatcgatcgctggcctacgaatgaaggtctgatcaaggcgttctccgaaaacattaccaagaaattgcaagagttcccagaacctattagagacaaggtggttttgttattttccgcccattctctacccatggacgttgttaacactggtgatgcataccccgctgaagtggcagccactgtctacagcatcatgaagaatttgaagtttaaaaatccttacaggttagtctggcagtcccaagttggacctaaaccatggctgggtgctcaaacagctgacattgctgaatttctgggcccaaaggttgacggactggttttcatccctattgcctttacctctgaccatattgaaactttgcatgaaattgatttgggtgtgattggggagtctgcatataaggacaaattcaaaagatgtgaatctttaaatggtaaccaaactttcattaaaggtatggcagatcttgtcaaagatcatctggatagtaaccaattgtattccaatcaattacctctagatttcacacttggtaagtctagcgatcctgtaaaggatctttcattagtgtttggaaatcacgaatctacttag

SEQ ID NO: 2430 - DNA, 816 bp, Saccharomyces pastorianus
atgagtgaacgtgtaagtcaccatatacatgggaagtttttcataattaaactgaatgatccaaaacacctaaactctttgacctttgcggattttgtatccatcgcattactactaaataaggcaaacaatattgactctgttttatttacggtcttgcaaagctcaggtaagtacttttcctcaggaggtaaattcacagcggtaaatgaattacatgtcgaagaaaatgccagtgaagtagataaagtttctaagctggtgtctgccatttgttcccctaatatatttgttgcgaatgcgtttgaaacgcataagaaggttttgatatgctgcttaaacggacctgccgttggccttagtgcttctctggtggccctttgtgatattgtatattctaaaaatgattctgtattccttcttttcccattcagtaatctcggctttgttgcagaagtaggaacttcagttacgttgactcagaagctaggggttaattctgctaatgagcatctgattttcagctcaccgattctattcaaggagttactaggaacaatgatcacaaagaattaccaattgaccgacactgatgccttcaacatgaaagttcttgaggatctaaaacaaaatgtaaaggggctttacccaaagagcataataggtatgaaatatttgctacatagtcaaatgagagaaaagcttatcaaatcccaagcaatggaggctaacggtaccttgcctttttgggctagtggcgagccattcaaaagatttaaacagcttcaaaagggaaacagacgccacaagctataa

SEQ ID NO: 2431 - DNA, 2052 bp, Saccharomyces pastorianus
atggggcttctaaattctgcggataaagaaatcattaagagagctctaccaaaagcttcgaataagattattgatgtcgcggtagccagactatacattgcataccccaacaaggatgagtggcagtgcaccggactatcaggagctattgctttagtggatgatctggtgggaagtacatttttcctgaaattggtcgatatcagcggccatagaggggttatctgggatcaagagctatatgtaaattttgaatactaccaagaccggactttcttccacacatttgaaatggaagagtgctttgcaggtttactattcgttgatattaacgaggcatcgcatttcttgaaaagagtccagaaacgtgaaaggtatggtaacaggaaaactttgttgaataaaaatgccattgcgttgtccaagaaagtaagacaggaagagaaatctcaggttgtacatggtccaagaggggagcccttacttgacaaccaaagaaaaaggtataactatgaaaacgcggatacgattccaaccacaaagcataaagctcctcctcctcctcctccaacaactgatactttcgattctgatcaagaaagttcattttccgatatcaaatcaataacaccatctgcacccactaccccagcaccaacgcttcctcctacatctcctgaagtgagaaaagaagaagcacaccctaaacatactttaccacctttaccggcccagatggcacctttaccagatcctccacaacatagcgttcctgtacaacacaatgctcctgcacaggctcaaaacaatccatttccgtttcccgtcccagaaaattcgccagcacaatcccaaacaaacccatttccatttccggtacctcaacaacaattcaatcaaccaccctcaatgggaatgccacaacagaatagacctcttccacagctgcctaataggaacagtcgtcccgtaccaccgccaccgccaatgcgtgctaataacggaggcgtaaatgcttactcgtcgggacctacacctgcacctccaccaaggcgtgggcctgctccaccacctcctccaccacatagactggcaactgctaacacatttaacgcaatttctactgcaggaaacagcgtccctccgcaggctactggaagaagaggtcctgcaccaccaccacctccaagagcttctcggtctatgccaagcgcacccatgcaacctaatctacaacaatacagtaatcccaaccaaccctttggatatcaaccaagcaccaatatgccttccgcacctcctcctccaatgacgacttttaacaatctaacaccgcaaatgactgctgcgagcgaacaaactcatatgaatgcagcagcaacaccagcattcttcccacaatccaacatgtctcagatacctacgcaaactaaaaatccacaagtggcacctccgccacctccagcgttccttggacagtcgcagacgcctcaaccagcagtgccagcagcgccagcattcctcggacaatcacagacatatcaaccaccacccccaccaccggctccaccagcacaacaatcgatgacgaatgctgcaccacctccacctccgccagcattcctagcacagcaacctcaatccggaggtgctcctccacctccgccagcattcctaacacagcaacctcagtctggaagcgctcctccacccccagcaccaccccaaatgccagcagcaggaacgtccggaggcggatcattcactgaaactaccggcgatacaggacgcgatgctttattggcttcaatcagaggcgcaggtggcataggcgccttaaagaaagtagacaaaacgcaacttgataaaccttcggtcttacttcaagaagtacgcggagaacctgccacacagccacctgtagctgcaagtaatggcggctcgtccgggggaccacaggcatctttagccgatgcattggcagcagctctaaataaaagaaaaaataaagtgggagctaccgacgacatggacaatggtgatgattggtaa

SEQ ID NO: 2432 - DNA, 1188 bp, Saccharomyces pastorianus
atgtctttagaaagagaggaaccacaacatttcggagcagggccagcccagatgcccacaccggttctacaacaagctgctaaggacttgatcaattttaatgatctaggtcttggtatcggtgaaatttctcatcgttcgaaagatgctaccaaagtgattgaagattccaaaaagcacttgaccgaattgttagatattcctgacacccacgaagtgttctacatgcaaggtggtggtactactgggttctcatctgtagctaccaacttggctgctgcatatgtgggaaaacacggagaaattgcacctgctggttacttagttactggtagttggtcccagaaatcgtacgaggaagcaaagagattgcatgttccagccgaagtcatctttaatgctaaagactacaaaaatggaaagtttggcacaattccagatgaatctctttggagagataaggtcactggtaagaagttttcatatgtatacttgtgtgagaatgaaactgtccatggtgtggaatggccaaatttaccaaaatgtctggtagatgacccaaatattgaaatcgttgctgatttatccagtgatattttgtctcgtaagatagatgtatcccaatatggtgttattatggcaggtgcccagaaaaacattggtttagcgggcttaactctatacatcatcaagaaatctattcttaaaaatatttctggcgcttccgaagaaaccttacatgaacttggagtaccaatcacaccaattgcattcgactatccaacagtggtaaagaataactccgcttataacacaattccaattttcacattgcatgttatggatctcgttttccaacatattttaaagaaaggtggtattgatgctcaacaagctgaaaatgagcaaaaggccaagatattgtacgaagttttagattcaaacccaagcttttacaatgtaccagtggatccaaaatgtagatccaaaatgaatgttgttttcactctaaagaaggagggccttgatgaaaagttcttgaaggaagcagcagctcggaaattgacaggtttgaaaggtcatcgttcggttggtgggtttagagcttccatctataacgccttatcagtacaagccgtgcaaaacttggtagatttcatcaaggaatttgccgaaaggaacgcttga

SEQ ID NO: 2433 - DNA, 663 bp, Saccharomyces pastorianus
atgtctgcacctgttcaaagtaatggcgaagtccccactttcaagctagtgcttgttggtgatggtggtaccggtaagaccacttttgtgaagagacatttgactggtgaattcgaaaagaaatacatcgccactatcggtgttgaggtccatcctttatccttttacactaatttcggtgagatcaaattcgacgtctgggataccgcaggccaggagaagttcggtggattaagggatggctattacatcaacgctcaatgtgccattatcatgttcgatgtgacttctaggattacctacaagaatgttcccaactggcatagagacttggtccgtgtgtgcgaaaatatcccgatagtgttatgtggtaacaaagtcgatgttaaagaaagaaaggtcaaggccaagaccataactttccacagaaaaaagaacttgcaatactacgatatttctgcaaaatccaactacaattttgagaaaccgttcttatggctggctagaaaactggctggtaacccacaattggagtttgttgcctcgcctgctttggctccaccggaagtccaagtcgacgagcaattgatgcaccaataccagcaagaaatggaccaagccactgccttgccattgcctgatgaagacgacgctgatttataa

SEQ ID NO: 2434 - DNA, 1320 bp, Saccharomyces pastorianus
atgtcagttacattaccaaaattccttacgagaacagctcttaaagcttctctatcgagaaacctattaaggctctcttctatagcttccagaagtttttctcaaactgcaagtccctacgcagcagcttttgatcgttctaaaccacatgtaaatataggtacgattggccatgttgatcacgggaagacaacgttgactgctgccatcaccaagactttggctgcaaaaggtggtgccaacttcctagattatgctgctatcgacaaggcacctgaagaaagagcccgtggtattaccatttccaccgctcatgtggaatatgaaaccgctaaaagacattattctcatgttgactgtccaggtcacgcagattacatcaagaatatgattacaggtgccgcccaaatggacggtgccattattgttgtggctgctactgatggccaaatgcctcaaactagagaacatttgctattagccagacaggtcggtgtccaacatatagtcgttttcgtcaataaggtggatactatcgatgacccagaaatgttagaattggtggagatggaaatgagagaactattgaacgaatacgggttcgacggtgacaatgctccaattatcatgggttctgctctttgtgctttggaaggtcgtcaacctgaaattggtgaacaggccatcatgaagcttttggatgccgtggacgagtatattcctacaccagaaagagatttgaacaagcctttcttgatgcctgttgaagatatcttctccatctccggtagaggtaccgttgtcactggtcgtgtggaaagaggtaatttgaagaagggtgaagaactagaaattgtcggccacaacaccactcccttgaaggctattgttaccggtattgaaatgtttagaaaggaattagactctgccatggcgggtgataacgcaggtgttttactaagaggtatcagaagagatcaattaaagagaggtatggtcttggccaaaccgggtactgttaaggcccataccaagattctagcctcattatatattctatctaaggaagaaggtggcagacactctggatttggtgaaaactacaggccgcaaatgtttatcagaactgctgatgttacagttgtgatgagattccccaacgaagtggaagaccattcgatgcaagtgatgccaggtgacaacgtcgaaatggaatgtgatttgattcacccaaccccattagaagttggtcaacgtttcaacatcagagaaggtggtagaactgttggtaccggtctaataacacgtatcatcgaataa

SEQ ID NO: 2435 - DNA, 363 bp, Saccharomyces pastorianus
atgtcgcaagaaagcagcgctttatctgaatctcaggaacagcttgacaacaactctaaaatagagaacggagaggcagcctccaatagccccagagacaatagtaaacctgtgcttccttgggatcatgaaagcaaagcggtagaaatcaagagtttcagtggttataaagtagagttgaccggctggataaggagggatataaggcaggaacgtcaaaagcaaccagtatcagagtcagaatctaatgcatctgatataaaagaaccggaggacaaaagcatggaacataaagaaccagagaaggatgaacgtgaaaagaaagaggtcaaggagggaaggagagacggctcggagtcgtga

SEQ ID NO: 2436 - DNA, 4863 bp, Saccharomyces pastorianus
atggcagcggtacccactatcgatcttacactagctgactcagataatgaagacatattctattccttctcatcttctacaagtatggataatacagacgttaaaaaagaaaacatcaaaacaaagaaaacgggtgtagaaccctcaccgtttgttggcagtatgaaacaaccactttcacatccttacaaagtgagtctatcaaaaagtaagaaatataatattctttcgaaaaatgaaacaattacaaacaaagattttattatagaaggaaacacaaagtctttcaacatggcaaaccgacataacgttgtaaagggagggattgtggtgtcacctgatgacagtgaagaaaagaaagacagcaatttaaataagcaaatcacagagctatttagtgaaaacgagtatgcaaactcagcaaaagaccaagagcaaaacgaaacagaaagagaaatgatccaggataaaatggaaaaagaggcggttgccaacattccgtcttcatatttctctaaagattacaacgctagtgaagatgatttcgagcccaactacagccagaatagtactttcaaattccaaaatgatccgaacccaaatatggacacacatcgtttaatagagggggatagaaacatcagaacggaagataattgtttaaaggaagacgaagatccaacgaaggaaatggcagccgtgaaccaccatgctatcccttttgaagctggcgctagtccgaaacctgaagttgaaagcgactttaaagacattacaacaaaaatctctaatagtgagccaactctaccatcaccatcctacgtaatgcctgatgaagatatatttaaaaacgggacggccggggtagacgaaaatgcgactgttcgacttccaggactgcgaagtgatgttccttcccttgaacaagaagaaagtgaactattcaagcattttagtgagcaacctttcaatatcaaagaagttgattttacaaacaaaagaaagtacagtagcgatttagaggataaaaatacagtcaagaggccaatattacccctaagacacttagacgatggaactcatgagggttctgctgctgagcaggagaataattcgatcatcatactttctgacgaggaagaacccgatgtccctatggatgatgttcaacatgacgtgaaacttcctgaatttaccacagcagataaatttggtactgttatgccagaagttatatccttacttgaccttcctaacattaatttggacagtccattcataaaaggggtcagtgatagtgattcagcgattacaccggaaaaacaaacacctagatcaaattcatttattccccaaagagacgtaaagtcagagcaaggcccagaatcttttcacaaagaatataactcacttgaaactttgaaaaaagaacatcaggttttattaaaggaattgaattctaaagaatccgaattacgtaatgctcttaattcgtccaagacgaactctgagatcttaaggagaaaactaacgagaagagaaaaagaagtttcagaggctgaaagacattggaaacttctgttgacgttaatgaataggagcggtagaaccattagctcgacccagcaaattctagtcgatgaagctcaaaaccagttaaatatatcaaaggaaaaaaggcaattgacaaaagcaaagttggattcaatcaatatgaagatgtataactataatgaacagtggaaatcctttgtacacctaaaaaatttaaaactacaaaaatcattgaccgcactcgaacaatcaattagggaaaatgaagcctctgaaactgtaaacaaaagaagcgaacatctggctgagaaggaaaagctagaccagatgctaaaagaaggaacactgagcttcagtaaatacaagcagttaacgagtgaaatccagaagaagctgaatgacctgaatatagaaaatcaacgcaaaaaagataacagtcatgacacatcaatactacagcagcccctggcgaagagagacttatttattaaatctatcgataccgcgaaagatttattagcaaaaaacacatccagaacagaaatgacaaaacgaattctttataaacatctggacaatttgattacctataaaaacttttttgaagggggaaaatctttaatagatgtcaacagaagaaacatcgcacgtgaatctgctcaagtgttatttaccaatggtgttaaaatgccaattgtttttgaaaccctacaagattacggtatcaagttttctaatccgtcacttgttaatcctgacagaagagcccaatattttaaaagtattgaagttgctcgcgaccttattatgaagtccaatagatcggaggatgcgaagaggaagattactcgattcttaaatattctggaagaattccgaaaggatatagacacgggatttccgccgacacccttaaagagagaaggcgttgggaaagctatcgttgggctgagacaacaaggattgaaaatggaaaaactgtatgaaaatcttaggaaatataaagttcctttaacaaatgaagaactgctacagcaaagctatttatttccagcaaacgctggccaacctcttccttccaactggaacactatggaaaatgcagaaaatgataatcctgcaaatagtaatatttcaacgcaagatgaattccacatttccaacatgcatgcggctgaagatcaagaacagattagggctcttttagaaaatgttaaacaatcagaatcaattattgacggtgaagcacttactccagaagacatgaccgtgaacttattaaaacaccagaggctaggtctacattggttgttacaagttgaaagctctgccaagaaaggtggactacttgctgatgatatgggtttaggtaaaactattcaagccattgcactgatgctggaaaataggtcagaagaccataaatgcagaaccaatttgattgtcgcaccagtttctgtcttaagggtttggaaaggtgaaatagaaacgaaagtgaaaaagcgtgcaaaatttaacacgtttatttttggaggagccggaaatggaaaagtaaagcattggaaagatttggccagatatgatgccgtcttggtatcttatcaaacgttggcaaacgaatttaagaagcactggccagaaaagttaggtggtgaacaaaagcagttaccacccgtgcctcaaattcaggcattaaatgcattaaagactcgaaatgagtactactctccgttttactgtaatgactcgatgttttacagagttttattggatgaaggccaaaacattaaaaacaaaaatacaagagcgtctaaagcatgctgcactataaacagtatgtatagatggattctgtccggtacacccattcaaaatagtatggatgaactgtactccttaataagatttttaaggatcccaccttatcacaaagagcaacggtttaaattagatatcggaaggttcttccaaaagaataagcaatacgaatatgacaatgaggatagaaaaaacgcactaaaaaaggtcagggttttattaaacgccatcatgcttcgccgttctaaggctgataaaatcgacggcgaacctctcctagagcttccgcctaaaatcgtagagatagatgaatcgcagctgaagggcggagaactagaattttacacagctttagaatcaaagaatcaagtattggccaaaagattgctaaataattctgctaggggtagttattccggtgttcttacgttgctgttacgcctaaggcaagcttgctgtcattcagaattagtcgtcatgggtgaaaaaaaggcagaaggtacaaaggtagcaaatgggaaaagctttgaaaacgactggctcagactctactttaaaatcggtcatatgagcgaggatgcacaggctcaagtaatcacctcgatggattctatgacttgtttctggtgtatggagcaattagaaccagaagccatgtctattttgacaggatgtggtcatttaatttgcgatgcttgcattgaaccgtttatcgaagagtcgtctatgttacctcaggcaaagaaagctaaaggtggagctttggtacttccctgcaaagattgccaacgtttaacaaatgaaaaagagattgtttcacataaactatatgaccaggtaataaaccaaggattcactagggaggatttacatgccgagtacttaagcgaaatggagagacaaaaattacaacagaagaacgtatatgtgccagatttcgagaagttggaaccgtcaacgaaaatagaacaatgtatggaagttatccaaagagttttcgatgagtcgccaactgaaaaaattatcattttctctcagtttacaactttttttgaaattcttgaacattttctgagaaacagactacatattccatatttgaaatatattggatctatgaatgcacagagaagatcagatgttatcaacgagttttaccgtgactcagaaaagagggtacttctcatttcaatgaaagctggtaattcagggctcacgttgacatgcgcgaaccatgtggtaattgttgacccattttggaatccctacgtcgaagagcaggctcaagatcgttgttatagaatcagtcaaacgaagaaggttcaggttcataagcttttcatcaaaaattctgtcgaggatcgtattgctgaattacagaagaggaaaaaggaaatggtcgattctgccatggatccaggtaaaataaaagaagtgaacagtttaggccgtcgggaattaggttttttgtttggtttgaacggtttgtaa

SEQ ID NO: 2437 - DNA, 858 bp, Saccharomyces pastorianus
atgtcgaatgcagaagccagcagagcgtatgaaatcatcgtagagtccgttgtgaatgaagtaagagaggactttgaaaatgctggtatagatgaacaaactctacaagatctgaagaatatttggcaaaaaaagcttacagagactaaagtgactactttctcatgggataatcaattcaatgagagcaacgttaatggtgtacagaatgatttaaattttaatctttctacgcccaatataaattccaatgagttcaatattaaggaggaacatggcggtaacgaaagattgattctacccaatgccaatgccaatgccaataacagcatgtctcacactggagggactaatactggtaataatacgggagatgcaagtaacgacacaggtgcccgtacagacatgagtacagatgcaaacacaaatacagatacaactacagctagcgggccgaacattgaagtaaaaccggagatagaaataaccatcgaaaacgcccatataaataccgtagaaagtgtagatggagaagaggaaaaggagggagaagaggaggaaaaaacccagaaggaaaaggagcagatagagcaagtaaaattgcaagcaaagaaggaaaaaagaagtgcattgttagatacggatgaggtgggttctgaattagatgattctgacgacgactatctaatttctgagggcgaagaagatggaccagatgagaacttaatgctctgtttatacgataaagtcacaaggaccaaagctaggtggaagtgtagtttgaaggatggggtagtgaccattaatagaaacgactacacctttcaaaaggctcaggttgaagcagaatgggtataa

SEQ ID NO: 2438 - DNA, 1413 bp, Saccharomyces pastorianus
atgtcctcccaacaacataagttcaagcgtccagacgtctctatcagggacaagaaactggacactcttaacgttcaattgaagaaaatcgacaccgaaatcaatttgatcagaaagcaagttgatcaacaccaggtcaacgatggcactcaacaagaacgtaagaagttgcaagacaagagtagagaaattatcaagactcaagctgaattgaagaaccgtagaagcaacattcatgattctattaagcaattggatgctcaaatcaagagaaagaacaaccaaatcgaggaaaagttgggcaaaaaggctaagatttcctccaccgcagaagccaagcaaagaattaatgaaatcgaagattccattgcctccggtgatctttctttggtgcaggaaaaactactagtcaaagaaatgcaatctttaaacaaattgatcaaggacttggttaacatcgaccctattagaaagtccgtcgacgctgacaaggccaagatcaatcagttgaaggaagaattgaacggattgaacccaaaggaagtctctagccaattcgaggaaaaccaagagaaattgaatgacattcattcaaagactcaaggtgtttacgataaaagacaaaacttgttcaacaagcgtactgccttgtataagaaacgtgacgaattgtacactcaaattagacaaatcagagctgacttcgacaacgaattcaaatctttcagagctaaattggacaaggagcgtttaaagcgtgaagaagaacacaagctttccaaattattggaacaaaaagatgttgacatgggcaaattgcaagaaaaattgactcacgccaagatcgctgctttcacctacgaaattggagctatcgagaattccttacttgtcttggacccaacctatgtgaaacctaagaaaaatattttggctgacttgaacgaaactgttttggaaaccaagcctgccagaaaagttgttgctgatgatttagtcttggtcaccccaaagaaggatgattttgtcaatgttgctccatccaaatctaaaaagcacaagaagaagaaccaacaaaagaacaccgaaaatgaacaacctgcatccattttcaacaaactcgatggtaagttcactttggaaccaaccttgattgctactctagctgaattggatgttactgtcccaattaacaatgatgatgtcaagatcaccattgagcaattgaagaagaagcatgaagaactgttgtccaagcaagaagagcaaacaaagcaaaatattgaatctgttgaaaaggaaattgaaaaattgaatttagattactccaacaaagaacaacaagtaaagaaggaattggaagaaaaaagattgaaagaacaggaagaagctgaaaaggacaaggaaaattaa

SEQ ID NO: 2439 - DNA, 1236 bp, Saccharomyces pastorianus
atgacttctctggctaatgcggtgttcaaaaggtatctggcggtgaggcctcaccaagctgtccaggcaagaggcaagaagaagtcgtcgtcgtcgttcgacaagtttttcccacaacaggacaatggcaggaaaaagcaatgggaggtgctgaatgaggacaaggcctcgtggttcaagaggaagtacgctcatgtgcacgccagggagcaggaccatacagcggatccgtatggcaagaggaaagcccacgtcgataagctaaaggaaatcaaggtccaggcgaaattagatcaaaagaggcacaaatctaagttcccaaataggaacattgtgcagaagctcttgaacgacaacccccttctggagtatgtctacggtaccaacagcgtgtatgcggcgttgctgaaccctggaaggagttcccactcgcgagtgctgtactacgggagcataccggcaaagatccttcagaaagtcaatgagttgaagatcgcgacggagcttgtggacaagcacagactgaatttgctaaccaactacggggtgcacaataacattgccctcgagaccaagccactgcagccgttggagatcgcatacctgggcgacgtggacaccaccgcagcggatctaaccatccacgagtcgggcttcgacaacgaagaagtcgtgcacagtttgccctacagcacacgggaggactccaaggggttccccctggggctgtacttggacgaaatcaccgatccgcacaacatcggggccattgtaaggagcgcatactttcttggggcagacttcattgtgatgtcgaggagaaactgttcccccttgacacccgtggtgtgtaaaactagtagtggggccctcgagctcctgcccattttctacgttgacaagccgctggagttcttcaccaagtcgcaagaaatgggaggctggacgttcgtcacgagccacttggctgacgctaccgcagaaaagtacacgacagggaaggcgctcagcgtacatgacctgaacggcatgtgcaccaagctgcccgttgtgctggtggtggggagtgaaagccaaggtgtaagaaccaacctcaagatgaggagcgacttcttcgtcgaaattccctttgccggttccgggactcacgagcgggatcccgaccgcattgtagactcgctcaacgtgagtgtggccactgcactgttaatagacaatatcctcgcctgtaaatag

SEQ ID NO: 2440 - DNA, 663 bp, Saccharomyces pastorianus
atgtcagagcaaaaggccctagtgaagcgtattacaaacgaaaccaaaatccagattgcgatcgccctgaagggtggtccgctggcgctggaacactcgatcttcccagcacgggaggcggacgcagttgcagagcaggccacgcagtcgcaggtgatcaacgtccagacaggcatcgggttcctggaccacatggtccacgccctggccaagcacgccgggtggtcgctgatcgtcgagtgcatcggggacctgcacatcgacgaccaccacaccaccgaggattgtgggatcgcgttgggacaagccttcaaagaggccttaggggccgtgcgtggtgtgaagcggttcggttcagggttcgcacccttggacgaggctctgtccagggccgtggtcgacctctcgaacaggccgtacgcggtggtcgagcttggcctgcagagagagaaggtcggtgacctctcctgcgagatgatctcgcactttctcgaaagcttcgcagaggccagcagaatcaccctgcacgtggactgtctgcggggcaagaacgatcaccaccgcagcgagagcgccttcaaggccctcgccgtggccatcagagaggcaacctcccccaacggcaccaacgacgtgccctccaccaagggtgttctcatgtag

SEQ ID NO: 2441 - DNA, 1860 bp, Saccharomyces pastorianus
atggctgaactgagcgaacaagtgcaaaacttaagcatcaacgacaacaacgagaatggttacgttcctcctcacttaagaggcaaaccaagaggtgccagaaacaacagcagcaactacaacaacagcaacggcggcggctacaacggtggccgtggtggcagtttcttcggtggtaacaaccgtcgtggcggtggtggctacagcagcggcgggttcttcggtggcaacaacggaggcagcggcggtagcagaggcaacggccgttccggtggtagatgggtcgatggcaaacacgtcccagccgccagaaacgaaagaaccgaggcaaccttattcggtgttcctgaggatccaaacttccaatcctccggtatcaacttcgataactacgatgatattccagtggacgcttccggtaaggatgctcctgaaccaattacagaatttacctctccaccattggacgaattgttattggaaaatatcaagctagcccgtttcaccaagccaactccagtgcaaaaatactctgtccctatcgttgccaacggtagagatttgatggcttgtgcgcaaactggttccggtaagaccggtgggtttttgttccccgtcttgtccgaatctttcaagaccggtccatcccctcaaccagaagcccaaggctccttctaccaaagaaaggcctacccaaccgccgttatcatggccccaaccagagaattggctacacaaattttcgacgaagccaagaaattcacctacagatcctgggtcaaggcttgtgtcgtgtacggtggttctccaatcggtaaccaactaagagaaatcgaacgtggttgcgatcttttggtcgctaccccaggtcgtttgaacgatttgttggaacgtggtaagatctctttggccaacgtcaagtacctggtcttggatgaagctgatagaatgttggatatgggtttcgaacctcaaatcagacatatcgtcgaagactgtgacatgacacctgttggtgaaagacaaacccttatgttctcagccactttcccagctgatatccaacatttggcccgtgatttcttaagtgactacatctttttatccgtcggtagagtcggttctacttctgaaaacattacccaaaaggtcttgtacgttgaaaaccaagataagaaatccgccctattagatttattgtctgccaccactgatgatggtttgactttgattttcgtggaaacaaagagaatggccgaccaattgacagatttcttgatcatgcaaaacttcagagctactgccattcacggtgaccgtactcaatccgaaagagaacgtgccttggctgctttcagatctggtgccgccagtctattggttgccaccgctgttgctgctagaggtttagatattccaaacgtcacccacgttatcaactacgacttgccaagcgatgtcgatgattacgtccatagaattggtagaaccggtcgtgccggtaacaccggtcttgccaccgccttcttcaacagcgaaaacgccaaccttgtcaaaggtttgcatgaaattttgactgaagctaaccaagaaattcctccatttttgaaagacgctatgatgagtgctcctggtagcagaagcaacagtcgtagaggcggtttcggtcgcagcagtggtaacagagattaccgtaagagtggcggcggcgctagcgctggtggctcctggggagctccaaagagtagagagggctccttcagaggtggcagcggcagtggcagcggctggggtagcgacaacaaatcatctggctggggtaacagcggtggttcttcaaacaactcttcttggtggtga

SEQ ID NO: 2442 - DNA, 1695 bp, Saccharomyces pastorianus
atgttgaaactaagacttgtttttcgaggggcacgtcagttttccggtagtgtgataacgaaggtaaattgtgcatcgtgttctataaaactacaagatcaggactctagtatagcaggatactatacgaagccaaagaagctgcctgattcaagatcaaagcccgatatacatgatctgaaatatttactgttcagtcaagatatacaactgtcgaagcaagcggctttacatgatcgagatcacatcaccaccacggatatcgaagaaaccaaagacgaattgtcatcaagaattatttgcaaaagatgcagcgatgccctccaccaaaatcgttatgagtttaaagagtttcctgagagtgcattagatgaagttctaaactatatccctaagaattcaaacgttatgcatatagttccttttgtggaatttcctttgcatttgaaccctaatattttaaaaagtcatgatttggatgccacattgttgttgaccaaaagcgaccaactgttcaaggacaagacttctgttagcaagaaggtccctatttttatgaaacagtttctgaagtataatttaaggatcgactcaaataaaacatttgctatatctgcattgaaaaactggaatatttccatgctttacaactccctcagaaactacacgtatttattggggaatcctaatgttggtaaatcaactttaattaactctcttctacaaagataccttgggtataaaatcaaagtgaatccgacgggccaaatcaactcgccttccaaagaagtgatgcaagaagctctcaataagccgagaaatttcttcaggacccaggctgctggcgtatcgcatattcctaatttgactagatctatacaggcttatcaagcgtctggtaaaattattttcgatctgccaggttattctatgcctacatctggattgcgcttagaagaattattcgataaacattggcttcaaagaatacgaaagacgaacttattcaaccgtaagcaggtgaagaagaaaaattatgagtcgatgtgcggtactccacaaggtgcatgttataccgtcggaggccttttttacttggtgcccccagaagggtccataaatcaaatcgtgaagtacattccaggcccatcgactaaattcaaaaatatcgaaaagggtattgaagtttttagctcgtgtgtttcgtcgtcgggaacgcatgcattatcgcagtgttgtggaattaaaagtccattatgcgacaaggagcaatatgcgcgatatgcaattccaccttttgttggtagtatagagattgtactaaaaaatctagggtatattttactgcgaaccacgggaaagtatgatttcaaagggcttcatgaaatatgggttccaagaggtattgatgtgtgcattagagaaccgctagaaaaattaattgaaaccggctacgaacgttatatggaaacggacggaaaagaatcgagttgccctagagacaggccgatcattagttccctgtacgaggtggccaaagatgaaacggatgttttgaacaaagtaaagcgattgtatttggatagaacgaaaaatgatttatctgccaggagatttgctgacgatgatccttatgatctagtaaaacaagaccctgaagaaaagtcaaacccgtattggtattaccagtggtaa

SEQ ID NO: 2443 - DNA, 213 bp, Saccharomyces pastorianus
atgattgtcccagttagatgtttctcctgtggtaaagttgttggtgataagtgggaaagttacttgaacttgttgcaagaagatgaattggatgaaggtaccgcattgtcaagattgggcttgaaaagatactgttgcagaagaatgattttgacccacgtcgatcttattgaaaagtttctgagatacaatccactagaaaagagagattag

SEQ ID NO: 2444 - DNA, 558 bp, Saccharomyces pastorianus
atgttcagacaatcaattagaccactagcttcaactagaataacctttgttcgctacaacagctctccagcctacacggctgcagttagcctgttgaaaggggatctgaagaaggccatgattgccaaggatgagatgaagaagacagcaatcagaagcatgctatcggctatcaagaacaaagagattgatttgaaggggaagagcagcgacgagtactctttatacgatatgtactccaagttgatttctcaaagaaaggactctataaatgaattcattgctaacaaaagagacgatttggtaggcaaggagcaagacgaaatgaacgtcattaaaaaatacatggaacaattaccagtttcatctgaacttgataccgatcaaaatgtgaagaacctgttagacgcccttaaagaaaaggcaggtgacaaaaaagtccaaattaaagaattgatgggacaaattgactggaaatctctgccaacggaatttaagacgtcgccaactaccataaaaaatagcatcgtgaaacaatttaaggaaatcttcaaatga

SEQ ID NO: 2445 - DNA, 1458 bp, Saccharomyces pastorianus
atgggtaaaaacaagaagaaaacagggaaaaaggccaaaaaccagcctcatgttgaagccgttggcgaaaccaccgatgaacatgaagtagcaatcacttctgcaaaagaagacacagccactgaaatccccaaagcgatcggtgttccagaagactcggaaaatgtagaggctaagaaggaagagcattcacaagagataaatcaacaagaagtcagtgctgatctcgtcacagataaaaccatcccattagaaaacaatatggccaacgaggaaataaaggctttaaaagaagagattgaacgtttaaattcagaattgaatgccaagaaggacgaggaaacgcaaaatgaagatgccaaagatcagctagaaaacgtcattaaagaacgagacgaattcaagacacaatacaatacccttttaagcaagatatcttccatgaaatcaatctttaataagatgaaggaatcacagaaagaattagaagaagtccaagaacaactaaccgaatacgaatctcaaaacctaaaattgaagaaaaaacttgaagcttccaagattgaaaactctgaattacaatcaacgattgtgacaataaataaagagttagagaatctggaaaacgaacaagaaagtgctgaagatatatttttggaatacgaatcaaagatagaggccttgcaggatgagcagcgcaacatgattgaaacgcatagcaaagaacttaaagcttctaggaaggataaagatcaattaagtgttcaggtccaagagctgatgataattttagagaacctcaaacaagatatatctgacctgagaaacgaaaaagatgatttgaagcaagctttggaattacacgaaagtgagaaaacagcattgcaaaactcggtgaacgatctggaactaaaaatcgaagaacttgtcagcaaaaaggaagaggaattaagagaaaaggatctggaagtaaaagatttgcgctcacaacttgacacagagctggaagcacacaacaatgatattacaattcttgaaagcttgaaaaaagaaatagaggacatgaaagaggacgtgtctatgaaggaaaaatacgaggaagaatcaaaacagcatgttttacagatcggcaagctgcgccatgaagctatcatactaaacgagcatctaacaaaagccttaagtatgctgaagaagtcaagcgactcagaatccgtggataaagaactgatatctaacttgttgatctcttttgtggccatacccagagcagacccaaggaagttcgaagttcttgaattgttgtccaatttcttgaactgggacgaagataagaaacagcaggccggtttaatttcgaataatgaccaatccagaagtgcaagcgccgtatcacgaacagaaagttttgtatcgctatggaccaactaccttgagaaagaaagtgagaaggattga

SEQ ID NO: 2446 - DNA, 882 bp, Saccharomyces pastorianus
atgtcggcagaaccattattgcccacacacaacgggccacaggcgggtgaagcggcttccacagaccagaagttcgtcgtagtgcggttttcggacgtagcagtaggagatctgcagttgaacgtatcgaatgtgccgtatgcgaatataaatacgcactggttgcgtcgaatgtgtagggagttacggccccaatatacgcagaggagaagactgaagtttatcaggaatggtagcattctaaacacgcattctaagatatctgatgaactggcgcattattttggtgctggaagcagcaactccgacactggcacaagtgccagcggtggggcggagcagaacaagtactatatccattgtataattggcacggaggatctcacgccagcagagctcgctaccgaggacctgaaggatgatgcgaccccgtctaatgagtccatgaccacacaggccatcgggtttgacagactacgatcagtggggtttaccgaacaagaaattgaactactgagacagcagttccgagccacttatggggacttggaagaggaggaggagagactcgtccaaagtagtaacagagatgacgatgtccatgacattagacaactagaggaacagtggatggaaagcgggaatggcaccaccccggagaacggcgctggcaatggaaacgaggacaggttcaactccgtgcccattgccaacataaagcataacaaggacctgttactgggcatatgtgtagggtttttctttggtgtctttggtatactgttgatgaaattcgatgggttgttcaatagacgacaaaaaatggcaattttcgccggtgtgattgttaatgttatgttctgtcttgttagaggtttttaa

SEQ ID NO: 2447 - DNA, 441 bp, Saccharomyces pastorianus
atgtccagcaccctatttgacgatatcttccaagtctcggaagtcgatcctggtcgttacaacaaagtgtgtcgtatcgaagccgcatccaccacccaagaccaatgcaaactaacattggatataaacgttgaactgttccccgtcgcgccacaagattcgttgactgtcactattgcatcctctttgaaccttgaagacaccccagcgaacgaggcttctgtaacaaaaagttggaggcctcctcaacctggtgacagatcattggccgacgactacgactatgtcatgcacggtaccgcttacaaattcgaggaagtcagcaaggacctaattgcggtttactactcgttcggcggtctgctgatgagattggaaggtaactacagaaatttgaataatttgaagcaggagaatgcttatcttttgattcgtcgttaa

SEQ ID NO: 2448 - DNA, 471 bp, Saccharomyces pastorianus
atgtttgccagactcgccaaccccgcctgctacaagcccctcatgggctccagcataacaaaagctgcaaagagactataccatcccaaggtaattgaccactacacaaatccaagaaacgtcggatccatggacaagtcccaggccaacgtcggcacggggatcgtgggcgccccagcttgtggggacgtgataaagcttcagatccaagtgaacgacaagtcgggcatcattgagaacgtcaagttcaagacctttggctgtgggtcggccatcgcgtcctcttcctacatgaccgaactgatacgtggtatgtcgctggacgaggccgtcaagatcaagaacacagagatcgccaaggaattgagcctgcccccggtgaagctgcattgctccatgctcgcagaagacgccatcaaggcggcaatcaaggattacaagacgaagaggaacccctccgtcttgcattga

SEQ ID NO: 2449 - DNA, 3747 bp, Saccharomyces pastorianus
atgagctccaagttaaactacgcagatatcgacgttccactggattggctgtataagggcaaacgaagaagtaagacgaggaatgtgaactccacgcgtgcctcagacccagcgcctccttccagcaggaaaagttcgactccaaaggcgaatcccactcctactgctactcccgctgctactcccacattcgcagccgcccctcaagggccctcgactgagcagagtgtaaagaatgagccatctaaatctaaaccggcggtgctcccaggcaaacctccgcaacaggaacaacgaggtgctagaaggacacgttcccactcggtgtcctatgacgttttgaaaaaaaacgctcaagaggccacctcagactctccaaagatatcccgagtcagaactgcacaagatcaacctgccagagaaacgaaaaatattgccgttccggagtccatagcttcaaaaaagggaagaactcgttcttcgtctatatctactcctttgaatgaacggtccaagaaatctctattcggttctttgtttggaagaagaccctccactacgccttccctcagcaccgagaaaccagcgtcttctcaaaatgacagcaaaaagagttcagagctcttccccatagacactaaacagccgaagaattccacccccagtaatacgcctgttaccgcctcttccaaaccggctagttctggcagtagcaggcatcgtagcagctccatcacttcaaagttgttaagcatcccacacaacatattggagggctcttcctcggattctaaccatcatcatcaccttaatggacatggaaatgaccaggattcgccgttaccagcagagtctccagatttgccgcccattctggaaagaagcaccacccagcagttaaagaaactatccgatgtcgatctgaggagggttacaatagccgttcaagagttcgacgcggatcctccacagcaactaccttcgagaaaacctaaaaggggcgacgtcttgatcccagaagatatggtaagcgcacccccattgatctccctaggtatcacaaacagtggcgatcaaacgactttccaatcaagcgcctccgctttgtatactaaggactctaaagaatataaagccgctctagaacactacaagaaagcagccaaagaagccgaaaaacatcaaaaggacgcatattatgtcgcggaacgcatggctcaagaagtggcaaactataaggccaagcaatcgaaactctcttcactgtcctccgttgcaacttcgccagcagattcgttagcggatcaggaaccctcttccatagacactaaggcttctaaactccatatcgataaacccatcaatgcaggcgcacatccttttgaaactcagcataatggtaacgccggactcccctctagtgcagaacaaactttggacgtatcctacactagatgttgtcatttaagggagattctaccgataccttccactttgagacaggttaaaggtaaaactgctcccctacagactttaaagtttttgaatccaaaaccaactctagtggatattttatcattttgcgactttattgccataactccgatacataacattgtctttgacaatgtgtccctaactcatgatatgtttaaaattgtcatttgttctttagcaacttctccagtcgtagagaaattggggttaagaaacgttgtgataaatgaacaaagttggaaactactttgtaagtttctactgcaaaataaaactttaattaaactggatatttctcaaactaaagcaagatcggatctaagtgattcaaactacagagaccaaatggattgggaattattttgtcaagtgctcagaaagaaagacggtagacctttggaagaactacttttgaatgggctaaggttcgacaagatgccgttcgactattacaaaaatgttttacagacattcgctcaaatgaaccctgagaatcctattcgtcttgggatggctaacgtagagttctccactcaatgtttcgattttctctttgattggatgtctcaatacaacgttcagggagtagatttggcctacaataatttagaaactttggtgaaaccaatgatcgaaaaactggctagattgccttacaaacgcctagaatatttcacacttaatagcactaatatcacctctgttgatgatatgtcctccattttgaaatatctttcaagattgcctagcatcaaattccttgacttgagcaatttaccaatgttgttcccaagtattttaaaatctgattacaagtacttgcctcaatttcctcaattaaaacgtgttcactttgatttcaacgatctttctgtaaaggaaacaacaatgctcgtgaacatattagccaagtgtgaaaccttgtcccatgtctcgttaattggtcaaagtcccatgcccgacgccgataaaatctctgtcgaaagtgatgattctgaaaaggcaaaagttgaaaagaaagaacaagttttattccttagaaatacattgtgggcttccctgtatgcttttgttagggattctcataatttagttagtttggatattgactatgatgaaataccggacgaaatccaatcaagagtcgctttatgtttaatgcataatatgaaaagaattatggactctagctttaaattggacgaattgactgtgcaagatgatttgatatttgatggttctttaataacagaaagtgcagaagaagttttaaagagactaaatgataactccttgcttcaaaatgacgttggaaggaaatatctcttaagaaaatatttcgaaaaaatggaaaaagtacatcacaatgttcagcatactatcgattctatgtttgagaaaagagaatccgatgaactaccactacaagaaaaggagaacttactgcggttattattacttgagaaaaatttatcaaatattcttgaaatatttgcctctatgcccaatatagcagatgtcgtgccattttcaaagactgacaacagtttcccagatatcagagatagcaccggcaattccggttacaacgatggtattcgcccgtctctaaaacacttggattctgacagattaattaatgatgcttctgttcccgaaaacgattcatcgatcagaccgcatttgatggccactgattcaggacgtattatcgatgtaaccaccggtaaagctcttctatttaaaagctcatcgaacacttcattggctggtaaaagacaagaagaagaggaaggtgaattacacaaatggggtgtctttgttcaacatcaaagttcaagacatagttctatgcctcctactcccaccagctcctcgcgaattagcggtacatcaacaccagatggtggagccgtagacaggaagaaagggaaaccagctgaagtatcgagttctaggccaaaaatattaccaaagatacctacgggtactgaactgagagacgcgattatcaaagccaagggtattaattccgttgatgacttgattaaaaatgtgacctctgaaaaagttggtttggaatcattatacggtgacgaattgaacaccagaagcccaagcaatgaaagtctgcaggaatcacagcaaaaagtgcatttgcaaaggccacccattgaagatgaaactgtgacgaagaaatatgacaaactattgaacgatttatccaatgttcgtcacagcaaaagctaa

SEQ ID NO: 2450 - DNA, 1392 bp, Saccharomyces pastorianus
atggcaaagagcaagtccaatcagggtgcgagtggagcacgccgcaagcctgcaccttctttataccaacacatctctagcttcaagccgcaattcagcgctcgggttgatgacgtgttacacttcagcaagacggtggcgtggagaagcgagatcattcctgataagtccaaaggcactttgacgaccagtcttttatactctcaagggagcgatatctacgaaatcgatgccactttaccattgaaaacattctacgacgatgacgacgacgacggtggcaacaaagaaagctctaaaactaaatccgcaaccttcccaaaccctgagtacggcgacgccttccatgacattgatggtacgctattgcgccccaaatggatctaccaaggcgagacagtggccaagatgcagtacttagaaagctcggatgacagtacggcaatcgcgatgtctaaaaatggctctttggcgtggtttagggatgatatcaaagtgcccgtccatatcgttcaggagatgatgggtcctgccaccagttacgctagcatgcactcgctcaccagacccggctccctggcggtggccgatttcgatgtgtctaccaacatggacacggtagtaaaatcacaaagcaatggctacgaggaagacagcattctgaaaatcattgataactcggatagaccgggagacatcttacgcaccgtacacgttccgggaaccacggtaacccattcggtgcggtttttcaacaaccatctatttgcatcatgctcagatgataacattttgaggttctgggatacaagaacggcagacaagccgctttggattctgagcgagccacagaatggccggctcacgtcgttcgactcatcgcaagtcactgagaacttgttcgtcacaggcttcagcacgggggtcatcaagctatgggatgcgcgcgccgtgcaacaagccacgactgacctcacgtacagacaaaatggcgaggatcccatccaaaacgagatagccaagctgttccattccggcggcgactccgtcgtggacatcttgttctctcaaacttctgccacagaatttgtcacggtggggggaacgggcaacgtgtatcactgggacatggagtattccttctcgagaaacgacgatgacaacggagatgacgtgcaagtggctgccccagaggaactacagggccaatgtctgaagtttttccacacaggtgggacaagaagatcaagtaaccaattcggcaagagaaacaccgtggcgttgcacccggtaattaacgatttcgtcggtaccgtggactcagatagtctcgttacagcttacaaaccattcctcgccagcgacttcattgggagaggttatgacgactaa

SEQ ID NO: 2451 - DNA, 1521 bp, Saccharomyces pastorianus
atggcttcactatttaggcccccagagtcgacgaaatgcaacccaaattctccgagactaaaactgccctccctaaggaataaccagttagatgatagtaatatatattcgatatctaacgggagctctaccacaggccatactccagagccgttgacttcttccacatccacgctattttctcaacatcgaacttattcaagcgattcctccatggctctaaacaccataaagaagaggcctgctccaccatctttaacttcattgagcacgagcacactacctacaagcaaaacgcgacccccccttgcgcctattaccgatgtatcagactccaggcaggatctagaattgaaacagaaagcaatagtcgcaagtgagccttcggatagtagtgatatgatctctccgtcgatagcaagccctttttcacatacgaacacatcttctccctatcttagaactgacctgaacaattcggtggagtctgatttttcaaatttgatatcggcatatgaacaaagctcaagtccgattaagccattacctcgtcagactgcaacacctactgaaccatatacgaacttgaacagcgcgcaagacgtcgatcaactggatgaaaacggttggaaatatactaacttgaaggataaaatagagactctaggtgtcctgggagaaggcgcaggtggatctgtgtccaagtgtaaactgaaaaatggatctaagatatttgctttgaaagtaatcaatacattaaatacagatcctgagttccaaaaacaaatattcagagaattacaattcaacaaaagttttgaatccgaatatatcgtacggtattatggaatgtttacagatgatcaaaattcctcaatatacattgctatggaatacatgggcggcagatcattggatgcaatttacaaaaatttatcaaaccgtggaggtagaatcggcgagaaggttcttgggaaaatcgccgaagcagtgctaagaggactatcgtatttgcatgaaaagaaagttattcatagagatatcaaaccacaaaacattcttttgaacgagaatggactggtgaagctttgtgatttcggagtcagcggagaagccgtaaactcactagctacaacttttactgggacttccttttatatggctccagaaaggattcaaggccaaccatatagtgttacatctgatgtgtggtcacttggattgacaattttagaagtggcgaatgggaagtttccttgctcttcagagaaaatggcagcgaatatagctccgtttgaactattaatgtggatcctaacattcactcccgaattgaaggacgattccgaatccggtattatatggagtccatcattcaaatcttttatcgattattgcttgaggaaggatagtcgtgaacgcccttcccccagacagatgataagtcacccctggataaagggacaaatgaagaagaaggtcaatatggaaaaatttatcaagaagtgctgggaagattaa

SEQ ID NO: 2452 - DNA, 687 bp, Saccharomyces pastorianus
atgagagcctttacagcagccacaatgagagccacctctaggaagtcgttcgtccaagggggaccaagaacttccttgatgacttctacgtttttagggagagcgactccacttacaacgatgagatactattccgaggaagccaagaaagaagaagccaaagaaaacaacgaaaatttgactgaagaacaatctgaaatcaagaaattggagagtcagctgggtgtcaagacaaaagaggcttctgaactaaaggacagattgttgagatccgtcgctgacttcagaaacttgcaacaagtaaccaagaaagatattcaaaaagctaaagattttgcattacagaaatttgcaaaggacttattagagtccgtagataactttggccatgctttaaatgctttcaaagaggaagacttgcagaaatccaaagaaattagtgacttgtacactggtgtcagaatgacaagagatgttttcgaaagtaccttaagaaaacacggtattcaaaaattagacccaatgggagaacattttgacccaaataagcatgaagcgacatttgagctgccacaacctgataaagaaccaggtactgtttttcacgtacaacagttaggtttcactttaaatgacagagtcatcagaccggctaaggttggcatcgtcaaaggcgaagaaaactaa

SEQ ID NO: 2453 - DNA, 2424 bp, Saccharomyces pastorianus
atggcttccgtacccaaacgccatacatatagtggcaatgtcgccaccgaaagaaaccaccatcctcttcaaaggaataacgagattttgtatcctatacgtaaaagcccacggaaacatgccacctttgggccatatatagtgggttctactctgggtgaaggggagtttggtaaagttaaattgggctggtctaaagcatcctcgcccaatgaggttcctaagcaagttgcgataaaactaattagaagagataccatcaagaaagatgccgataaagaagttaaaatataccgtgaaattaatgcactgaagcatttgacccatccaaacattatttatttagaagaggttttacagaattcaaagtacattgggatagtactggagtttgtatctggaggtgaattttataagtatatccaaagaaagagaaggttaaaggaatcttctgcatgcaggctgtttgcccaattaattagtggtgtcaactatatgcattccaagggacttgttcatagggacttgaaactggaaaacttattaatggataaacatgaaaatctagtcatcacagactttggctttgtgaatgaattcttcgaagataatgaactaatgagtacttcctgtggttccccttgttacgcagcaccagaattagtcgttagtactaaggcatacgaggcgagaaaggcggatgtttggtcctgtggtgtcattctctacgctatgcttgctgggtatctaccatgggatgacgatcatgaaaatccaacaggtgacgatatcgctagactataccagtacattacccaaacaccccttaagtttcctgagtatataacgcctattccaagagaccttttaagacgaattctggtaccgaacccaagaagaagagtaagcttacgggcaattcaaagacatgagtggttgaaaccacatcaggcctttttaagcattcagccgaactactgggatgaacaattgcaaaaaggacatccgcaactagctgctgggggcgatgttggtcgacatacaacttattcctcgccaacatcctcccactcgaaaagtagggataggaactcgctgataatagagtcaaccatagagcaatctcgaatgtctccgcaacccgtggctactagaccggattcatcaatttccatcagcgattccacgttgataccgaacaatacgaaaagaaatcaaactgaatctagggtagttagcgatcattcaagtgaatcgaacaatcataaacgaaacaccacgaacagctctttacaagcagaacaaactgctaggcactcttccaaaggcaagaaacatacatcagttactgggcttcttacaatccctggctctcctaccatcgcgaggacaaggaatatatcatcggaacctactggccaggtaaacgctcccaatcagacgacttttactcaggaggatttccatcgtgtcggtaattaccacgtgcctcgtaataaacctaggcctacttcttactatcctgggcttattcgaaacactgcggatgagagtttaatggatattccagtaaataaattaaccggaaagttgccggactgcaaaaacttggtttcttcaaagaagccagaaggcatttcttcggacacagcacatgatgctactaaagctgctgtttctaataattccattataatattaccggaaggcccagcagtgaaaaattcgccggtagattatcactatgctattggtgacctgaattatggtgatcaaccaacaacagaagctatcgcgaaaatgaatagagatcttgctcataaaataatagagaacgttgcgccgcttgaaaagatcgacttggaggatgaatcggtggtctcaactgctaaagagtccaatggctctgttagtgaagaagatactgaaattcggccaggtaatgttgtcaatccttctaacaaatcggttttttccttggaaaaagaaaataggaaaaactacgaaagaaaaaggttcagtttcatgtcattatattcatccttgaatgggtcgagatccactgtggaatctcgtcaatcaaaggtcaatatgcctcctgtgtcgtctagaaatccatcaggacagtcaaataagagcagtaccaaaataactcagcaacaaccgcgtactcttgtcgataacggtgtgccgactataccaacgcctgctaacaacattaatgacggtggaggaaggattgtcaattctggtaatactggaagtggcaatcctagtaggcctatgcgagcttctgttatgatttcaacgttacgagaagaagaaagaagtacagtgtctactgaagggcacaacgttgaggctcagacttcaacagcaagaaaggttttgaattttttcaagagaagaagcatgaggatttag

SEQ ID NO: 2454 - DNA, 636 bp, Saccharomyces pastorianus
atggctggaggaaagattcctattgtcggcatcgtggcatgcctacaacccgacatgggcatagggttccaaggaggcctgccttggaggctatccaaggaaatgaagtatttcagacaggtcacttcgtcgaccaaggattcaagtaagagaaatgctgtgataatgggcaggaaaacatgggaatccataccacctaaatttcgccccttgcctaaccgaatgaacgtagtcatttcaagaagcttcagtgatggcttcgcccacgatacggaggaagcaataattaggagcaattcactggaaaacgcgttgaaccatctagaggacaagtttcgagactcattagaaagaatatacgtgattggcggtggcgaagtctacaatcaaatgttcccacttacagaccactggctcatcacaaagataaacgcgctgagcgaaaccgcactaccttccatggatacgttcctggatgcgaaaagattgaaagaagcatttagcgagcaagatccggcccaattgaaagaatttctccccactgcggtcgaattgcccaaaaaagactccgaccaacgctactcccaagaggagaagggctatcgttttgagtttgcgctgtataatcgtaaatga

SEQ ID NO: 2455 - DNA, 1311 bp, Saccharomyces pastorianus
atgtcccaacacgcaaattcatcatcctggacctcttttttaaaatcgataagttcgttcaatggcgatctgtcgtccttgtctgctcctccatttattctttctcctacatcattgacggagttctctcagtactgggctgaacacccagatttgtttctggagccatcgttcattgacggtgaaaactacaaagaacactgtctctttgatccaaatgtggaatcacaggaagtggcgcgaatgttggcggtggttagatggttcatttctactttaaggtcacaatactcttctaggaacgaatcgatgggttctgaaaagaaacctttaaatccatttctaggtgaggtatttgttggtaaatggcaaagtgataaaaatccagagtttggagaaacagtacttttaagtgagcaggtttcacatcatccaccaatgaccgcattttcaatctttaacgataagaatgacgtttcccttcaaggttacaatcacattaaaaccggttttactaagactctgacactaaccgtcaagccatatggacatgtcattttgaaaatcaaagacgaaacttacctgatcacaactccacctttacacattgaaggtattttagttgcttccccctttgtcgaactaggtggtagatcgttcattcaatcatcgaatggtatgctgtgtgtcatagaatattcaggtagagggtattttaccggtaagaagaactcattcaaggcaagaatctataaaaatcctcaagaccataaacacagccataaagaggatgctctgtacttgatttcaggacaatggtcaggtgtttcaacaattataaaaaaagactcgcaggttccacaccagttctatgattcgtcaaagacacccgccgagcatttaatagttaagccaatcgagcagcagaatcctttggagagcagaagagcttggaaagacgtggcagaagcaattagatcgggcaataatagtatgataaagaaaactaaggaagagctagaaaatgcacaaagagctttgagagaacaggaagctgcgaaaggtgttcagtggcaaagaagatggtttaaacaagtaaactactccaaagaagacgaatccagtgatgcagaaaagccaagcgacaatgatattttcagaaagttggcatcgacacttcagctctctgagaaaaatgtgccaagtggaacgttaatcggcgctaaggatgataaaaaggacgtctcaaccgcattgcattggagatttgacaaagatttgtgggcgaaagagaaggagattattatataa

SEQ ID NO: 2456 - DNA, 1113 bp, Saccharomyces pastorianus
atgcatcggaactattattcgaatacagaaatttacacaaaaaacggaggctcagaatatgtaagaaaaaaggttttaagatcgagaaagccatcttttttttccttcttcaatgacacttcaagttcaaacgggaacgaacttgtaggttttagacggttcgcaaaagcttatttgtttggggatgagactgattcatgtgggactgattcttatacacctgttaaggcaattgcgaataaaagacgttcaaagaaagaacataaaaatgatcagcaactatggaaaagacagcataattcacaaggttgctcattttttatagaagatgacattaataaaaaggcagaaacagcagtcaaggatttatacgggaatggcaaatacaacggtcacgattccgtttttaaaggagctcagtatacggaagaaacagaatacaatgaaaaagcaacagaggctcagaattctacctttcccaaaacaagatcggtgtcaataaacgatattccacgtggcacaggaattggtagcgttttgtctcaagtgcgtggcggatctttggaaagaattgtggtttacaggtatgatactccggaacgctctttgcataaagttgacctatttttcctaaactatgatggggctcagtcatttatgaagtatgcgacgacgaatatttttaaagtcaacgggactcatttaagaccggagtggattttccttgaaagcacatttgaaaatattatgaaagaacagtcggtaaacagaatattagatgaggaaaaacttatatcaagatgcttgatcgtaaaaaaaagttcatcaaaaactatagttaccaaaccaagtcaagacaaatcacaaagtttggaaaacattgacattcaagaattagaaaaggatttccaaaattttggggaggttttagaaattacccccattgtatcaaggaaattatgtgtttccatattcttttatgatatatccagtgctatgagagccatggaagaatacgaacaaaagggatcgtatttatataataaatacttcaagacatggacaatatggtatggaaaagatattacagaccagccttgtatcgacctgtaa

SEQ ID NO: 2457 - DNA, 2034 bp, Saccharomyces pastorianus
atgtctgatttaactgatgttactgtaaaaagatcccttgatactactgttgagtctccggaaaatgtcgccaagaaatcaaagattgaacagcgcattcagatagatagtggtattcatgaagcagatgtcgggattacttattttctatccccagaattgtcaggatttaaaggacaaatcaagcaacggtacactgactttttagttaatgaaattgatcaagaaggcaatgtcattcatttaacagataaggggtttaagatgccaaagaaacctcaacgctctagggaagaggccaatgcagaaagggaagttgaagctgctagaagacaagaatttaaagttgattctcaattgagggaggaattggtggagatatttggggaagaagatgtgtccaacatcgaaaccgtctaccgcatggctaataagatggaatcaacaaaaagttttgaggataagaccgttagaactaagattcatcagttattacgtcaagctttcaataacgaacttgaatcggtaaccactgataacaacacttttaagattgcaagatctagtaaaaattcaagggctaacaaacaagaaaagatcaaccaaaccaaagatgctaatggcgtggaaaattggggatatggtccaagcaaagatttcgttcacttcaccttacacaaggaaaataaagacaccatggaagccgtcaatgttataacgaagttgctgagggttccaagtcgtgtcatcagatatgccggtaccaaagatcgtagagctgtaacatgccaaagactttctatttcaagaattggtatggatagactaaatgccttaaacaaaactctaaaagggatgattatcggtaattacaacttctcagatacaagtttgaatctgggtgacttgaagggcaatgaattcgttattgttattagagatgcaactacaggcgatagcgaagtctcactggaagatattgtttccaacggttgtacatcattatcagaaaatgggtttataaattattttggtatgcaaaggttcggtacattcagtatctctacgcatacaattggtagagaattacttttgtccaactgggaaaaagctgctgaattgattttatctgaccaagaaaatgtgcttccaaaatctaaggaggctagaaaaatttgggcagaaactagggatgctgccttagccttgaagcagatgcctagacagtgtcttgctgaaaatgcattattatattctttgtccaaccaaagaaaagaagatgatgggacatactctgcgaacgcttattatacggctataatgaaaattccaaggaacttgagaactatgtatgtgcatgcttaccaaagttatgtctggaactctatcgccagtaaacggatagagctatatggtttaaaactggttgtcggtgaccttgtcattgatgatactgaaaaacctgtgtctgagaccagcatagacgatgaagattttgatgaagatgttcgtgaagctcggtttgttcgtgcaaaagctgtgactcaagaggatattgactcaggtaaatacactatggaagatgttgtattaccatcaccagggtttgacgtgctttatccttctaatgaagaattgaagcaactctatgtggatatattaaaagcagacaacatggacccatttgatatgaggagaaaggttcgtgatttttcactagctggctcttatagaaacgttgttcaaaagccaaagagtttagaatataagataatccactatgatgatccttctcaacagatagcaaacacagacttggatattttgaataatacaagagcaaaagaaagcggtcaaaagtatatgaaagccaaattagacagatatatgccaggtaaaggtggtgagaagactgctgtggtattaaagttccaattagggacatcttcttatgctaccatggcactgcgtgagctaatgaagctcgagacttctcgccgcggtgatatgtgtgatgtcaaacagggaatctaa

SEQ ID NO: 2458 - DNA, 1335 bp, Saccharomyces pastorianus
atgtcacatgacggggaagaagaacctggtattgccaaaaaggtagactctgtagatgatattattattaaatgccaatgttgggtcgaaaaaaatgatgaggaacgtcttgctgagatattatcgataaatacaagaaaatcaccaccaaaattttatgtccactacgtcaattacaataagcgtttggacgaatggatcaccactgagagaataaacctggataaagatgtactgtatccaaaaccaaaagcagttgacgacgaagataacaagaggcaaaagaagaagaaaacacccgccgccacacctcaggcaactttgcaagacggagtagatggtatgtcaagagaaaatacagatgttatggatttagacaatctgaatgtacaaggaattaaagatgaaaatatatcacacgaggatgaaattaagaaattgagaacttccggttccatgactcaaaatccacacgaagtggcgcgtgtcagaaacttgaaccgaataatcatggggaaatacgaaatagaaccatggtatttctctccataccccattgaattaaccgatgaggactttatttatattgatgactttacactgcaatattttggatctaagaaacaatacgaacgctacaggaagaagtgcacacttagacacccaccagggaatgaaatttatcgtgatgattacgtatctttttttgaaatcgatgggagaaagcagaggacgtggtgtcgtaatctctgtttactatcaaaactgttcttggatcacaaaacgttgtattatgatgttgacccatttttattttattgcatgacaagacgagatgaacttggccatcacctggtggggtacttttctaaggaaaaggaatccgcagatgcttacaatgtggcatgtatcttaacactaccacaatatcaaagaatggggtatggtaagttgttgatcgaattttcttacgagttgtcgaagaaggaaaacaaggttggttcgccggaaaaacccttatctgatctaggtttattatcctacagagcctattggtcagacactttgataactctactagtggagcataaaaaggagattactatcgacgaagtaagttcgatgacctcaatgactacaacggacatactgcacactgcaaagactttgaatattttacgatactataagggacagcatatcattttcttaaatgaagatattttagatcgatacaatctactgaaagccaaaaagagaagaaacatagatgcggacaggctcatttggaaaccaccggtatttactgcatcccagttacgctttgcctggtaa

SEQ ID NO: 2459 - DNA, 1257 bp, Saccharomyces pastorianus
atgtcagatacaataaacactttaagaagaagaacgaatgaagagtggaaagctacgcccggtattgccgaacagcatgaggatcaaccctcgacaatcatcgataagagagaccaaactcccaagccacaactagagtcgtgttgtcccttagcaacgccctttgaaaggaggttgcaaacgctggctgtggcatggcacacatcctcttttgtagtattttctatatttgcattgtttgcaatatcgacgccgacactatggttttttgttatcccgtacatgatctattttttctttgatagatctcctgcaactggtgatgtggtaaacagatattcccttcagtttcgttcgttatcagtttggagatggtactgtgactacttccccataactttgatcaagaccgccgaactgaaaccaacttttacgctctcaaagaacaagaacaataacggcaaggtgtacaagatcagattgtggccaaccaaatattctatcaacttgaaaagctactctaccatcgattaccgtgaccaggaatgtacggggccaaaatatctattcggttatcatccacacgggattggtgccctgggcgcgttcggagcatttgcaactgagggttgtaactattctaaaatctttccaggtattcctatttccttaatgacattggttactcaatttcatatccctttttacagagattacttgttggcattaggtatatcttctgtgtcaagaaagaatgctttaaggaccttaagcaaaaaccaatcaatttgtattgttgttggtggagccagggaatctttgttaagttcaacgaatggtacacagctgatcttgaacaaaagaaagggatttatcaaactggcgattcagacagggaataccaacctagtccccgtgtttgcattcggagaggtcaactgttataacgtattaaacacagaagcggactcgacattgggtaagatgcaattatggttcaaggaaaacttcggctttaccattcccattttctatgcaaggggactattcaattatgacttcggtttattaccatttagagcaccaatcaatgttgtcgtagggagacccatttatgttgaacaacaaatagtaaatcctccagatgacgtcgttgatcatttccacgacttgtatataaaagaattggaaagattatactacgaaaatagaaacaaatatgggatatcagaagcagaattcaagatagttggttga

SEQ ID NO: 2460 - DNA, 975 bp, Saccharomyces pastorianus
atgctagacccacgaatattgccatactacaaccctgccgtggaccggaagattgccgtggtgacgggtgggaacaccgggatcggttggtataccgttctgcacctttatttgcacgggttcgtcatttacatatgtgggagaaactcccacaagatctcgaaggctatccaggagatactcgcggaggcgaagaagcggtgccatgaccggggcgacggcccaggcccgaatatacggcggctggggtctttgcattatatccatttggatctgacggacttgaaatgcgtggaaagggcgtcgttcaagattttgaagctggaagaccatatcgatgtgttgatcaacaacgcagggatcatggcggtgcccttggagatgacgaaggataggtttgaagtacaattgcagacgaactacatttcgcacttcttcttcacgatgaaactgcttcccctgcttcgtcactgtcacggtagagtcatctctctgtcctctgtgggccatcggctcgaagtgatgtactggactctatgcaagacatgggactacaagcctaacatgctttttacctggtttcggtacgcaatgagcaagacggcgctgatccaatgcacgaagatgttggccattaagtacccggacgtcctgtgcctgtccgtccacccgggcctggtgatgaacacaaacctgttcagctactggacaagactgcccattgtgggcattttcttctggctcctgtttcaagtcgtcgggttcttttttggcgtatccaacgaacaaggctcgctggccactctaaaatgcgcattggaccctgcgttgtcggtcgagacagacaacgggaagtacttcaccacgggggggaaagaatctaagtcgagctacgtttccaacaacgtcgatgacgcagcttcgacctggatctggaccgtccatcagctgagggaccgcggattcgagatataa

SEQ ID NO: 2461 - DNA, 2037 bp, Saccharomyces pastorianus
atgagtgattatggtcctttgggtattactaacttcattaccccgtacgacctatgtatattgatccttatacatgtacattgctcgcaagataacggcatagcggtgcccacagaagtctttcttcaattgatatcacccacgaggccatcaatagaatggaaccctctactcaaggacaatagtaatcttcggcctgcttctgctgttctacctcctatactgcctatactggaacacgtaataaggatattgctggatgaaaagaacaataacaaagtggccctgacactaatgggctatttagaagccattgatgggttggattcaatcaatagattgatgatggatttagagaaaaactgtttggtcaataatcataggtcgatgaaaatgcgtacaacaataacaagaagacaaattacaaaggcaagttttttagggacatttttatcaacatgtttacggaagtaccaatttggagattttgagatgagagagacaatttggatgaatttggagagtttcaaatctgtttttaaaaagacttcattgtggctgaaatttaaggatagcattcatgttcaaaaaataaaacagtgtcttttggccgacactgaaacttctacggaggatcaagatatgatggaattctttcagcatttcaatggaagtggtgatgtcaattcaaagaccatgaacgaggaggtgtatggaactttaatttctatccaacatttgcaatcaatcgttaactggcagatcatgaaatggttggataatatagatgatggtgaaacgccatataaacagcaataccaactggttttcggtttattaaatacgctttcgttaaatgatgctacaagatttccattggtattcattctgaaatatctgaaggctatcaaagagaatagttaccaaattgccttagattcattgcacaattatttcgattacaaatcaacaggtaattcacaaaactactttcatatttctcttctgtgtcttgcaaccttccattcaagtttcaatgagtgtgatgcagccatcaattcttttgaagaagctacgagaattgcgagagaaaataaagacatggaaacattgaacttgattatgatttggataataaactttatagaggttcatccggaatatgccaataggttctatatcactgtggaacagatcataaaatatctgaaaaatagttctgatgtagaagatgccaacattttcagtaatgcctataaatttgaaacattattatccatagtaaaggaatccaagacgattgacgtttccaactcacttttgaaatttatggctatatcgctgcagaatgtgccgtctcaaaacatcgatcttttccaaagtctgcttgggtatgaaataaaattctggaaagaactgggctatggctccatatcggatgtgtatgaaaaatttgttttgccaacttcttcttcatctttgaggaatcatgacgattatatcataaaccgagaaataaaaacagcattcaaatcacttgaggaggaggatttttcaaaagtcaagcaatgtcttttgaaatcagaatcacctaaacttgattacgaacagaaaacaaagctgaaatacttaaaagtaaagtacttgacacgaataggtgattacgaccaaagtatgcaatcgatcaaccagtacattaaagattgttgtgaggaggtcatggattcgaattggaggttcaaattcgaaatcgaaagtgtcgaagttttgcttttgaataatgtaggtttaagaggtttaccggaggtaatgctattaatcgataaatacaaagagataggaaatcctttacggtgcatgatattgttgatcaaattgtgtgagattctcatccaagtagggaaaagtagagaagccaaatctttggtcgactgtaacttgttcggcctattagaattcccacttgtgagagggcaggtaaacaaactactaaagttttttagcgtagaagaggatagggatattcaaatgaattga

SEQ ID NO: 2462 - DNA, 1338 bp, Saccharomyces pastorianus
atggcaaccctacctggcattgatgagcacaccgcgtctgaagaattgataactggagataatgaatggcacaaattggttattcccaaaggcagcgattggcaaatcgagcttaaaactgaaacaaaactgatgatcaaggtgaactcaggcatagctgaaatatttggcactgaattggcactagaagaggaatacaccttccagagctggaagtttcccgtatacgctgttgaggaaacagaactggcgtggaaatgcccggacttaacgacaaatgcgatttcaataaagcataatcatactatgaaatatatatataatctgcacttcatgttggagaaagtaagaatgtccagttttgagggccctcgagtggtgattgtcggtaattcgcaaagtgggaaaacctccttatcaaggacattatgttcatacgcgctgaaatttaactcttatcagcctttatacatcaatctcgatcctcaacagcctactttcaccataccgggatgcatatctgccactccgatatctgacatacttgacgcacagctgcccacctggggccagagtctcaccagtggtgccacactgctgcataataagcagccgatggtcaaaaattttggcctggaaagaatcaatgaaaacaaagacatatatctcgagtgcataaaccaattgggccaattagtgggccagaggttacatacggatccacaaagcaggaggtcagggtgcatcattgatactccatcaatagcacaattggatgaaggcttgggtgaactacatcatatgttcaagaaattcaacgccaacattttggtagcactatgcccggaaaccgatcctctatgggagaaaattaaaaaagagtttggtccagaattggggaacaataacatctttttcattcccagcttagatggtgtctcttccgttgatgatgtatataagagatccttgcagagattatccataagagagtacttttacggctcgctgaatacagctctaagcccttatgcaattggcgtagattatgaagacgtcacgatctggaaacctagtaacgttttcgataatgaggttgggaaggtgcagctgttccctgtaacaataaccccaagcaatctacagcacgcagtcgtagctataacattcgcggaaagaagagcagatcaagcagctgtgatcaagtcgcctgttttaggatttgccttgatcacagaagttaatgaaaagagacgtaagctaagaattttattacctgtgccaggacgactccccaacaaggcgatggttctaacctcgtatagatacttagaatag

SEQ ID NO: 2463 - DNA, 915 bp, Saccharomyces pastorianus
atgcttttgtttaagcttatttccccaaaggtgcttgtcgagttagtagccagtaaaaaggttaacagagtcattccggtggatgcgacatggtatctgcccatttggaagcttgatagtaagcaggatttcctgaccaagccacgtattaaaaactctatctttttcgatatcgatgcaatcagcgataccgagtcgccctatccacatatgttccccccaatacaggcttttaatgatgcgatgagtaatttgggggttcagaaagatgatattttggtggtttatgaccgagttggcaatttcagtgctccaagatgtgcttggacattgggagtgatgggacatcctcaagtgtacttgttaaacaattttaacgagtaccaagcgctcaattatcccctagactctactaaggttaccgcgttttctccttacccaaagagccgctatgaagctactaaggacttgagggacgaagaagttgtagactataacgaaatgctggagttggtaaaacgtggtgaattggccaagaaattcaactttttcgatgcgagatccttaggcagattcgaaggtacggcaccggaaccacgtccagacatctcatctggacatattccaggtgctcagccattaccttatactgaactgctagacccggagaccaaagtgtacccagaagatggagaaaccatgcgtgccatggtggaaaaggctttaaaaaaattgcagtgtactctggacccaaccaaaccaactatttgctcttgtgggaccggtgtgagtggagccattatcaagacaggtttggaattagctggtgttccaaatgttaggttgtacgatgggtcttggaccgaatgggtcttaaagtctgaccccaagctgatcgctaagaacagagattaa

SEQ ID NO: 2464 - DNA, 531 bp, Saccharomyces pastorianus
atggcccgtgatatatgtaccttggacaatgtttatgccaacaatctgggtatgctgattaaattggctaatgtaacagttccagatatatacgaggatgcatttttcactgagttattcgcagaagatacctcaatgacaaaaaataaaaaggcaaactcaaaaaaagacgtacgtttcacacagctggcttattacagtgaaatcccagttggtggtctggtggctaagctagttcctaagaaacaaaacgagctatctttaaagggtattcaaattgagtttttgggtgtgttgcctaattatagagataaatccattggctctaaattattgaagttcgcagaagacaagtgctcggaatgtcatcaacacaatgtgttcgtttatataccggcactaaataactctgccaaggaatggttcatagctcatggattcgaacaacatggcgacgtttttaacaatttcataaaacgtgtaaatggcggcgagcaagatgccattctattgaaaaagcatatttcttaa

SEQ ID NO: 2465 - DNA, 1977 bp, Saccharomyces pastorianus
atgcccacaaattacgagtacgatgaagccagtgagacgtggccgtcatttgtcttaacagggatcttaatggttgtcggacccatgacactgcttcaaatataccaaattctttttgggtccaacgctgaagcagtgggttcaggggacgcgaaagaattcaatgacgaagtcttgactaagctgaatgacgaatacaccagtaacgaaatcaaacaattcaggaaaaaatttgacaagaatagtagtaagaagtccaaaatatggaacaagaggaatatcttaatcatcgttggctgggtcttggttgcagtacttctgcaaaggattaacagtaacgatgcaatcaaagacgcagctataaagctattcgatccttacgaaatcttgggtatatcctctagtgcctctgacagagacattaagtcggcttacagaaaactatctgtcaaattccacccagataaactagctaaaggtttgacaactgatgaaaaggacgtgatggaggaaacttatgtacaaattacgaaggcttatgaatcccttactgatgaattggttaggcaaaactatctgaagtacggccatccagatggtccacaatcgacttctcacggtattgctttaccaaggttcttggtggatggaagtgcatctcccttgttagtcgtctgttatttcgcactactaggtttaatcttaccatatttcgttagtaggtggtgggcaagaactcaatcttataccaaaaagggaattcataacgtgactgcttctaatttcgttagtaacctagtcaattataaaccatctgaaatcgtcactctggatttaatcttgcattggttatcctttgctaatgaatttaaacaattttacccagatttacaaccagaagattttgaacaactactacacgaccacatcaaccgtaaagatagtggtaaactcaatgaagccaaattcagaatagtggccaaatgccactctttactacatggtttgatagatattgcttgtggatttagaaatttggatattgcgttgggtgccatcaatactttcaaatgtattgttcaagctgtaccattaactccaaacgctcaaatccttcaactgcccaatgttgataaaaaacatttcagtaacgaatcgaaggatgttcatacactgggtaaactgtttactttagaagattccaaaattggtgatcttcttggtataaaagatcaagcaaaattaaacgaaactctaagagttgcgtcgcatattccaaacttgaaaatcatcaaagcggatttccttgtccccggtgagaatcaggtaactccattatctaccccatatatttgcctaaaagtactagttcgttctgcaaagcaaccgttattaccaaccaatttgattcctgaagacaaattagtggaatcgcaggattttgaatcccaaagagatccgtttgctattatgagtaaacaaccattggttccattttcatttgcgcctcttttccccacaaagagacgttgtaattggtgctgtctggtaagttctcaaaaagatggtaaattgctccaaacaccaatcattgtcgaaaaattatcttataaaaacttaaatgatgataaagatttctttgacaaaagaacaaaattagacttgaccaaagatgacaaattcaatataaatgactgggaaattggaactattaagattccattaggtcaacccgcacccgaaactgtcggtgatttctttttcagagtcattgttaagtctacggattattttaccacggatttggacataaccatgaacatgaaggttcgtgatttaccagctgtggaagaacaagtagacatctattctgaggaagacgatgactactctagtgatgaggatgaaagtgctgctagtgattataccgatatcgacactgataccgagactgaagaggatgaatctaccgaatag

SEQ ID NO: 2466 - DNA, 486 bp, Saccharomyces pastorianus
atgagtaaaaatagatcgtcactacagtccgggccattgaacagtgagttactggaggagcaaaagcaagagatatatgaggcgttttcgttgttcgatatgaataatgatggctttcttgactatcatgagttgaaagtagcaatgaaagccctggggtttgaactacccaaaagagagatacttgacttgatagatgaatacgatagcgaaggacgccatctgatgaaatatgatgatttttatattgtaatgggggaaaagatattgaagagagatcccctggatgaaataaagagggcgttccaattattcgacgacgaccatactgggaagataagtatcaaaaatttgaggcgcgtggctaaagaactgggggaaacattgacagatgaggagttaagggcgatgatcgaagagttcgatctcgatggcgatggcgagatcaatgaaaacgagttcatagccatttgcaccgatagttaa

SEQ ID NO: 2467 - DNA, 654 bp, Saccharomyces pastorianus
atgtcgtggagatatgcgctgaaagcttacgttaccaatcctgaaacagtagatgatggtgcgatgatttactttgatgacaaagtgtccatcatcaaggactcatttgctaaatcggagtgccatttattagtattaccacgatctacacagttaagtagaggtcaccccaccaatataatcgactctaagttcaaaaacgagtttgagccatacatagattctgcaatcaactacattttcaaacactttcaagaaaagttccgaattaagaaaggtgatgacaatgagccaaattgggaagatgatatattacgtgaaaaagacaaatttataagcaaatttatacagatagggatacactccgtgccctcgatggccaatttacacatacatgtaatatccagggatttcaattcgttaaggttgaagaacaaaaagcattacaattcatttaatactggatttttcattagttgggatgatttaccactgaatgggaaaaaagtaggaaatgataaagacatcgaaaccaaatatttaaagaaccatgatctggtttgttgctactgtcaagaaaacttcagtaacaaattcagtttgttgaagaagcatttagagctggaattcaataagcattttgagctcagatga

SEQ ID NO: 2468 - DNA, 1314 bp, Saccharomyces pastorianus
atgagtgaagaacaggaccctctattagcaggattgggagaaacacccatagacagcggtgcccaacaacaacaggaacagcaaccagagcagccacaagaggcagagggacaacgtgaggaggaacctccaagactggaccctgaacaggaggcccataacaaagccttgaaccagtttaagagaaaactgctagagcacagaagatacgacgatcaattgaagcagcgccgtcagaacatacgagatctagaaaagttatttgacaagaccgaaaatgacatcaaggctctacaaagtattggccaattgatcggtgaagtcatgaaggagctttccgaagagaaatacatagtcaaggcctcctcgggtcctcgttatatcgttggggtgaggaattcggtggaccgctccaaattgaagaaaggtgtgagggtcaccttagatatcaccactttaaccataatgagaatcctgccaagagaaacagatcctttggtgtacaacatgaccagctttgagcaaggtgaaatcactttcgatggtatcggtggtttgaccgaccaaatcagagaattaagagaagttatagaactgccattaaagaacccggaaattttccagagaatcggtatcaaaccccccaaaggtgttctgctatacggacctcctggtactggtaagactttactggccaaggcagttgctgccaccattggcgctaacttcatcttttccccagcatctggtattgtagataaatatattggtgagtctgctcgtattattagagaaatgtttgcatatgcgaaggaacatgaaccttgtatcatcttcatggatgaggtagatgccattggtggtcgtagattcagcgaaggtacctccgccgatcgtgaaatccaacgtacactaatggagctattgactcagatggacgggtttgataacctgggccaaactaagatcatcatggctacgaacagaccggatactttggatcctgctcttttgagacccggtagattagatagaaaactggaaattccattaccaaacgaagctggtagattagagatttttaaaattcatactgcaaaagttaagaagacaggagagtttgatttcgaggctgctgtgaagatgagtgatggttttaatggtgctgatattcgtaactgtgccactgaagccgggttctttgccataagagatgaccgtgatcacatcaaccctgaagatttaatgaaagctgtaagaaaagtggccgaagttaagaagttggaaggtactatagaatatcaaaaattatga

SEQ ID NO: 2469 - DNA, 1044 bp, Saccharomyces pastorianus
atgccttttgctcagattgttattggcccaccgggttcagggaagtccacatattgtaacggatgttcacaatttttcaatgctattgggagacattcccaggtggtaaatatggatcctgccaatgatgctttaccttacccgtgtgctgtggatattagagactttataactctggaagagatcatgagagagcaacacctgggccctaatggtggtttgatgtatgccgttgaatctttagataagtccattgatttatttatactacagatcaagtcacttgtagaagaagagaaggcgtatgttgtgtttgactgcccgggacaagttgagctgtttacgcatcattcttcattattcagcattttcaagaaattagaaaaagaactagatatgaggttctgtgtggtgaatttaattgattgtttttacatgacatctccttcacaatatgtctctattttgctactagcattaaggtctatgctaatgatggacatgcctcatatcaacgtcttttcaaagatagatatgttgaaatcatatggtgaattgccatttagattagattattacacagaggttcaagatttggattatttggagccgtatattgaaaaagaaggttccggtgctctgggaaaaaggtatagtaaattgactgaaacaatcagtgagctggtttctgatttcaacctggtttcctttgaagttttggctgtggatgacaaagaaagtatgataaatctccagggtgttattgataaagctaatggatatatatttggtgcatctgaagtgggcggtgacacggtttgggccgaggcctcgagagaaggtgcattgctcgcaagctatgacattcaagataggtggatagataataaagaaaaatatgataaagaagaagaagagaaacgggctgcaatgttgaaagaacaagaactacaaaataaagaagttaatatagacgaagaagacgagtggcagagtgcactaaacgactgggaggaaaaacaaggcacagattttgttagatag

SEQ ID NO: 2470 - DNA, 321 bp, Saccharomyces pastorianus
atggcacccacacaattggaaatcaaagtcaaggctttaaagaggctagtcaaagaagagggttactaccaacaagaactaaaagatcaagaagctcatgtggcgaaactcaaagaggataaaagcgttgattcatacgatttgaaaaaacaggaagaagttcttgatgataccaaaagactactgcccactttgtatgagaagattagagaattcaaagaagatttggcacaattcctagaatcgtaccaaggtactgaagatgttagtgaagcaaagactgtcattacctctgcacaagaattagtcgcatctaaataa

SEQ ID NO: 2471 - DNA, 2079 bp, Saccharomyces pastorianus
atgcccaatctattgtcaagaaaccccttccacggtcatcacagcgatcaccatcatgatcgtgataattcgtcctctaacaacccgccgcagttgattagaagctctaaatcttttttaaacttcattggtagaaagcagagtaatgactcattaagaagcgagaaatctacagattcgatgaaatctaccacaactaccaccaactacaccacatcaaacatcaacaacaactcccatagccataccaacacaacaacaatttccacaaacaataataataacaataacaataacgaaacacaccaccatcataatgtctctcacgcactccatgactacacttctccagcatcaccgaaacaaactcactccatggccgaattgaaaagattttttagaccctctgtaaataaaaaactatctatgtcccaattgcgttcaaaaaaaaatagcactcattctccaccgccatcaaaatcgacttctacagtcaacttaaataaccactatcgcgctcagcacccccacggttttacggaccattacgcccatactcaatctgctataccgccgagctcagattccatcctgtctctgtcaaataatatcaacatctatcatgatgattgtatcttggcccagaagtacgggaaattgggtaagctactgggttccggtgcaggtgggtccgttaaagttcttgtgagacctactgacggtgccacttttgccgttaaggaatttagaccaagaaaaccgaatgaaagtgtcaaagattatgccaagaaatgtaccgcggaattttgcataggttccacgctacaccatccaaacgttatcgaaacagtcgacgttttctctgattccaaacaaaacaaatattatgaagttatggagtactgtcctattgatttctttgcagttgtcatgacgggtaaaatgtctcgtggtgagatcaattgttgtttaaagcaactgaccgaaggtgtgaagtatttacattctatggggctagcacacagagatttgaaactagacaattgtgtcatgacttctcaggggattttgaagttgatcgattttggtagtgctgttgtatttagatatccttttgaagatggcgtaactatggcccacgggatcgtgggtagtgatccttatttggcgcctgaagtaatcacttctacgaaatcatatgatcctcaatgcgtcgacatatggtctattgggatcatatattgttgtatgatgctgaaaaggttcccatggaaagctcccagagattccgatgacaatttcaaattgtactgtatgccggatgatatagaccatgattattcggaatcagccaaacatcatgaagagttattaaaggaaagaaaggagaagcgccaaaggtttttgaaccacaatgactgctccagtatcagtcaacagccaccaatccatgaatcggattcaaagccggctcaaaatcaaatcccaaccccaacacctacacaagataataagaacagtaataaacctgagattgtgattgaaccagaagccggacaaaaagaagccgaggacaatgataacgatgacagcaataatgataaggaaagtacgccagctaacgacaaagcaagcactaaaattaatgttattgcggacggaaatgataatgatggtacacaagctccagtagacgccgacgttaacgccaatgtgaacaagaatgttaatgcagataaagctcctcatggacaacaacagcaccacgacagacgccatagtaattctccggacaataaattgatgcaacaacataaaggtcctcatcataaaaagatcattcacggcccataccgtttgttacgtctattgccacatgcttcaagacctattatgtctcgtattctgcaagtggatccaaagaagagagctaccttagacgatatttttaatgatgattggtttgcctctattgccgcttgtacgacggattctaaaaatgcaactattagagcacttggtcaccatcatacgttggttagagaggaaaacgctcatctagaaacctataaggtttaa

SEQ ID NO: 2472 - DNA, 984 bp, Saccharomyces pastorianus
atggcatcatcagtccccgggcccatcgaattgcccgcatcccgctatgatctctccacgtactggggcagaatccgccattgtgcaggaatctccgatcctaccatgttgctcaccagtgagaaggacctggcgcacgccaaagaaatcatcagtgcgtaccgccatggggagttgaaggagaccacgccggagttctggcgggctaagaagcagctggactccaccgtgcatccggacacaggcgagacggttcttctgcccttccgcatgtcctccaacgtgctgtccaacctggtggtcaccgtcgggatgttgacccctggtttgggtaccgcaggtaccgtgttctggcaatgggcgaaccagtcgttgaacgttgccgttaattctgcgaacgccaacaagtcccatccaatgtcgacgtcccagttgctcaccaactatgccgctgcagtgacagcgtcgtgtggtgtggcactcgggttgaacaacctggtgcccaagttgaaaaacatctccccacattcgagattgatcatgggccgtctggtgccctttgccgccgtcgtgagtgccggtattgtcaacgtctttttgatgagaggcaatgagatcagaaagggtatctctgtgttcgacgcaaacggcgatgaggtcggaaaatcgaagaaggctgccttcatggctgtcggggagaccgccctgagtagggtcatcaacgccactccaacaatggtcattccacctttgttgttggttagactgcaacgcggtgttttgaaaggtaagtcccttggggtgcaaactttggctaacctggcgttgatctcagtcaccatgttttccgccctgccttttgctttgggtattttcccccaaagacaatcgatccatttgagcaaactggagcccgaattacatgacaagaaggacaaggacgggaagacaatcgaaaaagtctacttcaatagaggtatttag

SEQ ID NO: 2473 - DNA, 1383 bp, Saccharomyces pastorianus
atggcggaagataagtcgcaggtcaagatcaggtttttcactcgtgagaaggatgaagcattacatgtccaagaaacaccaatgtacgcacccatctctttgaagagatacgggctgtccgaagttgttaatcacctaatggactcggataagcctgttcctttcgatttcttgattgacggtgagctgttgcgtacttcattgcaggactacttgactaagaaaggtctatccagtgaaacttcgctgaatgtggaatataccagggctgtcctgccaccatcgtatttgaacagtttcagcaatgaagactggatcagttccctagacgtgggcgacaactcaaaacacatcatcagtggttcttatgatggtattgtccgtacttggaatctatcaggtaacgtgcaaaagcaatacagtggccattccggtcctatccgtgctgtcaaatacatctcgaacacaagactagtttcagccggtaacgaccgtactttaagactatggaaaaccaaaaacgatgacttgaaattgactccgcaacaacaagcagccgaagacgaagatgaagaagccaatattgaagatggtaagaccttggcaattttggaaggtcacaaggcaccagtcgtctccatcgacgtgtccgacaactccagaatattatctgcgtcttacgataactccattgggttctggtccactatttacaaagaaatgaacatcgtggatccattagaagacataaataacccaaataataaaatatccactgcagccaggaaaagaagaaagttgacgatgaaagatggtaccatcagaagacgtgctccactatctctattagaatcccacacagcccccgtggaacaggtgatttttgactccactgataacaccgtcggttattccgtatcacaagaccatactattaagacatgggatttggtcaccgctagatgcatagacacaagagccacatcgtactcgttactttccattgcacaattgccctccttgaacttgttggcgtgcgggtccagcgccagacacatcacattgcatgatcctcgtttaggggcatcttccaaggtcacgcagcaacaactaattggtcataaaaactttgtctcttcattggacacctgtcccgagaacgagtacatcctgtgctcaggttcccatgatgggactgtgaaagtatgggatgtcagatccacttctccaatgtacactatcacaagagaagacaaatcggttcaaaagggtgttaacgataaagtctttgctgtcaagtgggcagaaaaggtgggcattattagtgctggtcaagataaaaagattcaaataaacaagggagacaacatcttcaaaaattaa

SEQ ID NO: 2474 - DNA, 1287 bp, Saccharomyces pastorianus
atgctgcgagcgacacttaaagaatatttaactatgtctaagaaagttatagtcattgctggtaccacgggagtgggaaaatctcaactgtctatacaactagctaaaaaattcaacggtgaaattatcaattcagattctatgcaggtttataaagatatccctatcataacaaataagcatccgatttcagaaagagagggtattcctcaccacgtaatgagccatgtcgattggtccgaagaatactactcgcaccgttttgaaagcgaatgcatcaaggccattgaagatattcacaaaagaggcaagatacccatcgtggtaggaggcactcattactatttacagaccttgttcaacaagaaggtagaaacgcggttttcggaacgtgaactcactcaggaacaattagagattttgcaatctaatgaccccgatatcgtttatagcactcttgtggaatgcgatccggatatcgccaacaagtaccatcctaatgactatagaagagtacaaaggatgctggaaatttactataaaacgggcaagaagccaagtgaaacgtttagcgaacaaaagatctccttaaaatatgacaccttatttttatggttatatagtagaccagaaccacttttccaaagactagacgatcgtgtggacgtaatgcttgaaagaggcgccctacaagaaatcgagcaattgcacgaatattacaagcaaaataatttcactccggaacagtgcgaaaatggtgtttggcaagtcatcggcttcaaagaatttttaccatggttaacaagagaacctaatgataccactgtgaacttagcagattgtatagagcgaatgaaaacacgtactcgtcaatatgcaaaaagacaagtgaaatggatcaagaaaatgcttatacccgatatcaaaggtgatatttacctgctggatgccaccgacctctctcaatgggacgtcaccgcttcccaaagggcaatcgccatttccgatgactttgttaataacttgccggtgaagcaagaaagagcaccagaagccctaggggagctattatccgagggagaaactacaatgaagaagttggacgattggacccatttcacttgcaacatatgtcgcaatgcggacggtaaaaacttggtagctatcggtgagaaatactggaatatacatttgcgcagcagaagacataaatctaatttgaaaagaggcgcacgtaacgccgactttgaaaaatggaaagtacacaagaaggaacctgctgaataa

SEQ ID NO: 2475 - DNA, 1986 bp, Saccharomyces pastorianus
atgagtgagcttcttggtattccgctcaaacgtactttagaagttgattttgtcacagagctgtcaaaactaatcgatgctacatcctttcaaactgcatcctttttccaatcggatatatctaaagtcgctgccgcaaggaacaatgccataactcctgatatctcagatagtggactcgatgctttgaaaaagtactacgcgattctgcttcaattggagaagaagttcccaaacaatcagattgaatttaaatggtttcaaacattatcacagaagtcacatggttgtggccaatattcattgcaatgggaaaaattaaccatcatttataacattgggtgcatgtattcattgttggcgttggatagcaacagcgattcggcagaatccttaaaaaaatcatgcctttacttccagattggcgccgggtgctttaagtatgtactggaccatcaagcaactctcaagacagagacagtagttgatgattcgacagctaaagcattgacctcattaatgctggcacaagcgcaggagtgtttttggttcaaagctgtacaagataaacataaagactccttgatcgcaaagttatcacaacaaatcgtggacttttatgctgaatccataagggactcccagaaaggtaaactcatcagaaatgattggaccaatcacttgaaggctaagaaggcctattttgatgcagtgacttattacagaatggcattgtcttttaacgaaaagaagcagttcggtagcatggtgaaagctttgcagaccgcactaaaatttgttaatgaatcaacgttatcttcaaacgcgaagttcaaaactgtgattgaatctgctctgaaagaagctcaaagggacaatgatttcatttacttgcaacaagttcccactgagttaccaacgattcaaccggcttctatggttaaaccaactcccaccgtaggcttattaccatccatcggcgatagcgagctgttgttcaaagacctaattccgatagaggttatggattattgtacggcttataatgaaaggcaagataagtacattgaacaacgtgttacaaaccctctcacttcgttaaataaattactcaaggagtccatgactaccttccaaataccacaggaaattaaaacaattagcgaaaccgaactaaaacaataccaagcgtcgctcaataatcttcaagtgaataataaaaatatacaaagtgaattagataacataactaatattttgaatgaagaagccttgagtgataaccaactccgactaaagcacgggactctacattggactttacccgaatcatcaactatcaacgcaatatattacgataaattgaataaactcaaagaatacatcaatcaaggtagtgcgattgacaaacaaacgaatgtgctgtttcagaccattgacaaagctttgataacatcggagatcaaattaccggtatccaacgaccccttaacaaataaaatcaaaaatgtcatacaggagagaagcgagcatattgaaaagacgaagcgtaggtcttctgaatatagaatacttccaaaaattatttcatcgtataaaaaaaatggcacaacagactttgaacccattttcatagaacatttgaagtattttgatgaagatctgagatacgttgatagtacgaagcaagaaaatatgaagttgatccatgagatacagtttaaggaggagaatacaacaaataaaaacggtgtaaaaaccaaaaaaatggaaagaacagatcccagagagttatatattgaagatctgaaatattctctacggttgctcgaagaggtaaaagataatctaaatgccgggaccaccttttatgaaaatttaatcaactctacaaacacattttgcaatgaagtacgagagtttgatgagacaagaagaattgagaaaacaaagcttgatgaaagcctcatacttgaagggcaataa

SEQ ID NO: 2476 - DNA, 939 bp, Saccharomyces pastorianus
atgagtacaaataaagaaataataaggaataatgacttgcgaggtttgattgacgataagaggaagttagtcaatgaaataagagaatttgaaaaatctattaaacctttagagtttgaatcataccaggattattttcttattaaaacgtttagaagaggaatttctgcaagtggtcatgtagatattgatagtttgagaaacaaagaatatgggatttactataaaaagattaagagaagctccacacaagatgttggcgaacctatcccatccaacccttcctcttcatcctcttctaccagatcaagctcgtcaattgacatgagtgatacagaatattcaggtgaaaacacttctgctacggctgacaataatcccagtggtagaagaagacgcaccaggtcacaagttacacaaagggaaaacagtgtatcaataccattgccctcgatacgtgaagccaggatagatcatgacgatgaggaaatttcagcgacagatagtagcgaattgccatttcctgttccaatttcagaagttgagaacatcgacattggttcagatatcactgagagagacagcatcagaagaaggtcatctagaatatcagaaagggacaaaaggcgttctgagtctaggcccgattcagacgtagatgaagaaggcgacgaagaagacacgggcgaaggagagactaaaatccaagacctctacgaaagtctggtacctaaaattctggagccacgtaggagatcagattggattctgcccccaagggcaagatatacacctgagaagcaaatgaggaccaaaccgtcgtttaagagtataaagattaatgagctggttggaaataaaaggatacgaagtatattatctaggttcgaaggtggcgtcgcaggtatacggaaaagagattgggattcaacccagtaa

SEQ ID NO: 2477 - DNA, 858 bp, Saccharomyces pastorianus
atgcaaaacgagccaatgtttcaggtccaggtggacgaatctgaagatagcgaatggaatgatatcttaagagccaaaggtgtgatacctgagcgtgcaccctcacccacagcagaactcgaagaagcattagaagaagcacttgctaaacaacatgaaaacagattggaggacaaagacctatctgacttggaagaactagaagatgatgaagatgaggattttttagcagcatataagatgaaaagattaaatgaaattcgtaaactacaagaacgttccaaatttggtgaagttttccacattaataagcctgaatacaacaaagaggttacattggctagtcagggaaaaacacacgaaggcccaaaaagcgacgataatggcgaagaaaataatagcggtgtctacgtgttcgttcatctatcattgcaaagtcagctacagagtagaatcctttcccaccttttacaatcagcagcatccaaattcaaagacataaagtttgtagaaatacctgccaacagagcaatcgaaaactacccagaatccaattgtccgactttgattgtgtattaccgaggtgaagttgttaaaaacatgataactttattagagttgggaggaaataattccaaaatgaaggatgttgaagattttatggtaaaggtcggtgccgtatcagagagagacaacagactaattataaatcaagatgatgaagaatcaagagaagaaagacaattacatttcgctaacaagaaatcgatcagatcaggcataagagggaaatttgatgtcggcataggtaatgacggtggtaatatcaacgatgatgatgacgggttttttgactaa

SEQ ID NO: 2478 - DNA, 693 bp, Saccharomyces pastorianus
atgactaaggaaataccatattattccgataacgacgataataacatcattagactattcatcattagacatggacaaacagagcataacgtgaaaaaaatactacaaggtcacaaagatacctcgattaacccgactggggaagaacaagccactaaactaggacattatttacattcaagaggtattcactttgataaggttgtgagtagtgatttaaaaagatgtaggcaaacgacatctttagttttaaaacattccaaacaagatgatgtgcctacatcctacacttcaggtttaagagagcgttatatgggtgttatcgaaggtatgcagatcactgaggccgaaaagtatgctgataagcatggtgagggttcctttagaaatttcggcgaaaaaactgacgattttgttgccaggttaactggttgtattgaagagcaggttgccaaagcgtcggatgaaggtgcaaagaacctagcgttagtgagtcatggtggtgctattaggatgatattgcaatggttaaaatatgaaaacaagcatgcccataagattattgttttcaacacctccgtcactatagttgactatattaaagattctaaacgattcgtcatcagacgtgttggtaacacccaacatcttggtgatggcgaatttgtcgtaagcgatttgagattacgttaa

SEQ ID NO: 2479 - DNA, 732 bp, Saccharomyces pastorianus
atgcaatattcaaaatatgagggcgcacacgatggcaacgacacagtagtcaattgctcagaagatgaagctctcgagaatgatagaatcatcctgggttataaaaagagattgataaaaattgaagtccagatgcaacaccttttagatgatttgaatttggatccgcatcagattgaaccaagtcttattgctttgcagaaacaccatgacacatttcaacaacttctacaggaaaggaagaacactttgcaagggcaaaattatgctcatcagcccagacaagaaagtatcgataatcaaggaccagtagggccaaggatgaatctaggcgacaaattcatgaaatttcaacagagcaatgggcaattcttcgatgaagagcatattttaaggattctgcaaaaaaatacagactttaaaaattattttcaagtcgacaaaaatattgagcaaaaggtactgctactcgcaatgtaccattgcctcaacgggccaacgcgcttacaccaggtattgaatgttgatggaatcatacataatagcagtattagaaccatattgggaaaacaggtgtctagttccaaatggactgtgtttctgtatgacgtaaaattagctctgctggcacataagccggatgtgccgaacctggaaaccagtaaaatggtcgtcaggtatggtgatttatttccttgtgcctcgtactttaaagatcatccagcatactaa

SEQ ID NO: 2480 - DNA, 420 bp, Saccharomyces pastorianus
atgtggaaggctgtattgaatgcttggaacggaaccgataatcaaagtgatgtcgtttcgggcattacctcttataaatttgaagacatgaaaagaattgtggaaaaacatgaccccaatgtagtgttggtagacgttagagaaccatctgagtactctgtggttcgtattcctggctctattaacgtgccatatagatcgcaccctgatgcgtttgccttggactcgctcgaattcaaggaacaaaccggcattccaaaacctgacactgaaaaagaactgattttctattgtgcatctggtaaacgtggagatgaagctcaaaaagttgcccacaccaatggttattcgaacacttcactttaccctggttcaatgaacgattgggtcgctcatggaggtgacaaacttaatatttag

SEQ ID NO: 2481 - DNA, 450 bp, Saccharomyces pastorianus
atgtttagacacagtacaggtatactctcgagaacaatctcagcaaactcgccttcgctaatcttgaggacgtttacaacaaaggccccaaaaatttatagttttgaacaggttaagaatctggtggaacatcctaatgatacaaagctactcgttgacgtgagggaacccaaagaagtggaagattataagatgccaacaacaataaatattccagtaaacagtgcccctggtgctcttggattgcccgaaaaggactttcacaagatctttcaatttgataaacctcctcaaaacaaagagttgatttttctttgtgcaaagggtgtaagagcaaagactgcagaagaattggctaggtcttatgggtacgaaaacaccggtatttatcctggttccatcactgactggttagctaagggtggtgccgacgttaaacccaacaaataa

SEQ ID NO: 2482 - DNA, 966 bp, Saccharomyces pastorianus
atgctaatccatcatatttataagtttcttctaagtcttttcattattgatttagtgaaagctcagagcttttacgactctgatttgcacatacttgaactaacaccgaagaactttgataaagccgttcataatacaaactatactacactagtagagttctatgccccatggtgtggccattgtaagcagctgtcaagcacatttcgtaaagcagcaaagaaattggacggtttagttcaagtcgctgcggtaaactgtgacctaaacaaaaataaaggtttatgcgctaaatacggtgtcgagggattccccacattaaaggtattcagaccccctaaactggatctatccaagccaatgactgatgccaggaacagtttcaaaagtcattctgatgaagcatatacaggcgcaaggaccatcgcgcctatcgtcgacttttctctttcaagaataagatcatacgttaagaagcttgtccgtatagaaaaacttggatctctgctcgaaaaatctcccaaactttccgtagttttattttccaaacaagacaaactttcaccagtctataaaagtattgctcttgattggttgggcaaattcgatttttattctatcacaaacaagaagctgatggaagtagctggtgtgagtccaccttatgaaaaaattccaaagattttcaaatatttgcaggaaatggttcctgaacaacaacacagcgaaaagagtaagctggtcgttttcgatgctgccaaagatgagttttgggagtacaacgaaagtgcaatcaacaaacttggtgtttctaaatttttccacgacacttttgatatttcgccaaacgaaggcccgctcagtaaacgcttcgaatatatcaattatttaaagactggtaagaaaccaagcaagatgaagaattttcaaccaagaagcaaagacgtcaagcatgacgaattataa

SEQ ID NO: 2483 - DNA, 5109 bp, Saccharomyces pastorianus
atgaacataccacagcgccaattcagcaaggaggaagtcaaccgctgctatttgagatggcagcagttgagaaacgagcacgggatgaatgctccaagcgtaccagagttcatatatctgaccaaagttttgcaagttgctgctaagcaacaaccagaattgcagatgcagcgtcgacagcaaggtatgtcggtttcccagcagaacactgcctcagcttctccgaaccaagtagacttgccaaataatacggcctcgcacatctctgcttccgcttctccaaatctggctccaaatatgccattgaatggcagtgagccctttgctactactgctcgccaatcgccaatcatgtccgcgcctattccgctggacaataatagtaataataacaacattccagagcaacgacagtcctcgatgacctcattaaatggaaataacttttcacagccggcagcgaacaacgtggaaaatgttgctgacaagccagcgaacactacccataacggctataacccgaatatttccgaaggacagccccaaagtggctcgctgcgggaccatactatgcaagatttaaatgcgcttccaggttctcaaataaattccccgatgcctcagcaaacgcagatgcaacaggcccagtttcaagcacagcaagtgcaattccaagcacagcaagcacaacaaacgcaagtgccgccacaacagggaagaagattgcctatgacaatgttcactgcagagcaatccgaattattaaaagcccaaatcacatctttgaaatgtttagtaaataggaaacctattccacttgaatttcaagccgtcattcaaaaatcgattaatcatcctcccgatttcaaaaggatgctactgtctttgagtgagtttgctaaaagaagacagcccgtagatcaaaatggccaattaaataacaacaagagcaacggcatgcaacaacccactattgaggctgaacataataatatcaacctcgatcaaactgcgtccgaagttgcaaacaatacacctttgggagataaaaatgttgatgttacatccgttccatttattgggccttccaacaaacctgacgtaaatagtccgtccgttaaaaacttacaagctgtaagtaatactcaaacagcacgggccaattcgaagatagaggagaataaggctagcttaaatgaagacaaaaccgtatccattagcgataaaatactaaccgaacaaaacaagcctccaacaccgcagaagcctgttcctttgaatgttcttcaagaacaatataaagaaggtataaaagtggttgatatagacgaccctgatatgatggttgactcctttacgatgccaaatgtctgtcaaagtaatattgattatctgactttactagctaattctgatcatgcaagatttctgattgaacctggtgttttaccggttggtatcgacacgcatactgctactgacatttatcaaactttaattgcgttaaatcttgatgctacagtcaatgattgtctagacaaattattggatgatgattgtgagggatcagtcaaggaagacgccctttatgattattatgcgttgcaattgttacccctgcagaaagccgtaagaggtcatattttgcaatttgaatggcaccaaaattctttattgaccaacacacatccaaattttctatctaaaataagaaatgtcaacgcccaagatgcgttattgacaaaccagctatacaaaaaccatgaattactgaaattggaaaggaagaagcttgaagtggtagcaagattgaaatcgatgaataaatctgcaatcaaccaatataacaaaagacaagataaaaagaataaaaggttgaaatttggccataggcttattgccacacatgctaacttagaaagagacgaacaaaagagagccgaaagaaaggcaaaggaacgtctacaggcattgaaagcaaatgatgaagaagcatacataaaattattagatcaaacaaaagatacgagaattacacatttgctgagacaaacgaacgcgtttttggattccttgacgagggccgtgaaagatcaacaaaaatacaccaaagacatgattgattctcatataaaggaaacatcggaagaagttgaggatttatctatggtgccaaagatgaaggacgaagaatatgacgaagacgaggatagtgctaatatcgattattataatgttgcacacaaagtcaaagaagatattaaaaagcagccttcgatcttggttggtggcacattgaaggactatcaaatcaagggtttacagtggatggtttcgcttttcaataaccatttgaatggtatattagcagatgaaatgggtctcggtaagacaattcaaactatttcactacttgcgtatttatatgaaatgaagaatattcgtggtccatacctagtcattgttcctttatccacattgtcgaattggagcagcgagtttgccaaatgggctccgagcttaagagctatatcgtttaaaggttcgccgaatgaaagaaaatccaaacaggctttgattagggctggtgaatttgatgttgtcttgactaccttcgaatatatcatcaaggaaagagctcttctatctaaagtcaaatgggtccatatgattattgatgaagggcatagaatgaaaaatgcgcagtccaaactttccttaactttaaacacacattaccacgcagattatagattaattttgactggtacaccattacagaataacttaccggaactatgggccttactaaacttcgtgctgcccaagattttcaactccgtgaaatcatttgatgaatggtttaatactccctttgctaacactggtgggcaagacaagattggattgagcgaagaagaaactcttctagtcataagaagattgcataaagtactgagaccctttttgttacgtcgtttgaaaaaggatgtggaaaaggaattaccagacaaagtcgaaaaagtagtaaaatgtaaaatgagtgcactacaactaatcatgtaccaacagatgttgaaatatcgtcgcttgtttattggtgaccaaaataataagaaagtggtaggtttaagaggattcaataatcaaatcatgcaattgaagaaaatctgtaatcacccttttgtgtttgaagaagttgaggaccaaataaatcccaacagagaaacaaatgacgatatttggcgtgttgccggaaagttcgaactattggataggattttacccaaattaaaggcaacaggccacagggtactgattttttttcaaatgacccaaattatggatattatggaagattttttaaggtacattaatatcaagtatttaagacttgatggtcatacgaaatctgacgaacgtagtgaattgttacgtctatttaatgcgccaaactcggaatatctgtgctttatcttgtcaacaagagcaggtggtctggggttgaatttgcaaactgcagacaccgttattatttttgataccgattggaatccacatcaagatttgcaagcgcaagatagagcgcacagaatcggccagaagaatgaagttaggattttaagattgatcactactaattccgtcgaagaagtcattttggaaagggcttacaaaaagctagatattgacggtaaagttattcaagcaggtaagttcgataacaagtctacctcagaggaacaagaagctttattgagatccttgttggatgcagaagaagaacgtagaaagaaaagagagtctggcgttgaagaggaagaggagctgaaagattcagagattaatgaaattcttgcaagaagcgacggcgaaatggttacacttgccaagatggacgaagaaagatcaaagagggaagaggaactaggggcaagaagccgccttttggaaaaatgtgaattaccagatatctacagtagagatatcggcgcggaactcaagcgcgaagaatcagaatcagctgctgtttacaatggaaggggtgcgagagaacgcaagacagcgacttacagtgataatatgtctgaagagcagtggttgagacagttcgaagttagcgatgatgagagaaatgagatgagggcaaggaaactaagaaaagaatacgaggccaaaagtgagacagtcaatgaggatgctgagatcaagggtgaatacattgatattgaaaatggtgaagctgaaaataatcaagactccattgagcaccatgtagatacagatccggttatgaatgatgatgaatccatctctaaaaagagaaaagctgggagaccgcgaggaaggcctaaaaaagtcaagctcgagacacctgaagatggtgaaccattaacacttgaatcgagccccgtgactggcgataattcgccaagtgagggctttgtggacgttccaaaaccacaaactgcaggcaaaacatctgttaagtctgccagaacctcagcgaggggccgtggaagaggccggggtcgtggtcgtggtcgtggaagaggaagaggaagaccgccaaaggtaagaaatggccttgattatgttcgcacacctgctggtgccactactcctattgatataagagaaaaagttgccaaacaagcccaagcgttgtacgactttgctcttaactataaaaatgaagctggaagaaaactttccgatattttcttggctaaaccctctaaagtgttatatccggattactacttaattatcaagtaccctattgcctttgataatatcagtactcatatggatctattagcttacaactctctcaaagagacccttcaagattttcatttgattttctctaatgccagaatatacaatactgagggctcagtggtatatgacgactctttggaactggaaaaagtggttatggacaaataccatgagataatgggtgatgacacaccaatcagttttactgaatttgatgaacagtatgctactaaaccactagcgttgccccctattgtaccttcaaccctcgccgaatctcttgctgatgaggcggatgagaccatgacagaaacaagtatatag

SEQ ID NO: 2484 - DNA, 4419 bp, Saccharomyces pastorianus
atggatattccctcgccagatacaaatcctaatggtcacaggagcagtaggaaccgaagagctccaagggcctctttttcttccacaacgacagcttccactgcaacaacattaacatccgccacagtcttggaccaaaacaactcagaaccgtatgcaggcgcgacattcgaagccgtgccaagttccatcgtgtcattccatcatccacattctttccagtcaagtaacctcccaagtccgcgtttgtcgggaaatttcgaacaaagaggccgccggttgactgagtcagatcctctagtgttatcttctgctgaacagtcaagaagctcttccagaaatccctctcatttcagattctttacacaagaacaaatatttaatgccgaagggtcctcgacactagaaaatacagactatgacacggtatgggatgcagcccctgcttacgaacaagatagaatctacggcactagctcgtcctctagacgttcttccatgcgaagtttctccagaacttcgtccatgtcaaatgccaactcctacagagctttcaatagcaggggccgttccgattcgagagctccgcaacgattagcaggaaatctggatgccggatctgtttatcattccatcacgaattcatcttccagcttatcgagatataccacgagagagagaatccccattgaattagaaagccaaacggacgaaattttagaggacggatcttccacgcattccttcgaatcctcgaatagtagacgatcttcaagtgagaacaatagaggaagtatttctggccatgacgaagtccataaccagcatagcgaatatttaaaacctgatcaccatgaaaagttttaccctcagtatgtacctaaccttcattaccaaagattttacattgcggaagaggacttggtaattggtatcgccgcttatgaaacctccaagtttagaaattttatctacaacatgtgctgtctcttgtcctttgggttagtttaccttttggtgagatggcttcctcaccttagggtgcgatattatggtgtcaaggtgccattggccaaggcagaatgggtcgtgatagaaaatgaatttggtgaatttgccatacaaccgattgatagacagtggtataacagaccattaagtactgttctgcctttcgagaaatactctaacccgctagaggaaacaaacgaaacgtcattcagccatcatcatgctaatgaagttaacccaaacataccgattttgatcacatttgaatacagatatatcaaattcatttactcaccactagacgatctattcaaaacaaataataactggacagaccccgactgggtggatttaggtactttatcgaatgggttgagtaagggcgtccaagaagacagagagcttgcatttggtaaaaatcaaattaatctaaggatgaagactacttcagaaattctgttcaacgaggtgctgcacccattctatgtctttcaagtgttttctataattctgtgggggatagacgaatactattattacgcagcgtgtatttttttgatttcagtattatctatttttgattcattgaacgaacaaaaaaagatatcaaagaacctggccgaaatgtcgcacttccattgcgatgttcgtgttttgagagataaattttggacaaccatcagctcttcagaattagttccaggtgatatatatgaggtatcggatccaaatgtaaaaattttaccctgcgattctattttgctgtctagtgattgtatagtcaacgagtctatgctaacgggtgaatctgtacctgtttcaaagtttcccgccacgcaagaaacaatgtatcaattgtgcgatgattttcaaaatacccaaatatcgagtttcgtttccaaatcgtttctatataacggtacgaatatagttagagctaggattgccccaggccaaactgccgccttggctatggctgtaaggacaggcttctcaacaacaaagggatctctggttagatctatggtcttccccaaaccgactggtttcaaattttaccaagattcattcaagtatattggatttatgtcgctgattgccatttttggtttttgtgttagttgttttcagtttattaaacttggtttggacaagaagactatgatattaagggctttggatattataacaattgttgtgccaccagctctgccagcaaccttgactattgggacaaattttgctttaagcagattaaaggagaaaggtattttttgtatttctcctacgaaagttaatataggtggtaagatcgatgttatgtgtttcgacaaaactgggacactaacagaagatggcctagatgtattgggggttcaaatatcgcaaccagcaggggtaagaggtcacaaatttggagaattattagacgatgttcgccaagtatttcccaaattctctttgaacgactgtaattctccactagacttcaaatccagaaactttttcatgtcactactaacatgtcattcactgagatctgtcgatgggaacctgcttggtgatccgttggactttaaaatgttccaattcacaggctggtcgtatgaagagaattttcaaaaacaaacattccattcgttgtatgaaggaagacatgaaggtgatgttttcccagaaaactcagatattatccctgcggtagtccaccctgatggcagtaacccagaaaatacgtttactgataatgatccccacaatttccttggagtagtgagaagcttcgaatttttgtccgaattgagacgtatgagtgttattgttaaaccaaataacgaagacgtgtattggtcattcactaaaggtgcaccggaagtaatttctgaaatatgtaacaaatcaactctaccggccgactttgaggatgtattgcgtagctatactcacaacgggtatagagttattgcatgtgctggaaagactttatcgaaaaggacctggctgtactctcagaaagtttccagggaggaggtcgaatcaaatctggaatttttaggattcatcatcttccaaaataaattgaaaaaggaatcatcagaaactttaaaaagtctgcgagatgcagacattagaacgacaatgtgtaccggtgataacatactaaccgcaatttctgtcggtagagaagcgggtttgatacaatgtccgcacgtttacgttccatctataaatgatacacccttacctggtgaaactgtaataatatggagagacgttaatgaaccagataatattttggatacaatgactttgaaacccgttaaagtgggaaataaccacattgagactttatctagaaatgagtatactttagcggttactggcgatgtctttagattgctgttcagagatgaaaacgatatacctgaagaatatttaaacgaagttctgttgaagtcgtccatttatgcaagaatgtcaccggatgaaaaacatgaattgatgatacaactgcaaaacctagactataccgttggattttgtggtgatggtgcaaacgattgtggtgccttgaaagcagcagacgtaggtatttccctttcagaagccgaggcgtcagttgctgctccgtttacttcaaaagtattcaatatcagttgtgtacttgatgttatcagagaggggcgtgctgcgttagtcacttcctttgcttgcttccaatacatgagtttgtattcagccatccagtttgtcacgattacaatactttacagccgtggttccaatttgggtgatttccagtttttgtacattgatttactattaattattccgattgcaatttgcatgtcttggtccaaatcctatgataaaatagctaagaaaagaccctcagctaacttaatttctccgaagatcctcgttcctcttttgatcagtatattgatagtgtttttattccaattaattccatggttaatcgtacaaaaaatgagctggtacattaagcccgttgtcggaggtgacgatgctgtagagtcctcagataacactgttttgttctttgtctcaaattttcaatacattttgaccgctgtcatcttatccgttggtccaccatatagggaaccaatgtcaaagaattttgaatttattgtagatattgtagcctctatttgcgtgagtatgttattaatgagtttgaatccggaatcgtactttggtaagaaattacaactcaccccaatatcaaacaatttcaatatgtttattattgtctgggcgatgataaattattacgctcaactatatatacccccatcggtgaaaggttggttaaagaaaagaaaaagtagcaaaaagtacaaactattaatactagaacgggaaaaattaacagacgtttaa

SEQ ID NO: 2485 - DNA, 930 bp, Saccharomyces pastorianus
atgcctcttcaattatttggcagagatcaaattgtagtacattatgaaaacaataacatgactggcgacaattcacatagccaaggtgttccaaggttgtgggcgaggagatttgcgaccgcactcagaaccctgatgaataggcgaatacagcatgttacacttacacattggtctttgttagttgtatgggttacgggtctgtggaaatttactagtcattatagacagttgtattctagatcagccattttggtgactgtttgcacaaatattcttttatttggcatatccgatatattggctcaaagtatagcttgcttttactcgtaccgtgtagatcctataccgcaggtactcaatgacacctttctccatgttcaaggcagccctgatatagaaaatggtgtgggttacgagagcgatgaactttccatcttcaacgattttacctctgaacatagctcctactcagataacgatgactatcctgaagttgctacatcgcaaggtactttcaagacagacacctttgatttatttaggtggtgcagtttcatgttctggggttttttcatatcatttttccaagctccttggtataagttcttgaattttttttacactgaagatcccacagtggtacaggtctttgaaagagttctttccgaccagctgctttattcgccagtatctctttactatttttttatgttctcaaactacgtaatggaaggaggcgataaatttacctttagcaagaaaattcaaaggctgtacatttcgacacttggttgcaattacctggtatggccgttggtacaatttataaatttcctggtcatgcccagagactttcaagctccgtttagctcctctgttggtgtagtatggaattgctttctttcgatgagaaacgcctctaaatag

SEQ ID NO: 2486 - DNA, 612 bp, Saccharomyces pastorianus
atgtcagcagaagattataagaacttgccagttaccgttgaaaagcctatcccagttgtgtacgacttgggtaacttggcagctttcgacagcaacgttttggataaaaatgattttgattcttcaaatgttaagcgtgaggaaaaaataaagaacctcacccgtgacaatgttcagctactgatcaaccagctattatctctgcctatgaagacaacgaccgaatctgcaggcggtaccagcggccaaagttctgtgatgactttactacaacttcctgttgccaccactgagctaccaagagaaaaaccattaccaaaggctaaggctatgaccaaatgggagaagttcgcagctaaaaaaggtatcaaaccaaaggagagagcaggtaagatggtttatgatgaagcttctggtgaatgggctccaaagtggggttacaagggtgcaaataagaaactagatagtcaatggctagtcgaagtagacgataaagtaaaaggtactgaaaaggaattgatcgatccaagaactttgaatagggcagaaagaaaacgtttggtaaagaagaacgaaaaacagcaaaaaagaaatatgaagaatgctttataa

SEQ ID NO: 2487 - DNA, 579 bp, Saccharomyces pastorianus
atgctaatctgtcgtggttggaaaccactactcaacgcttcttctattataagagaccctatacgagctgttcttccaggagcaacaattccaactaaaaggacttttcataacatcaatcgcttatatgttgaaaataacacagacggtatcacaactaagacaaaagaagagtctcattcgacgcagatgttcaaacctccggagacctctcagtatgaaggctcttaccaaagagattatgaaagaatagcaaaatattcgttaataccattaacaattgtacctttttatgcatccttgaccggtggagttatgtacccgctattggatgcatccttatcatctgttttcttgatataccttcagtacggtttcacgagctgtattatcgattatataccgaaggagaagtatccaagatggcataaactagctctttatagtctttacggaggatccatgttgtctttgtacggtatctatgagttagagacaaaagataatggtttcgttgatttaataaagaagctttggaatccgaacgatgaccatttgtatatattcggaagaaattga

SEQ ID NO: 2488 - DNA, 1440 bp, Saccharomyces pastorianus
atgggttttgttgatttcttcgaaacctatatgattggctctagggtccaagttaaacaattggacatttcagactggctgagccttagcccacgacttcttattctttttgggtacttttatatccacacgcttttaaccgcattcaatgagtgtcttcgatttgttaacagaaatgcattttgccttagattacgcttattatatgacagattttggtcacatttccccgtaattggagagtacaagattcgactactttcaaggatactcagatacactgagcagagaatgatacctaacctagataaaatattggaaatgattgaaatttggtttcaattacacttagtagaaatgtcatttgagaaaaaaaaaaacgtccagatttttattagtggtggaagtgacgaattgaatttctttaaggacaataaatttcaaacaaccttaatgatatgcaatcatcggtcagttaatgactacaccttgctaaactatttgtttttcaaaagctgtcctactaagtattatagtatgtgggagtttatacaaaaattacggaagggagacgatttacctgaatggccccagttaaagtttctgggctggggtaaaatgttcaactttcctcaattagatttattgaagaacatattcttcaaggatgaaacccttaatttgccgccagataaattaagaaacatattagaaacacaaaacaatcaggcaatcgctatcttcccggaagttaatatcatgagtttagagctttcaattattcagagaaaactacatcaagatttccccttcgttacaaatttttacaatttactatacccaagatttaaaaattttaccagtttaatgagtgcattttcgtcaattaaaaacatcaaaagaaaaaaaaaccatagtaatattatcaaagaggcaaggcttttgtttcatagagaaattgataaattggtccataaaagtataacaatggaaccttcaaaaatgtctaataaaataatgccgcccatgatcgttgaccactcttatttattcgagaaaaaggaggaggcaagccaagggaaacctaagccggtactgatcaatccatacatttatgatttcaccatagtttattatagagtcaagtacactgacagtggacatgatcatattaatggagacttgaaaattcataaaggttaccaattagagcaaatctccccgacaattttcgagatgattcgaccagaaatggagtccgaagacaattcgaaggagaaagaccctattgtagtaatggtacatataaaaaagcaccaaattcaacaactactcgcatacaacgatgtgagcttggagagatggcttgaaaacagatgggtagagaaagataggttaattgactccttagaaaagaaaattaaaattgagaccgaataa

SEQ ID NO: 2489 - DNA, 2241 bp, Saccharomyces pastorianus
atgatcacgcagaattccataccggaggtgaaagaggattttattggctacgctctaaatgagagaaaggccaggttgccgcagtttcgagacttaggtccgccggacttgatcacgctagcaaagtacttgcccacctcgagcaacacgaatactatcaacagtacgagtaggaccaacggggctgcagttcagccacccgccgcagctgcacccgatggctctgccgcttccgtaataaccaatggagacagcaacgatgccactgttaccaccaactccacaactgcttctctgttcagtaacactagagccggtaatgacgcagcttctatggtcaccgagttccatccctacaataagctaaagggagagatcggaacatttttctattccatgggtattgatacatccggcccgacctcggttgcgatcttcttaaagagaatctcggacattatcaccgagatgcctcaaatttggtttggtaagaggaaaatcttccaggtttctcggatttcattttcctgctggaatgcgttcaggaagtgcgacgtcaatgtcatcgtccacatcccgggcacaatccaaaacttcatagtagactgcaacggtgaaaatgtggaaatacaatcgcatgcggacgaggatctcatatgggcggaaacgttcataagcggagtcgtgaggtcaatcatgctgatgaaagataatgcagaagaaggcgagctgcagaacttggtagaaactttgattttgaacccattgacaacgtggcaaatagatgaaacgtctgagtctttcattgaattgttcccagtggtgtaccacaaaggaccactattaggcgcgccttactatatagccaatgtaaccaacacaaacaattacttggtggaaacgctggtagaaatagtaaagctaacccgtaatgtcaccatggcggagacaatgctcaaggacctggcagccaaaaaccccgaggcaattataatactggtcaagatttacttggcgtgtgacagagaaatagacgcaatgaaactgatatacgacgagttgtcacctgacaacaagaccaaaagcgctaatattgacatggactacaaatccgagctattgtgtttacaagcggcatttttaatagacaaaaagcaagattacgctttagctcaaaacatagcacaagaagccgctagttgttctccgagtgagtttagaccatggtatattttatctaaggcatacgtcaggttgaatgatatcgaaaatgcattactgatactgaattcgtgccccatgtccccgctaaaggaaaaatatattctaaaaagagtagttccattgccctctagtaatagtctacatttaccactgcccatcgatgttgtgctagatgaagtgacatcgttgaatccgcaggacgtccaaaaggaacaccagtctgcagacccgatgttagtcaatttggccgcatcgaatttgaagtccactttccaactggcatacaggctattaacggagatcgtgcaaatcaccggctgggaaaatctgttgaaatacaggtcaaacatctttgttatggaggacgaataccaaaattcgtcatcttcgttgcccaggggcgttgagaaacaagaagaagtgccactaagggccaaaaggctttgtgaaagatggttagacaacctcttcatgctcttgtatgaagacttgaagatgtacaccttgtggcaaaccgaacaactgtatatggacgtacaaaacaacaaccataataagttgacgtttgaatgggagctattcgggctctgtgcacgtcggttggggcacttgcccgaagccgccaaagcattccagaatggcttatcgcagaggttttcatcaaggtgcgcccggaagctgttggagtattgcgtgaacgagcgtcaacgaatcaaaaattttatcaactcgccaaactcacacgacatggctccggaggtgattagctcgcgcataagagagctagataacagcatcattgacctttgcgtgaagatatgttgctggaaccaccgctggtacaccgagttctccataagtctactggactcgttaagcgtggtcattcaagacatggggttgactaaagtgtccaacgaaatctcgtcaagatactcggagaccgttttcaagctggctcaagagaacatgctcgatttcttttccacctgcaccaatgggtactacgacgcataa

SEQ ID NO: 2490 - DNA, 78 bp, Saccharomyces pastorianus
atgtttagcttatctaactctcaatacacctgccaagactacatatctgaccacatctggaaaaccagctcccattaa

SEQ ID NO: 2491 - DNA, 231 bp, Saccharomyces pastorianus
atgagtactgaaaaactggaaacttctgaagagccacaagctcctttggccaatacttctgagactaatttagtaaaggaagactccgagaatgttgtcactgtatttgacctcgcaagtgaaatagaaaaatcattgaaggacgtacaaaggcaaatgaaagaaaatgatgacgagttttcacgaagtatacaggcaattgaagaaagacttaacagattgagtcagtga

SEQ ID NO: 2492 - DNA, 1569 bp, Saccharomyces pastorianus
atgagctccggaaacttgtcacctaaagatactattgttccagaagaacaaacagctcaactgcggcaatctgacctggacgaagacagcattaactataatctggaagaggatgaaatagtacctcttgagacaatcacttcatatgcgtcgaccttggtatcagcaaaggagtattccaaaaagacagacgataaagttacagacattgaaagccaaccaaattggggagaaactacttcgagggctcacgacagtgacaatgaaaaagaggacactgaagatgaggctgatagtttccctgaagggggggctaaggcttgggtcgttacgttcggttgtttcatgggattaattgcatgcttcggcctattaaattcaacaggtgtcatggaaagccatctgcaagacaaccaattggctaaagaaagtgtttccaccattggttggttattctctatatttctttttgtctgctttgcttcgtgcatcataagtggtacttacttcgacagaaatggttttagaaccatcatgattgtagggactctcttccatgtggccggtttgtttgccactgctaactccaccaaatactggcactttatactatccttcgctgttgtctgtgggttcggtaacggtatcgtgctaagtcccttagtgagtgtccctgcccattattttttcaaaagacgtggtactgctttggcggtagccaccatcggtggtagtgtaggcggtgtcgtttttccaatcatgttgcgtagcttcttctccatgaagtcaggcactgacccaaattacgggtttgtttggggaattagaacattgggatttttggatttggctttgctaaccatttcaattatcttagccaaggaaaggttgccacacgctattgaagagtctaaagatggggaatcacgattgagatacaccattagagtttatatcgtacaatgctttgatgcgaaagccttccttgacatgaaatatttgttttgtgttctaggaacggtatttggtgaattgtctataaactcagctatcacatattatggttcatacgctaccagccatgggatttcagcaaatgatgcctacacgttgattatgattataaacgtgtgtggtatccctgggagatggttgcctggttatttgagtgacaagttcggtagatttaacgtcgccattgcaactttgcttacactgtttatcgtcatgtttgttggttggttaccatttggtaccaacctaaccaacatgtacgttatcagtgccttatatggattctgttctggaagtgtcttttccttacttcctgtctgctgtggacaaatctctaagacagaggaattcggtaaacgttactctacaatgtactttgttgtcgctttcggtacactggttggtattccaatcacaggcgctatcatctctaacaaaaccacagcagattatcaacactacatcattttttgtggtttagcaacctttgtcagcgctgtctgttatataatttcgagagcatactgcgttggtttcaaatgggtcagattttaa

SEQ ID NO: 2493 - DNA, 1362 bp, Saccharomyces pastorianus
atgattcaaaccccaagtacagcgaccaaacgacacaactccatccataaaaacctctttgatccatcactgtaccaaataccagaacctccacgtggtgtttaccaacaccagaaaaaagaatacgctagggaagcatctagcaatcacgttttgggtcaagattttaccagcataaaggaaaaatttatccagttgtttcctcatggcatacaaggatacttgcccgatgttgatatcaggataattgtgatatgctttatatggtacatcacatcttctgtttcaagcaacctatccaaaactattttaagaactttcaatcatccaatagcactcaccgaattacaattccttttcagtgccattatgtgtgtggcatttgcttctatcgtgaatttgtttcgaacacctcgattaaggcatactgagttttcaaaagcattgaacaatttccctgagggaattcttccagaatacctgaatggtgatttccagaattccatactacgcaggtttctcattccttcaaaactagtctttttgactacgtttcctatgggaatatttcaatttattggtcacattacgtcgcataaggcagtctcgttgataccagtatcactagtacattcagtaaaggcactatcgccgataatgaccgtgggatactataaagtttttgaacatcgctactacaatcccatgacatattatacgctattgcttttggttttcggcgtcatgataacttgctggtcgacacacggacgtaagagagtctcagacaaaaacggtagcttcatattgaatgggttatttttcgcatttatatccatggcgatatttgtgtcacagaatatctttgctaagaatatattgaccatcaggaggaagatgacgcttctaccatcttcttcgactgatgatctcacatcgaacgaaaaacaggtaggttcaaacagagtaagatattcaccactacaagtagataagataaccatattattttactgctcatgcacagggtttttgttgacgctagcacctttcttgacgaacgaactagttcatggtggttctgtcatcaacgacttgaccatgaaaacagtgtggcttgtagtgatccatggtatagcgcatttttttcaagccatgcttgcatttcaattgatcgggtcactttcttccgtcaattattctgtagcgaacatcatgaagaggatcgtcgtcatatccgtcgcaatattttgggagacaaaagtgaatttcattcaggtgtttggtgtgattttaacagttgttgggttgtacggttacgacaaatgggggctctccaaaaagaatggacgccaagcataa

SEQ ID NO: 2494 - DNA, 642 bp, Saccharomyces pastorianus
atgaactatagtacagattcaagtaatacagtatatgtggggaatatagatccaagaataacaagagaccaactttatgaactttttattcagattaatccaattttaaggatcaagtatccgaaagataaagttttgcaaacgtaccaaggctacgcttttattgaatttcatagcaaagaagatgctcagtacgtgatacaaataatgaataacaccgtcaaattgtatgaccggctgataaaagttcgtcaagtaaccagctctttaggtgctgctaattcttcctcgaataattccaagggcatatctttacctattgctaaactgttcgtaaagaacctcgcagattcgatagacattgaacaactaggaaaaattttcaacaaattcggtaaaacagttaataaacctgaagtttttcatctatcaactggaaatctgaaatgtgcatatgtatattttgaagactttgaaaaagcagatgttgcaataaaatctctaaataatcaattagtggccaatagcaggatcacggttgattatgcatttaaggaaaacggtaagggtaatacaaaatatggcgatgaagtagataggctgctgaataaggaagcactaaaacacggcatgttaaaataa

SEQ ID NO: 2495 - DNA, 1476 bp, Saccharomyces pastorianus
atgagattggtatcaaagagaagaattaggtttcttatttttattttggttggtgtcttctctgtgtgtataatatcaaggtgtgttgtccacttccaatacaatgaggagataaagtactataagaaatttttccagcagaaaaaggacggccttcaagagatatataatcctttagagattaagcaaatccctggagaaacaatagatgatttgtattctgccagcttggaaaaggagctcaagaacaaccaaatcattgagtggtcaaagtttgcgtatgtgaattatgtaacagacgtggattatttgtgtaatacgctgatcattttcaatgatctgaaagaacagtttaaaacaaaggccaaattggttcttttaatatctagagacctattggatcccgatacttctgcaaagatagaccaaattaagcttcttcttgataaaattcaagctatagatgaaagccaagttattattaaactgattgacaatatcgtcaaaccaaaagatcctacaccttggaatgagagtttaacaaaattattggtctttaaccaaactgagtttgagcgtgtgatttatcttgataacgacgccacgctaagatcaagtttagatgaattgttctttttgcctaaatatatcaaattcgcggctccattaacatattggtttttatctgaacatgatttggaaaaatcatatcacgaaattaaattcaaggagaagcaaccaatcaatctcggttcgtacaccaaggtattggccaatagaattaggaaaggccagatgatttacaaccacttaccgagtctaccgcactcactatacttgaactcaaataatatagctcaagacattataagctccacctcatcttcatcaccattgttctatttccatggtagtaaaaaagttagtaagctgaaatttgcttctaacttgatggtcattaaaccttcaaaaaaaacatttgatgaaattgtagaggacacgctgcctaagataataaacaaaaaggataaatacgatatggatttgatcaatgaggaattgtacaatttaaagaaaatcatttacaagcagtttattttcttcagaaaagttagaaaacttttcaaaccagaagtattagttttaccttttgcaagatatggcctattgacgggttcacttaaaaatccgaagcactattctatgatttccaatgatgtattaggctataagaatttggatgaaaatggcgatgaaatcactagaagtttagatgacgctgtcacatactccaagtatatacatttttcggactatccaataggtaagccctgggtttatcaatcagtaaaggactttgaatgtaatgtagaaaaagaaaaatcgagaggccttgaattagaaccccaggcttgtagtgtttggaattcggtgtacgaatcttacatgcaaactagaaaaatatgttctgtttga

SEQ ID NO: 2496 - DNA, 2427 bp, Saccharomyces pastorianus
atggcatttccacgacttacgtctagtcatcagccgaaccggaaaggagaagcccatccattggctctttccattcgcatagaatccccaccatgcgttctatatggctctgctacggaatcatctggtgctgtattgagcgggctatttactgtgaaggtcatagatccctacaagagtagcgaagataagtctttgaaaactaccgaatcaaatgtgtcggctaagaataagagtttaaaaagaaagagcacatttggttctgcactttcatctagattgtcgaacttatctgtctcgacctctaatatctccccatcaacatcttctacttctccgtctcactcacctacacccgcaaatttaagaataatggccggttatacgaagattgcagtcacttcggtaacgctaactctggtacaaaaaattcattttcataagccctttgtgcccaatgtttcatccatacaaacctgtatgaattgtagaacgaagaccacaaatatgaaaagctgggaaattcagaaaactacgcaggaaatatccgtcggaaatcattcttatccattttcctatcttattccgggatccgtaccatgctcttcatcgctgggggctgcggctgaaactcaagttaaatatgaactgatagctgtcgtaacatacatggatccttacagaaacgctgtttcttctactcattctactccgaggaaagagggaagctcttccaagaagcaactattgcaactagtaatgcccatcgctgtcactcgaagtataccacgtgggccggacaaaaactctctgagggtctttcctcctacagaattaactgccgcagctgttcttcctaatgtggtttatcccaaatctacttttcccctagaaatgaaactagatggggtttcatccggtgatagaagatggcgtatgcgtaaattaagctggagaattgaagaaactacgagagttaaagggcattcttgcccagtacataagcacgaactcaaacagctagaagagcaagtaaaaataaaagaactagaaaagggtaaaaaaccacctagtcatatcaagcgatatggagaactaggccctcaaattcgggttgctgtaaactctctagaaaatatgccatcacaaagactaccaggtgagcccagaaatgaccaagcacttggttccgcggctccagcatcgaccggtaacattggattgggagatgaaagtcctgttaatgaggatgcagaagaccagcctggtagtgagtttattcatcctagcgatgacgctttacgtcaagaattactttcacagcaacagcgtgcaagagaacaacaacttcaacaagagctaaaaaataatagcactttatttacagaagaggttcggataatttctaagggagaaatgaagagtggatggaagacggactttgacaataatgggaaaattgaactagtcacagaaatagactgtatgagacttaactctggggtctccaatcctgtaatgtatgcatcaacagccaaagtccctactacaaccaataaaaaacccaacatcaacgtggcttgtgatatacaggatccaaatttgggtctatatgttaatcatatcttagcagtggaaatagttgttgccgaagaaacattacaatacgcaaatggacagcccatacgtaaactaaactccaaaaacaagaaagatagcaatagcagcgcaatgagtgtccataatccagaccagcggttggcagaactatctccaatgtttgctaatagaaacacaccaaaggtacgatccgttgatcccgaaggtataactcctgtaagcagtaataagtccaaccatagtattcttaaagacaaggcaacaggcggttctaactctaatatagttagtgtccccactggggctgcacgtgttttaagaatgcaatttagattatcagtcacagaaaggtctggactaggaatctcctgggacgaagaagttccgcctatctaccaagacgttaagctgctctcaccaccatgctacgagcgttctgcgaacaacaaaaccaaaaataaactatattcaacaatgagcaccccgatcggatcagtagatgattttgtaggtagtagcgacgatgatgatggggatgatgacactcgagggacagagaccggttctaatataatagaaactccgattgttcagagcaaactaactatcccgccaactgcgcactatcattccgcttcaacctcacaaagatctcttactgcagtacagtcgccgcctttggaaagtgttgtaagtgtccagggtagtgtgccttttcgcgggcaagtgttaacaccccataacacgagggatgtccggctccaaaacttttctgatgttttagattccaatagaatcactcaatag

SEQ ID NO: 2497 - DNA, 4710 bp, Saccharomyces pastorianus
atgtcatttgaagttggtacacgatgctggtatcctcacaaagaactaggctggattggtgcggaagtgatcaagaacgaggtcaaagatggcaagtatcacttggagttgagtttggaagacgatgaagtcgtgtctgtggacacggatgacttgaatgatgacaaaaaccagtccttgccgcttctcagaaacccgcctattctggaagccaccgaagatctaacatctctatcgtacttgaatgaaccggcggtcttgcatgcgatcaagcagcgttactctcaattgaacatctacacttactcgggtatcgtgctgattgccacgaacccctttgaccgtgtagaccagctttacacacaagacatgattcaagcatatgcgggcaaacgtagaggcgagttagagcctcatttgtttgctattgccgaagaggcatatagactaatgaagaacgataagaaaaaccaaaccattgttgtgagtggggagtccggtgccggtaaaactgtctccgccaaatatatcatgcgttacttcgcttctgtggaagaggaaaactccactaccatccaacatcaggtggaaatgtctgaaacagaacagaggatcttggccacaaatcccattatggaggcgttcggtaacgccaagaccaccagaaatgacaactcctccagatttggtaagtacttggagatcttgtttgacaaggagacatctattattggggcaaggatccgcacatacttgctggagcgttccagattagtttatcagcctcaaatagaaaggaactatcatatcttttatcaactaatggccggattgccggctcagaccaaagaggaactgcatctgacagacgcctcggattatttttacatgaatcagggtggtgacacgaagatcaacggtatcgatgatgccgaggaataccaaaccacagtggacgcgttgactttagtcggcatcaccacagaaactcaacaccaaatattcaagatattagccgcattactgcatattggtaacatcgaaatcaagaaaactagaaacgatgcctcattatctgcagatgaaccaagcctcaaactcgcgtgcgaattgctgggtatagatgccttcaattttgccaaatggatcaccaagaagcagattgttacaagatctgaaaaaattgtgtcaaacttaaatttcaatcaagctatggtcgctaaagattctgtggccaaattcatttattctgccctgttcgattggcttgtagagaacatcaacaccgttttatgcaatccagctgtcgatgatcaaatcaactcatttatcggtgtcctggatatttacggctttgaacattttgagaaaaactcatttgaacagttctgcattaactacgccaatgaaaaattacaacaagaatttaatcaacacgtttttaagctggaacaggaagaatatgttgcagaggaaatcgaatggtcgtttatagagtttaacgataatcaaccttgtatcgacctaattgaaaacaaaataggtatcctatctctgcttgatgaagaaagtagattacctgctggttctgatgaatcttggacccagaaattatatcaaacattggacaaatctcctaccgacaaagtgttttccaaaccaagattcggacaaactaaatttattgtgagccattatgctcttgacgttgcttacgacgtggaaggtttcattgaaaagaatagggatactgtctccgacggtcatttggaggttttgaaggcgtccaccaacgaaacactgataaacatcctggaaggtttagaaaatgttgccaagaaactagaagagaccaagaaggccgaactagaacaaaataacccggggaacaaaaaaccgggaccagcaagaaccgttaatagaaagcctactttaggttccatgttcaagcaatctttgattgaattaatgagcaccatcaactcgacaaatgtccattatattcgttgtataaaacctaatgctgataaggaagcctggcaatttgataacttaatggtattatctcaattaagagcatgtggtgttttagaaaccatcagaatttcgtgtgctggtttcccctccagatggacttttgaagaatttgtattaagatactatattttaattccacatgaagagtgggacctaattttccaaaagaaggaaaccaccgaagacgacattatctcagtggtaaaaatgatcctagaagctactgtgaaggacaagactaagtaccaaattggtaatacaaagatttttttcaaagcaggtatgcttgcatatttagaaaagctaagaagcaacaaaatgcataattctattgtcactattcaaaagaaaattaaagccaaatattaccgtaatcaatatttgaaaatttcccaagccattaaaatctggcagagcaatactaaaggtttcattattcgtcagcgcgtttatcatgagagaaaggttcattccgcaacattgattcaagccacttatagaggtcacgcaatccgtaataatgtgtttagtgtgctgagaaccatcatcaacttacaaatgagaatcagagaggaattaaagcgaaagcaatttaagagagagcacgaatataaagctgcagtaacaattcaaagtaaggttaggacttttgaaccgagatctacatttttgaacacaaagagagatactgttgtcgttcaatccttaatcagaagaagggctgctcaaagtagattgaaacaattgaaattagatgctaaatcagttcatcatctgaaagaagtaagttataaattagaaaacaaagtgattgagttaacgcaaaatctagcctctaagattaaagaaaataaagagatgacagagagaatcaaaggattacaaattcaagtagaagaaagtgtcaaattgcaagaaaccttagaaaacatgaaaaaggaacacttagtaaatatcgataaccaaaagaataaagacatggaactacaaaagacaattgaagataatttacaatccactgagcaagatttaaagaacgctcaactagaattagaagaaatggttaagcaacacaatgaactgaaagaagaatccaagaaacaattggatgaattagatgaaacaaagaaagctttagttgaacaccagacattaaatggagatctacaaaatgaagttaaatcattgaaggaggaaatttccagactacaaactgcaatgtcacttggcacagttacgactagtgtattgcctcaaacaccattgaaggatgtaatgggaggtaatagttccaattataatagcttgatggttgacaatttagaactgtcgcctggaaagtccagatccactccaatgtccggtaacaaccacattgattcattgagtattgatcaagacaatggcgctaatgctacacagattaacgaagagctatacagaatattggaagataccgaaatcttgaaccaagaaatcaccgaaggcctgttgaagggattcgaagttccggatgcaggtgtggctatccaactaagtaaaagggacgttgtttatccagctagaatattgattatcgttttgagtgaaatgtggagatttggtttgaccaaacaaagtgaaagctttcttgctcaagtgctgaccacgatccaaaaagttgtgacccaattaaagggcaacgacttgattccaagtggtgtgttttggttagccaacgtgagggaactatattcatttgtcgtgtttgctttgaattctattctaactgaagaaacattcaagaacggcatgaccgatgaggagtacaaagagtacgtttcattggtaactgaattaaaggatgactttgaagcactaagttataatatatataacatctggctgaaaaaattgcagaagcaactacagaaaaaggcaattaatgctgttgttatctccgagtctttaccagggtttagtgcaggagaaactagtggatttttgaataagatttttgctaacactgaagaatacacaatggacgatatcctgacgttcttcaatagtatttactggtgtatgaaatcgttccacatcgaaactgaagtgttccacgctgtagtgacaactttgttgaactacgtggacgccatatgtttcaacgaattaattatgaagcgtaatttcctatcatggaaaagaggtttacagttgaactacaatgtgaccagacttgaagaatggtgcaagacacatggattaacgggtggtaccgagtgcttgcaacatctaatccaaaccgctaagctactgcaagtccgcaaatataccattgaagatattgatatattaagaggaatctgctactctttgacgcctgcgcagttacagaaattgatatcacaataccaagtggcagactacgagtctccaataccacaagaaatcctgaaatacgtggctgacattgtcaagaaggaagctgcattatcaaacgatccgaagggtcatgaacatagcagcggtatattcattacaccagaaacggggccttttactgatccgttcagtttgataaaaaccagaaagttcgatcaagtggaagcctatataccagcatggttatcactgcccgcaacgaagagaatagttgatcttgttgcccaacaagttgttcaagatggccattga

SEQ ID NO: 2498 - DNA, 348 bp, Saccharomyces pastorianus
atgtcgacatcagtgccatacgatccatatgtaccttcagaggagactaactcgagctcgcacccgaactctcagaataaaacggccgctctgagacaggagatcgacgacacggtgggcataatgagagacaacatcaacaaggtggccgaacgaggtgaacggttgacctccatcgaggataaagccgacaacttggctgtctctgcacaaggtttcaagagaggcgccaacagggtcagaaaacagatgtggtggaaggacttaaagatgagaatgtgtttatttttggtcgttgtcattttgttggtggtcattatcgttcctattgttgtccatttcagttaa

SEQ ID NO: 2499 - DNA, 2667 bp, Saccharomyces pastorianus
atgtcttttgattggctcaatgttccaggattggacttaggcaacggggatcaaacagaaaggaaacaatccaatggattgggtccacccagtgtatctttcgactttggtgtgaacacttctgctccacgcgattctaatttctgggatcaaggttcacgaagtcagagcgatacgtctttatcctacagaaataatcttccaaccgcaggagctaattccgcactccaattgggttctcctgaaaagggagatcttcatgcagaagtgcaaaatctttctggaggtgatggttatgcagagacacctgaggatatgcaagtcccgttgtctctgtcacaaaaccaacttacacgcgaagaaataaggacatatttaagatggtacaactatatatgtctgagaacacatgggaaattagtcaaattaaatgacgttttcagattcttatccaatttcaatttatctcagcaaattaaagaaagaataatggaaatcttccgtagttgcaaaaatgcattgaatatcggtcaattctttgctgttctgaggcttattgctagagctattatccatggcattttacccgtaagaagaatgattttagagaaggcacctatacctaaacctcgtcctattttgagcagtgacaatcacgaggaggtttacgaagaagtagaagacgatgataacaataacaaagcgggtgatcaaaaggtcgacttcgattcatttgcttccctgttactaactggtacaacaataagaaaaagactcagaaggagagttaaaaacacaaactttaagagtaagaaagttagattttcagagcatgtgacgtttcaagatcctccgaatccaagccaaaaatcatccaataatgtcaacgagccaaagaaaccgattggcgaaaatgaagatggagatcaaaatcgtagtaataatggcccattagacttgacattgcccatggaccaattattgaagagactatacaaagggagacaaaatagtgggctagtctcaagcttaccgagcgaacaacaagaaactgaagaggaaaagaaagtcctggaggatatgaaggactcattatcccatttcaaacaaattcagaccgtggattctgcgtcactaccaatgtcatccgcacttttgcaaaatggtaacaatcggccaaacaataatgctaacaacaacggtgttccactgcaagtgccattagaacctttgaaaccaactgcaacaggttctgctaatcatttattgcgagaagaatacaaccaaggattaactccaaacaatgaaaccattcaaactggcttacaacccttgaaaccaacagcaactggttcagcaaattacttgatgcggaaccatatagaacaacctcaatccattcaatccacgaatgcgcctgatacaatggcaaactctggagggcttcagcctttgaaacctaccgccaccggctcggcaaactacttgatgaaacaacatctgtcaccttcagtgaatagcacgacaccttcaatgtttcaagggcaattcgcggatcagtatccttctccgcaacctacaggtcattttgtgaattcccctaacattattgtttctcaaagtaaccagcagcagcaaccgcaacaacaacaacaacaacaacaacaacaacaacaatcttaccaaacaaccggtacacctcaaccaaaaatcgagctatcaaatatatctcctcagcacacatattctaacaatattcgaatcaacaacgggaatattatatcgatgccaaaagtggaaatatcaaacgcgctttctcctcaaaatacgttttcacaacaccaacaaccacacttggtttctcctcaaaactcgtttgttaaaaaccaatcaactatgatttctccacagaatacatattctaataaccaacaatcgatgatatctcctcagcacacatataacaataaccaacagcaaattcaccaccttccaccacccccacctccgcggatccagcagcagcatgaacaacggccagccattatttctccccaacattcataccttgacatgccgaagccaaataacatgttgtccactcaaaattcatacacaaactcaaatcaaccaaatgtacattctccaaacttcttgtcaccccagaatgctgccaataattacttccagtctttgctttccacctcaccatcacctaattccactccactaactgcctccaatcttaatggacattctaataacgttagtaataacttgagttctttccagcctaatatgacaagtggtaatccaccaatgaacattagtcaatcacaccagacatataatggcaattattcgatgattaatcaacagcagcaacatcctcactcacaacaaccaatatatgggggacagttaacccaaatgcaacaacagcatcaagggcaatcccagtttaacaactgcgatatacacaaccaagcaaacaaacctaattacggtatgctagggcagcaagtgcaacaacaacaacaacaacaacaacagtttccattgtatactgatacaaatagatccaattcaagcgatatattgggtaatttacaatctttgcagcagcaagttgatgctttacaaacccagtataatagaagaccgtga

SEQ ID NO: 2500 - DNA, 702 bp, Saccharomyces pastorianus
atgtcctccgctatcactgctttgacacccaaccaagtaaacgatgaattgaacaagatgcaggctttcatcagaaaggaggccgaagagaaggctaaggaaatccagttgaaggccgaccaagagtacgaaattgagaagactaacatcgtgagaaacgagaccaacaacatcgatggtaacttcaagagcaagatgaagaaggccacgctatcgcagcaaatcactaagtctacgatagccaacaagatgcgtttgaaggtcctttccgcccgtgaacaatcactggacgggatattcgaagagaccaagaaggagttggcgggtcttgccggcaacagggacaagtacaagcccatcttgcagtcattgatcgtggaggcgctcttgaagttgttggagcccaaggccattgtcaggtctcttgagagagacgctgatttgattgagtctatgaaggacgacatcatgcgcgagtatggtgaaaaagcccaacgtgccccattgcaggaaattgtcttgtccacggactatttgaacccagaaaccgtttctggtggtgtcattgtatccaacgcctctgacaagattgaagtcaacaacactttggaggagagattacaattgttaagcgaagaggcattgcctgccatcagattggagttgtacggtccttccaagacaagaaagttcttcaactga

SEQ ID NO: 2501 - DNA, 2877 bp, Saccharomyces pastorianus
atgacgatcggcgataagcaaaagtggaccgctgccaatgtccgtaatacctttttggactattacaaatccaaggagcacaagttcgttaaatcctccccagtggttccattcgatgatccaactttactttttgctaacgcgggtatgaaccaatacaaacctatctttttaggtaccgtcgatccagcttctgatttctacaccttgaagagagcttacaactctcaaaagtgtatcagagctggtggtaaacataacgatttggaggacgttggtaaggattcctaccatcataccttctttgaaatgttgggtaactggtccttcggtgactacttcaagaaagaagccatcacttactcctggactttgttgaccgaagtctacggcattccaaaggatagactatacgttacctattttgaaggtgatgaaaagttggggttggaacctgataccgaggcccgtgaattatggaaaaatgtaggtgtccctgacgaccatatattgcctggtaacgctaaggataacttctgggaaatgggtgaccaaggtccatgtggtccttgttctgaagtccattacgatagaattggtggtagaaacgcatcttctttggtgaacatggatgatcctgatgtgttggaagtctggaatttagttttcattcaattcaatagagaacaagacggctctttgaaatctttgcctgctaagcatatcgataccggtatggggttcgaaagattggtctctgtcttacaagacgttagatctaattacgataccgatgttttctcacctttatttgaccgtattcaagaaatcacttcagtcagaccatattccggtaaattcggcgaagatgacaaggatggtatcgataccgcttacagagttcttgccgatcatgtccgtactttaacttttgccttggctgatggtggtgttccaaacaatgagggtagaggttacgttttaagacgtattctaagaagaggtgcccgttacgcacgtaaatacatgaactacccaatcggtaactttttctccactttgtccccaactttgattgcacaagttcaagacattttccctgaattagccaaggaccctgcattcctatttgaaatcttggatgaagaagaagcttcttttgccaagactttggatcgtggtgaaagattattcgagaagtacgctttggctgcttcggaaaccgagtctaagactttggacggtaagcaagtttggagattgtacgatacttatggtttcccagttgatttaactgaattgatggctgaagaacaaggtttaaagattgatggtccaggttttgaaaaggcaaagcaagaatcctatgaagcatctaaaaggggtggtaagaaggatcaatctgatttgattaaactaaacgttcacgaattatctgaattgaacgacgccaaagtacctaaaaccaatgatgaattcaaatacggtagcgccaatatcgaaagtaccattttgaaattacacgacggcaccaaattcgtcgatgagatcactgaaccaggtaagaagtacggtgttatcttggacaaaacatgcttttacgccgaacaaggtggccaagaatatgatacaggtaaaatcgttatcgatgatgttgccgaatttaacgttgagaatgtccaattatataacgggtttgttttccataccggttctttggaagaaggtaaattatctgttggcgaaaagattattgcttctttcgatgaactacgccgtttccctattaagaacaaccatactggtacacatatcctaaaccttgctttgaaggaaactttaggtaatgatattgatcaaaagggttctttagttgccccagagaaattgagatttgatttctctcacaagaaggcagttaccagcgatgaactgaagaaggtagaggatgtctgcaatcaacaaatcaaagaaaacttgcaagtgttttacaaagaaattccattggagttggccaaatctatcgatggtgttcgtgctgtttttggtgaaacttacccagacccagtacgtgttgtttctgtaggtaagccaatcgatgaattactagccaacccagctaacgaagaatggactaaatactctattgaattctgcggtggtacccacgtcaacaagactggtgatatcaagtactttgttattctagaagagagtggtattgccaagggtatcagaagaattgttgctgttaccggtactgaagcctttgaagctcaaagattggctgaacagtttggtgctgatttggacgcagcagacaagctgccgttctctccagtcaaggaaaagaaattgaaggaacttggtgtcaaacttggtcaactgtcgatttccgttattacgaagaatgaactaaagcaaaaattcaacaaaattgagaaggctgtgaaggacgaagttaagtcaagagccaagaaagaaaataaggaaactttggacgaagtgaaggcttttttcgaaactaataaggatgctccatatttggttaaattcatcgacatctctccaaatgccaaagctattaccgaagccatcaactacatgaaatcggatgacggtgttaaggataaatctatttatttatttgccggtaatgatccagaaggtcgtgttgctcacggttgttatatctccaatgccgcattggccaagggtattgatggtccagaattagccaaaaaggtttctaatatcattggtggtaaagctggtggtaaaggtaacgttttccaaggtatgggtgataagccagctgctatcaagaatgccgtcgacgatttagaaagtttgttcaaagagaaactttctatataa

SEQ ID NO: 2502 - DNA, 4092 bp, Saccharomyces pastorianus
atgagactgctagcattggcatgtatatttttttatgcgccgtttcgtgcattggctcatagtttacggtatggaatacccgagtctgctcaagtttggtccattttagttcacttactaggtgatcttgatgaacaattgctcgctgaactgtaccccttggttactggtttggatgatgaaactaatactcaaggatgccttatagcgtcgacgagtgacgcattaaggaaacaacatggcaaagaagatgtggcagatcttttagaactatatggcagcctttacccaatgggcctgctacaggaggacgtcagctccattaccgatcaagacgaaataaacgggaactattttatcatgaatgggaaaaggtatgacaagcccgatgatgtgttctacttgaaatccaaagatttaacaagtcaacagaagattccagacattaatgtcatacagccttacgatgtcgttattggtgcaaatccaaacgcacctgtgctggttttctacggttgccccacggttgacaacctcgattttgaagagtttaataggaatctatacatggaagctatgaacgaagaggcgaaaattagatttatctggagatcaacatgttctcttgatggagaaagtgtggagtatactttgaattttcccctcgggataaccttacaaaatggttctaatttgaactctatacctcaattgaagaaaatattatccaccatctctaatgacgtgtcagttgaaacaaatcacgagctttatgatttggatcctgaagagttacatgagctcgatttaaaggtcacgtcgtcgatctcgaaattttatcaagagaaaaatgatacgctagctactttacacttcaccaagaatatcattaacaactttcctttagtctctaagcagctaacagagattgtacttgacaacgaagacattaaagctagcaatgaaaaactaaattccaagggcttcgactataacatgttgggtctctatgtcaatggtcaaaactggaaaattacttcgctggacccatataatttgcttaatgctttgaaaattgaataccagaacttactgaaaattacaaatcttctacaaacgcacgagtcctcgaaaggtatgttagattccaagtttctactgaacaggttctctcaattctctctggggaaattacaaaacttacaaccgattaaaatggatctccacactattccggggttctcagattcggtgatatacttcaacgatattgaggccgatccacaatataacgaattaatagatagcgttcaagcgttctttgaaaaatcaaaatttggcgagttgcctgaaataagacaaaactggtcagaaatcatatttgttatagactttgctcatttagaagataatgacgtcaaggaggcattgagtggattagttcgtgccattaatgttatctttcaaggctatccacaaagagtaggacttctcccatataattcaggtagtgatgattccgttgttaataaaatatatgaactcaagaattcaactaacggcttggcagaattgaaaacatttttggaaacaatgctgcttgctgacggtttaactgccaacacagatgcgtcaaagtattctccagtcccagatgttcatggtttactcgatgaacttcaaattggtgaaacatcgattataattaatggtgaggcttatccattcaaaaagaatacctggaactatttaattgccaaagttatcaagaaagatactgaatttatacgtaaagaattgagtgtttcctccccaaaaaacaaacaagtaaaggtcagagacttgttacattataagtctgcaaatttgagacacaataaatatacgccaaattattttgctgattcgttgtactctacagtcaataatactgcattagaaaatattggtaaagatagagtaacgacatataccaaagataaaaggtacaatatactacacactatcacattggttgacgacttcaattctattcatgccttggaaagactgcagaatttgctgggtagttcttttgttggtgtgagggttagggtcattcatttaggtgatttatcaaacgcttggactcagctgcaacatagcttttccgacagcgattcaacaagctccataaataaattgatcaataacttgaaagtcaagaatggaaaaagcaaaacgtcgagaaaaaatgccttaaatcaactaggactccataaatggttcccagatatcccattatttgaactggaaaagggcacgttcattgttttgaacggaagatttattcatcttgatcctaaggaggtcccagaaacaaagcattttgaagcaattataaaaagagaagcggtcagaaccatcgattcagtgttctctttagacctacttttcccaggcttctcacaagaaagaatggatcctgactttattgaaatgacttcctctatcctaaccaaattattctaccagagtacaaatatctatggcaacggtattgattatactactgagagtagcttgccgagaatggatttgaatcagttcttcgaaccaaataacttgactatatttgatgatggaaaatcatctcctatcgatttattgctaattttagaccccctagaagaaagatctcagttgattctctctcttgttgatcaagttaagcatttgaaatttattaatgtacaagtgattttaatgccgacagtagatttgaacattgttcctatcaggagactttatgttgatgacagagaggttatcaaactggtaacttccgagaccagcctggttgattcagaagtggatatggaaatggacgccccaaagtcctttgtgatagacagcgagtttcagctgaaggaattgctcatagagctgcatgctttttccaacaaaacggctctttcagccggcaatattgatggtatagggggcgtatgtctggaacttgtcgatcatttgggaaatattatcgacaaaaccataacgatggacacctttgggtacggacagtttcggaccgacaggtttttaaagggctgctctatcagaagctgtgatccaaggtatactgttcactctttttctactgacgggcatcccgggtttataccatccaattctctagatatactatcgtacaatccttatagaatcgctgtgaaaataactgaagaaccctcatacggggaagagcacaaggaagatggcagcgatgacgcaaccatcaacatcttctccgttctggaaccagggctagatgaggaagaaaagtacaaacaaatggttttgtccatactgtccaagtgttctaaattgcagcaggtaaatttttttattttagagcaacaatctatttccgattcgctaaaaaaattctgcgaatacgtaaacgcctccggtgaaatgagaggtactatcactttcttaaagtacgaatggccacaatggttgaggccgcaaagattctcttcaagaagaagggatgtttctaaatttttatttttagatgtcattttccctcagaacatttcccaagtattgtacatgacaccaaatgaaaccccgtttgatccatttgatctgttccaatttcaagggctcaagcgggcaccattaggattattcagaatgagcggtaatgggtattggaaagaaggttattgggaaaaaatgctaagggaaaataacttagaattttactctactgagccaggctttcttgtaaacttggaaagatttcgtcaactagatgttggtaataaatacagaattcactaccaacgtgtatcgtctgatgccagatcactggttaacattggtcaagacttagttaataatctacaacttgaggttccaattaggtttctcaaggcgtcctataaaagtaaattgattactgatgatgaacatgtctcagaatggaaagaaagaattgatgccttcgtatcttcttctagtgatggaaaggcttctgaagaaggtaaaagtcgcaacaaccaaggttgcgaggattctatacctttgcatgatgaattatga

SEQ ID NO: 2503 - DNA, 2280 bp, Saccharomyces pastorianus
atgacagcgccattgtggcaaaataagaatgagaaaaaccacactgttgaacgagtcttatcaacagatatgaccgataacattttgagtagcaccagtacaagcccaaaggaagaagactctagaagctcttccgccgttgacatacgatccggaacagtgatcaacactcctgacaatgttagcagtactaggaagaggcttgcatgcacaaattgtagaaacagaagaaaaaaatgtgacttgggatttccctgtgggaactgctctaggttagaattagtctgtaacgttaatgatgaagacttaagaaagaagcggtataccaacaagtacgtcaagtctttagaaagccatatagctcaattggagaccaatttgaaaaaccttgttcaaaaaatctatcctgatgacgaccaaatgctgaatcgaatgatggtaggagatgttatgtcagttttctcagaaaggtcccaagtaccagatgaatattctgatcaaacctcgccgcttccaatccccgcaactagaggtacgtttattattgacaatgacaaagccaatcaaacgccatcgtcttttagaaaaccaacacctacatctaccataaactctggtatctttgattcccaaaaacaggatttcgctaattcgcttgatggccgattacttttaccaaggtcaataactccacaaggtgaaaaaaggaagaagccactagtaaagggaagtctttatcctgaaggccccgtaagttataaacggaaaccattgagtacgccagacggtttgttgtcggcatcttcattagtgacgcccgtagatccagttacttttcctgatggtataacagggaacaaccccacgcttgaaaatggcagactcaaaaagcgtatatctgatttgaagaccactgtgattgtaaggggattgaatgacgataatcctaactctctcaataacgatccaaggattctgaaatccctctctaatttttataaatggttatatcctggttacttcattttcgttcacagagagagttttctctatgggtttttcaatcactctaaaaataactacgaagattctaattactgttctgtcgaattgatttatgccgtgtgtgcagtgggttcaaggttaacaccagatttacatgagtattcagaagtgtattatgaacgaagtaagaaaacactattacaacttgtctttgatgagcaaagtacggcgcgcatcactacagtgcaagcgttgttttgcttagctttctacgaattaggaaaaggtaataatcaattaggatggtatttttctggtctggctattagggtcggctacgatatggggttccaattggaccctaaagtctggtacattgatgatagtaatctacagttgacccaaagtgaactggaaataagatcaagaatctactggggctgttacatagcagatcattttatctgcctaatgttgggtagaacttccacgttaagtgtcagtaactcgaccatgccagattcagatgaactgccagaagtaaacggtacggaagagtttaggtttattggaagacatgttttacagatttcactgccattgaaaaacttgataattttatcaagacttgtacaaattttcacttccaaaatttttattgagtcagaagacatagcgcaaaaagtaaagtacttgaatactttcaactctcaagtttacaactggagacaatccctaccagagtttttgcaatggtctaagacgctcattgaggacgatgacgtatccactgaccctactatatcgtacttctggtattactactatatagtacggcttactttcaataagccgtttatagaagactcccatgaatcagagacagtggttatagagattattgatgatttgaagactctgttagacaatttcgggaagaaattcggaaattataccaaaggtaacctctaccaaatatacgcctgcctactggccatcaactgtctgaagaagctgaaggaaacgcgctccagtgagcaagattcgtggaatgcacaactagactttttcaaccacatcttttatacacaactgtccccgtcatacgaactgccgaagcgactacaagaagacacggagctggaaacagaacaagaaaaccagacgttgaaccaagtcggcaacataaactacacgcacgacttctcgctctcccatgagatcgatgatcttatcaaagagcttttcggagtaggcacgccccagaaactctaa

SEQ ID NO: 2504 - DNA, 981 bp, Saccharomyces pastorianus
atgtcacaagcaaaaagatctaacgagaaccgcgaagctacaaggttcatcaaaaagcataaaaaacagattacaaaccccattgatgaaaaagatgggacttctaactgtatagtgcgtgttcccatcgctctttatgtctctttggcaccaatgtatctagagaatcctttgcaagggatcatgaaacaacacctaaacccattagtaatgaaatataataacaaagttggaggtgttgtgttaggttacgaaggtttgaagattcttgacgccgatcctttaaacgaagaaaatcagtctgaaaaattgataaaaattacgcctgacacccccttcggtttcacttggtgccacgtgaatctatacgtttggcaaccacaagttggagacgttttggaaggttacattttcattcaatccgcttcacatatcggtcttttgattcacgacgcattcaacgctagtatcaagaagaataacattccaacagattggacttttgttcataacgaggttgaagaagatgccgacgtggtgaacatggacgaagatgatagatctcataataacgaagaaagcaaagataacaacggcggaaacaatagtctgggcaagttttcttttgctaacaggtctttaggccactgggtggattctaatggtgaacctgttgatggtaaattgaggttcacagtgagaaacgtttacactacaggtagagttgtttctgtggacggtaccttaataagtgatattgacgaagaaggcaacggctacaacagttctcgttcccaagctgaaagtctacctatagtgtcaaacaaaaagattgtattcgacgacgaagtttctatcgagaataaggaaagtcataaagaactagaactaccagaagtgaaagaagacaatggttctgaaatcgtatatgaagaaaacaccagcgaaagcgatgatgatgaatcaagcgatagtgattaa

SEQ ID NO: 2505 - DNA, 4995 bp, Saccharomyces pastorianus
  modified_base (3648)..(3679): a, c, g, t, unknown, or other
atggatatttctaaaccagttggttctgaaatcacatctgttgattttgggatcctaacagctaaagaaattagaaatttgtcagcaaagcaaatcaccaaccctacagttttggataatttgggtcatccagtttctggcggtttatacgatttagccttgggtgccttcttaagaaatttgtgttccacttgtggtttggacgaaaaattctgtcctggtcatcaaggccacattgaactacctgtcccttgttataatccgttattcttcaatcagctgtatatctatttgagggcatcatgtttgttctgtcaccatttccgtctgaagtcagttgaagttcatcgttacgcatgtaagttgagattgttacaatacggtttgattgacgaatcttacaaattagatgaaataaacttgggctctcttaacagcggtatgtacaccggtgacgaagctattgaagacaatgaagatgaattcatggatggcgaggataagcaatcaaaggatgtttcctccactttattgaacgagttgaaaactaagcgtgcagagtatgtcgatattgctattgctaaagcactatcggacggtaggactactgaaaggggttcttttaccgctaccgtcaacgacgaaagaaagaaattggttcacgattttctcaaaaagctattaaccagagggaaatgtgataactgtggtatgttttcgccaaaattcagaaaagatggtttcaccaagatttttgaaactgcattgaatgacaaacaaatcacaaataacagagtgaagggtttcattcgtcaagatatgatcaagaaacaaaagcaggcgcaaaaactggatggttctaatgaagaatctgcaaacgatgaagaaagtttcgacgtgggtagaaatccttctgctaggccaaagacaggttccacatatattttatctactgaagtgaagaatattttggaaactgttttcaagaaagaacagtatgttttacaacatgtttttcactctagacccaatctatcaagaaaattggttaaggctgattctttcttcatggacgtcatcgttgttccaccaaccaggttccgtttaccatctaagctaggtgatgaagttcatgaaaactctcaaaatcaactgttgtcaaaggttttgacaacagcattgttgattagagatctaaacgatgatttgtctaaattacagaaggataaagtctctctggaagatagaagagtgatttttagtagattaatgaacgcgtttgtcaccattcaaaacgatgtcaacgcttttattgattcaaccaaggcacagggcagaactagtggtaaggttccaatccccggtgtcaagcaagctttggaaaagaaggagggtttgttcagaaagcatatgatgggtaagcgtgttaactacgctgctcgttctgttatttctccagatccgaatatcgaaacgaacgaaattggtgttccacctgttttcgcagtcaagttgacttacccagaaccagtgaccgcttataacattgcagagttacgtcaagctgtcatcaatggtcctgataaatggccaggtgcaacccaaattcaaaatgaagatggttctttggtctctttgatcgggatgtccttggaacaacgtaaggcactagctaatcaattgttaactccttcttcaaatgtttccgcacatactttaaacaagaaggtttaccgtcatatcaagaacagagatgttgtcttaatgaatcgtcaacctactttacataaagcttccatgatgggtcataaggttagagtgttaccaaatgaaaaaactttgagattgcattatgctaataccggtgcttacaatgcggatttcgatggtgatgaaatgaacatgcatttccctcaaaacgaaaatgcaagagctgaagccctaaatctagctaatactgattcacaatacttgactccgacttcaggttctccagttagaggtttgattcaagatcatatttctgctggtgtttggttaacaagtaaagacagtttctttactagagagcaatatcaacaatacatctatggttgtattcgtcctgaagatggacataccactagaaacaaaatcatcactttgcctccagctatcttcaaaccatatccactttggacaggtaaacaaatcattacaacagtgctgttgaatgttactccaccagatatgccaggtatcaatttgatatccaaaaataagattaagaatgaatattggggtaaaggctctttggaaaacgaggttctcttcaaggacggtgcattgctatgtggtattttagacaaatcacaatacggtgcttcgaagtatggtattgtgcactcattgcatgaagtttacggtccagaagttgctgctaaagttttatcagttttgggtaggttatttactaactatatcacagctacggcatttacttgtggtatggacgacttgcgtttaactgatgaaggtaacaaatggagaactgacattctgaagacatctgttgatactggtcgtcaagccgctgctgaagttaccaatttgaataaagatacaccagcagatgacgcagaattattaaagagattacaagaaattttacgtgacaataataagtcaggtattctcgatgctgttacatcttctaaggttaacgttatcacttcccaagttgtctccaagtgtgtaccagacggtaccatgaaaaagtttccatgtaattccatgcaagcaatggctctgtccggtgctaaaggttctaacgttaacgtttcccaaatcatgtgtttgctgggtcaacaagctttagaaggtagaagagtgccagtgatggtcagtggtaaaactttaccatcattcaaaccttatgaaacggatgccatggccggtggttatgttaagggtcgtttctattctggtattaaacctcaagaatattatttccattgtatggctggtcgtgaaggtttgattgatactgccgtcaagacatccagatctggttacttgcagcgttgtttgacaaaacaattagagggtgttcatgtatcttatgacaacagtataagagacgccgatggtactttagtgcaattcatgtatggtggtgatgctgttgacattactaaagaatctcatatgactcaatttgagttctgtctggagaactactacgcattgttgaaaaaatacaatccatctgccttaatcgaacatttagatgttgaatctgcattgaagtactctaagaagaccttgaaatacagaaagaaacatagcaaagaaccacattacaagcaatcaattaaatatgaccctgtcttggccaaatacaatcctgctaaatatttgggttccgtttctgaaaacttccaagataaattagaatccttcttggacaagaattccaaattatttaaatcagcagatggtgttaatgaaaagaaattcagagctctaatgcaattgaagtatatgcgttctctaattaatccaggtgaagctgttggtattattgcctctcaatccgttggtgaaccttcaacccaaatgacattgaatactttccattttgcaggtcacggtgccgctaatgtgacnnnnnnnnnnnnnnnnnnnnnnnnnnnnnnnntgaccgcttcttctgctatcaaaactcctcaaatgacattacctatttggaatgacgtttccgacgagcaagctgatactttctgtaaatctatttcaaaagttctactatctgaagtgatagataaggtgacagttactgaaacgactggaacctcaaataccgctgggggaaatgccgctcgttcctatgttattcatatgaggttttttgacaacagcgagtatagtgaagaatatgacgtttctaaggaggaattacaaaacgtggtatctacacaattcatacatctgttggaagctgccattgtaaaggaaataaaaaaacaaaaaaagactaccggaccagacatcggtgttgcagtgccaagattgcaaactgatgttgcaagcagttcaaactctaaaagattgaaagaagataacgatgaagaacaaagtcacaagaaaaccaagcaagccgtttcatatgacgaaccagatgaagatgaaattgaaactatgagagaagctgaaaagtcttccgacgaagaaggtgtcgattctgataaggaaagtgattctgactctgatgaagatgaagatgttgacatgaatgaacaaatcaacaagagcatagaagaagctaacaacaatatgagcaaattgcaacgtgatcgtcaatcagccatcatttctcatcataagttcattaccaaatacaatttcgatgatgaatcaggtaaatggtgtgaattcaagttagaattagctgcggaaaccgaaaagttgctgatggttaacattgtcgaagaaatttgtaggaattctattattagacaaattcctcgcattgatcgttgcgttcatccagaaccagaaaacggaaagcgtgttcttgttactgaaggtgttaatttccaagctatgtgggaccaagaagcgtttatcgatgttgatggtattacatccaatgatgttgctgctgttctaagaacatacggtgtagaagcagccagaaataccgttgtgaatgaaatcaataacgttttttcacgttatgctatctctgtttctttccgtcatttggatctaattgctgatatgatgaccaggcaaggtacttatttagccttcaacagacaaggtatggaaacatctacctcatcgttaatgaaaatgtcctacgaaaccacatgtcaattcctgaccaaggccgtcttagacaatgaacgtgaacaactagacagtccttctgctagaatcgtcgtaggcagattgaataatgtcggtacaggttcattcgatgttttggcaaaggttccaaatgctgcttaa

SEQ ID NO: 2506 - DNA, 966 bp, Saccharomyces pastorianus
atgactattctagagcagctcaatgatgcagacatccctcaaaggctagataaccacatatttttcggttccatacattctttgacgcgtacgaatttcctactagaaaacggcatcaggtatatcattaatgtcgatatacctactgaaacactatcacatatctatcatgagcttcgcccaagcttgttcgatgaaacagtcatcgtgaacatcgacaattttgactctcaaatatcaatggagaacgatttagtgcgttcctaccattggtataatagttcccttctacagcagttaattcattacctcgatttcttggacgatattaataataatggtgaacctctaactccaccaccagaatctcactatcgaaatgcatacgttcaattcgatcatggctctaatgattccgtatcggcactggataatttgctgtacggtaacaagtctgaatattctcgtacaaatattttccgagtagccaacgaagctaaattccaagtctttaacgatttgatcacaattttcaaatgctcaatcgctcaaaacgggaacatgaacagtaacatactcattgtttcaggaaacggtaataacgacgaaaatttaataagtttattgatgtctaccgtcttgaaggcaaacccaacttttaacgtctaccaagctttacaattcgttaaatccaccactgtaatccctgacactgtaagagacgaaaagattctatgggccccggggttcatcaactatcaagaattaatcaagaaaaacgaaatgtattgggggttaggttctcagaagggtctcaaacctacgtcctttgcctctcccatctccaacatggaaaggaaacaaagaagacgcgacgactcaagtattgtcagaccaaagctaccacaacaacaacaaagttcgttctgctcaatagagagacccaagagggcccgctgcgattaa

SEQ ID NO: 2507 - DNA, 882 bp, Saccharomyces pastorianus
atgaattctattttagacagaaatgttagatctagcgaaaccacattaattaaacctgaagctgaatttgataactggttgtccgacgaaaatgacgggaccggtaatctcatctccaacaaagactcttcatcggttctttctgcatcttcctccacatggttcgaacccttggaaaacattatctcctctgcatctagttcctcgataggctcccccatcgaagaccaattcatatgttcaaataatgaacaatccgctcttttcccaacagacgagtttttcagtaatacttcctcttactcgaattctcccgacgctaacaacagcaactcagtaaaaagagaagaggaagatgaagacgctcttttattagcggactttgaaccggcctctttacaatatatgcctaacatgatggacggtgacaacggcgatgataactcacttaaaaacgaaattgaattaaacgatccattcatgaaaacaggattggatgctaaggaaacgaaaaagagggccccaagaaaaagattaacccctttccaaaagcaagctcataacaagatcgaaaagcgttacagaataaacatcaacactaaaattgcaagattacaacaaatcattccatgggtagcaagtgaacaaaccgctttcgaagtaggtgattccgtaaagaagcaggatgaagacggtaacgaaactgccgccgctactccacttccagcaaccgccgctaccagtacgaaactaaataaaagtatgattttggaaaaagctgtcgattacattttatatcttcagaacaacgagcgactatacgaaatggaagttcaaaggttgaaaagtgaaattgatactttgaaacaaaacagaaaataa

SEQ ID NO: 2508 - DNA, 1878 bp, Saccharomyces pastorianus
atgctgaatctatcgctacccttccataataataaccgacacagcgcgggcgtctcgcccgcgcagaccgtagtcaccttcacggacgccgccgtcggcggcgccgacaagaaggacgccaacgtcgtccaggtgacggagtcgtcctcctccggctcgcgcacacagcactacgaggcggaaaaggacgacgccatccgcatggagaagatctccaagaacctgtctgcgtcgtccaacggcaccgttcgcgaggaactcgacctggaaaagtcgccctctgcggacggagacgccggtccgccgcgcctgaagcaaggtctgcagtcgcgtcacgtgcaactgatcgcactgggtggcgctatcgggaccgggctactggtcgggacctcgtccacgctgcatacatgcggccccgcggggctgttcatttcgtacatcattatctccgcggtgatctacccgatcatgtgcgcactgggcgagatggtgtgcttcctgcccggagacggctccgacagtgccgggtcttctgccaatctggtcactcggtacgtagacgcgtcgctgggattcgctactggctggaattactactactgttacgtgatcttggtggccgccgagtgtacggcggcctccggggttgtcgagtactggactacctctgtccccaagggggtctggatcaccatcttcctgcttgttgtcgtgctgttgaacttctcccccgtcaaagtatacggtgagtccgagttttggtttgcgtccatcaagatcctgtgtatcgtggggctgattattctttcgttcatcctgttctggggtggtgggccgaagcatgatcgtctcgggttccgctactggcaacacccggggtccttcgcgcatcatctcacgggcggctcgctggggaacttcacggacatctacaccgggatcatcaagggcgccttcgcgttcattctgggcccggagctggtgtgcatgacttcggccgagtgtgcggaccaacgccgcaatattgccaaggcgtcgcgccgttttgtgtggaggctgatcttcttctacgtgctgggcacgttggccatctccgtgattgtgccctacaacgatccatctttggtcaatgcgctggcgcagggcaagcccggcgccgggtcttcgccttacgtgatcgggatccagaacgccggtattaaggttctcccccacatcatcaacgggtgcattctgaccagtgcgtggtccgctgcaaacgcctttatgtttgcaagcactagatcgctgctgaccatggcgcagacgggccaggcgcccaagtgcctcggtaaaatcaaccggttcggtgttccgtacgtggccgtgggcgtgtcattcttgtgctcgtgcctggcgtatttgaacgtgtcttcgtccactgcggacgtgttcaactggttctccaacatcagcaccatctctgggtttctgggctggatctgcgggtgcatcgcgtacctaagattccgcaaggccatcttctacaacaacatgtacgaaagactgcccttcaagacctggggccagccgtacaccgtttggttctcgctcacgatcgtgtccatcatcaccatcaccaacgggtacgccatcttcatccccaagtactggaaagtggccgactttatcgccgcctacatcaccctgcccatctttctcgtgctgtggttgggccacaagctctacaccaggacctggaaccactggtggcactcggtgtccgagatcgacgttaccacgggcctggtcgaaatcgaagagaaatcaagagacctcgaagaaatgagactgcctccctccactttcagggagaagttcatggacgcgctgttgtaa

SEQ ID NO: 2509 - DNA, 3054 bp, Saccharomyces pastorianus
atgtctactacccagagtttgctaagctcggtactgtctggagtgcgcaatgtgtctcctgacacgcaccagcagacgattgtcgcgattaacagatttcaagacgatccggccctgctggactccatagtggccaactgtgtgccccctttggtagattcgttcttccacgtgtccctgcaagatcagcggctcgccgcagaactgttctacaatcttgacaaaatctcccactcaatggtccttaaatcactagatacaaatatttttagattagacgacatcgtacactatttacacaaccaagccccgccctcttccttcgccgacgtcttgtgcatctatctaaacctgtcttggctcagcgtgattctgctctccccttacactttcaaagacaggttcgacgaaactcttcgagcatcagctcggttcgacacctacccgatctgcgtccctccgatctgtaagatcaaggccattctatacttcaagaactacacgcatggcttcgaccagatcccagaaccggatcgctcaaacgtccgtctgctcaaccagtttctgaaactgttcgttcgctcgcagaacgcaagaacttacttctcggaggagaacctgctgcatctactgcaccttgccttgtccgcccaggcaatcaagctcttaccgaaactgttccgggtttcgtacgaccacgcatcccacaatgtcctcgatgccatagtggaattttttcaagaacatctggattcgagttccacggatacgcgcttccagttgtcgcactcctttgccaagatcatcaagttcctccaccaggtggacccatccacgtccctcgaactcagcgggtacaccatcgaaaacaccgtttccatgctacaggagcctttggactccatcgacagcaacgagctacacacctctctcttggttattgccgaattggccctggccaaaaccctccccacagaactgatcaatcaggtcctgacccagatcatccccacgacctgccatttccagcaatctcaattccagatcatcaagggtcaccacattagagactcaacaaatttcatcatctggtgtataatacgatcaaataataacaacttggcacctcagatactgaaatccctactatctcacctactgataaatgcctttttcgatccagaactcatcatcagatactcgagtttcgctgctctccaagaactattgggcaggtccaacaaatctctggcgctggaccaaactgatatagcctctatactgcaggcaaactggaaagacttgccaagctcgtttgaagacaactcagacttgatccgtaaactgttccatcctgggagcaccgccaacacgtctgtctgcgtgtgggacgttttcgttcattggtccttcaattggaatttactcgataatctacatttgaccacgatgaaacttaacatagatcacaatttactgcccttgatcaaatcgcaatttgacccgcctcatttactgcactccatcttaaacagaccgggaaactcgctcatacaaaactgtcaaatattatacttacatttgaaactatttgaaaatggagtaaaccacaccacgacaaggcagctttgtataaacattttccgaaataagatcagttcacatttcactttccaggggaaactgaagaaaaagcactacaatgataactcgcctgaaccttttgaaatgtttgtcattctcaagtactggcaattgatggggcaacgtgatttcgaccaggatttgttttggagattcgtcaccataatagcgccacagaaaaaactaaccttatacaatgaattcatccctactacgcaacaaattatatcccagtgcgtcggtctgaattataatacagcagttcaatgcattaagtcaggtaacgaattggcttgccactcaatatgccatttgcctgatcaagaaaaattttgctctcttttcttttctctgtttcctacgttgacatcacagtccaaatcgatcctgatagatgaacttgaaaaccattgggagaataaagtaagtgctataccgccaaattcttaccaaaagttttttgacatcattataaactgtctggatgactatacaataactcagcaaggtgatgtaggacgtctggtaagaatacaagcgctaaaacttatacaagcacattttgatttgttctctggtaacggcgacatcttaaaggcaaaattaacaagattagcggcagagcctgccctagagatcaaaaaattaagtttccagttactcgctccaactacctcgcaaaataccgaaatatctgactctttgatactcaattttcaacatggacaaggtcaaactaaagaattctggaaaggctacatgataagcgcgggtgcaataaattttgccgactctcagttgacttcatctatcgattcatttattgtgtattttaggtctttaaccgcttctcaacaacttgagctttgtaatgatctgatcagaataatcccaactgctaaacaagtgggcgagtccaaaaaacatgatttcaaacaagatcctttaacgggcggcatgcgatttgataccgtaaagttcgccatcaattgtttaaaattctggacaaggatcatggagtctgggttagttattttacaccaggatttcaattttcaaggcgtcttcgctaaattatataatctacacctactagattatgtgacattaagagttaacgtggttagattcttcccctttttggcgatctcttatcaccacacaatgaaagaaacgactgaaaaaatcacacttaatcttgtcaattccatttcaaaaaggctcttggttattgtgaagcgtgaatatatggcaacaaaatcaagattcatggcagatcaaaatattgctttacaaggtatattccaaatactactggaattggatgccatgaggcaacttgaaactttacagatggcttgtagaaatgcaaactttacgaatattttagagtctgatattactttatag

SEQ ID NO: 2510 - DNA, 2400 bp, Saccharomyces pastorianus
atggtggcatcatcgtcgaagaggacgctggatccaaaggaggactttttgcccacagacaaaacgccgttgaattcgaacaacaccataatatccgaattagcatcacgagataaatcaagctctagtaacacgactttaaaactaattgcgttgaacctcaaatcgataccagacgatgaagtgagttatatccagaacgttgagagactatctttaagaaaaaatcaattgacgtctttacctcatagcttcaaaacactatccaagcttcagtatttggatttgcatagtaacaaattcaaagatatcccatccgttttgtcacactgtcctcaactagaaatcctagatatgtcgtccaatgaaattgaatcgttgccggacgatatatcgccgttctggaaggacaatatgcgagtattgtcgttgaaagacaacaacgtatcaagcatctatagcttgaaatcgatcaccaaattgaacaagctgagcgttttagatttagaagataacaaattacccaaagaagagcttgaccaagtacaaaattacactccatttcatgcaggcatcaccaaagaagagtattgggcaattgccatatcgcgatatttgaaagaccatcctatccaacctaccccagaaccgaaaatatctagagcagccaaaagaatggggttcataaacacaaacttgtccaatggaacaatgagtgataacagcataatctcgcctgcgccgaacgtaaactcgagtctggttgcaccaataacagcgtcttcctcaaacgcaacttccgttgtatcttttaatggaggtacaacaaccaatactgaaccggatgctggtggtgcagttaatggaacagagctatacaatcattctaagtataatgattacttcaaaagactatcaatcttaccagaagagtcattgagtaatgagcaccaaaagatatcgcatgcagaactggttttatcttgtagaaaactgttattcagtttcacagagtgccagcaagccattagaaaaatcgcatcattctgtaaagaaaaggcagtggcagtgaacgttgtgtcattattatattctgttcgatcacacactgataatcttgtagaggttttgcagcaaacagagaacgaagataagtcacatgaccaagcattaatcaagctatgtcttacgatcattacaagctttaaacagattataacattactgaggaagaattttgaaatctttttcaaagaagatgatctctgttttatccgaatgttttatatgacgttaatgtgttcatatacggaaatgtacaacgcatggacatttatcaaagaagatgatcaaataaccagcgctacaagtaagccttccaagaaacactccttttcaagacatgatacatcgtctaatatcacaaacggtggaggcaccgtaataaatacagccagtacaacgagcaatggaaatggtaaactgctaccgaaaacaagaagtacgagagccccatcaacatctgcattgatttcgaacgctaacaatgtggcgggagatacgcccattctaaacgcctcagcagttccattgttatcgccaggtataaacggtggacatggtcatggtccgattgtaggccatcagaatgcaataagcagtagcaattctcaaacgagtatgaacgaaggaaaaccttctattcctaacgacagcatatcaagacaacaatttcttcaacacaaaaaatccactagcgaccctaagaaagatctgattacacacgaacctaaaccgcatccagtaatgaactcctccatcatcaacgcatcaaataacaccaactcgatggtctccaattccaatctaacacctccgccaatgaacgctgccggcaacagtagcactagtgtagtggaaacaaatattgacatccaactataccagacactttcaacagtggttaaaatggttagtgttgtatataaccaattaacatccgagatttctaagatagccattgctagtaccatgggaaagcaaattgtgacggactcgttggcacctaaaattcgtgatcttacagaaacatgtcgtcaagcaatggatttatctaagcagttaaatgaaagattaaacatactgataccaaatgattcgaattcagaaaagcatttgacccctctagagaaactaaagacgtgggaggtaatgaactcattcttaaaagtaataatatcgattttggctaacaccaaagtcgtgatgagcgacgtccctaatttgaatgaacttagacctaacttggccaatttggcaaagattactaaagatgttacagtaatattagatttaagttcatataaagccgtatctgtaagtgctaattctccagagtaa

SEQ ID NO: 2511 - DNA, 1584 bp, Saccharomyces pastorianus
atggccttggcaaattccagacctttgcaaataacaaccttggagaacgaaattcttcataactcgaattctccggttttccaattgagttcgatgggatttaccactcgagccgacactatatcgaatccaggtacggatcttgttggtaaccagccgagtatgaatttcgaagataatagtttatctggttcttcattttcgtcctcctcttctcaagagactaagacttccaagtctaaaaaggattctgctgttcttaaaaaagacaatccgttgttggaaatttctaaattaatacctgttactggcgagaggccaaaacccgaaaacagggactctcctctcgatgacgacgttcttcacgcggtatttgtaatattatgggaaatggaccctaaccaacaaggtatgactgttaaacagctgtgcgatttgcttttgcagaaacatccggatatgtcaaatttatcaaccaagttatcaaacttgatatcagcaaaactgaatgcttatgtcaagaaaattgaaaaaggggaaaagacgttaatttatgctttatcaagagaatggtcaaattcttcccctagaagaatgctatatatatacagagggatattatcgcctgattataaggagcacgcacaggctgtcacaatgcagctcaaacaacaactagaaaaatcgggcgactcaagcgactcgagctcaaatggcaagaaaaaaaaggatcttaacagtaatcaattagctagcaacgataattattcaggaccgatgacagatatgaaaaacctgtcttccaatagctccttctcaaaaaatttaaatgtcggaaatttggccttttcactaagtccagaatttaacattccttactctacgtcaccagtgtctttaaatctatctccagcaataagcaatagccagcagcaattgcaaacaccattagcgactacaccagcacctaagagtaaaaaaagaaacaatctagacgagggcgctaatgactcaatgacggaaccgaaaccaaagaagagcaaaccttcaaaggcaaacaaacaaacaaaatctcagtcatcgtcagctttatctacaccaaaaaaggtatcatcctctacatcactgtctgcttttgcagctgccaagaacatttcgccagaatctgccgtgacccacaatgcatcatcaagtacttatgtcactgctgctgctgctgcaccaagactatctaaactattaccaaaaaatggattcaagaaaaactcgcgcagttccttagaactggctgcaattcataaagtaatctccacacaaactccaattgaaagttcttcagagagttctgtgtatgacagtagtagcaactcaccgcttagtattaccaccgcaggttcttccactgaatcgttgtcagacttcagctccagccatgataatgaaacggaatcgaacccgagttctcaagaaccacgaaacgaagttacgaattggatgaagattgtaagaaatggattcttaactcatgatatcgaatctccagaatcaatcacattagatgacctagaaaatatattcaattga

SEQ ID NO: 2512 - DNA, 1896 bp, Saccharomyces pastorianus
atgattaggttgagcaacaaaaatttgattagaggcatgcaaatggcaactttgccaaaacctagtcatttgaccttacagacaactttgacaagaagatttagtctgacatgcaaggttctaaacgagacagatattactgaagaagaaaaggagcaactcaatgagccaagagcccgggactacgtggatgtttgtgttgttggaggagggcctgcagggctagctacagcaataaaaatgaaacaattggacaacgcttcaggaacaggtcaactgcgtgttgttgttcttgaaaaatccagtgtactgggcgggcaaactgtatctggtgccatattggaaccaggagtatggaaggaacttttccctgatgaaaagtctgatataggcattccgttgccgaaggagttggctactttggtgaccaaagaacatctgaaatttttgaaagggaactgggccataagtgttcccgaaccatcacaaatggtcaatctgggccgtaactatattgtttctttgaaccaagtggtgggatatttaggcgagaaggctgaagagttgggagttgaagtctatcccggaatagctgtttcagatctgatatatgataaaaacaacgcagtgaaaggtgtcattactaaggatgctgggatttcaaaatctggcaagcccaaggagacctttgaacgcgggatggagttttgggcaagacaaactgtactagcggaaggctgtcatggttccctgacgaagcatgcgctcaaaaaattcgaattaaggaaaggtagacaacaccaaacgtatggattaggtatcaaagaagtttgggaggttaaaccagaaaatttcacgaaaggattcgccgcccacactatggggtacccattatctaatgacatttatggcggtggtttccagtaccattttggtgacggactcgtcactgtgggtcttgttgttgggttggattacaagaacccctacgtttcaccgtacaaagaatttcagaaaatgaagcatcatccgtattattccaaagtcctagagggcggtaagtgtatatcctatgcagcaagagctttgaatgaaggtgggttgcaatctgtacccaaactgaatttccctggtggggttttggtgggagctagcgccggctttatgaatgtaccaaagatcaagggaacccataatgcaatgaagagtgggttgcttgccgctgaaaaaatctttgaatctatcaaagagctgcctgtattagaagaaattgaagatgaagatgtcaaggcagaaatgttcaccaaagagccaattatcaatttggagacatacgaagacgcattcaaacaatcatctatttataaggaactatacgaagtgcgtaatatcaggccatccttcagtggtcgatttggtggatatggaggtatggtttactctggtattgattctttacttctaaaaggtaaagttccttggacattcaaatttgatgacaaaaatgacggagagattctggaacctgccgccaattacaagcccatcgaatatcctaaaccagatggcaaaatatcttttgatattctgacatctgtctccagaacaggaacttaccatgatgacaacgaaccatgtcacttgagggttcctgaacaagatatggtgaaatatgccgagagaagctttcccgtttggaaaggtgtcgaatcaagattttgccccgcaggagtttacgagtttgtgaaggatgaaaagtctcccgtgggtacgaggctccaaattaactcccaaaattgtatccattgtaagacttgcgatatcaaagcaccaagacaagatattacatggaaagtccccgaaggtggagacggaccaaagtacacactgacttaa

SEQ ID NO: 2513 - DNA, 708 bp, Saccharomyces pastorianus
atgactgatagaaatttttctccacaggagggccaggcgcctcgaggttcaattccggaaggattcaacgccaatacgatgattgcaagaggggatataaatataccaagacaacaacaacaacaaaaggaagaggaaaatacggggctgcccgtttctgaggaggaattccagatggtacaggaactgcaggccatccaagcaggtcatgaccaaataaatctaccgccaagcggtcgagggcctcttgagagcaatgacaactgcgatagcgatggtgcagagggcgatgtagacgacgaagacgaggagtacgacgtgtttcgaaacgttggccaagggctggtgggccactacagagagataatgatacgctactggcaagaattgattaacgaaatcgagtccaccaacgagcctggctccgagcaccaagacgacttcaaatcgcactcgctgccctttgcaaggattcggaaagtcatgaagacggatgaggacgttaagatgattagtgcggaggcccctatcatctttgccaaagcgtgcgagatattcatcacagaattgaccatgagagcttggtgcgtggcagaaagaaataaaaggcgtactttgcaaaaggcagacatcgcagaggcgctgcaaaagagtgatatgtttgactttctcatcgatgtggttcctagaagaccactacctcagtga

SEQ ID NO: 2514 - DNA, 1587 bp, Saccharomyces pastorianus
atgaaacacccgtatgaggaattccctacaggatccaagtcgccatacaacatgcccagaggagcccatcctggcgctgttttgctctcgccacaatcatctgccataaacaacaataacaacagtgcgggcagcaacaattgcaacaataatcagggcaattcatccgtggccacgaacgttttgtcccctcaatctcacagtatgtcgctcaatgatatgctggatcagcaatccttcatgctggatgccacaggttctatgccccagccactccagcaacaacaacagcagcaacaacagcaggcatctttgccttcccttaatattcaaacaatatcgtccacggcagctggttctgctatcgtttcccccatgatgcaatcaccaaaggcattacagtccactttatcttcaacgtcgatgtacttggattccttccagagatcttcaaataatattttgggtcttccatcgcaaaatagctcaatgcccttacagcaatcacgtcaaccgcaacagcaaccccaaccccaacctccaaaaaatgattcgaagacagccataaagttcagccaagatatcaaccaattgtgctcttggatatcaatgctgaatagtaaccaacaaaacactgtaatggacaatatcctctctgttttgcatgacgatgttttgaaatacactaaattgaaattagacaccttaacaaacacttcattcatgtcatcgcagcttcccgccatcgcatccccaatacctaacagggacgatacacagattttgaatatcgattctgttttttcttcaagtccaatcaccaatgactctgagaatactgataatttgctgtatcagaattggtcacctcaaccacattcaataccaattgcccaacctgtttacgataacatcactgactccggccaacggtccaaatcagcagaacctcattccaatacgaatccaaatctcattccacttcaaaagcaattcgatggtaacagtgccaaatacaaaaagtcaccatcggataactccgcttacgttgcacactccctttcaacttcccattcttactttcaaccaaagaaaaggtcaagcatggcgaatgagtacaactcccaccaccaccattcattgcatcatcctttacataattcaacttcatacttttctagcagtccaagatcatcaggaactgaagcattgagtaagtccaaccaaaatgtgtttaacactaccaacgaccacctcaatgttggtactggtgctacaagcactacacctgcatctacaccatctaacggaaacacaccactatcgagtaattcttcaatgaatccaaagagtttaaccgacccaaaattattaaagaatatacccatgtggttgaaatcgttgaggctacacaagtactcagatgccttaagtgggaccccatggagtgaactgatttatttagatgacaaaactttagaaaagaagggtgttctcgcattgggagcaaggagaaaacttttgaaggcttttggaatagttatggattacaaagaacgtgatttaattgatagatctgcttattaa

SEQ ID NO: 2515 - DNA, 873 bp, Saccharomyces pastorianus
atgacttcaatcggtaccggttacgatctttcgaatagtgttttctcccccgacggtaggaatttccaagtggagtatgctgtcaaagccgtcgagaatggtaccacctcaattggtatcaagtgtgaagatggtgtagtatttgccgtagaaaagctaattacttccaaactgttggtcccacagaaaaacgccaagatccaagtcatagatcgccatattggttgcgtgtactcgggcttgatcccagatggtagacatctggtcaatcggggccgtgaagaagcggccagcttcaagaagctgtacaaaacgcccattccaatccctgcctttgctgatcgtttgggtcaatacgtgcaagcgcacactttatacaatagtgtcagaccatttggggtaagtaccatatttggtggtgtagataaagatggcgcccacctttacatgttggagccaagcggctcatattgggggtataagggtgccgccacaggtaaaggcaggcaatctgcaaaggctgaactggagaagttagtcgatcaacacaccgaggcccttacagcaagggacgctgttaagcaagcggcaagaatcatttatttggcacacgaagataacaaggaaaaggactttgaattagaagtaagttggtgttcgctatcggaaacaaacggtctccacaagtttgtcaagggtgatttgctgcaagaagcgattgatttcgctcaaaaggagcttaacggtgacgacgacgacgacaatgatgatagcgataatgtcatgtctagtgacgatgaaaacgcgccagcagctacgagcgcaaacgcaaacgctacaactgaccaagagggtgacattcacctagaatag

SEQ ID NO: 2516 - DNA, 3012 bp, Saccharomyces pastorianus
atgtatttcaatggccccccatcaccgacaatgagcagcattagtaaaaagagaaataggctctccttcgtttgtcaagcctgcagaaaagccaagaccaagtgtgaccaggagaaacctcgatgtggcagatgcatcaaacaaaacttgttttgtatatacgatgttgccagacaaaaggcccctagaaacccaaataaagatgctaccatagcgagattgaagaaggagattcgctactggagaaacaaaaccgtggacctgacacaagagaagaaagatttctacacggcattaaacagatcaaccgaggaaccgagcaaaagtgttaaaaggatgggcaaaagctctctaaataacacctttccaataagtctatataagacccatcccagattgattatgaccaaggtaatgaaaagggagatcaaccctttgtcagagaaatacttgatatttcaagatacatttctcaaaaccctaattgcttctgtacttttgaattcgtccagaaattccatgatccctgctttaaatgccgatatcagtagctcggggacacaaccatgcgtgagaaataatgtagtgaaaatgagggatgttcttttgaaaaattcgaagtacgaatcacaaagaaagtccatcaatcagtttactgataggcttttacagaaaaaggatccagaagaacaagcggcgataaataatgtgatttctttgctctacagtaacaatgaatcatcatatctggaggatacatgctcttccgaaaacgattattctgatttattgaaaaactacattaccgaaatcgaaaagacaatccccccaaaagccattacagaactatacgtttctcatttttttgagcatatttatcatttaataccttttgcaaacaaagaaatgtttgaagagtctattcatataactgtacagtatgacgaattcgagaaggtacggttgtccatggggacaactctcttgcgaaataaaatggaaaatttatgcattttactgttaatactgagaatatcttatatctctttgaagtttatagaagaaaagattgaagactacagcccttatatcactaaaaaaatgttagagcaatatcccatacaaagcaaaataattttcttatcgcagcagatacttgcatctgaaaactggtgtgcgtgcgctaatgagaacactatttcatgcttactttatatttggtcggcatttgttttctccccaactgagggtgactttttattagagcaaccatccgatattattatcaaccttgtaattataatagggacgtccattggattacaccgtgatccgtccgactttccagccttgaatcatcccgaagtctcagacaaaaggctgctaaatttaagaagaatacaatggctatcaattatttctatggcatctctggagtcgagtttaaaaggtaggctattggtatctcccctttctatgattgatcttttcataaatgttcgagatccaaattgcgtagaaatctataaaggaagagtcaagaaggatttaacaggttccgaatcagatgaacaactgctagaaattcatgaagtatttttctaccgagctcagttggcactattcttatctgatttgaacaatataactatatcatacagtggttcagtcccaatggatacgttagaaaccttgcgtattaaagccaatgagctgttaaggaacaaatttcaattaaggaatgtggatataaatatctccgatgaagagaggacgtttcagaaattgagctttaattcagttttgaactcaataagtctgtcaggtcaaattttaggtaaactgatgatgctaagagcttcaatagccttgatgttatatttcgaaacacttgcaatggaaagaagcgaatgtttgcctttcttttacaaatatttttttcaatgttgtgcagataccatttctttgatgagattttttttgttatatttcaatggcagttatgagaaagttctttcatctctagtgtgctgtatcaccacaaaagttatacaagttgcagttcccaccacaatgttcaccctattagtgattataatgagagcggaattggccaagaatatgttactgataaaatgtaacgaatgcaatgcccgaggagacattaataacctccccgaaattaaggaaaaaatcaagttcttagatattatcaaagacaacttcgagaaacttttattagaggtatatcttcttgcctcccaacacctgaggttcaaatatttttacattttcaaaatgcttaccttatttgatgtattcatccaacggttaagaaaaggtcagctattttcaggattgtttgtaaaagtgaacaaagatcaaactacgaaaaaaattgccacaatgctggagttaactcttggtataaatctggacaagtctgaccatttaatcgatagattaaaaggcaaaaatcctactgttaactttagccttaaccaactaaaccaaattctcaaggagtttgataaaataagaaacattggcactactgatccacacaattctcttaatctatcaaagccgaacataaaggataatacacccacaatagagcttttactcaactccacaatggagaaacacagtaatgcaccatcttcaagttactcaaaagaagccgctaccctgggtggtacctcgactcgtgtgccggcgcataatagcggtaaccacagtgacggtgaaaaattaccctctttaacttattcgagtgaaaatagctgtgatgcacctaacctaaattttgtcgcaggaaacaatgactataattccaacgatgccaatgctaataatgataccgccgttagtgacaacaccaagtcttctagcaatttcaagaggcgcaacgacgctcctatgccttctttggatggattaatggatgtcccagacatctttggcagtcttgatttctttgattatgaccttctttttcagaatgactag

SEQ ID NO: 2517 - DNA, 2112 bp, Saccharomyces pastorianus
atgctacctattgatatgcttcttcgttgtattttcgttttaactatatggttccatcaggcacatgctatttcgattaatagctcaaattttcaggtttcgaactcattcacactactcaataatgcgtcgcaactgttttcggaacccttcgatatatccactaaatacttgaagacgtcagctttattgacttgtgtgagaaattcacaattttctgcatcgtattttgaagctgctttctttcccctaaataatacaatattctttgatattgaagcccaaacaattatgaatgagaacataaccataaaagcagagcttgtaacatacggtctcaatgtttataccaaaacttttgatttatgtgggatacaagataatttattatgcccactaaagcccggaaatatagaacttattggaagttatcaattggaaagcgcgatgacaagccaaattccggctatagcatatagcattcctgatttggatgcgtatattgtagtgtccgcatattcttcttctgataaaaaattagttaaaccgctagcatgtgtccaagtgatactaactaatggcaaaaccgtccaaacacaatacttgtcctggattctggtggcattaaccgcttttggagtggtgttttcaatcatttattctttgcaaggctatacagccacttcgacacgcttggcatcttattcgatatcgttggttttatatttccaaaacttggcaatcctttctatgatcagtgtgtcatttttaccgcccattgtcgccgcgtggacccaaaatttccaatggtctatgggtataatcaaagtagattttatgcagcgcttatttgactggtatattatggctacatctggttcccctacagttgtgtatcacaataaggacattctatcaattagtgttcaaaaacgagagttggatgtaagcagcaagactgtatccgcttcaagcaatttaaatggtattgaaagttctcaaagggacacattgctatatacttcaaacctgagaaatccaaagaattacctgtcaaaaattttaattttaagaggtattaaaagagtatcatataaggccggaattgaattgtcaaattttttcttgacaggattctctttttttattatctttattattatgatagtaataggatttgctacgttcaagttatctttgaaactactgcgaaagtttgaaatcaaagctacgaggtatttacacttccacatcaactgcagctcactcctccaagggacactatatcgagtaattctcataatctacccacaaatatcgcttttatcgctttgggaatttactcaaaaagactcagcagcagccttaatagaagcgattgccgtttttcttataacgacagctttgctgtcgtctgcaggtgtaaggatatggagacagatgcacaaatccaaaaagttttttggccactcaagctatctactcttcggcaactctgaatttctaaacaagtttggcttcctttattctcaatatggttctccaaaagcatggtggcttattgttacgttagcatacatgctcataagatctgttttagttggaactctacaaactcacggaaagtcccagtctgcgggtatcttcttaactgaagttgtttatctcgtatttttgtgttgggcgcgaccttatatggacaagataaccaatgtctttaatatcagtatccattcgttgaacttagtaaacgcattcttttttctatttttcagtaatttgttccagcagcttatggctgtttcctcctttatgggaataattttcttctttttgaatgctttgtttgccatctatctttccgttttcattctggtgggatattcttcggcaatatactacaagcaccctgacacgaggtacaagcctattgatgaccaaagacgatccttcctaaaaaatgaaatggatgatgatgctacttacgcattagtgccagaactacacgaaatgaaaaaggccgttcttgaatgcaacggcactcaaaaaccgcaaattaacaagatcgacctttgtaaacacagctcgaacaacgagtatctgtacatgtga

SEQ ID NO: 2518 - DNA, 1209 bp, Saccharomyces pastorianus
atgcgcatcaacaacgagctagcaactaagttttcggcttcgactgtccatttggaacatatcacaacagctttgaattgcctgacaccttttggcgcgaaagacgatgtacttatatttattgatgcagatggcctgtcgtttgtaagggagaacaaccatgttataaaaatacaattactactatcccgagagttgtttatgtcttattcgtataggaatgaaactgaagatcatatgaaactgtgtgtaaaaataaatcatattttagacagtgttagtgtgatgaatagaaactcagatgatattgtagagtgcactttatcgtacgatggacatggatccccatttgtgctcatatttgaggattcgttcatatccgagagagtggagtactcaacttatttaataaaggactttgatacaaatggattagaacttgatagagagagcataagctttgaggcgatcattaaaggtgaagctctttattcagcattgaaggacttgaaagaaatcggttgcaaagaatgctatgtttatgcgaagactgacgcaaacaatgataacgtatttgcactaatatccaaatcacagctaggcttttcaaagatcaaattaccaagcaacaggtcaatactggaaaaattacaagtttttgatggcgattccacaaccgtattagacgggtccgctgtaattgggttctttgattttacttcatttgataagattagaaagagtactaagattgcaagtaaagtactctttagaatggatgttcatggcgtattaagtgtaaatattttaagccaaacagacgatgtgattatcacagataccgcaagaccgtcaaacagtcgattggttactggtgtcggccaactgcaattgccaaaggattatcctggtatagttattgaggtttgtatgttggagaaagaatctattgacgaagtagcgcagacggaaatagagcttctgatggagactaatgaacttggtaattataacaattctaaaaaattcaccccaaataagaggtatgctgctgcatttgggaataacgaaggctccgatgagaacttactgcaactaaatggcaaaaaagtaaaattaccaccggaagatataagtgataaaaagaacgatagcgatcaagaaaacaactacacatatccaaccaacgacattcctttgttcttttaa

SEQ ID NO: 2519 - DNA, 432 bp, Saccharomyces pastorianus
atgtctgacgttgaagaagtcgttgaaattcaagaagaaaccgttgttgaacaaaccgctgaagttaccattgaagatgctttgaaggttgttttgaggaccgccttggttcacgatggtttggccagaggtttgagagaatctaccaaggctttgaccagaggtgaagctttattggttgttttggtcagctctgttaccgaagctaacatcatcaagttggttgaaggtttggccaacgacccagaaaacaaggttccattgatcaaggttgctgacgccaagcaattaggtgaatgggccggtttaggtaagattgaccgtgaaggtaatgctagaaaggttgtcggtgcttccgttgttgtcgtcaagaactggggtgctgaaactgatgaattatccatgatcatggaacacttctcccaacaataa

SEQ ID NO: 2520 - DNA, 1815 bp, Saccharomyces pastorianus
atgttaagtcccgaacgtagaccatccatggccgaacgtcgtccatcattctttaattataaccagaacgcgagtcctttggtggtcccacatttagctgggattgaagatcccttaccggctactaccccggataaagtagatgttttaattgtgggaacaggtatggtagaaagtgtgttagcggcagcattagcctggcaaggttctactgtacttcacattgacaaaaatgactattatggagacgcttctgccactttaaccgtagaccaaatcaaacgatgggtaaatgaagtcaacgaaggttcggtaagctgttacaaaaatgcaaaactgtacgtatccacgctcattggtagtggcaagtattcgtcgagagatttcggtattgacctctctccaaagattctattcgcaaaatcagatttattgtcaattttgattaagtccagagttcaccaatatttagagttccagtctttgtccaatttccatactttcgaaaacgactgcttcgaaaaattgaccaacacaaagcaagaaatattcacagatcaaaatttgccattaatgactaaaaggaacctaatgaaatttatcaaatttgtgctcaacagggaagagcaaacggatatatgccaaccttatgcagaaaggaccatgtccgattttttagtagaaaagttcaaattagaaaaaccccaagtcttcgagctaatattttcgattgggttgtgttatgatcttaatgtaaaagtaccagaagccttacaaagaatccgtcgatatttgactagttttgacgtttatgggccatttcccgcattgtgttccaaatatggtggtccaggagaattgtcacaagggttttgtagatcagctgctgttggaggtgcgacctataagctgaatgaaaaattagtgtcttttaacccaacgaccaaagtagcctcatttcaagatggctccaaagtagaagtttccgagaaagtcataatatcacctacccaagcccccaaagacagcaagcaccttccacagcaacaataccaagttcatcgcctgacctgtatagtcgaaaacccttgtaccgaatggtttaatgaaggcgaatctgctgccatggtagttttccccccaggatcgttgaaatctggtaataaggaagtggttcaagctttcattcttggtgccggtagtgagatttgtccagaaggaaccattgtatggtacttatcaacaacagaacaaggtccacgtgcagaaatggacattgattccgccttggaagcaatggaaatggctcttttgagagagtcttcatcagaattagaaaataatgacgaaattgttcaactgacgggcaatggtcatacaataataaattccgtaaaactgggccaatctttcaaagaatatgtccctagggagagattacagtttttgttcaagctttattatactcagtacacatccacaccaccattcggtgtagttaactcctccttttttgaatccaatcaagatttagaaaagaaatacatccccggtgcaagtgataatggtgtcatatacactaccatgccttctgctgaaatatcatatgatgaagttgtaactgcagccaaagtcctatacgaaaagatagttggtagtgatgacgatttctttgatcttgattttgaagatgaagacgaaatacaggcaggcggtgttgtgaacacaaaacagtttgaaagcgccattgacgacgacgacgacgatgttattatggagggttccggggaatttgtaggtgaaatggagatatga

SEQ ID NO: 2521 - DNA, 2697 bp, Saccharomyces pastorianus
atgcctctatcaaacacgtttggaacgcacagtttggaaacccactctttacatattcaaccagcaccgcacatgaaattgagtaaagaggaaaggtctcattatagggagcggtaccactcactagactatatatctaattatgtgtctgtatttgaccaagcaatgagctataatatcgattccaggattagaaaagagaatgagctcttattgaaaaagtactatgaatcaaggaaaccttttagcttcaccaacttcaggcaaggaagtgtaattagctcttcggattcttctacaggctttaccgaaagaacaaagatttatagtttcctaaacgattttattagtaactgcgttaatgaagtagatccatacacactaaaaatgacagtaagaaatagacatagcgctttaaacatggtcaacatggatgatgaacgtaaggacaaggatagcgaggacaatcttgaagagaatcctaataacgatcattttggtaggtctggtgatggttctttatattcgtcggaaagattggagatactccgctcctgctcaacaagatcatatttcaaatattataaaaagcttttgacagtagacctaaaggattgtgatattttgaaaagacataatttatggatgccaatgattgccagaaaatttaggtttatattaatatccaatgcagaaccaaaggatgcaagtttagcgagccccgttccaatacctattatatcgccagacttagatatttttcaaaaaaagacatgccctcttttcatcaatggtacagactgtgttcccaagagttatgatacgttttcaggttcttcagtagtcatgtcaattttttcagagttcaaattcccaccattaacataccattgttccgttgaattgaatgaccaactgtttattgtcgggggtttgatggcgtgccatcggtatgatgaagaagcagcggatttaaaagatttttatgttgatggcataaagaatctaccaccgccactattaccggacttaatcaataatccatccatgatttctaaccctcatttatactgtttatccttaacttcttccagactaacaagaccagacattgcaggttacattccccctccactggtgtgtagtcagggttgcaaattgacggaaaggcatatattcttttacggtgggtttgagatcaagtcggaaactcaagtagatgataagggaagatatttcataaggaagagagcttttttgaataacaccggctacattttagacacagtgacatttaaattttccaagatcgaattggtagctcctccataccaatttgccatttacaataatttctcaccgaggtttgggcatatgcagtcatcagtaagtaattctagtaataacttggctaatgacagctcctcgacaagcaccaagggtagaagatcgatcagcccatatcgtcggggtagtggagactacaagattgatgatttagtgggcccgccagctagtaaagattatttaccaagcgattccatgtcaaacgtgacaatcccaagatctacagatagtttttcttccaaaacttttagtacaggaacacattcttgtagctctgttaataccattattatctttggaggctatagtcagaccggtgatgataaatacgaagctatgaatgatatgtggaaaatagacatcccggtcatatctcgtggtaaacgtaattattacaaatttgctgacacggtgacagttactaaaattcctgttattgatgatccagaactatggccgagcagaagagcattttcagcatgctgtgttcctgattatttcacacaagaagcagaacctattgaaaaaaggcttttgagaaacttgaaaaacgacttttccatagatatggaaacccagccaggcaataagccatctcaaccgcttttcccaaacataccacattcaagaaaggagaagaaaaatgggcgcgatagtatgcatgcttccagttcaagcaacagtactagtgacgacgcctcgttgaaatctgctaaaaatacgaattcaagtccttctataagtcccaaacacacgccaccactgaacatgccgaagagaggcactccattcggaagagtggtcgcatttcacggggggtctgatcgctatagcgtttgctgcgatatgtggtggtttgatttcgattcggaaatttgggcgaagatagacctctttgctaaaacacaagatgagtctgatggtttggtacccataagcctctgtatggttgggcactctatgacgacagtgggtcgtaaggtggtgcttatcggcggtctacgacaagaagatgttgaccgattgtatatggatgaagccgttcccgaagaaaaagtatcaggtattccgctcggtagtggtgtaataaatgttgtggatttggatacacaatgtcttcagggctgtaaactaatacgatatgaaggggacactaaggattcagtcattatggactttcacctcggcgaaccccatcaagtattggccgtagcaggctcagtagcacaatgcaagggaggtgtgaccatggtgggcggggtggtagccggtcgtcaaaacatctcgaaactttatctgaggggagctgtcttacagttgattcttccaagtatgaatttggccaactaa

SEQ ID NO: 2522 - DNA, 1638 bp, Saccharomyces pastorianus
atggataaaaacacaggctaccaccaaaaatttacaactaccggggcggcggctgcttcttcaaggcagcttcccacggataataacgcagatacaaattttttaaaagtgatgtcggagttcaagtacaattttaacagtccgttgcccacaactactcaattcccgactccttactcctctaatcagtaccagcagacgcaggaccattttgccaacacggacgcacacaacagctccagtaacgaatcgtcactggtagagaacagtatcttaccacatcatcaccagcaggtacagcaacagcaacaacatctcggctcgattgtgccacccgcagtgacaagaacagacaccagtgagaccctggacgatatcaacgtccaaccttcatcagtcttacagtttgggaattccttgcccggcgagtttctggttgcctcccccgaacaattcaaggagtttttattagattctccctctaatagcttcaatttttttcacaagacaccggcaaaaacaccgcttcgatttgtcacagattctaatgctgctcagccgaccatagtagacgactctaatcaacaacaaaatatctttagcaacgcggaattgaacaatcttttaaaaagtaatgggaaaatgtcttcctcgttatctgccggtgcattctcgcgtactccgttaagcaaaatcgatatgaatctcatgtttaaccaaccattagccacatctccatcaaagaggttttcttctttatcactgacgccatatggtagaaaaattttaggcgatgttggtacgccgtatgcgaaggcgttgatatcttccaacagtgcgctggtagatttccagaaggcgagaaaggatatccatactgatacaaccaatattggctcgataaataccactaatatcttacaaagaacaccgtcaagatccaatggtaagaaaatattcatcaaaaccccccaggacgctatcaacggtactagcacactcaccaaggaccacgaaaacaaaccagatttgtatggctcttcgcctacaactattcaactaaattcatcgataacaaaatctatttccaaattggataaccccagaattcccctattagcctccagatcggataccatattagattccaatgtggacgatcagttatttgatttggggttgactagactacccttatctccaacaccaaattgtaattctttacataattcaaccgcaagggccaccgcattacaaattcctgaactacccaagatggggtcctttaggagcgatactgtcaccaatcctagcccaagttcaaatacgatctctttcaaaagcaaatctggtaataataattcaaaaggcaggatcaaaaaaaatgggaaaaaaccctctaaatttcaaattattgtagcaaatattgaccaattcaatcaagacgcatcatcatcatcatcatctttaaataataatacaaacactaatgcaggaatttcaaattcaagtatgccaaagaaaaaggctaataaacttaaaagatcacaatctttactttcggactccaaatctaaatcgcaagcaaagaaaaattgtaatccgaaacccaatgaaaacttattcaattcacaatga

SEQ ID NO: 2523 - DNA, 1560 bp, Saccharomyces pastorianus
atgtttagtagatctacgctctgcttgaagaagtctgccgcctccgtcggcagactgcaattgagatatttctcgcacctccccatgacggtccctatcaagcttcccaatgggttggagtacgaacagccaacggggctgttcattaacaacaagttcgtgccctccaagcagaacaagacttttgaagtcatcaacccctccacggaggaggaaatatgccacatttacgaaggtagggaggacgatgtggaggaggccgtgcaggccgccgaccgcgcgttctcgaacgggtcctggtctggcatcgaccccatcaacagaggtaaagccttgtacaggctggccgagttgatcgagcaggacaaggacgtcattgcgtccattgaaaccttggacaacggtaaggccatttcatcttccaagggcgatgtcgaattggtcattaactacctgaaatcgtctgcaggttttgccgacaaaatcgacggtagactggtcgataccggtaggactcatttctcgtacaccaagagacagcccttgggtgtctgtggccagatcattccttggaacttcccattgttgatgtgggcctggaaaattgcacctgcattggtcactggtaatacggttgtgttgaagactgccgaatccactcctttgtccgcactgtacgtctctaaatacatccctcaagccggtatcccacctggtgtgatcaacattgtatctgggtttggtaagattgtgggtgaagccattaccaaccacccaaagattaagaaggttgccttcacagggtccacggctacgggtagacacatttatcaacaagccgccgccggcctaaaaaaagtgacattggaactgggcggtaagtcaccaaacattgttttcgccgacgccgacttgaaaaaagccgtgcaaaacatcattcttggtatctactacaactccggtgaagtttgctgcgcaggttcaagagtgtacgtggaagaatccatttatgacaagtttatcgatgagttgaagaccgcctccgaatctattaaggtgggtgacccattcgatgaagccacattccaaggtgctcaaacctctcaaatgcagctaaacaaaatcttgaaatacgttgagattggtaagaatgagggtgcaaccctgattaccggtggtgaaagactgggcagtaagggttacttcgtcaagccaactgtcttcggtgatgttaaggagagcatgagaatcgtcaaggaagaaatctttggccctgttgtcaccgtcaccaaattcaagtccactgacgaagtcattaacatggcaaacgactcagaatatgggttggccgcaggtattcacacctctaacattaataccgctttgaaagtggccgatagagttaatgcaggtaccgtatggataaacacctataacgatttccaccacgcagttcctttcggtgggttcaacgcatctggtttgggtagagaaatgtctgttgatgctttacagaactacttacaagttaaggccgttcgtgcaaagttggaagactaa

SEQ ID NO: 2524 - DNA, 1365 bp, Saccharomyces pastorianus
atgtccgagccagaatttcaacaagcttatgatgaagttgtctcttcgctagaagactctactcttttcgagcaacatccaaagtacaaaaaggtcttgccaattgtctctgttccagaaagaattatacaattcagagtcacttgggaaaatgacaagggcgaacaagaagttgctcaaggttacagagtgcaatacaactccgctaagggtccatacaagggtggtttgcgtttccatccatctgttaacttgtctattttgaagttcttgggtttcgaacaaattttcaagaactctttgaccggcctagacatgggtggtggtaaaggtggtttgtgtgttgacttgaaaggaagatccaacaacgaaatcagaagaatctgttacgcctttatgagagaactaagcagacacattggtcaagacaccgatgtgccagccggtgatattggtgttggtggccgtgaaatcggttacttgttcggtgcctacagatcatacaagaactcctgggaaggtgtcttgaccggtaaaggtttgaactggggtggttctttgatcagaccagaagccactggttacggtttggtctactacacccaagccatgattgactacgccaccaacggtaaggaatccttcgaaggtaagcgtgtcaccatctctggtagcggtaacgttgctcaattcgccgctttgaaggttatcgaactaggcggtaccgttgtttctctatccgactccaagggttgtatcatctctgagaccggtatcacttccgagcaaattgctgatatctctagtgccaaggtcaatttcaagtccttggagcaaattgttggtgagtattccaccttcactgaaaacaaagtccaatacatttccggtgcccgtccatggacccacgttcaaaaggtcgacattgccttgccatgtgccactcaaaacgaagtcagcggtgacgaagccaaggccttggtcgcccaaggcgtcaagtttgttgccgaaggttccaacatgggttccaccccagaagccattgccgtttttgaaactgctcgtgccacagcctccacactaaaggaatctgtctggtacggtccaccaaaggctgctaacctgggtggtgttgctgtttctggtttggaaatggcccaaaactcccaaagaatcacatggagcagcgaaagagtcgaccaagaattgaagaaaatcatggtcaactgtttcaacgaatgtattgattccgccaaaaagtacactaaggaaggtaacgctttgccatccttagtcaagggtgctaacattgcaagtttcattaaggtctctgatgctatgttcgaccaaggtgatgtattttaa

SEQ ID NO: 2525 - DNA, 1548 bp, Saccharomyces pastorianus
atgtcaaaagggccctctctaacgcaaaaaaacctggaaacaagtgcggaaacaacgaaaacagacgatggagtattgttagatcagttcgagatccaagatgaaacccccaaatctctggtatgggaggctgccttcgtcggtgtcctgtgctcggctcaattgatgacacaggcaggacttggccaatcaatagcgcctctccatattatcggtgatagttttggaacgaagaatcctgggcaattgagttggtttgcctcctcatactccctcactgttgggacgtttattttgattgccggtagactcggggacatttttggtcacaggaagttttttattcttgggttcttgtggtatgcgctgtggtccctgcttgccggttttagcgtgtactctaacaagatctttttcgattgttgccgagcctttcagggcatgggtcctgcctttttactacctaatgccattgccatccttggtcggacatataagccaggaaagagaaagaatatggtctttagcctgtttggggcctcagctcctggtggattcgtccttggagcggtgttctcgtccatgttaggacaactcgcgtggtggccatgggcttattggataatgggcatcgcttgttttctcttagcagtagcaggttatttcgtgattcctggtactcaaatgccgagccgcaattcaccatctttcaacatattggaacgggttgattttgcgggatctgttactggtgtcattgggctaattctcttcaattttgcctggaatcaaggtcccgtggtgggttgggaaaccccatatacgtatgcgcttttaatagttggaaccgtgttcttgggcgtttttggattcatcgagtcgcgagcagcttttccattacttccatttgctgcgctttctagtgatgctgccttcgtgcttggatgtatagctgcaggatggtctagtttcggcatttggatattctacacatggcaattcatggaggactcaagggagcaatctcctctcctgtctagtgcacaattcgcacccgtgtcgatcagcggattttgcgcagccatcacgacaggatttcttttaagccacacgcctgctagcacggtcatgctttttgcgatgacagcttttactgtaggaatcatattgatctccacagctcctgtcaaccagacttattgggcccagacctttgtctcaatcatcgttatgccctggggaatggatatgtctttccccgctgctacaataatgctgagcaactcaatgccacacgagcatcaaggccttgcagcatctttggtcaatacggtagtgaactattcgatatccattggactgggtgttgcaggtacaattgagtctcaagttaatgacggaggatccaatgctctgaaaggataccgttgttcttggtacttgggtatcgggttgagcgggcttgggatttatgtcgctgcagtgtatgcatcgagcacatttgtgaagtctaagaaaaaggctaccgaaaagcaatttatagaataa

SEQ ID NO: 2526 - DNA, 1638 bp, Saccharomyces pastorianus
atggcttcttcagggcccaatgcacaaccatataaacgtcaaagagtccggaaagcatgtgtgccctgtagagagcggaaaaggaagtgtaatggtaaatcaccatgtgaaatgtgtgttgcgtatgggtatgtatgccattacaccgaagatgatgggttgttagcaccgtctcgtatgaatcaggtggaagaaatgcctcgtgatacagggaatacaccgtacgttcccttaaacattattaggaatgggacacatagtactgatacccagaaccttacaaatcgaaatattatcgatcgaactaagtctagatacacgatccagcattcagcagtcgctttccctcgtagtcttggcctcgagctccgatcaaccaaccccccacgtcttcattgttttgcttggcattgtgggatcagaccagaggaaaagccgaacttccatgtacctttgtctgatctagtcacaaaggaagagtattaccgcatctcaaaagtgtacttttcggttgttcatccaatctttgatatcgttgatcccgagcagctaggaaagaacgttgaggcatattggaacggcgacgcagaaacatcagagtatggtgctgtcattgcgggagttattgccttaggatcattctttatgggaagtcttggtcatcctcgagagacggatataatacgatacgcaaagggcatcctggatgacccgactttcagtcgcattccctcaatggagcaaatatccgcatgggttttgcgcaccatctacttgcgtgccactgcccgaccccatgtagcatggctggctagctgcttgactattcacctttcagaggcaattggcctgcatcatgagattgacagagaggatttagcgttgacaaataacgtctcactgaaaagaaccactgaggtcagcgaacatactcgaagattattttggtctgcatggtcgattaacatcattctttcatacgactatgggcgttcaagtgttgtgctgaataggattacttgcaagccagtcaaggagacagatggtaattatacgctctatttggtggcgttggcgcaattaattccacaagaaagtgtgaatgcaaatgtggcacaattacttcaagccttggcagcagttcacgaatcaccggatgcgcacccatttctatctttgaccaaggctgatatatgtctttctttttatcgaagacttcgcttgctaaatcatattcttgataaaagcgtcgtttcacaaatcatcgatattggcaacactgcattagcggcagcatttgcccttgtaaaaatagatcaagcgtggtggaacgtgttgagcacctccttccagtacgtctgcgtgcttctcgcgatagacactccagaaagtctttcccacgttgctgctgcgatgaggacgcttgataatattacacaagttttgggtacgcatatagcttttgaagcacagaagaccgcaaaacttcttcttgaggattcagtgaaaaaaaagaggcaagaaattcaacaacttgaacaagcgactcatcagagatcagctcccgaaactacccatttgcttgatattgactgggatgcactgctcgacccatctgacacactaagttttatgtaa

SEQ ID NO: 2527 - DNA, 459 bp, Saccharomyces pastorianus
atgaaattttcaactattttcggagctgctacaattgcgactgccgtcttggcggctgatgtgtcaagtgtaatgaccaccaagactattactgtcactaacggtaacaacgtgtacacaaaggttgtcaccgacaccgctgaccctgtcattacttacagtaccactagaaccgtcgttgtcagcaatagtgctggtgtttacaccaaggttgttaccgaaggtccagacaccacttctgaaaagagtactacaaaaacacttaccttaacaaatggttcaggatcatcaaccaatctttatactaagactgttacccaaggaattgaatcatctacatcctcttcatcggcttcctccgcctcttcgtctgcctcttcgtctggtgctgctccagctgctttccagggtgcaagcgttggtgcactagctcttggtttattttctttctggttatag

SEQ ID NO: 2528 - DNA, 603 bp, Saccharomyces pastorianus
atgaaattttcttccgctctagtcctatctgctgttgccgctactgctcttgctgagagtattactactgtcatcactgctaccaagaacggtcacgtctataccaagaccgtcacccaagatgctactttcgtctggggaggtgaaggttctgctgccacttctgctgctgaatcctccgctgctgcatcctctgctgctgtaacttctgctgctgcaacttccgctgctgcatcctctgttgctgtcacttctgctgttgcaacttctgctgctgcaacttctgctgacgaaggctctggttccagtatcactactgtcatcactgctaccaagaacggtcacgtttataccaagactgtcactcaagacgctacttttgtctggaccggtgaaggcagcaacacttgggcaccaagcacttccaccagcgcagaagctacatcttctgcctcaaagacttcagctaccactgttgcaacttcagcttccgctaaatcatccactactgctcaaatctcaagcttcactggtgctgccgatgctatcactgctggtactggtttgatgggtgctgctcttgccgccgtcattttgttataa

SEQ ID NO: 2529 - DNA, 2082 bp, Saccharomyces pastorianus
atgcttttagctaagttaatactgtttctggtgtatttggtaccaggttgtgtagcaaagccgaaaataagtaaaaaaagaacacagtgggatctgatagcaattaatgcttgtgctaaagaattggaattgtacaagtatgatacggacgctaagggtcaccacgcttctatttgcacttatgagcccgcattaggctcttggctacattgcgcgaaggaagtcctcgccagtaaaaacaaaagcaaaaaaacatttgaaaaaacatttaacaatataaaccagatttgtcgggattatcagaaagatgaaactattagtaatgatgaattttatcgaatcctttctaatgcgtctatcttcatccggcctattggcgaggcaaaggaaataataagataccccattattcctaacaagatctctctagataagtgggtatgggcttatttcggtccgttggataacttagacaaggggaatatatacggaggagcgatttgtttgtactggctaggggttctgtttattgcaactgtgtacaatttcttgaatttttcacgacttaaacaaacgatttttaagaacaaggtgtcagcatatctgcgaggtcacttagttcttccagcacttattcacaaccatgctatgtttgtggggaaatggtttttcgtcgggctagtccctactaggttggagacatctatcttactcggttatgttttgttacatggactttttctgagcacttacaattttgactccaatcagctgcttagcgatcacagaagccaaatgctcatcttcatttcagacagagcaggaatcttggcatttgcgcactttcctttgatagtactctttggcggcaggaacagtataatgacttggttgacaaatatacggtatacgtcattcataacttaccacaaatggttagggagatttatgttggtagattgtatggttcacgcaatggggtacacgtatcatgcgtacatagagaactattggaaatacgtcaaatacagtgatctatggacgtccggaagacatgccatgattattgtggcagtacttgtgttcttctcattcttcttcttcaggcgccattactacgagttgtttgttatagtacacatcattctggcaataaaattcttccaggagtccttgaaacattgccacaaactcgggtggagtgaatgggtgatagcgtgcgcagtattttggattggtgaccgcattttgcgattgataaagattgcgatattcggaatgccattagctaagttgaagatgtacggtgagtcgatgatagaggtgagaattgcaaagagttccaaaagttggaaagctgaggctggtcaatatgtctacctgcagtttttaaaaccaaaactattctggcaggcacatccgttcacagtcatggactctttggttgaggatggcgaattagttgttgtaataacaattaagaacggactgacaaaaaaattgcaggactatatattgcagaatgaggagtatgctgaaatgcgagttctagtagaggggccatacggacagagcactcgaacgcacttatttgaaagcctattattttttgctggtggggcaggggttccaggacctctgtctatggcgataaaggcgggtcgggaacgaaagaacgatgataatcagacgattaaatttgtatggagtgtaagaaatgctgagcttttggaagtgtacaaaaaagagataatggtgttgaaacagatggaggtggatgtggagatttactatacaggggaggagaaagatggtttgcgtgtggaagatgataccgccgccaataaaaatatcgaaggtagactgttgacgggttcggagtcagtggaagtagttacaaattttggacgaccaaaaatcgatgaagtaatcgaagaaggaatgaatggagtaaaatctttgttagttgtttgctgcggctcagaagggtttgtagacaaaactcgggaaataactgcaaaaaaggttgttgataatggcgaaaaatggatagaatatgtggaagagtttcaaaactggtaa

SEQ ID NO: 2530 - DNA, 1698 bp, Saccharomyces pastorianus
atgaaaagagctataccatttagccccaaagcgaacgtttccaaggtgcctaagttagatatagcacatgacttcggacagtatcattctgtgaataagaaatattatccaaatccaattactgcgaagagcgccaatcaattcaacaataagtcgagggctaagccaatagacatcctggaaaaactgcagaaaaaacacaaagcgttactcaaagacacttctactgttatacattggtttcggaacgatttacgcatacacgataatttggcgttgtacacatgtgttgaactatatcagcagttaaaggaaaacaatgcggatgccaagttgtatgccatctatgtcatcaacgaagatgattggagagctcatatggatagtgggtggcagttgtcatttattttagaggcattgaagaacttgcagaaatccttggctgagctacatatccctcttcttgtatggaaattcgacgattttaaaagctctttgtctaattcaaaggaatttgttacgttttttaaagaaaagtgtctggatttaacctcaggaaaaccggtggccattacagctaacattaaataccaaacagatgaactctaccgcgacattcggttattagaacaggacgaccaacggattcaactgaagttttaccatgactcttgtatcgttgctccaggtctactcactaccggtaaaggtactatttattccgtatttactccatggtataaaaaatgggtgttatatctgaacaaacataaagagaacggttctggaatatgtcatttgtacgaaattaaacaagcaaagtacaatgaaaaatttgagttggaaccgttcgattataaattaccagacgagtttgttgagtacattcccaaatcacagtggtctttgccagaggcttctgaggctgcagcgttgtctctattggatgatttcctacaaactaagagctcccagtataatcatgcaaaagacatgctttctttggatggaacttctggactaagtgcgtatataaccactggtatgatcagcacaagattcatagtcaatcaagcttcccaagtgtccaatggccaaattatggccaaagcacttaaggacaactcttctatccagaattttatcaaagaggtggcctggagagatttttacaaacattgtatgtgcaattggccatacacatctatggaaatcccatatcgacttgatactttggatataaagtgggagaatgacgcagcagtatttgagaagtggtgtatcggcaatacgggcatccctgtagtagatgctataatgagaaaattactatacacggggtatatcaataatagatctagaatgattacagcttcttttctttccaagaatctgttagtagattggagatggggtgaacgttggttcaggaagcacttgatagactgtgatttatcatcaaatatcggcggctggggtttttgttccagtacgggaattgatgctcagccatactttcgagtatttaatatggatttacaagcgaaaaaatacgatccagagatgaaattcatcaagaaatggattccagaattgtccaattctgaaggtcatcattcaaaagattacccagatccgttagtggatttgagggatagcagggaacgtgccctagaggtatataaaagcgctatgtga

SEQ ID NO: 2531 - DNA, 858 bp, Saccharomyces pastorianus
atgtcctctgatttagctgctgaattaggatttgaccctactttaaagaagaagaagaagaccaagaaggtaattccagatgattttgatgctgcagtaaacggtaaagaaaatggttcaggtgatgatctatttgctggattaaagaagaaaaagaagaagtccaagagtgcttccgctgacgccgagcctgaaacggagcctaccgacgacatagccgaagccttgggtgagttgtccttgaagaagaaaaagaagaagactaaggacagtagcgtagacgcgttcgaaaaggaattagccaaggctggtctagacaacgtcgatactgaaagcaaagaagccactccagctgctagcgccagcatccaacaagaggtcggtctaccttatccagaattattatctagatttttcaacattttaagagccaataacccagaacttgctggtgacagaagtggtccaaagttcagaattcctcctcctgtttgtttgcgtgatggtaaaaagactattttctcgaatatccaagacatcgccgaaaaattgcatagatctccagaacatttgattcaatatctatttgcagaattaggtacatccggttctgttgacggtcaaaaaagattagtcatcaagggtaagtttcaatctaaacaaatggaaaacgttttaagaagatacattttggagtacgtcacttgtaaaacttgtaagagtatcaacactgaattaaagagggaacaatccaacagattgttctttatggtctgtaaaagttgtggttctaccagatctgtcacttcaatcaaaaccggtttccaagctaccgtcggtaagagaaggagaatgtga

SEQ ID NO: 2532 - DNA, 1095 bp, Saccharomyces pastorianus
atgagttctgtcgtgctggaactgttccagtatttatgctgctgccgtggcttttccgatacaactatcagagtgaatgataaacgatatagaatacaaagattactaggagaaggtggactgtcgtttgtatatctggtacagctattgaagggttctctcattatggaaaatggtgttgttgcaccagaactatatgcactaaaaaagattatttgccctagcgtagagagtatttctaatggtatgcgagaaatagagaactacaagcgatttcaaagcccttatgtcattcaaagcattgactctcaagtaatgcaggagaaagatggctcaaagtcaatttatataatattacccttttatgcattagggagcttacaagactcgattaaccggagactattggaaggtacttttatatcagaagcggaatgcgtcaggataatgcttggagtgataagaggtttgctttgtttacacgatccggcatcgagacaggataataccaatcccagaacaactattgatacggtatctatgacttatagtgatgaaacagcgtttcttttagaagatactcctttagaaatggatatgctttcttctagtttaggtgcttcaattgcatacgcacatcgcgatatcacaccttccaatattctattttcgtcagacggattgccggtcataggtgacctcggctcttgttctcaagctgatattataattggaaacaggaaccagctcagagagctacaagaatgggtaaacgacaactgcacattaccatacacggcaccggaacttttggatttgaaattgaatcaggaattggattgtaaggtggatatatggtctctgggttgtacgttttatactttaatgtttggcatttctccttttgagcgagaagaacaaatacatggcgcttctataacctatgctatcagtactggcaagtacagtttcccaagaaattctcgattttctgagggacttctgaatgtgatcaagaaatgcattcaagtggaccccgtacaaagacctaccatcagtcaattgttaaatgctttacaagatttggagagttga

SEQ ID NO: 2533 - DNA, 1419 bp, Saccharomyces pastorianus
atgtcaatccaaactagtgatccaaatgaagcatcggattctttgaagtcgttgtcattgattgctgcccactctcatattacagggttgggcctggatgagaacttacaaccgcgtccaacttctgaaggtatggttgggcaattgcaagcccgtcgtgccgctggtgtgatactgaagatggttcaaaatggaactatagcgggcagggccgtcttagtggcaggtcctccttccactggtaagaccgctcttgccatgggtgtttcccaatctttaggtaaagatgtacctttcactgctattgcaggttctgaaatcttttccctggaactgagtaagactgaagctttgacgcaggcctttagaaagtccatcggtatcaaaatcaaagaagaaaccgaattgattgaaggtgaagttgtggaaatccaaattgacagatccatcactggtggccacaagcaaggtaagctgactatcaagacaacagatatggaaaccatatatgaattgggtaataagatgattgatggtttaactaaagaaaaagtgctagctggtgacgttatctccattgataaggctagtgggaagattaccaagctgggtagatcctttgctagatccagagactatgatgccatgggcgctgacacgaggtttgttcaatgcccagaaggtgaattacaaaagaggaaaacagtggttcatacagtgtcattgcatgaaatcgatgttattaactccaggactcaaggctttttggcgttatttactggtgacacgggtgaaattagatccgaagtgagagaccagatcaacacaaaagtggcagaatggaaagaagaaggtaaagcagaaattgtcccaggtgtattattcatcgatgaagttcacatgttggacattgagtgtttttcgttcataaatagggctttagaagatgagtttgccccaattgtcatgatggctacgaatagaggtgtttccaagactagagggaccaattacaaatctccacatgggttaccgcttgatcttttggacagatcgattatcatcacaactagtagttataatgagcaagaaatcaaaacgatcttatccataagggctcaagaggaagaagttgaattatcgacggatgccttggatctgttgaccaagactggtgttgaaactagtttgcgttacagcagtaatttaatctcagttgctcaacaaattgccatgaaaaggaaaaacaatactgttgaagtggaagatgtaaagagggcttatttgttatttttggacagtgctagatccgtcaagtatgttcaagaaaatgagtcgcaatacatcgacgatcaaggcaaggttcaaatctcgagtgttaagtcagcagaccctgatgctatggatactaccgaataa

SEQ ID NO: 2534 - DNA, 495 bp, Saccharomyces pastorianus
atgtcaacgcaactcgcaactaacatatacgctccattctacgctccctttttcgggtttgcaggttgtgctgctgccatggtgctttcctgtttaggtgctgccatcggcacagccaagtcaggtattggtattgctggtatcggtactttcaagcccgaattgatcatgaagtctctgatccccgtggtcatgagtggtattttagccatttatgggcttgttgtggccgtcttaattgcaggtaatttgtctcctacggaagactataccctcttcaacgggttcatgcacttaagctgtgggctttgtgtagggtttgcctgcttgagtagtggctacgccattggtatggtcggtgatgtgggtgtcagaaagtatatgcaccaaccaaggcttttcgtcggtattgttttgattcttattttctctgaagttctagggttatacggtatgattgtagctttgattttgaacactagaggctctgaatga

SEQ ID NO: 2535 - DNA, 657 bp, Saccharomyces pastorianus
atgtcacaaagtcactccaaaaaactggacgtaactgttgagcagctccgaagcatataccaccagttccatgatatcctcgaggagaaaactgacctgcatttgccaaagaaggatcacgacgatgatgctgtcagaagagaggtgcagatacaattgcaagagtttttgttgagtgccatgacgatggcctccaaatctttagaagtggtaaacgccgacactcagggcaagacggtgaagcagctaatcatggagtctcaagagaagtacatggagcccttcgatctggagctgaatgagcaagttaggaagatgtaccaagagtgggaagacgaaacagtcaaggtggcccagttaaggcaaacagggcccgccaagatcaacgaggtatacaacaacgccaaggatgaatacctgatgcatctagatggaagaatcggcgttctggaagccagaatgacagaccagcaagccgcggagcaagatgaaggcggcgaaggcgatgatcaagctgccgagactaactggaatgacattaaacacgattatgaggtctcgctcaatgagctgagtcaaacacaacaaaacctgcctcaggtgcgatacaacgtggagaaggtcaagcatctaatagactacctacagaaggattga

SEQ ID NO: 2536 - DNA, 873 bp, Saccharomyces pastorianus
atgagttataacaatccatatcagatggagacccctttcgaggaatcatatgaattgaacgaaggctccagtgctgccggtgccgatggccacgattttgtggggtttatgaataagatcagcgagattaatcgcgatcttgataagtacgatcacaccatcgaccaaattgattcactgcacaagaggcttctgaccgaagtcaatgaagagcaggcgggccatttgaggcattctttggacaatttcgtggcacaagcgaaagatttgcaatttaaactgaaaagtgagatcaaaagtgttcaaatggacgggatacacgacataaataaacaagcccaggcagaaaactccaggcaaagattcttgaagctgatccaggactatagaatcgtggactccaactacaaggaagagaacaaatcccaagccaagaggcagtacatgatcattcagccagaggccaccgaagacgaagtcgaagccgctataagtgatgtgggaggccagcagatattttcacaagcgttgttgaatgcaaacagacgtggagaagccaagactgctcttgcagaggtccaggcaagacaccaggagttgctgaaattggaaaaatccatggctgaactaacacagttgttcaatgacatggaagagctcgtaatagaacaacaggagaacgtggacgtcattgataagaacgttgaagacgcccaactggacgtagagcaaggtgtcggccacacagacaaggccgtcaagagtgccagaagagcaagaaagaacaagatcagatgctggttgattgttttcgccatcatcattgttgtcgtcatcgtcgttgtcgtgccagccgttgttaaatcgcgttga

SEQ ID NO: 2537 - DNA, 5649 bp, Saccharomyces pastorianus
atgaaaccggaagtcgagcaagaattagctcatattttactgactgaattgttggcttatcaattcgcatctcctgtgagatggattgaaactcaagatgtctttttaaaagacttcaacactgaaagagttgttgaaatcggtccttctccaactttggctgggatggctcaaagaactttgaagaataaatacgaatcttacgatgcggctttatctttacaaagacaaattctatgctactccaaggactctagagagatatactatacccctgatccatctgaattagccgcaaatgaagaagctgctaaggaagaagccccaactccagttgctgctgctgctgctccagttgctgctgccccagttgctgctgctgccccagctccagttgctgctgctgctgaaatcgccgatgaacctgctaaggcttctctggttttgcgtgttttggttgctcataaattgaaaaaatcactagactcaattccaatgtccaagaccatcaaggacttggtcggtggtaaatccactgttcagaatgaaattttgggtgatttgggtaaggaattcggttccaccccagaaaagccagaagaaaccccattggaggaattggctgaagctttccaagacaccttctctggtgcattgggtaaacaatcttcctctttgttgtcaagattaatctcttctaagatgcctggtgggtttactattaccgtggccagaaagtacttacagacccgttggggtttgccatctggtagacaagatggtgcccttttagtggccctatccaacgaacctgctgcccgtttaggttctgaagtcgaagccaaggctttcttggattccatggctcaaaaatacgcttccattactggtatcgatttgtcttcttctgccagtgcttctgctgctccagacgctgccgctggtggtgctaccattgatgctggtgctttggaagaaataaccaaggaccacaaggtcttggctcgtcaccaactacaagtcttggctcgttacttgaagatggatttggatggcggtgaaagaaagtacttaaaagaaaaagatactgtctctgaactacaagctcaattagattacttgaatgccgaactaggtgaattcttcatcagcggtgttgccacctctttctctagaaagaaggccagaactttcgattcttcttggaattgggccaagcaatctttactgtccttatatttcgagattattcacggtgtcttgaagaatgtggacagagaagttgttagcgaagctatcaacatcatgaacagatctaacgatgccttgatcaagttcatggaataccatatctctaaaactgatgaaactaagggtgaaaactaccaattggttaagacacttggtgaacagttgattcaaaactgtaaacaagtcttggatgttgatccagtctacaaggatgttgctaaaccaactggtccaaagactgctattgacaagaatggtaacattacttactcagaagagccaagagaaaaagtcagaaaattatctcaatacgtgcaagaaatggcccttggtggtccaatcactaaggactctcaaccaactattgaagaagatttgacccgtgtttacaaggctatcaatgctcaagctgataagcacgatatttccagctctaccaagcttgaattcgaaaagttgtacagtgatttgatgaaattcttagaaagctccaaagaaattgatccttctcaaaccactcaattagctggtatgattgttgaagatgccttggacaaggactctaccaaagaagttgcttctttgccaaacaaatctaccatttctaaaactgtttcttctactattccaagagaaactattcctttcttacatttaagagtaaagactcctgccggagactggaaatacgaccgtcaattgtcatctcttttcttggatggtttggagaaggctgccttcaacggtgttactttcaaagacaagtatgttttgatcactggtgctggtaagggttctattggtgctgaagttttgcaaggtttgttgcaaggtggtgctaaagttattgttaccacctctcgtttctctaaacaagttaccgactattatcaatcaatttacgccaagtacggtgccaagggttctactttaattgtcgttccattcaaccaaggttctaagcaagatgtcgaagctttgattgaatacatcttcgacagtgaaaagaacggtggtctaggttgggatctggatgctattattccattcgctgccattccagagcaaggtattgaaattgaaaacatcgattctaaatctgaatttgctcacagaatcatgttgaccaatattttaagaatgatgggtggcgtcaagaagcaaaagtcagctagaggtattgaaacaagaccagctcaagttatcttgccaatgtctccaaaccacggtactttcggtggtgatggtatgtactcagaatctaaactgtctttggaaactctattcaacagatggcattctgaatcctgggccaaccaaatgaccgtttgtggtgctattattggttggacaagaggtaccggtttgatgagtgctaacaacgtcattgctgaaggcattgaaaagatgggtgttcgtactttctctcaaaaggaaatggccttcaatttgttaggtttgttgaccccagaagttgttgaattatgtcaagaatctcctgttatggctgatttgaacggtggtttacaattcgttcctgaattgaaggaattcactgctaaattgcgtaaagaattggtcgaaacttctgaagttagaaaggccgtttccattgaaactgccttggaacataagattgttaacggtagcagtgcagatgccgcctatgctcaagttcaagttcaaccaagagccaacattcaattggacttcccagaattgaagccatacaagcaagttaaggaaattgctcctgctgagcttgaaggtttattagacttggagagagttattgttgttaccggtttcgctgaagttggtccatggggttcttctagaaccagatgggaaatggaagccttcggggaattctctttggaaggttgtgttgaaatggcctggatcacaggaaacatttcataccataacggtaacttgaagggtcgtccttacaccggttgggttgattccaagaccaaagaacctgttgatgacaaggacatcaaagccaagtatgaagcatctatcttggaacacagtggtatcagattaattgaagctgaattattcaacggttacaatccacaaaagaaggaaatgatccaagaagttattgttgaagaggacttggagccattcgaagcctccaaggaaactgctgagcaattcaaacaccaacatggtgacaaagtggatgttttcgaaattccagaatctggtgaatactccgttaaattactgaagggtgccaccttgtatattccaaaggctttgagattcgaccgtctagtggctggccaaatcccaactggttggaatgccaagacttatggtatctctgatgatatcatttctcaagttgacccaatcacattgtttgttttggtctccgttgtggaagccttcatttcctctggtatcaccgatccatatgaaatgtacaaatacgttcatgtttccgaagttggtaactgttccggttccggtatgggtggtgtttctgctctacgtggtatgttcaaggaccgttataaggatgaaccagtccaaaacgatatcctacaagaatcgtttattaacaccatgtccgcttgggttaatatgttgttgatctcttcatctggtccaatcaagacacctgttggtgcctgtgccacctctgttgaatctgttgatattggtgttgagactatcttgtctggtaaggccagaatttgtattgtcggtggttacgatgatttccaagaagaaggttcttatgaattcgctaacatgaaggccactaccaacactttcgaagaattcgaacatggtcgtacaccagctgaaatgtccagacctgccaccacaacccgtagcgggttcatggaagcccaaggtgctggtatccaaatcatcatgcaagctgatctagctttgaagatgggtgtgccaatttacggtattgttgccatggctgccactgctaccgataagatcggtagatccgttccagctccaggtaaaggtattttgaccactgcacgtgaacatcactccactttgaagtacgcttcacctaacttgaacatcaagtacagaaagcgccaattagtcacccgtgaatctcaaatcaaagattgggtagaaaacgaattggaagctttgaaattggaagtggaggacattccaagcgaagatcaaaacgaattcttgcttgaacgtaccagagacatccacaacgaggcagaaaagcaactaagagccgctcaacagcaatggggtaatgacttctttaagagagacccacgtattgctccattgagaggggctttggccacatacgggttaaccattgacgacttgggtgttgcatcgttccacggtacctccaccaaggccaatgacaagaacgagtctgccacaatcaacgaaatgatgaagcatttgggtagatctgaaggtaaccccgtcattggtgttttccagaaattcttgaccggtcatccaaagggtgctgccggtgcatggatgatgaacggtgccttgcaaatcctaaacagtggtatcatcccaggtaaccgtaacgctgataacgtggacaagatcctggagcaattcgagtacgttttgtatccatccaagactttgaagaccgacggtgtcagagccgtgtccatcacctcgttcgggtttggtcaaaagggtggtcaagccatcgtggtccatccagactacttgtatggttccatcactgaagacagatacaacgagtatgccgccaaggtcaatgccagagaaaagggtgcttacaagtacttccacaacggtatgatccacaacaagttgtttgtcagcaaggagcacgctccttacactgatgacttggaggagaatgtctacttggacccattagcccgtgtctccaaggacaaggtcggcagtttgactttcaacgccaagggcatccaaaacaaggacagctacatgaccaccagtgccgtcgagaccgccaaaatcttggaaaccatgaccaaggagaaggccgccaacggcggtgttggtgtggacgtggaattgatcaccagcatcaacgtggaaaacgacactttcatcgagcgcaacttcaccgcgcaggaaatcaagtactgtaccgcgcaaccaagcgcccaaagctccttcgccggcacgtggtcggctaaggaagccgtcttcaagtccctgggcgtcaagtccctcggcggcggtgccgccttgaaggacatcgagatcgttcgtgtcaacaagaacgggcctgccgtcgaattgcacggcaacgctaagaagcttgctgaccaagccggcgtcaccgacgtgaaggtgtccatctcccacgacgacgtgcaagccgtcgcagttgccatctctaccaagaaatag

SEQ ID NO: 2538 - DNA, 618 bp, Saccharomyces pastorianus
atgatgccctataacacacctcccaacatccaagaaccaatgaatttcgcgagcagcaatactttcaatttcaatccagatacgatcagtttcccgaatttcaagtatgaccatcttcagcagcagcagcagcagcaacaactacaacaacaacagcagcagcgtccacctccgctacagccgcaacagcaacaacagccaataactccccctttgtttcttgcaggcgccaacgcaagctcgaatcccaacaagaatgtcagcactaataacgtccctccactgcactttagcgggtcatcccagcattacgctgtcccggacatagatcactcctccataatatacaagaacaatatctgcaagtccttcaaagacgatttgtttttctgcccaagatcactgctgtctgtagaagagcaacaagcgtgcgaaaaaatggatagactgactgctgaacaaatgtcactacatcaacaaaatgcgccctccagctccaactccggatccttgtcttcctccccgccaacttctgcgtcgtctatattcaactctaggcccaaatttaatccttacacttcacaaagttttaatcctttggaaagcgtacaagaatga

SEQ ID NO: 2539 - DNA, 1632 bp, Saccharomyces pastorianus
atgagttatactgacaatcctcctcaaacaaagagagctttatcgttagatgatttggtcaatcacgatgagaacggaaaggctaaactacaaaaactaaacgaagcggctgacgcgaccgcacaaccacgtatcggcagggatgaagaaactagttcgaaccaagtccttgcagcaactgaaactggtaaggctaatatagatcacgggtcccacccagtaagacccaaacaacgcaagtcaccgggcgatgatgaagaaaccgacacggatgatgatgtgggtacgactggggagattaacttcgatacaggaatggattttgattacgacaaacaacatagaggcctttcccccaatggtttacctctcacagatgcagccactgacgccgaggttaaattagaaaaatcttccaatattacgacacttcctaatgtgaaaacagacaatgaaagggaaatactgaaaaaaatcaacgacgggaacactggaaacaataacacaggccaaatgcaaccacaggaccagaagaaatttgaagagaagccaggaagaaatggaattaagatggaagaagaaaaaaacacagcggtcaacaatatttttgaagaaaaagctaccttacaatccaagaaaaacaacattaaaaaggatttagaagtactaaatgaaatatctgcatcctcgaagcccagcaaatataaaaacgttccaatttgggcacaaaaatggaaacccactatcaaagctttacaaagtatagatgtgaaagatctcaagattgacccatctttcttaaacattattcccgatgatgatttaacgaagtcagtacaggattggatctatgccacgatatattccattgcgcccgaactgagatcattcatcgaattagagatgaaatttggccttatcattgatgcgaagggcccagatcgtgtaaatccacctgtttcttcgcaaactgttttcactgaccaggatgctcacttaaccccaactatcgacgagtctttgttcaaagaactgagtaagtatatccgtggtatcagtgaagtcagtgagaatattggtaagttcagtattattgaatctcaaacaagagattcggtatatagagtcggattatccacacaaagaccaaggttcttgagaatgagcactgatattcaaacaggtagagtggggcaatttatagagaaacgacatgtggcccaactgttattatattccccaaaggatagttacgacgttaagatttctttgaacttagaactacctgtacctgaaaatgacccaccagagaaatataaatcacaaagtccgatcagtgaaagaacaaaagaccgtataagttacatccacaatgattcttgtacaagaattgatattaccaaagtggataaccataataaaggtccaaaaagtagacagtcggaaactactcacgaagtcgaattggaaatcaacacgcccgcattgttgaacgcttttgacaatataaccaatgatagtaaagaatacgcatctctcatcaggacgtttctaaataatggtacaattgtcagaagaaagttatcttctttatcatatgaaatttttgagggttcaaagaaggttatgtga

SEQ ID NO: 2540 - DNA, 1014 bp, Saccharomyces pastorianus
atgatagagttgagattcttggtcgacaacaaaaacactgtgtgtttcacgttattcgtcgctttagtactttcagtatatctcctggtttatttattttcacatacaccaaggccgccttacccagaagagctgaagtacacagccattgacgaaaatggcgttgaggtcactcgtactttgcctactctaggcaaagaacaccaaaatggtgacgacgaagaaataattttgtcggttgtaatcccaagttataatgaaacaggtaggattttgctgatgctgacagatgcgataaagtttttgaaagaaaagtatggttctaagtgggaaattgttatagtggatgatggttccacggataataccacacaatactgtttaaaaatctgtaaggagcagtttcaattagactatagacaattcagaatcattaagttttctcaaaatagaggtaaaggtggtgctgtgagacagggtttcctacatattagaggtaaatacggtctcttcgcagatgctgacggtgctagtaagttcagtgatgtggctaagttaatagaggccataaaaacttatgaaacttccggcacaaatggaaaaacagtgaagcctgttgtagccattggttccagggcacatatggttaacacagaggctgttattaaaagatcgatgattagaaattgtttgatgtatggtttccacactctggtattcatatttggtattaggtctattaaagatacacaatgtgggttcaaactgtttaataggcctgccatattaaagattttcccatatttgcataccgagggttggatctttgacgttgaaattttaattctggccatcaggaaaagaatccaaattgaagagataccaatttcttggcatgaagttgatggctctaaaatggctttggctgtcgatagcatcaaaatggcgaaagatctagtcgtaataagaatggcctatttattagggatatataacgataacaagaaatgttag

SEQ ID NO: 2541 - DNA, 3552 bp, Saccharomyces pastorianus
atgcctccaaagaagtttaaagatctaaactcgtaccttgacgaccaaccagcggacccaggcctagttgcctctccattcggtggttatttcaaaaaccctactgcagatgctaacagtaataatgctactaacaagagcagttaccagcaacagcgtaataggacacaaggtggcaataaccaaaatgcacctttccaacagggtggctaccaaaacaaccagtcacacaacaataactataataaatacaataaccaaatttatcaaaaatcgagttataaacagtctgctgtgacaccaaatcaaagtgggactccaaccccatctgcttctactacatccttgacttctctgaatgaaaagctttgtaatctagaattgacacccatttctcagattttgtcaaaaatccctgagtgtcagagtattactgattgcaaaaatcaaatcaaattaatcgttgaagaatttagcaaagaaggtaacactacaggtgaaaacattggacaatggaaaattgtcgatgtcctatctaaattcatcaaacctaagaatcccccattagttagggaatcagccatgctagttgtttctagtattgcccagttttttaacggcaaggctccacaagaagcttacttgttgccatttttcaatgtcgtccttgattgtatttccgataaagaaaacaccgtcaagcgcgcagcacaacaagccatcgataatttattgaattgctttccaatggaagctttgacttgtattgttttaccaacaatcttagacttcttatcatcaggtgctaaatggcaagccaagatggccgctttgactgttgttgatagaataagagaagattctgcgaacgatttattggaattgactttcaagaacaccgttccagttttgactgatgtagccactgatttcaaaccggaattggctaagcaaggttacaaaacattactcgactacgtttctatcctcgataacttagatttatctcctcgttacaagttgatcgtggatactctacaagatccatctaaggtgcctgaatccgtgaagtccttgtccagtgttacctttgttgccgaagtcactgaaccttctctttcgttgttagttcctatcttaaacaggtctctaaacctatcttcttcatcccaggaacaattaagacaaactgttattgtggtggaaaatctaacaagattagtgaacaatcgtaatgaaattgaaagttttatccctctactattacctggtatccaaaaggtcgtcgacactgcctctttacctgaagtccgtgaattggctgagaaggcccttatcattttaagagaagatgacgagcctgaaaaggaaaacaaattctcaggcagaatgactctacaagaaggtagagatttcttactggatcacctcaaggacatcaaagctgatgattcttgttttgtcaaaccttttatgaatgacgaaaccatcataaattacatgagtaagatcttaaccgttgattctaatgttaatgattggaagagactagaagaatttttgaccgccgtttttggtgcttcccaaaaagaatttgttcaacaagaatttatccataacttgagagctctattttaccaagaaaaggaacgtaccgatgaggatgagggtattgaaattgtcaacactgatttctccttagcttacggttcaagaatgctattgaacaaaactaacttgcgtcttttgaaaggtcatcgttacggtttatgtggtagaaatggtgctggtaaatccactttgatgagagcaattgctaatggtcaattggatgggtttcctgataaggacacattacgtacctgtttcgtcgaacataaactacaaggtgaagagggtgatttagacctagtttctttcattgctctggatgaagaattacaatccacctctcgtgacgaaattgcaaaagctttggagtctgttggattcgacgaagaaagaagagctcaaaccgttgggtctttatccggtggttggaaaatgaaattggaattggcaagagctatgctacaaagagctgatatcttgttgttagatgagcctaccaatcatttggatgtttcaaacgtcaaatggttagaagactatttgctagaacataccgatatcacttcactaattgtttcccatgactctggtttcttggacattgtctgttcagacatcattcattatgaaaacaagaaactagcttactacaaaggtaacttggccgcatttgttgagcaaaagcctgaagctaagtcctactatactttgaccgattccaacgctcaaatgcgctttccacctccaggtattctaacaggtgttaaatctaataccagggcggtcgctaagatgacagatgttacctttggttatccaggttctcagaagccttcattaagccatgtgtcttgttcgttatctttatcttcccgtgtggcttgtttaggtccaaatggtgctggtaaatccaccttaatcaagttattaacaggtgagttagttccaaatgaaggtaaagtggaaaagcatcctaacttacgtattggttacattgctcaacatgccttacaacacgtcaacgaacacaaggaaaagacagcaaaccaatatttgcagtggcgttatcagttcggtgatgatcgtgaagttttgttgaaggaatccagaaagatttccgaggatgagaaggaaatgatgactaaggaaatcgatatcgatgacggtagaggtaagagaattatcgaggctattgtcggtagacaaaaattgaagaaaactttccaatatgaagtcaaatggaaatactggaaaccaaaatacaattcttgggtgccaaaggatgttttggtgggacatgggtttgacaaactggtccaaaaattcgatgatcatgaagcttccagagaaggtttaggttaccgtcaattgattccttcggttattaccaagcattttgaagatgttggtcttgattctgaaattgctaaccacacaccactaggctccttatctggtggtcaactagttaaggttgttattgcaggtgctatgtggaataaccctcatttacttgttttggatgaacctaccaattatctggacagagattctcttggggctttggccgttgctattcgtgactggagtggtggtgttgttatgatttcgcataacaatgaatttgttggtgccttgtgtccagaacaatggattgtggagaacggtataatggttcaaaagggtaccggacaaatcgatcaatctaagtttgaagatggtggtaatgccgatgccgttggcgtgaaagccgccaacctaaaaccatctgtcgatgacgatgactctcccgctaatatcaaggttaagcaaagaaagaagagattgacaagaaacgagaagaaggtacaagtcgaacgtcgtcgtttacgttacatcgaatggttgtcgtctccaaagggaacaccaaaaccagtcgatactgacgatgaagaagattaa

SEQ ID NO: 2542 - DNA, 441 bp, Saccharomyces pastorianus
atgtcaagttttaatgctgagaccgctgataacttagaagatattgaaaagcaattcgctgttgtcgccgttgaacaagcggaaacatactggaaactattaacaagcgttccaggttccaaattgcgtttgaccaagttcgatgacgaaatttacgaaaacttcatcgaaagattcccggaatacaaggatattgaaagaattaagaaattcacagacgaagaactaaagaccaaagaagctaaagaaagatggagaaagttcttcacaatctttgaaaaaacagtcgaagattataactttggaactttattgagaacagactcctcagccgagtacggtcaatatacgacctgttttgttgtgaggctacaattttacgcctttgaaatcgcaagaaataagcacggtttgaacgattggattgttggccacgaatga

SEQ ID NO: 2543 - DNA, 1503 bp, Saccharomyces pastorianus
atgaccaatgaggaaggccttaacaagtctctcattaatgacgttttagcccgcagtatgtcagaattcgatgatgatgacgatgaagatgaaaacgatagtgacatgtatagaggtaatgacgaaggggaggatgtctttgacctgccgctcaagttgggcatctcacaaagcagaaatttctctgaagtaaatggtgtgttggatccattatccagtttgcatggtccatccaagagggtgagatttgaaaaacgaaggcagcagcagcagcagcaacaacagcaacaacagcaacataataacgactttaatatcgatccgagcctgaagagtccgtccggtaaaaaactggatgtggaacagctgatacagtccgccagcgaattcaacgattatcttgctaataacattgacaaagtaaatagcttcaattctgaacttttaggcagcagtggtaaactgcctgggaaagccaaaagtgacacagcaactcagggcactggccgtttagattctatgtcgaactttgctcttagcgacacagagctgaacaatgatgacgatgattatctgctagatcccttagcaaatggcagttctagtactccgaccatggaccgccatggttacagtttattagatgatgctctgtctacttctgataaggagaaaatatatacgaacaagatcaattctaatagtcaagtagatactgatgaccgcactcacgagagtggaaacacgaccagtgataacgaagagaataccaatgagtcatctgaggtcatagattacacaaagttcgattctttcccctaccctccatcgcttgtccccaatgaagagccgccggatttgaaagtactgagcatcgagtctgaacaggaaaacgaaaaagagctacgacgaatatctttactcttggatcactacgaatcaataaagaaattaccagatctatcggacgatgaagctttatcgagattccgtgagaacattgatttaattttgcagctgtccaagagaatcgatgaaaacgcaaacactttagccatttcctccgaagatcctcaaaaatttgttaattttacaatgaaaaacccaccttcattatcattcaaagatttcattgatagaattcagaataaatgcatgtttggcgccatagtctacctcggtgccacctatttacttcaattagtctttctgactagagacgacctaggcggccctatcaagctaaaggctaaactacaagaggaccaaacacataggatcatcatagccacaatacgtattgccaccaaattattagaagattttgttcattctcaaaattacatctgcaaagttttcggaatatccaaaaggctgctaactaaactggaaatttcatttttggcaagtgtgaacttcgatgggttaatgatcacttgcgagaaattggaaaaaacatcgcacatcctcgaagacacaagacaggcattgggaaattcatga

SEQ ID NO: 2544 - DNA, 3525 bp, Saccharomyces pastorianus
atggagcagtctaataaacagcatcgtaaagcgaaagagaagaacacagccaagaagaagctgcatacacagggccataatgcaaaggcatttgccgttgcagctccaggtaagatggcaagaactatgctaagatcaagcgatgtgaatgaaaggaaactgcatgttcccatgattgatcgtaccccagatgacgatccgcccccttttattgttgctgtcgtaggtccaccaggaacaggtaagaccactttaatcaagtccttagtgaggagaatgacaaagagtactttaaatgatattcagggccccattactgtcgtttcgggtaaacatagaaggttaacattcttggaatgtcctgcagatgacttgaatgcgatgatcgatattgccaaaatcgcagatttggttctattgttaatcgatggtaatttcggttttgaaatggagacaatggaatttctaaatattgctcaacaccatggtatgccaagggttctcggtgtagctactcatcttgatctgttcaaatcccaatctactttaagagcttctaaaaaaagattaaaacatagattttggacagaagtttaccaaggtgcaaagttgttttatttatccggtgtcatgaacggaagatatcctgatagagaaattttaaacctttccagatttatctctgttatgaagtttagaccattgaaatggagaaatgaacatccttatatgttagctgataggttcacagacttaacacatccagagttattagagacccaaggacagcaaattgatcgtaaggtcgccctttatggttatttgcatggtactcctttgccatctgcgccaggtaccagagtacatattgccggtgttggtgatttttcagtcgcacaggtagaaaagttaccagatccatgtccaacacctttttatcagcaaaaattagacgattttgaacgtgaaaagatgaaagaagaagcaaaggctaacggagaagtcaccacgggttccacaacaagaagacgtaagagattggatgataaagacaagttgatctatgcaccaatgtctgatgtcggaggtgtgttaatggataaggacgctgtgtatattgatattgggaaaaagaatgaagaaccaagttttgtcccaggtcaagaaagaggtgagggtgaaaaattaatgacaggtctacaaggtgtcgagcaaagcattgcagaaaaattcgatggtgtcggtttacaactgttcagcaatggtactgaacttcatgaagtcaatgaagatgaagacctagacgttgaagatgaagaaatcagtgaagaggatgaaagaaaaagcaagggaagaactactttgagacaaccaaagatttatggtaagtcagttcaggacgaagatgcagacattgataatttaccaagtgatgaagaaaactacgcaaatgatgatgacgtagaaggttctgcaccaagaatggtcgaaattgattttagtgacgctgataaacaagactcggaaaaactagccttggaaaccgactcagaatttgaagagagtgaagatgaatcctcttgggaaagaaatgcagcaaacaagctgaaaaggacagaaagtaaaaatagaacttggaatatcggcaagttgatatacatggataacatttcacctgaagaatgtataagaagatggagaggcgaggaagataatggcgaatacgaaagtgacattgaagagaatgttgacgatgaatttttcaaaaaaacagatggaactgttacgaaagaaattattaaagaagactcggttgatttggaaaagttcgctccctactttgatactttcgaaaggcttgctaagaaatgggacaatgttgattccataaaagctcgattcctcggtgctgggataatgggcaacgagaaggcaaagaaaacttctgatggaaacgacgaagaagcatatggtgactttgaagatttagaagacgaaaacggttctgaaagtgcagaagaaaatggtagcgaagaaaatgaagaggaagacggagatgacaattcattcaccaacttcgatgctgaagaaaaaaaggatttgactatggaacaagaaagagaactaaacgccacgaagaaagaaaaattacgtgcacagtttgaaatggaggaaggtgaaaatttcaaagaagatgacgaaaataatgaatacgacacatggtacgaattacaaaaggccaagatctccaaacagttagagattaataatatggaataccaagaaatgaccccggaacaacgtgaaaaaattgagggtttcaaagctggctcttatgtgcgtatagtcttcgaaaaagtcccaatggagtttattacaaatttcaatccaaagtttcccgttgttatgggtggtttgctaccaactgaactaaaattcggtattatcaaagctagattgagaagacaccgttggcataaaaagattttgaagaccaatgatccattggtcttgtctttgggttggagaagattccaaaccttaccagtatacacgacgagtgattctagaacaagaacgagaatgttgaaatatacgccagaacatacgtattgtaatgctgctttctacggtcctttgtgttctccaaacacgccattctgtggtgtccaaatagtcgccaacagtgatactagaggcggtttcagaatcgcagcaacaggtgttgttgaagaaatagacgtgaacgttgaaattgtaaaaaaactgaaattagtagggtttccttacaaagttttcaaaaacacagcttttatcaaggaaatgttctcaagtgcaatggaagtcgctagatttgaaggtgcacaaattaaaactgtctcaggtatccgcggtgagatcaagagagctttgtcaaaacccgaaggccactttagagcctcctttgaagataaaattttgatgagtgatattgtgatattaagatcttggtaccctgttcatgttaagcgattctataacccagttacttctctgttattgaaggagaaaactgaatggaaaggtgtacgattaaccggtcaaattagagccgctatgagtttggaaacaccatctaatccagatagtgcataccaaaagatccaacgtgttgagagacacttcaacggtctaaaggttccaagggctgttcaaaaggacttaccatttaaatcccaaatccaccaaatgaaaccccaaaagaagaagacttatatggccaaaagagctgtcgttttgggtggtgatgaaaagaaggcaagatcgtttatgcaaaaggtgttgacgatctcaagagccaaggatagcaagaaaaaggaacaaaaggctgatcaacgtaaagaaagactaaaaaaattggccaagatggaagaaaaaaaggcacaaaaggacaaagaaaagaagaaagaatattttgccaagaatggtaaaagaacaaccatggatggtgacgacgagtctcgtccacgcaagatgagaagataa

SEQ ID NO: 2545 - DNA, 717 bp, Saccharomyces pastorianus
atgaagttcaccccaagcatagttcttgatgctccgcaatattacgttgaccattttaatggcaagtacaacgtcgataaatgtgttattttaagagatttgcagctagaatctgacacagaatccatgccatctagcctgaaacacctcaccaagccaacacacatcctggatttgacaaataatgaacttctcacaattccggatctatcgagcagaaatgatatacacacattgctgttggctcggaacagtatagtggatgtagatggtcgactgttgccaatgaacttgcaaaacctcacgttgtcaaataatggcttaagaaggtataaagaacttcagtttttacgcagagcgcccaagacactgaaaactttgactttattaggaaaccaagtttgccatttggccaactatagagagcaagtactccgattagtaccgcatctagaaactttagatttccaaaatgtgacaactgaagaaagaaaggctgttttgaagctttcaggaaaggtggatgccacgacaccaaaggcgatcgatgctacaacaaaagacaatgaatccagagataagacgatggaaatcatgaatttggtggtgagcaagatgacggtggagagaagagacgaattgaaaaggcagctggcagaagccacctcgttggaagaaattgcccggttggaaagactactttcaggtggcgtttaa

SEQ ID NO: 2546 - DNA, 546 bp, Saccharomyces pastorianus
atgagacaattaacagaggaagagacgaaggttgttttcgaaaagctggctggctatatcggtagaaatatttcgtttttggttgataacaaagaactacctcatgttttcagattacaaaaggatagagtatattacgtgcccgaccatgtttccaaattggctactagcgtagcaagatccaacttgatgtctctaggtatttgtttgggcaaattcacaaagactggaaaattcagattgcacattacttccttgacagtactagccaagcatgccaagtataagatatggatcaaacctaatggggaaatgccattcctatacggcaatcatgtgttaaaggcgcatgtaggtaaaatgtctgacgatataccagaacatgccggtgttatcgtttttggcatgaatgatattccattggggttcggtgtcagttcaaagagtacctctgagtcaagaaacatgcaacctgctgccattgttgctttcagacaagccgatatcggtgaatatttgagagatgaagacactttgtttacttaa

SEQ ID NO: 2547 - DNA, 1749 bp, Saccharomyces pastorianus
atgtctccagaaatattagaagcacttcttcaatgggctgcgtccattggtgtggtggttccagagggactgaagtttacatacagcgatctcaagggcattctttgtgtatgtgaaaaagaaatggatgaaccgaagatcaagatccctcccaagatcatcatttcaagaagtttgcccataaaatgcttcaaactccatgagtccactgggaatatcaacggatggttgaagttattcttggctaagataaagttcgatgaatataatgataccatcgtggataatgtttgcgtgaacaagaaattcaaaccttacttggatgcgttacccttgcagcttaactcaccattgatttggaactcaagcgagctggagtgtttagcatctacgaacctggggaattctattcatgagaaatttgcgaacatattcaaagaatggtttgaattgatcacctcttccgatatatttgatttagaaaaagtggcagatgatattcagatataccgcacgcttgacgggatggcatacgaggctctttatgaacgaatcttgaagaagactgaacttcaaacgccaaccatttggtattcgttttctgcatttctatggtcgcaactaatattcacttcaagagcgttccctgaatatgtggtgaacgggaagtgtccagaaaattctatcgtattacttcccattattgaccttttaaaccatgactaccgttccaaagttaaatggtatcctgaaaatggatggttttgctatgaaaaaatggggacggtagcccaagggcaagaattgttcaacaattatggcggtaaggggaatgaagagttgctgtctggatacgggtttgtcttggaagataacatttttgactcagtagctttaaaaataaaattgccgttagatgtaatttctgcaattcttgaaaaggaacctcttctgaaactgcctacactttcagattacacaacatttgcctttgaagataagaattctaaccgacaagacggtgaggcagctcgtgatgctacggattacgcagacggtgtaacttatttcattaatacgcaaaatgagcaaagtttagagccattgctaaatcttttcacttacctatcgaagactgaggaggaaaccttgcatgatctgagagcccgtttcgaaggtatacaaattctaagaaatgcattggaaagtaaattgaacaacattttaggagctacaccaattgattcatcaaatatcaactcctacagatattattgtgctgatatttatagaaaaagtcaaaaacaaatactaaaggaatctgtagcgcgattgaaaagattagagaagacaatgctatcagagaacaagaaccgactactaactatgaacaaaatcttgaagaacgaccctgcttttacagaaactgagctcccttcactgtttagtaatgaagatgatgaagagctcgtcttcgaatccacctacgatttgttggtcctgtgggtcctagtgaaggctaggtgtcagtcattccctacaaaatatcagtgggtgggacagcagtacattagttctgggaacaccgcatatatctcggatgactccaaggctttccatgcccagtacttcggcaagcaagataacatggacttgaaacaagtggaccacgcaatccaattcgtaggtgctaactccttcaccagagcctcgtctacttcaggcgataccgttctggttcgcaagtag

SEQ ID NO: 2548 - DNA, 966 bp, Saccharomyces pastorianus
atggttgagattgtaggacatagagctttcaagggaaaatatcctgaaaacacgcttttagcgttcgaaaaggcgtacgcagctggggcagatgtgatcgagacagatttgcaaatgaccagcgatggtgtggtggtggtcaaccacgactctgacacggaccggatgtgggacaaaaacctggtgattagcgagtcgacttgggaggaggtcaggcgattgcgctgcaaagaggacggctctctggctatgatgactttaatggagatccttgagtgggcagttagtcatcccggggccaagttgatgttggacatcaagttcaccaacgagaagatcatcatgatcaagacgttcgctgccatgctggaggttaagaatgatttgaaattctggcaagagaggatcacttggggcatttggatgttagattggtacgacttcggtatcgaaacaggagtactgaaagactttagagtcatcgtgataagtttatccttagatatcgcgtctcaatttgtgaagcgttccctgtcgttgaacgatcctcattacaagcttttcggcatcagcgttcattttgtctcctcgtggacgagccggttcagactgaagctgctaccgaccctgatggaaaacgacatcaaagtatatttgtggaccgtcaacaaacccgtcgatttcaagtatctttgtgaattatcaatttacggtgctatcactgatgacccggtcaaggctaggaaattatgtgaagggcagcctatgacaaagccgtcctgtactgggaagaaattccggatacctagtttgagatctgtggatgggctaagattccatgtctttgtcaaggtctacaccattctttgtacacttttgttttccaaatgggtccacatcgaagtgaggggttggtccattgcttacgtgattttcctatttcttcgcaccattcattttctttga

SEQ ID NO: 2549 - DNA, 1458 bp, Saccharomyces pastorianus
atggatttgagagtaggaagaaaatttcgtattggtaggaagattgggagcggttcctttggtgacatttaccatggtacaaatttgatcagcggcgaagaagtggctattaagctggagtccattagatcaagacaccctcaattggactacgaatcccgtgtctacagatacttgagcggtggcgtggggattcctttcatcagatggttcggcagagagggcgaatacaatgccatggttatcgaccttctaggcccatcattggaggacttgttcaactactgtcacagaagattttccttcaaaacggttatcatgctagcgttgcagatgttctgccgcatccaatatatacatggcagatcgttcattcacagagatatcaaaccagacaactttctcatgggagtaggacgccgtggtagcaccgttcacgttattgatttcggtctttccaaaaagtatcgagatttcaacactcatcgtcatattccctacggagaaaacaaatccttgaccggtacagctcgttacgcaagtgttaacacacatcttggtatagagcaaagtagaagagatgacttggaatcgctaggttacgtcttgatctacttctgtaaaggttctttgccatggcaaggtttgaaagccaccaccaagaaacaaaagtatgatcgtattatggaaaagaaactgaacgtcagcgtggaaactttatgttctggtttaccgctagagttccaagaatacatgtcttactgtaagaacctgaagtttgatgagaaaccagattatttgttcttagcgagactattcaaggatttgagcatcaaactggagtaccacaacgaccacttgttcgattggacaatgttgcgttacacaaaggcaatggtggaaaagcaaagagacttgctcatcgaaaagggcgactcagacgtaaataacaacgcgaatagcgcaagcagcgccgacaacaagtctgaaaccttcaacaagattaagctactagctatgaagaagttccctactcatttccactactataaaaatgaagacaaacacaatccttcgccagaagaaatcaaacaacaaaccattttgaataataacgcagcttcctctttaccagaagaactgttgaatgcactggataaaggcatggaaaacctgagacaacagcaaccgcaacaacagggccaaagttcacaaccacagcagcagcagcagcagcagcagcaaccgggtggacaaagaccaaattattatcctgaaccattactgcagcagcagcagcagccagtccccatggctgccaccagggtcactcagtatcctccgcaagtaagcgccaataatttcaatactaatcaagcatctgcacaacctcaaatgagatctaattcgcagcaaccacctcaagataaaccagccggccaatcgatttggttataa

SEQ ID NO: 2550 - DNA, 1146 bp, Saccharomyces pastorianus
atggatttcgttgcgggacaacctcaaccagttggtcagtcaatccaacagcaacagcaacagcagcaacaaaatgcaaatacgcacgaacaagatttcccgcaaccgcatcatgacctgcaacagcgacaacaacatcatcaacaactgctgccatctcaactgcctcagaaatccctgatttccaaaggtaagtatacactacacgacttccaaatcatgagaacgcttggtactggatcttttggtagagttcatctggtacgttccgtccacaatggacgttattatgctataaaggttttaaaaaagcagcagattgtgaagatgaaacaagtcgaacatactaatgatgaacgacgtatgctaaagcttgtcgagcatccatttttgattagaatgtgggggactttccaagatgcaaggaatatctttatggtaatggattatatcgagggtggtgaacttttttcactgctaagaaaatcccaaaggttccctaatcctgtagctaaattttatgctgcagaagtcatattggcactggaatacttgcatggccataatatcatttatagggatctgaaaccagaaaatatcttgttggacagaaatggccatatcaagataaccgattttgggttcgctaaagaggtgcaaacggtcacatggactctttgtgggactccggattatattgctcctgaagttattaccacaaagccttataataaatccgtggattggtggtctcttggtgttctaatctacgaaatgttagctggttatacaccgttttatgatactacgccaatgaagacgtatgagaagattttacaaggaaaagtcatatatccgccatatttccatcctgatgtcgtggatttactaagtaagctaattactgcagacttaacaagaagaatcggtaatttgcaaagcggttccaaggacattaaagcccacccatggtttagtgaagtggtatgggaaagattattggccaaggacatcgaaactccatacgagccccctatcacatcaggcattggtgacacctctttgtttgatcagtatcctgaagagcaattagattacggtatccagggtgatgatccatatgcggaatacttccacgatttttaa

SEQ ID NO: 2551 - DNA, 1365 bp, Saccharomyces pastorianus
atgggtattcctatgcagatatatcagggccagaacagggtgctattttacgacaggagaagtcagaacgagccagatgaacgtgttaatcggtattgttactacactgcaagtaacgactacccacagctgccaaatgcgataaaggagcagatttgtcggtttttgtcgagcagcctgggagaaaatgatttggaagcggaaaactcggttgaggacgaggaagaggttgaagatggtcctcgaagtgacacaggattggaatttgttaggattaataaccatttttcttcccatgacttgcgaagttttaaaagttataaaaattttaacaacgagtactggatgttctattctgacgaaacagatgataggaaagtagtgctgtatgattttaaggatcagcatttcatcgtcattaagcagcaattccatggccagctgaacttattgttgtcgaacacaataacctgtatggactgtaattttgattataatacaagcaccgttcaagtcctgattggttttcagaatggaaagctcttaaaactatgctgtgacttgaatggaaacgttaataatcacctacttctgaaggacccttcaacttccttttatcagcatgggagaaatcggtctatactaaatgtttgggcaggtttgctgccccattttgttgtatcatttagtatggaagagggactgctaataacttctctgaatcaccagcaagcaaacggggatttacagagtttcaaaacaagtttttatttacctagaaatctaggaagtgacacaaatgccaagtccgttttaaattttccacagtttactctatacaagggagacagcttgatatgtcactgtgataatgtcttggagcctactggttctgcaaacaaggaattaaattttatgttgaaaatagatgaatgtgttcaaaatatagattatctttcaagaatagaccatgtcctggttgaatcgaacttgagatatctctcgattccagtaccaaactctaccgacgatcctagctctattgaaaacaataaagaaatttgtccgatcttctacaagacacaagaacttaatatgcatgatccaagaacagggcgccaaacagcaaacaatgacaagtatatttttataacagagcagcatctttacgggacggcgctctcggtatacaaatattcgacatctttcgaacggtggttgtttgttggttattcagatatcagggctaagtatggcataaagaatgtgaaagacatttttgtaggtaattgcccctccataaatagcccaattgtggccatccttactgatgataataacattcaaacaattcttcttaaatag

SEQ ID NO: 2552 - DNA, 480 bp, Saccharomyces pastorianus
atgttcaaggagtgtgtggcaaggaaggtggcgccaagcttatacatggttcgtagctacctggtgacttgcaaaaggaaacagcagttgtggttgctgcatagaaggttgtgcacattaaataataattacttctttttagaatgggaactgctttttttaactaatgaggtcgtaaagtggaaggaaatgatcggttttttggagagccagttgtcatgcataaaatgctacatcgagatagagaagccaagctacgggcaaaacttccagcgtctgatagatgattacaatgagcaactgaacgaaaataatgttgttatttccattctgaagaatagaccgcgggtttctccattccccgtatatctttacgatgaagtatattcacgtaccaaactcgccatcgcggagttggactcgttgataataatctcttttatttccttggtgtttttatgggtatcgatagaaatctaa

SEQ ID NO: 2553 - DNA, 804 bp, Saccharomyces pastorianus
atgtttggagtaaaagatgctatattcaaaatcaaacgttcctttgggggtacagattcttcagactccactgcctacactacagcaaaccaatccccctccccctcccaaatgaaagataatcataacccttttcgaaaaaaaacgacatctaacagaaccatggtcgaggactgcaccttaccatcagtgacgctgaatggctattttccctcaactaaaaacaagctccttactcctgaaatgtgcgatgaaataagatccttaatgcctacaagaatacaactgtacacagagtggaatcttttatatagtcttgagcaacacgggtcttcactgcactctctatatagtaacgttgctccagatagtagagagtttagaagagtggggtacgtattagtaataaaggatcgtaagaacgggatctttggagcttatagcaatgaagcatttcatcccaacgaacacagacaatatactgggaacggagagtgcttcttatggaagctagacaaagtgcctgatgttaatatatctgaaaaggaggatcctaagaaagaagacagagaggaaagatggagattttcgggttatccgttcacgggagttaatgaatttgctatatattgtacgtctaaatttctttcaatgggtgcaggtgatggccattatggccttttgtgcgatgatgggctcctccacggtgtatcgaacccttgtctaacgtatggtaatgatgttttaagtgcagaaggcaataagttctctatagttgctctggaagtatggcgagtgggatag

SEQ ID NO: 2554 - DNA, 1818 bp, Saccharomyces pastorianus
atgtcattcagggcaaccatcacagatccggggaagcagaatatctggtttcgtgcgatttatgttctatctacaattcaagatgatatcaagattactgtgacgacaaatgagttgatcgcgtggtcaatgaatgaaactgataccacgctttgtcagatcagatttgagaagagtttttttgaaggatacgaatttaagcctcatgaaatcgtgtttggggagaatgggatccaagtcatagacgatacgtacggtgataaccataaactatattccttccgagttaatggaaagcacttgacaactatttcgagaaagccagacagcgacggcataaaatcattcactattgcagtcaataatacttctacatgtcctgagtcgctcgcaaataggttgattgtagtaattgaaatggattcgttgatagtaaaagaatactgtcctcagtttcagccgattaaatatgatcctattataatcgatttgaagtacaaaagaaaatttttggacatttttggaaccgcagcttccgatcggaatccgcaagagccgttggaccctaaactattggaggttttcgtaagtactgaacgtgaactaacatctgctctatttaatgaagatgttgaatcagacatacggaaaagaaatcaactaacagctgctgatgaaataaattacgtctgttgcagctcaacactgttaaaaaactttctagataactgcaatgtaaacgtgactgacgaggtaaaactagaaattaacgtccacaagttgagcataacagcatttactaaagcagtgtacggaaaaaataatgacctattgagaaatgcattaagtatgagcaacactattagcacattagaccttgaacattactgcctcttcacaaccgtagacgatgaaaaagaagagaagcgatcacatagcaagcgtaaagaacatacaaaaagcattgtttttaagctaaaagacttcaaaaactttataaccattagcccatcctggaaaagttcacaaggtggaaatgacaatataagcttatggttctgtcatccaggagatcctattctgatgcaaatgcagaagccaggtgtgaagctagaattagttgaagttaccgatagtaacatcaccgatgattcaatgggagggaagtatataaaggcagccatttcgggccccaaagaagaaaccggaaagcaagaagtcaaagaagggtatgaaagcccgctaaggagtaggattgcgcttcatagagaaacccagtcaacttccgtcactagcactcggaagagtcctctaaaaacatcatctcttgtcccaggtagtggtaatgcggttaccaagagctatagaaataacacggcaaagaagttatttgtagaagagcagagccaaactatgagttacggaggaaagagcctgttcgagcaggacattttggttaatacaaatgtgaataaggaaaggattcttaatggtagtgaagcttaccagtctaatgcgttgaagaggtctagaaacgatattcgtaatggagccgaagatgcttcccaagagtcaaccgtcgcaaaaagagctgataccacagtgacttggggaagaacattaccaacttcggatgacggggtttcgtccaacgaggtcaacaagagagaaatgctaaagagagagaaactaaagcatttacagggactgatgcattctagaaatggctcaaataataacaaaagtcaagacgataaggaagaggaaggcgggctgggccctacgcaagttgagaagccaaggggtttgttcgattga

SEQ ID NO: 2555 - DNA, 1077 bp, Saccharomyces pastorianus
atggacttgaactttacggcgaaaactgtcgaaataaacggtgaaacccatagaattctactgcaaaacgaaaatggaccttgtgcgctcttagcacttgcgaatgttctaatactctccccaagtcataccaaaatttcttgtgagttaataaagttggtgaacaaaggaaatgaagtccctttaggagaactcgttcaagtgctagccaacatcggtttacaatttacagataaagctggtactgacataaatgaattattaacaatattaccccaattacataaaggcttgaacgttaaccccaaattcaacggatcctttgaaaatagtatagagatgtcaatattccggttgtttgacgttgatctcgtccatggttgggtaatcgataatcgtatagatgatgcaataaaagaaaaagtatgtcactactcttacgaatctgcccaaagaatcttaacacaagcagctgatataaatagcggccttatgaaagaagataactcgaaggaaatcttggacgatgctatgcatattgaactttttttgaacgaatcaccaacgcaattaacagacatcgggctacgacaactaagagaaaagacactgcagaacacatattcaattttattcagaaacgaccatttctctacattgtacaagtacaaagatcaattatacacactgatcacagactttgggtttaagaattgtacaggcatcgtgtggcagtctctaggttctgtagatgggtcaggtgatgccttttttgctggtgatttcagtagcgcaaagtcaaatgatgagtcgccggcaaatgagactgaacatggctttaaaaataataatcggtcaatcaaagaggctcatcaaattgaaaatgatagcgaattggctagacgtttacagcagcaagaagaagagcgtctaacaatgttagaaactaagcgaaggaactgccactctagaaaaaaatcagaaagcccaccaaaaaaagaggcgtctaaacgaaaaagtagtcctgcaaaggtgaaccggtccgaaacctcaaaaagtgagtgcatcgtgatgtag

SEQ ID NO: 2556 - DNA, 207 bp, Saccharomyces pastorianus
atgagggctgttacgaggaataaagtagtaaacaacctgtacttttccacgttccttattgcattcgcatccgtggccatcggttctatactgccgtgcccagcgcattccgttgaatctgattcgccggctgtggaacaacacaagcttcagctgactcacgagcaggaggttaagaagaataatgctctgaggaaagagatatag

SEQ ID NO: 2557 - DNA, 1851 bp, Saccharomyces pastorianus
atgtcggtgtcgaggatatggagtagcgtcgtacatttcttttctgtgcaggcggttgattcacgcataaagccagatcctgaattcaaaagacgacggaaactgttcattagctcctcgaaaaacgaaactggttcatcatccatcaaaagcatagtttctactgtcagtggcactactcgtagcccagtgagcggttctaataacccatctttatcactatggaatacgtgggaatttagactatattatttagcgtttttaatagtgcttccgtggatgctcaaagctgccctggctacaagttccgattccaacccgaattattacaaatatagtggcctgctatctcgtggctggcttctggggcgtaaagtagataacagcgactctcagtacagattttttaggtcaaaatttttcccattgtctgtattgatactactacaaactgcattgaaaaagctttttattaaatttagtaaaagctccaagatatatttcgattttgcgtgcggtctagttttcatctgcttattttatggtatcaattccatcaagttcttcacgcatgcttttatcttttttactttggcacattcgttgaagagaaagcgttcattagccacattagcaatttggtcttatggtgtctttacgttattcattaaccaaaaagtgaggaattttccttttagtaatattgctacaatcctgaaccccatggaccattggtataaaggcattatcccaagatgggacttttttttcaatttcacattgttacgtttattgagttattctatggacttcttggaaagatggcatgaacaattgagtccgcaacctacaacaaattatgaggataaccagcccgaattcaggaaaagttcatctgtttctactttacaaaccatttatgaatcaggtaagaatagcgccttggacgaaaaagatcgaatggtcgcagaacatcacatacaggattacaattttattaatttcattgcttacatcacgtatgcgccattattcttggtaggcccaataataacttttaacgattatctttatcagacaggaaataagttaccttctttgacgagaaaaagcataagtctatatgccctaaaagtatttctaagtttgcttttgatggaaatcgtcctacatttcttctatgtaggtgcaatagcaagaactaaggcatggagtaacgacacacctttacaactagccatgatcggactgtttaacttgaatatcatgtatctaaagcttttgataccatggaggctctttagactatgggctatgattgatggtattgacgcgccggaaaacatgctacgatgtgtagacaacaactatagttcactagggttttggagagcttggcatacgagcttcaacaaatgggtaatccgctacatatatgtcccgtttggtggttccaacaatagaatatcaacaagctttgccgtgttttcattcgtagcgatatggcacaatattgagtttagattattattttggggatggttaactgtctttttgttgctggctgagacttttgttactaaatgtttcattaaatatagattcaaggtctggtatagatttttttgtggtgctggtgccgtaataaatatttgcatgatgatggttgttaacctatatggattctgtttgggcgcagatggtacgaaactcctattaagggacatcttcagtactttgtctggtttagagttctctcttatgggtgcagcaagcttattcattgccgtccaaataatgtttgaaattagggaggaagaaaaaaggcatggcatcaacttgaagtgttga

SEQ ID NO: 2558 - DNA, 465 bp, Saccharomyces pastorianus
atgaaactctcaacaattgttacagctgttttgtttacagcttcttccgttttagccgccccagttaataccactaccgaaaatgaaacagctcaaattcctgccgaagctatcattggctacttggatttggagggtgattctgacgttgctgttttgccatttgcaaacagcaccaacactggtttactgttcataaatactactatttcaaaccttgctgccaaggaagaaggtgtttcattaagcaagagagaagccgatgctgaagcttggcactggttgaaattgagacctggtcaaccaatgtacaaaagagaagctgaagccgatgccgatgctgaagcttggcactggttgaaattaagacctggtcaaccaatgtacaagagagaagctgaagccgatgccgatgctgaagcttggcactggttgaaattaagacctggtcaaccaatgtactaa

SEQ ID NO: 2559 - DNA, 282 bp, Saccharomyces pastorianus
atgtttctacagacgctccgccttaatatgccaagggtgctatcgcacttgaaactgtctcccgcaacggtaacgagggcgtacactctgccctccctcttgtcggcaggtcctcaacagccggcacttacagcagctaacaggtcgttggtgttcagcaggggctttaaagtcagaacctctatcaaaaagttttgtagcgactgctacctggtaagaagaaaaggacgagtgtacatctactgcaagtcgaacaagaagcacaagcagcgtcaaggctga

SEQ ID NO: 2560 - DNA, 3042 bp, Saccharomyces pastorianus
atgaaggacgtttctcattacggtcctgctttatgtaccaagtttcataatgactatgttctagccggctacgggcctttcgtccatgtgtatgactatcgttcgaatacgttgatcagcaaatgtagaatgtttcataaaaacaaagtccatggaattagcatttctgccggagaagaggttttggcctacggtgcgaggtcaatatcagtggtaaggttcgaagacattttgaaaaacgagtcattggtggattcggaaaagattaactcagattgggttactaatggtgaattcagttctgacgggtcccaagtatatttactgacctgttataacaaagtgctgatttgcgatttgagttgcgaagtgctctcaagcaaatctttacgtggagaaaggtccatcttatattctggtatgattaaagtctttgctccagataaagtgtatatcagtgctggtactgtcatgggtggtatcatcatctgggatcttttttcagagaccaaaatccacaacttgctgggccatgaaggttctatcttctatgttactttaagtaacaacggcagtttcgtagccagttgttctgacgacagatccattagactatgggatttagacactggtgaagaactgtctgttgggtggagccacacagcaagaatttggaatttgaagttctttgacaatgacacaaagttaattagtgtttcggaagactgtacatgtcgtgtatggaccgttatggaatctcaaaaaaacattaccgaattatcgatatctaatatttatgacgtgcacttgagcaaaaacatctggggcgttgatgtcaaagaagatgatatgatagctgtgacatctgggaatgacggcagattgaaactgatcgatctactacacttggaaagacatggtgatgaagaaacatcattcaacttggatgaaattagtcagcaacttgacattgtctttgataaaaatgaaactatcaaggggttccagggattttcgtttggtatagttatcatcacatcactaggcaagatccttcaatttagaaacactactaagcaatggaaattattgctaaccgacgaaaactttgtcgcgtattcaatcacgaacggaattcaagcacaaaatattgttgtcttctctaacaataagaaggatattcttttgattagatttagcgaaaatggagatgaagtaatgcatgttgagcaacatcatacaactgagctttccaagaccaacaactgtcttgtgactgagtacgacgaacattcatttcttctaaccttggaatctccaaaccctcgtgataagcttttatgtctagagatagattttcaagacttgaaaattaaaactaagcactgttttaataaacctgaaaactttgcttcctcatgtttagcgtcttttcaaaatttcgttttggttggatcgcgttttagtacattggcgatctttaacttacttaatgatgatgacgagcctttcataattaggagattatgtccaggtgacactactacctcaatcaaattcgtagaaaataaaaatgactccactgtcttttctgtaaccaacagggatggttactatgacttcatagaactgacgaaaagcaactgcgaaagcccccatccccaattttcctacaagattttacactctaacaagatgatgaaagggttcttagaaggtgcttttttcaattcaaacggtgaatatatcacttatgggtttaagtctagtttattctacctctacaatgagacaaactgttatgaattagctagtgaagtatgtggtggtgcccatcgtcaatggaagctcaacaatgtcaatgatggtcacattctgatgtatatcaagtcatcgcggttgcatctaaggaaaatgtatcattctgtgtttcctgagactttagaaaaaggcattcatggaagagagattagagacatttcgatttgtccaggggcaagtgccgatacagatggcaattttaaaggaggtcatatattttgtaccgcatctgaagacaccacgatcaaattaggatacttcgacaataaaacaggcagaatccggaacttttggactcagaggaaacatatttctgggttacaacgctgtcgattcattaatgaaaaattaatgatatcagcttcagctagagaagaattgtttttgtgggaattgaatgataagtacgataaacgaccatatgtaacaatacggcaaacgctaccgacatccactaacaacccagatttaagaatcatggattttgacgtgaaatttgtatctcagtcgggtgatttcatcttaataactgtttattcagattcagccataaagatctggtattacaaagaagaagaaaacaaatttgaattaattacggaaggtcgttacaagacgtgctgcatattcaacgtcgcgttggttgcactgaagaatcagcttttcgttgtcatttcaccaacagatggatatgttgttatctataatgtaacagaatacgtaccgtttaccattgatgttacttctggtgatttggcggacaataaactagatactgttgtttcgggtcttcccatgcctgtgttgcagttgcaagtgcatcagtcgggtatcaaatccttagactacgtcgttgacactatgagaacatcagcagcaattttgacaggtggtgatgacaatggattggggttgagctacttgacgttggatgctgtgaacactccagcgttaaaggcaagcgattttatcgattcagctgcatcttcaacaataacgtcaggtatattgatcaatggcggcgaagaagctatcaccacgtctgttgaccaaatcgtacgcgcttggaagattaccgaggggaaacttactctggcggatgaaaagtataccactgtggcggacacaggttcattggacatcatttcaaataatgacaacacggaattcgacaaaacgttgctgatcggtggtgtcgggctatccttatggagaaaatga

SEQ ID NO: 2561 - DNA, 630 bp, Saccharomyces pastorianus
atgtctttagaagaatttgacgaatttaaatatgaccattcaacaaaacgtcttgataccccatcaagatatctgctgcgtaaggcaagaagaaaccccaatggattacaagaactgcgtgagtcgatgaaatcttccaccatttatgtaggtaatttatcattctacacatcagaagaacagatttacgaattattcagcaaatgtggtacagtaaaaagaataatcatgggtttagatcgtttcaagttcacaccatgcgggttttgttttattatatatagttgtcccgatgaagcactgaatgcggtgaaatacttgtcagatacaaaattagacgaaaagacgattaccattgatttggatcctggatttgaagatggcagacagtttggtcgtggtaagagcggtggccaagtcagtgacgagttaaggtttgattttgatgcctccagaggtgggtttgccattccgtttgcagagcgtgtcggtgtacccaattctagattcgacaataatagcaattctcaatcaaccaccaatgattatattcccccccctgatgcaatgggtacttttagaccaggttttgacgaagaaagagaagatgataactatatcccccaataa

SEQ ID NO: 2562 - DNA, 876 bp, Saccharomyces pastorianus
atgaattataactgtgaaattcaaaacaggaacatcaacagtgttgacaatcaagtctgtctgcctcctatccaagtcctatttaactcgatagaaagacggaacgtgcccgaactggcatttgcaaatacagaacacccctgcgataacctgcggtgcaagatcaacggagaacaaacctatttcgctcctgtcctactcccacagcattcagacgtgtatcctgtagtcaattctggactcgaaactactactactatcgctacctcgcaattcctacctgagagtacgaaggagcccgaacacgtcttggagaatctaaagccttgctataagtcagctccaatctacgaaataatcaataatgaagcggatatgcacacagagacaaagaggccgattccagagtttgaagattctaaatcgaagaaaaagcaaaattctggtagaaggtctaacctaccaaaggaaactgtgcaagtattgaacacctggttattgaaccatctaaacaacccctacccaacacagcaagaaaagagggaattgttgattaaaactgggctcaccaaaattcaactgtccaattggtttataaacgtaaggagaagaaagatattcagtgactactacactttagtaaactcaattcccagtgataacgcgaacaataccccaatggaacaagcgcaaaacgcctcgatatatcacaacacattgtctgctgccaacaacaccacatacgatgccacatcgaactgctctaccgattatgaattgtccaagagattcgctcatgcccccgttacacgacgcaaaaaattgattgataggttagaagaactgaaaaaactatctaaccccgatatgaattga

SEQ ID NO: 2563 - DNA, 2352 bp, Saccharomyces pastorianus
atggtaaatactagaggttacacggcagtcccaaacgttgaacagccaaccagtaactcacaagatgtgccgactacacccgtatctgagcctgatatggaaatgccaatagagcctcccgtatatgtagaagagatgggcgtagaagaacctcgggtatcggaagcctttagtgaaaaagttcaacggttccgaatatgtttcgaaaataatgtagtgattccagtgaaggaaaaggtagtggatccactagcgcaaataatgtctctgatgtctgaaaagtttgatttgattttgagcaagtgtggtaatgttttggtaatgaaaaggatattttaccttgtgttaatgtctattgtgacagctttgatcatctccagtgataaattacccaatggaacagcccggggttcaagtggattattctcagaccacgaactcctattacagtacgccaagaagtctattgacctttcaaagatagagagagatttggagtatattagtagtatgcctcacatgtcaggaacaagcggagatgcagctgttcgacattacatcagagaatcatttgataaaaatggtataaagctggctggagaggaagaattcatggcatattcgaattatccaggaaacgcttcactttacgtgtacccgaggggtaattcagaaggatttggcatcccattaaatgaagaaaatttcaacccaatgagtcgcaatggtgaattcagaaacacagccgtaatctatggtaacgaagcatcattggacgatatggtttctctaaaagatgggggggtcttaaacggagacttcatcttacttttacattacggagattatgttttccagcaaatgatgagggcgcaggagtatggcgctaaggcggttatcttcatttctgaaccatacaaagataacaaagatgtggtacaaatgaaatctgttgccttacctcaaaacggtactggtgacgcacttacgcccgagtgggaagggtccattagggacccgattgatgtcgatgacgctagatatctgcccaagattccatcaataccgatatctactaatcaaggcgaaaaaattctatctacattatctgacactggtgtgaaattttcgaataatttatatagtgggtctcccaatgactgtctaatcgatctgctggtggaaacagcgactagggaacgacatccggttcacgacatagtgggtaatattgaagggtcagagcaaaacggaatggcaattgttatttccgcgccaaggaactctgttagctttggtactacgtatccttcttttgggactgttgtcttgttatctctaattcaattgtatcaagaaatggtttacaaattcgactggaaacccttaagaaatatttacttcatttcctttggtggttcagagtttaatgaagcaggagccacagaattgatggagaagagagcagaagtactgaagaatgaaatatacaccctaatcgacgtaggccaggttggcatatgggatgagagtaacattttggacatacaatgccatccgttactagcagactttttccaaaagaatggtaccagccgtggtctcgatgttcaagtggataacattcatcagttcggtgactggacgccgtacctggcacggggaatgcccgttgccattatttcatcgcctagtgtgatgaacagaaagcttcctataggcaccgtagaagatacgttcgaagccgtcaaggatacattgcgagataaaaataagggtgaaatgctctctgaaatgatgctctatcttgttgaaaaatcactcgagctcatcgacgacccaatgatcccattcagtgtatcaaattacgcagaattcctttcaaataccttgaagggtattcagaaagagtgtcccgataccgtgaactttgacgaggtattttcaggtacggcgctatggaaaaacactgaactacagttcaatacgtggaagagcgggtgggcggacctaatgtatggtagcagcacttctatagagcccaccatcatagccattaaccgttggtcgtggaactacttactgtcccggattggtatcacccagtgcttggagaaagggttaccggaaaggacgttttacaagaacgttatcctcggtcccaagctctgggtgcagaaagatgacccacttcgctcatggacttttcctgaaatcagagattctattgccatcaaagactgggtttccgtacaggaacaactcaacgccttaggcacgatgttgcagaacacagctcgttatttccttgggaacaaaaacctccgcgaaataaacactaataattactag

SEQ ID NO: 2564 - DNA, 894 bp, Saccharomyces pastorianus
atgtctggaagctatcaacatctatccaacgtgggatcgcgtgttatgaagaggttgggtaaccgacctagaaatttccttccccatagtgaaaagttcatccaaaaatctactcccgagttcatgaaatcagatttgaaggatgtagatgaagagactagcttcaagagcgaaaaagaatggaagtttttaccgggagacagagtagttataatgaaaggagcttccaagggaaacatcgccataattaaatcatttgataaaagaacaaatgcatttgtactagatgaaaatggaccaaccaagacagttcccgttcccaagcagttttggctagagggccagacctcccacatgattacagtcccagtatcaattttaggaaaggatttaagattagttgctgatttcgacgatgaaaaaaccccaggacagacaaggaccgtggcggtgagggatgtttcatttaacggttcatactatgatgaagactacaaaaaggtgatgccatatagatgtgtaaagggccaaccagatttggttattccatggcctaaaccggatccactcgatgtgaaaacggatctggccaccgatccagcaattgctagagaacaaaccttctgggtagattccatagtgaaaagccctattccaaagggtgccattctgagtattcgtaatcctcactccaaatacaagaggggcactttgacagcgaaagatatagctaaactggtggcacctcaaatgcctctaactgatgttaagaagggctacttggaagaaaagaaagaactagcccaaagagaaatgccaaagttaaccgaagaagatatggaagccattggggccagagtttttgagtttttagaaaagcaaaaaaccgaataa

SEQ ID NO: 2565 - DNA, 459 bp, Saccharomyces pastorianus
atgtcgttcattaaaaacttgctatttgggggcgtgaaaacgagcgaggacccaacggggctcacagggtccgcagggtctaacacaaacgattccagcaaacccagcgagccggtggtggccggtaacttcttcccaaggacgttgtccaagttcaatggtcacgatgatgaaaaaatcttcattgcgatcaggggcaaagtgtacgattgcacacgtggaaggcagttctacgggcccagcggaccatacacgaactttgcaggccacgatgcgtcgcgcgggctggcgctgaactccttcgatctggatattatcaacgactgggaccagcccatcgatcccttgacggacctgaccacggagcagatcgacgcgctggatgagtggcaggagcatttcgaaaacaagtatccttgcatcggcacgctgattccagagcccggcgtgaacgtatga

SEQ ID NO: 2566 - DNA, 1122 bp, Saccharomyces pastorianus
atgactattgatgaggatgtgcgggaaatttccccatattttcaggtaaggcaaactacatggggaggtagggcttgttttagtagcagtaatattcctgaaggaacaacagttttgcaagctgctcatttcacaggatcatccatttcctacgaatttagaaaggaagtttgccacaattgtttcgcgtacgataatgcgagaaccatgaagtacaaactgaactatgattctattaaaaatctgatctgcggagcgggttgtcagatcaatccccaaaagttcctcggcgctggattatggttttgctcggaatattgcagagattcttatcttcaaataccgaatatcgttgaactgatcgagttttatgagatattattgcgccatttcccaaatatgttgaaaagatataatactactaccgaacaagagacaaaattaaataccgtctcgatttcagaaagcattatacagtctgcatgggacgaaattgaaaacgattggataccaagcatcgataacatgaaaggaaccaaaaaaataaaccaattaccaccaatttcagaagacgagtactgttgtattaggtttgtttgcgaaagtttgtttaatttgaaacacatggaccctcagtctataacgcaacgaactttcaatatgctgcaatccaatgagcttggtaaaatatcgagatttcctgtcttgttacatttccaaaagctagtgtttcaaacactctacattctgttaccttcacatttgcacaaaatgctcacaataccattgttaagacatattttaggtacagaatatgggaacgcattcggcatatggcaagacggtgaagctgctgaaagtagagagtattttggatactgggtattcccagaggcctcttacttcaatcattcttgcaatcccaatgtgactaaatatcgcaaaggtaattcaatggtgttcaaggtcaataaagacatcaaagaaaacgagcagatatgtatagattattccggagtgttggccgtaccaactaaaaagcgtcggaagtttttggctgaaagctggttttttgattgtgcttgtgagaggtgtaactcagaattgcaatctgtccattaa

SEQ ID NO: 2567 - DNA, 768 bp, Saccharomyces pastorianus
atgattttcaatgtattgtgtagtttattgctagtttcttccggtgttgtatgtgcccaatacaccaacggcacccagagctataccccatacaccaagacattatccccaacctactctgttctgcctcaagagacaacattgacatacagcgatgagacgaccaccttctacttgacatccactgtctactctacccattggttcaccccctctccatcagctactattacaagcgcacctaccactagcacccccgctttaagtacatctacatctgaatataccaccacctatttcgacacagacaccacttacacatctactataacttccgcttttaccattactctgtcctcggaggccactactgagaaggctgaatccgttttcactagcgtcacagaaattgcgtctaccatcactaactcgggtagcacgtacacttccaccttaacttcaactttgttagttactgtacgtaattcgaaagcaagcgctaccgcgacagttgcttcaaccacaggcgcagcctctgatatcggtgctttagaaaaattggtctctgctgaaagccaatctcaagctgctgaaaccgcatccagcggtgatgcgcaatgtaatgcagccactcagtatgttacaattactgctactccagttactaaattagtcactactactgcagaacctgtcgttcaatacgttactgttacagccggtgctggtaatataactactgctgctaacaacggtacccacatttag

SEQ ID NO: 2568 - DNA, 831 bp, Saccharomyces pastorianus
atgttttcttctgaagaaaaggatacctgccagttgttgggacctgtgtctcttttggttcaaacattgatgggtataacagcagtggctgtgttactggttaaaagaaactatgagcatccaagaaggaaaatgatcgtgtggagttatgatatcggaaaacagattatcggttcactcggaatacattttttaaatctgggtattagcatattgaaaagaaggcggaaactatttttactggccaccggtagtgatgacgacgaagaccaatgcgactggtatttcctgaatttgctcttagataccactctcgggatccccattctttggttatccttatacacaattgaaagagtgctaaaatctctgcattttcaaaatattgaaagtggtaattacttcccatctaaaaaggtcaagaatcaccctagaacgcctttattttctgcatttgtgaaacagctggtcattttcattctcgggctgggcgtgatgaagctatgcgtgtttttcatacttaattacctggaggaatgggcctattggtttgcggatctgatccttggctggtcagattcatggccaaacttgcaggtttttttggtgatgtttgtcttccccattttgctgaattgctttcagtacttttgcgtagataacgtcatcaagttacctacagagagtttgacgctaactaatgcggagaattttgaaacaaacacattccgcgatgacgaatttcccgatctatcggaagactggacttacaccaacactgaagcacctaacaaaggcaacaacgcttccagctatggcagtataatatag

SEQ ID NO: 2569 - DNA, 3276 bp, Saccharomyces pastorianus
atgtcttctggtctggtcttagaaaatacggcacgtagagatgcgttgattgccatcgaaaagaaatatcaaaaaatatgggctgaagaacatcaattcgaaattgatgctccatcaattgaagatgagcccatcactatggactctgaagaattgcaccgcaaataccccaagtttatggcatctatggcctatccttacatgaacggtgttttacacgccggccattgtttcactctttccaaagtcgaattttctatcggtttcgaaagaatgaatggtaagagagctttgttcccattaggtttccactgtactggtatgccaattctagcttgtgctgataaattaaagagagaagccgaattatttggtgataactacgacaatgtaccagctgaagaagaagaaactaacgaagaaactccagtcgaaaaagaacatgaggatgtcactaagttcaaagctaagaaatcaaaggctgctgccaaaaaaggtcgtggtaaatatcaatttgagattatgttacaacttggtatcccaagagaacaaattatccagtttgccgatgctaagtattggttaacttatttcccacctctatgtgaaagtgattgtagctcgctgggttcccgtattgactggagacgttcttttgtcactaccgatgctaatccttattatgatgctttcatcagatggcaaatgaacaaattaaaggctgcaggtaagatcaaatttggtgaacgttacaccatctactcagaaaaagatggtcaagcttgtatggaccacgatagacaatcgggtgaaggtgttacaccgcaagaatatattggtgttaaaatcgaagctttggaattcgccgatgatgctgcagcaatcattgactctacttccgccattgacaaatctaagaagttctactttgtcgccgccaccttgagacctgaaaccatgtacggtcaaacgtgttgcttcgtctctccaacaattaaatacggtattttcgatgctggtgtctcttattacattactactgaacgtgcattcaaaaacatgtcataccaaaagttgacaccaaagagaggcttctacaaaccagttgttgccattcctggtaaggcctttattggtaccagaatccatgctccactatccgtatatccagaattaagaattttacctatggaaactgttattgccactaagggtaccggtgtggtcacttgtgttccatctaactccccagatgactatattactaccaaggacttgctgcacaagccagaatattacggtatcaactctgaatggattgaccatgagatcgttccaattatgcgtactgaaaagtatggtgatttaactgccaaagccattgttgaagaaaagaaaattcaatctccaaaggataaaaatttattggcagaagccaaaaagattgcttacaaagaagattactatactggtactatgatttatggtccttacaagggcgaaaaggtcgaagttgccaaaaataaggtcaaggctgatatgattgctgcaggtgaagctttcgtttacaacgaaccagagtctttagtaacgtctcgttctggtgatgactgtattgtttctctggaagatcaatggtatgttgactatggtgaagaaagctggaagaaacaagccattgaatgtttggaaggtatgcaactatttgctcctgaagtgaagaacgctttcgagggagttttggattggttgaaaaactgggccgtttgtcgtacttatggtttgggtactaggttaccttgggatgaaaaatacttagttgaatctttatcggactctactatttatcaatcattttatactattgctcatttgttattcaaggattactttggtaaagaaatcggtccattaggcatctcagcagaccaaatgaccgaggaagtgtttgactacattttccagcatcaagacgatgttaaggattctgatattccgttagtctccttgcaaaagttgagaagagaattcgaatacttttatccattagatgtctctatctctggtaaagatttgattccaaatcatttaacttttttcatctatactcatgtcgcattgttcccaaagaaattctggccaaagggtattagagccaatggtcatttgatgttgaacaacgccaaaatgtctaagtccactggtaatttcatgactttagaacagactgtcgaaaagtttggtgcagatgcttctcgtattgcgtttgccgatgctggtgacactgttgaagatgccaattttgatgaatctaatgccaatgctgctattttaagattatttaacttgaaggaatgggcagaggatattacccagcatccctctcatttgagaaccggtgaaataactgatttctttgacatcgcattcgaacatgaaatgaatgctttgatcgaaaagacttacgaacaatatgctttaactaattataagaatgctttgaaatacggtctttttgatttccaagctgctagagattattaccgtgaagctagcggtaccatgcataaagatttgattgcccgttacattgaagcacaagccttattgctggctccaattgctccacattttgctgagtacatgtaccgtgaagtattaggcaagcaaagttctgtacaaaataccaaatttccacgtgcttccaagccaatagataagggagttctggcctctttggattacttaagaaatttacaaagaagtattagagaaggtgaaggtcaagcactaaagaagaaaaagggtaagtctgctgaagttgatgcatccaggccagttaagttgattttattaatttctgaatctttcccagaatggcaatcacaatgtgttgaagttgttcgtaaaatgtttgctgaacaaactttaaatgataacaagaagatcagagagtacgtcgaacccaaggaaatgaagagagctatgccatttatttctttgttaaagcaacgtttagttagtgaaagcccagaacatgtctttgaaagagaattgcaattcaatgaaattgacaccgttaaagctgctgctaagaatgttgaaaaggctgctcaagctttgaaaattgctgagttcagcgcaatttctttcccatatggcgctaagaccggtaaggatatatttactggtgaagaagttgaaatcccatctgtaacaaagattgttgaaaacgctgttccaggtaatccaggtgtcattttccaaaacatgtaa

SEQ ID NO: 2570 - DNA, 762 bp, Saccharomyces pastorianus
atgttaaagctagctagcacatttatctcgcccttatcaaggaatagtgtcgtttccttaagaatagcttccacatccaaacgatatcagtcttcatttacatttttaaataaccactcgttattgtccaaaagtcagatgaaatctaaaaggaaaaagggtagtaaaaaggcggcgtatcatcgccaatccccagagcacgaatgcaatacaccacttatagagcaaagcgaagcaatatccaaaacagattctaccaatataagggcttcacattcaagaaagaaaagacgcgatttttcgtggcttccaagagttccatccacctcacacctaaagcatagtgacatgaccacaaacgtactctattctggatacagacccatatttattaatcctaatgacccaaagctaaaagaagataccggaagtacattgtacgagtttgccatgaagctagacgatttaaatgaacctctgtccccatggatatcctccgccactggacttgaattcttttcagaatgggagaacatacctagtgagctgctgaaaaatttgaaacctttccatccacctggcgaaaaagcaatggacgttaatgaactaacgagtgtagctgctaaaggtaatacggcaaacagcaatgagaataacgagacttttcagaagaaaatggacgaggttttaaaaagaagaggtaaaggaagaaaaaaaccagtggtgacattactacaaatgaaaaaaaaaatggaaggatga

SEQ ID NO: 2571 - DNA, 918 bp, Saccharomyces pastorianus
atggtaaaaagtttcattcatgcttcgaagataagacatgcagcacgcaaaaggaagcatcattccaagtacaaaaccttgcgaaagctaatagaggaaaatgcttacaagatagagtcgtcaaagccgttgaatggaaaactttttaagtactggaaaaatagacgtcgattgttttcaaaaatagattcgtcatcgatatatatgacagatgagctttggttcagtgtaacgccagaaagaattgcgtgtttcttggcaaatttcgtcaaggcatgcataccaaacggtgagaagatattggatgtattttgtgggggtggtggtaatactatacaatttgccaagcaattcccttatgtttatggggtggattatagcatcgaacacatatattgcactgcgaaaaatgctcaaagctatggagtggatgataggatatggctgaaacagggatcctggaaaaaactagtctctaaggaaaaactctctaagataaagtacgattgtgtatttggatcgccgccctggggaggcccagagtacttaagaagtgacgtttatgatctagagcttcatttgaaacccatggggataacgaaaatgctaaagagcttccttaaattaagtcctaatgtgatcatgtttttgccaaggaattcagacttaggacagctttctcgagccacgaggaaaatcctgggcccatttgccaagtgtaaagtactatatgttaaggaaaatggatatatgaagggaattttttgcatgtggggggagtgcttctttaattacgaacctggaacgcaaggaaacaacggagtagagctgtgttctgaagacgaaaaacaggagaaaggcgaaactactgtagcaaccaaggataaaagtgtagacatttacgacataaatggttga

SEQ ID NO: 2572 - DNA, 861 bp, Saccharomyces pastorianus
atgatcacggactcgtcaattttaaaaaagcacgcatcatctaaaaaaagcacaaggatagtatctctgacgctgattttcctcgggatagtaagctttctagtgtttacatgggacgactccttagaattttacaataacgctacgggccttaacgacagtaacgatagcaacgagcaagggagcgcgaagagattgatttacaagctaccaaacttattaaagaccgcagacggtcttccagataagaaagaaaatgaattgaatattttaaaagtcaaagaagaaatctcgcatatccaaagtgaagtcgaggtcgatatcccggcatccgcatttgagtctacaacatcgtctttatccacagcattccaaaaagatgtgcccgcgcccagaacagctacatcaacagtgccctcatcctcatcctctattatcttgaaaagaaacatcaaccaaaagaaattcgaccccaaagtgagctttcttgacatcataaatacctcgccagctgtgctatttattatgtcatcacaaacggactctgtttttttgagaagcttattacaaaaagaacttgagatttcacctgaattggctattgtcgatttggaaaaacattctcatggttatgaattagaaaagtatatcaagcaaaataaactggacatagaccccagtacttccttggaaaccatccactcgccctacttgtttttgaatggcatttccgtaataaacaacggaatagcaagagacataatcgagcctcattcaaaggggttgttactatcagttttaaagtccgaagcccgcggtaacttactcattgaaaagaaagacatcccttccaattcatga

SEQ ID NO: 2573 - DNA, 1221 bp, Saccharomyces pastorianus
atgttcagtttacaagctctattaccattggccttattgttgttggccagcattaatccagccgctgccaaagttcacaaggctaaaatttacaagcatgaattgaccgatgagatgaaggaagctacatttgagcaacatttggctcatttaggccaaaaatacttgactcaattcgagaaagccaaccctgaggttgccttttccagagaacatcccttttttaccgaaggtggtcacgatgtcccattgacgaactatttaaatgctcaatattatactgatatttccttgggtaacccacctcaaaacttcaaagttattctggatactggttcttcaaacctttgggttcctagtaccgaatgtggttctttggcttgtttcctgcactctaaatacgatcatgaagcttcttcaagttataaggctaatggtaccgagtttgctatccaatatggtactggttctttggaaggttacatctcccaagacacactctctatcggtgatttaaccattccaaaacaagactttgctgaagctaccagtgaaccaggcctaacatttgcctttggtaaattcgacggtattttaggtttaggctacgacactatctccgtcgataaagttgttccaccattttacaatgccattcaacaagacttgttggacgaaaagaggttcgctttttacttgggtgacacttctaaggatagtgaaaatggtggtgaagctacctttggtggcattgacgagtccaaattcaagggcgacgtcacttggttgccagttcgtcgtaaggcctactgggaagttaaattcgaaggtattggtttaggccatgagtttgccgaattagagggtcatggtgctgccattgacactggtacttctttgatcactttaccatcaggtttagctgaaatgatcaacgccgaaatcggtgccaagaagggttggagtggccaatacgctcttgactgtaacactagagacggcttacctgatttgactttcaacttcaacggttacaacttcaccatcggaccatacgattacactctggaagtatcaggttcttgtatttctgcaattactccaatggatttcccagaaccagtcggtccattggccatcattggtgatgccttcttgcgcaaatactactccatttacgatttgggtaaagatgcagttggtttggctgaagctatttaa

SEQ ID NO: 2574 - DNA, 2514 bp, Saccharomyces pastorianus
atggaaaatattacacagcccacacagcaatctacgcaagccacacaaaggtttctgatcgagaaattctcgcaggaacaaattggtgagaatattgtgtgcagagtcatttgtaccacgggacaaattccaatcagagacctctcagctgatatttcacaggtcctaaaggaaaaacgatctattaagaaagtatggacattcggaagaaatccggcatgcgactatcatctgggcaatatttcgagactatccaataagcattttcaaatactgctgggcgaagatggtaatcttttactaaatgacgtttccactaatggaacctggttaaatggtcaaaaagtagagaaaaataacaaccaattgctatcccaaggtgatgaaataactgtcggcgtaggtgtccagtcagatatcttatcgttggttgtattcataaacgataaatttaggcaaagcctcgagcaaaataaagtagatcgcaaaagatctaacttgaaaagcacgtccaaaaccacctctccaggtcttacttcctccactccatctgtcgtcgccgctcacaagactggtattttcaaagatttttctattatcgatgaagtggtaggccagggtgcttttgccacagtaaagaaagctatagaaagaaccactggaaaaacgtttgcagtaaagataataagcaaacgtaaagtaatcggtaatatggacggtgtaacaagagagttggaagtgctacaaaagctccaccatccaaggatagtgcgtctaaagggcttttacgaagacgctgaaagttactacatggtgatggagtttgtttcaggtggtgatttaatggattttgttgctgctcatggtgctgttggggaggatgcgggaagagagatatcgaggcagatcctcgaagcagtgaaatacatacactccatgggtattagtcatcgtgatttaaagccagataatatccttatcgagcaagacgatcccgtgttggtgaagataaccgattttggcctagcaaaagtccagggaaacgggtcctttatgaaaacgttttgtggcaccttagcatacgtagcacctgaagttatcagaggcaaagattcgtctgtatctccagacgaatatgaagaaagaaacgagtattcctcattagtggatatgtggtcaatggggtgtctcgtgtatgtcattttgacaggtcacttgccttttagtggtagtactcaggaccaactttacaaacggatcggaaggggctcttaccatgagggtcctttaaaagatttcaggatatctgaagaagcaagagattttatagattccttgttacaggtggatccaaataataggctcacggctgcaaaggctctaggccacccttggatcaaaatgaatccgctcgtcccacaatcggatggtgatttttcccaaatctctttgtcccaatctttatctcaacagaaaatactagaaaatatggacgatgctcaatacgagttcgttctagcacaaagaagattgcaattagaacagcagcaaatattacaagagcaagagcaagagcaagagcaagagcaagagcaagagcaagagcacaatgaagaagatcaagatggtaaaattcaaggattcaaagtacctgctcacccacccgttcgatatacacagccaaaaagcattgaggctgatagccaagaacaaaaaatcatgcatcccaataatataacaaacaacatgagcgcaaagaaaaaggggcatggtagatttttgactttacagccattacctgatagcattattcaagaaagtctcgaaattcagcaaggtgtaaatccatttttcattggcagatccgaggattgtaattgcaaaatcgaagacaacaggctatctcgtgtgcattgtttcatttttaagaaaagacatgctatagggaaaagtatgcatgaatctccggcccaaggtttggacgacatttggtactgtcacacgggtactaatgtaagttatttaaataatagtcgaatgatccaaggtacgaaattccttttacaagagggagatgaaataaagatcatttgggataagatcaataattttgttattggctttaaagtggaaattaatgatactacaggtctattcaacgatgggttgggtataccgcgggaacaaagagtaatattgaaacaaaccactgaagaacaagatctggttaagaggctaacccaaatgatggctgctcaacgtgcaaatcaaccctcggctgcttcttcaccaatggcggctaataagtcacaaattggcgtcgtagccaataacagcaacaactcagtcttaagcgatttggtagaaccccccagtaatgcaaacacgggaaacatccttaagagaatacactcggtaagtttgtcgcagtcacaaattgatcctagtaaaaaggtcaaaagagccaaactagaccaaacttcaaaaggtcccgagaatttacaattttcataa

SEQ ID NO: 2575 - DNA, 1077 bp, Saccharomyces pastorianus
atgctgccggaaaaaagattattgaccgcagaggacatgaaactatgggagaagtcccaaacaagagctgatttcacgaagttcattataaacctagctgaatctgttaaagggcacgaaaactctcagtacaaggaaccagtgtctcagcaaataactggtatgctgaacctgctttcccagataagagacattatagagaagcacccagtggtgcaagatgtagatagttcaagatttggtaaggtggagttcagagatttttatgatgaagtctcacaaaattcccgaaaactgttgaaatctgaattttcttcgcttacagatgaacaggtggaacaactatctatttatcttgatgaatcatggggcaataagagaagaatcgattatggttcaggtcatgagctaaatttcatgtgtttactctatggactatatagctttgagattttcaatctttcaaacgattcgacgaatctcattctgaaagttttcatagagtaccttcacataatgagagtattagaaactaagtactggttggaacccgcaggctcgcacggggtttgggggttagatgattatcacttcttaccgtttttattcggcgccttccaattgaccacccataagcacctaaaaccaatatccattcacaatagtgagcttgtagaaatgtttgctgatcggtatctgtattttggttgcatcgcattcattaataaagtcaagtcatctgcctctttgagatggcattcccccatgctagatgacatcagcggcgtaaagacttggtcaaaagttgccgaaggaatgataaaaatgtacgaagccgaagtcctcagcaaactgcccatcatgcagcatttctatttcagtaaatttttaccctgtcctgaaggcgtatctctaccaagaggccatatacacgatggcactgatgtggacgacgagtgcaacattgaaggtcatgcccatagtacttggggcgattgttgtggtataaaattaccaagtgctattgcagctactgagatgaataaaaaaaatcacaagccaataccttttgattaa

SEQ ID NO: 2576 - DNA, 1356 bp, Saccharomyces pastorianus
atggatgaaaacgtttataattttgaaaatttggcggatatagacaagttctatacgacgatacggtggaacaatcaatactcgcacatgagtaccttaccatcttatctacaaaaggagagagagagccataaatccctgttggagcggtatgatacctacgcaaataaaaattcttcttccaattgtgaaaacaaggaacttgcgctacagactatttctaaagatatgcgaggaacatctcaagctttagttgacaagaaagagcaagacacgaatgcatcatcttttgttgatgaaatttttcagccagaaagcactgggcactttatagtaaataggtatgaaaaactgatatcacaaaaaccagaatggcatgccccttggaaactttcacgcgttatcaatggacatcttggatgggtacgatgcgctgcaattgaccccgttgacaacgagtggtttgtcactggaagcaatgacacaacaatgaaagtttgggatctcgcaacagggagattaaagattactttaacaggacatgtaatgacagtgcgtggcattgccgtctcggatcgacatccctatttattttctgtcagtgaggataagacagtcaaatgctgggatctggaaaaaaatcagatcattagggactaccatgggcacttgtccggagttcgtaccgtgagtatacatccaacgctggatcttatagccactgcagggcgagatagtgttgtcaaactttgggatattagaaccagggtacctgtcataacgctcgtggggcataaaggtcctatcaatcaggtggaatgtgctccagtggaccctcaaatagtaagctcatcaactgatgctacggtgagattatgggacattgttgcagggaaagctatgaaagttctgacacatcataagagatcagtgagagctatcgcgttacatccaaaggagttttcaatggcatcggcgtgcaccgatgatattaggtcgtggggattagcagaagggtctttattaactaatttcgagtccgaaaaaacaggaataataaacactttgagtattaatcaagacgatgtcttatttgctggtggagacgatggaatgttgtcgttttatgactacaaatctgggcacaagtaccaatctttggctacgagagaaatggtaggctcgttggaaagtgaacgaggcgttctgtgcagtactttcgataaaacgggactaagattgattactggggaaacagacaagagtataaagatttggaaacaagatgaaactgcctcaagaaaatcggaacctgggttagcatggaatcccaatctacgaactagaacgttttaa

SEQ ID NO: 2577 - DNA, 2613 bp, Saccharomyces pastorianus
atgtcgactacaatggcaacaccggcgaaactaaagaacttgcttctcaacctacacactcgttgtattgggctacatattaatgatgtcacactaaaagtatactttagactactgatacgacaccttctacagatatccaggtcaaatgctgctcatcccaagcaaaggagaagggcccagatattactaatatcactttttgtgtcagcagtcacgcttttatccggcataacatacggtaccaccaaaattattttaaagtgctacaaattctacaaatacccatggaaaaggaagaacaggaggcctgtaattagaagaacaaggtcccaaatgcagttggatagtggtgcgaggataatgtacatccctgaagtggagttattagatcgtcagaactcgaaagataataaacatgaaactactatagataagaagaagaggaaaagaatctttatcccaccaaaggataacgatatatacgaacatgacaaatttctttttaaaaacgtggaaccggagagaacgaaaaactcacaattattctactcgaagtttttgaatcagatgaatgttttatctaaaatcttaattccaacagtttttgataaaaattcgttcctcttagtagctcagattttttttttggtaatgagaacttgtctatctttgtttgtcgccaaattggatgggcagatagtcaaaaatattattgctgggagagggaggagctttttatgggacttggggtgctggtttttaattgctgttccagcttcttataccaatagcgccatcaagttactccaaagaaaattaagtttaaactttagagtaaacctgacccgttatatccatgatatgtacctggacaaaagacttacattttacaaattaatatttgactcgaaagcatccaattcggtgattaaaaatattgacaactcaataactaacgatgttgcaaaattttgcgatgccacatgctcagtttttgcaaatattgcaaaacctgtaattgatttaatattcttttctgtttatttacgtgataatttgggtactgttggtgtggcaggcatatttgttaactatttcattaccgggttcattttaagaaggtatacgccaccattgggaaagctggcgagtgaaagatcggcgtctgatggtgattactacaactatcatctaaatatgatcaacaatagcgaagaaattgcgttttatcaaggaacagctgtagaaagaacaaaagttaaagagctatatgatatactaatggaaagaatgctattggtcgacaaatgcaaatttggttataacatgcttgaagactatgttttgaaatacacatggtcaggtttaggttatgtttttgcctctattccaattgttctctctaccttagcaactggcattaatgcggaggaaaaaaacatgaaagaattcatagtcaataaaagattgatgttatcacttgcggatgcgggttcaagattgatgcattcaataaaggatatttcacagctgaccgggtatacaaataggatttttactctactttctgctcttcatagggtccattctctaaactttaattatggcgccgttccttcaatatcagcgctgcacacagaagacaatgcaagaaatccaaatatgttaaccaatgctgacaattcacaagacgttattcgtggcaccgtccaacgcaactttaacggcatcagattagaaaacatagatgtaataattccatccgtaagggcaaacgagggtattaagttgatcaacaaactaactttccaaattcctttacagatcaattccatggcttcaaagtccaattccatacaagatttatcaaaggcaaatgatataaaactaccatttttacagggatctggttcaagtctacttatattggggccaaatggatgtgggaaaagttctattcaacgtattatagcggatgtttggccagtatataacaagaatggtctactatccatcccttcagaaaataacatattctgcattcctcaaaaaccatattttagtaggggcggcaccttgagggaccaaattatctatccaatgtcttcggacgaattcttcgatagagggttcaaagataaagatttagttcagattttggcagaggtgagactagactatcttttgaaaagaggcgttggattaacgtatttggacgctgttgccgattggaaggatttattaagcggtggtgaaaagcaaagagtaaactttgctagaattatgttccacaagccattatacgtagtattagatgaggctacaaatgcaattagtgttgacatggaagactatttgtttaaccttctgaagagatacaggtttaattttatttccatctcacagaggccgacgttgatcaaatatcacgaaatgttgttagagattggtgaaaatcgtgatggcaattggcaattgcaagccataggcacagacgaagcaattctatcaattgacaatgaaatagaagaactagagaaaaaattagagaaagtaagaggttgggaagatgaaagggaaaaactgcagaaaaagcttgaaatcatttga

SEQ ID NO: 2578 - DNA, 1359 bp, Saccharomyces pastorianus
atggcccctaccaacgtgaccaagaagccttctcaatacaaacaatcttctagaaagggtaagaaagcatggagaaaaaatattgacatttctgaagtagaacaatatatggaaaaaaaaattgaccatgaagttacacatggaacaagtgatatgacttcgttacagaatgatgcccttttccaagtcgatgttgaaggtgacgacatattgaaaaagaaattgattaagagaaatcaaatcaaaaaaagtttgaaaagtagagagattcttgatgccgtcaaaactaattcaaaaatttcagcacttaaacatcatacgagtggtagtggggaaaaatccaagaaaattcaaggtgtttctaagcatgaattgaaaaaattaatggctttggctggcagagttcacggtgaatcaaagatcaagaacagagctgccaaagatggtttaatcaaatcaacggctggcgacttgtggggtagcgaatctagtcccaagaaacaaaaaatcaaactgccttccggtattgaacttgatgtgaatgaaaagggccaaatacctgaggatttactcaaaaaatcaacaacaggttggtctattgcttcagttagaccagaaactttgaacgtggaaccacttgcagtgaaggactttgtggagcttccacatgctggtaaatcttataatcctaacgacaaatcttggtctgaattgataaataaggagtataaagatgaaaaagtaagagaagatgacagagtcgccttagaattgtatagagaaaggattagtcatttaatggagacattagaggacaatgaagaggaggaatcttcctctgacgaaggggaaaaagaagaagagaacgaagacgagcaaagcggtagttctgatgatattgaagtaagactatcaataaatgaacctgttaagaataagaaaaagacgaagtatcaaagaaataaagcaagcaaacatgaagagaaggttaaattgcaacaagaactaaagaaattgagagagcgggttaaagatttagaaactgttattgattctgaggagaccaggaaaacttctgtcgtagagcctaaaaatgccaacaaggttaagaagagcaagaaaaataaaaaaaataaattaggcaccaagtattctgttattgatgagagattggaagtcaaattctctgatgaactatctgattcattgagaaaagtgagacctgaaggaaacttgctatacgataccgttagaaaattacaaagttccggtaagattgaatcaagagtaccggttaagagaggcagaagatacaagcaaaaaatcactgaaaagtggacacacaaggactttaaatag

SEQ ID NO: 2579 - DNA, 1305 bp, Saccharomyces pastorianus
atgtctcaatacgcaagttcatccttatggacttctttcttgaagtcaatcgcttcatttaacggagatctttcgtcattatcggcacctccatttattctatctccaatctcattgaccgaattttcacaatactgggctgaacatccagagttgttcttggaaccttctttcatcaatgaagataattataaagagcattgtccgatcgacccagaagtcgagtctgcagaaatctctcgtatgttggcagttaccaaatggtttatttctactctgaaatcccagtactgttctcgtaatgaatctttgggttctgagaaaaaacctttgaacccatttttgggtgaattgtttgttggtaaatgggaaaataaggagcatcctgaatttggcgaaactgttttgttgagcgaacaagtctctcaccacccacccgtcacagccttttctgtcttcaatgacaagaataaagtgaaactgcaaggctacaaccaaatcaaagctagtttcactaaatccttaatgctcaccgttaagcaatttggccacactatgttagatattcatgatgaaagttacttggtcactccacctccattacatattgaaggtatccttgttgcttcgccttccgttgaattggaaggtaaatcatacatccaatcttccacaggcttgctatgtgtcattgaattttcaggtagaggttatttctctggtaagaagaattctttcaaagctagaatttacaaggactctaaagatagtaaagataaagaaaaggcgttgtacacgatatctgggcaatggtctggctcttcgaagatcaccaaggctaacagaaaagaagaatcacgattattttatgatgctgctagaattcctgctgaacatttgaatgtcaaatcccttgaagaccagcatcctctagaaagtagaaaagcctggtacgatgtggctggtgctatcaaattaggtgatttcaatctgattgcaaagacaaaaagtgaattggaagaaacacaaagagaattaagaaaagtggaagaggctaaaggtatcagctggcaaagaagatggtttaaagatttcgactactctgtaacacctgaggaaggtgcattcgtacctgaaaaggatgacactttctctaagcttgcttctgctttgaatttatcaacaaagaatactccaagtggtactttagttggcgacaaggaagataggaaggaagatatctcgtccattcattggagattccagagagaattatgggatgatgaaaaagaaattgttttgtaa

SEQ ID NO: 2580 - DNA, 1059 bp, Saccharomyces pastorianus
atgtctctaccaaaatggtgtcctccacattcaaacctaaagataaatccaatgacgggggaagacgtgtactgcatatgtaaaaaaccggattatggggaactaatggtaggatgtgatggctgcgatgactggttccatttctcttgtcttcatattcctggccagtttaaagacttggtgttttcttttttttgtccctactgtcaagcagggattactggtaagaacaaagatgccataatgaatggtgaaatgaacttgcccaagactttatggaaaaggaaatgtagattgagcgattgttacaagccatgtctacaggatagcaaatattgctcagaggaacacggcaaagagtttgttgatgacatttgggctcgattgaaaacggatgaagacaaagttaaagttaaaaaaatggtcgaacaaactgaacatgtagataagttcaaaaaattcggtcaagctgattttatcaacaacgatatagttataaaaaatgaccaggaaaaagagattttcgatcaaattgtagcacgagatagtacattaaaaatacttgaaaacgatcttcgggaacttcaagagaaaacgctcccattattcaaaaagaaatttgagcttttagaggtatatttgagttggttagacaacgtgtacactgaaattcgcaagttagacgatgacatcgcggccaatatggaaggcgataaaacttctactaaggggacaaataagaagaaaaagaacaatagcaggagcaggccgaggaggaatatttgtggctattactctacatatgaacagacaccttgcgctgtagaagaatttgtggctgagattgggaaggacgaggaaagcactacaatccgtggggtatgcacaaaatggaagtgtaacaggcattcagactgggtgtctacaaatcaagaacagtatcttcaacagattgattccttggaatcgatgcaagagaggttacagcatctcatacaggcaaggaaaaagcaactcaatatccaatattatgaacaacttctgagaaaaggcttatag

SEQ ID NO: 2581 - DNA, 498 bp, Saccharomyces pastorianus
atgtttcctattttaaccagactagcaaggcctgccgtgatggctgcgagacccgtgaacgccgccgggttgttaagggcgtccagcataacaaaaagactgtaccatcccaaggtcattgaacactacacacacccaagaaacgtggggtcgttagacaagaaattgcccaatgtcggcacaggcttagtgggtgcaccagcgtgcggcgacgtgatgagactgcagatcaaagtgaacgactccacgggtgttattgaggacgtcaagttcaagacatttggttgtggctccgccatcgcgtcctcttcttacatgactgagctcgttcaagggatgaccctggacgacgctgcgaagatcaagaacaccgagattgccaaggaattaagcttgccccctgttaagttgcactgctccatgttggcggaagacgctatcaaggcagccatcaaggactacaaatcgaagagaagcaccccaaccatgttgtcatag

SEQ ID NO: 2582 - DNA, 174 bp, Saccharomyces pastorianus
atggcggagccacaaccaaatgtcttgaacttgacgtcctcaataacacccgtggagtcgttcactttgatctgcagtctcatcacgtcgccgcacgctggtgcacccactaagcctgtgccgacattgggcaatttcttgtctaacgaccccacgtttcttgggtgtgtgtag

SEQ ID NO: 2583 - DNA, 1359 bp, Saccharomyces pastorianus
atgtcagcgaatagcggggtaaagcgagctagtaaggcatttaaaacatgtctattttgtaagcgatcacacgtcgtgtgtgataaacagcggccgtgttctcgatgtatcaagagggacattgcacatttgtgtaaagaagatggtataccgattacaaatgaacgactgtcacagcaaggaaattcacccgaggagaattgtatagcaccggaaacatatccaaatagggcgaataatgggagtatgtttgattgtcaaaacaatcgtaatggatcgacggacaccagtagccccaaatatggggagcctcaatcatctaaactagactctactcttgtaaacgatacaaccagtttattacttccacaacagcctatatttgtatcagagaatgtcggctcggaattcagttctttgaatgaatttctttcgatgctagaaaaccctctgctggcccattcagggttgagctctggtggcacgagtgatattcatttagaaaatggatcacaaagcacccaatctccattagaatatcaaaatgacaaccatagaaatggaaacgaagtggtaagacgaggacagaatgcaccggatataattccagcgtcttctaatgatgtttcaaagacgtatggacataacgagccgaaggaagtatctaatgatcagttcgaggccgatcctaacgagaacagtgctccaacgcctaaggaacagtttttcttaacagccgcagatccatctacagaaatgacgccggaagataggttgaaattggtcataaacgccaaactagaggcaggattgttgaagccttacaattatgccaaggggtacgccaggttacaagattacatggacaaatacatgaatcaatcttccaagcaacggattctgaaacccctgtccaccatcagaccagcgttcaggaccattgcgcgttcgttaaaggatgtggatctagtactcgtggaggaaagttttgaaaggatgctattgtcatatgatcgtgttttcacctcgatgagtatgcccgcttgtctgtgcagacgtacgggggaaatttacagggccaacaaagagtttgcctccttggtcgattgtacggtggacgatctacgcgatgggaagttagcaatctacgagttgatgacagaggaaagtgcagtaaacttttgggaaaaatatgggtccattgcgttcgataagggccagaaggccgtcctgacaagttgtagtctacggaccaaagacgggatccgtaaacgaccatgctgtttcagcttcaccatcagaagggatagatacaacatcccgatttgcattgtagggaattttatccctttatcatag

SEQ ID NO: 2584 - DNA, 894 bp, Saccharomyces pastorianus
atggtattccaaaaagacgctaagtcctctgcttactcctctcgtttccaaactcctttcaggagaagaagagaaggtaagactgattactaccaaagaaagagattggtctgccaacacaaggccaagtacaacactccaaagtacagattagtcgtcagattcaccaacaaggatatcatctgtcaaatcgtctcttccaccattactggtgacattgtcttagctgctgcttactcccatgaattaccaagatacggtattactcatggtttgactaactgggctgctgcttacgctactggtttgttgatcgccagaagagccttgcaaaagttgggtttggacgaaacctacaagggtgtcgaagaagttgaaggtgaatacgaattaaccgaagctgtcgaagatggtccacgtccattcaaggttttcttggatattggtttgcaaagaaccaccaccggtgctagaatctttggtgctctaaagggtgcttctgatggtggtttgtacattcctcactccgagaacagattcccaggttgggatttcgaaaccgaagaaattgacccagaattattgagatcttacatcttcggtggtcacgtttcccaatacatggaagaattggctgacgatgatgaagaaagattctctgaattattcaagggttacttggctgacgacattgatgccgactctttggaagacatctacacttctgctcacgaagctatcagagctgacccagctttcaagccaactgaaaagaaattcaccaaggaacaatacgctgccgaatctaagaagtacagacaaaccaagttgtccagagaagaaagagttgctcgtgttgctgccaagatcgctgctttggctggccaacaataa

SEQ ID NO: 2585 - DNA, 672 bp, Saccharomyces pastorianus
atgaggaaacaaatattaatggttgcagttcaaagtattttatgttctaccgtttttggtgagcgaaccaacgtggggctttccactgaagaactgggtggtgactcagttgtgtactttgatgaggacccggttgtggtagaaataaacacgaagtctataaacaaacaggctttggaacagttggcaacgacgagaaatgttgttcttactgatttgcctgaaacccttgagtttatagacttcaacgagtacgcaaaaatgaaggcgaaatccgacatgctattagagtatatcaacgaatacgaattcgatgattttgaggaaagttcggaaggcggtgtttatgaagaggaagaagaggatttgatttatgattttaatgttcaagcaaaggacacggacaaaattaatgccaatgtttatgaatttgttaaagaaaaagaagtaattaacacttatgataaaaatattacgaactcaaccacggtggagtcatctactactattggtccttttaaaacgtctcactcttactccgcttctattactccgcattcgaatgcttcaatagcgggtgaggactacgataacgggagctccttcttgaccccaacaactgtagctttgacagtattgttgaccattttgttatttatacagacctactaa

SEQ ID NO: 2586 - DNA, 813 bp, Saccharomyces pastorianus
atggctcccaagaagaccagcaccaagaccatgaacaagggtaagaagcccgtgaccagcaagagcaaggacaagccgcttgccaagacagcacctaaaaagagcacgccaaagaaggaagaaccttcgtccaagagctacaaagagctgatcgcggaaggactcgcagctctgaaggagcgcaagggttccagccgccctgccctcaagaagttcatcaaggagaactacccgatcgttgggtccacgagcaattttgacttgtattttaacaacgctattaagaaaggtgtggaaaccggtgactttgagcagcccaagggccccgccggagctttgaaattggcaaagaagaagtctccagaacccaagaaagagaaagaaaccagtccaaagcccaaacaatctgccaccgccactgcctctgccactgccgccgccataacaacgccaaaggcgaagaccccgtctaagaaacaagcgcccaaaaaagtagtaaagaagaagtcgtcgcctaccgccgccagcgccagtgctgccgccaagaaggcggcttccccttcttcattgagctacaaagaaatgatcttaaagagcatgcctcaactcaatgacggcaagggctccagccgtatcgtcctgaagaagtacgttaaggacactttttcgtccaagttgaaaactaactcaaattttgactacctcttcaatagcgctatcaagaaatgtgtggaaaatggtgaactggtgcaaccaaagggcccctccggcatcatcaaactaagcaagaaaaaggctaaaatatccacctaa

SEQ ID NO: 2587 - DNA, 2688 bp, Saccharomyces pastorianus
atgacgcaatctttgggtatcgaacagtacaagctttcggtcgtatccggtggtaaacccgctttgaacgatttcagctcggtgaccggtaacaagaatatcgcacgtttgtcgcacgaccagctgaactatatcattcctttcaacaatcagatcaaggtgtactccgtggaaaccaggcaatgtgtcaagacactgaagttcgccaataaccccgtgctttgcgggatctttttgcaagaacaagaagacaacgagtccatagtaaagattttattggacgacataactgctcctcagcagaagaacgcacatctgattaccgtgtttaccaagagcggctacgtcgtggttctgaactacaaggggaaactagtcgagtctcccaagcatttcaaaatttctttggaaaacgaacagctctctaatgtgttccacagcaaaggcacattcaggatcctaacaacgttcaaagacgtcaaacagaaagcccaaaactccttgcagtcctacaggctgcacgggttaactttcgatgaatccaaaggacagttcgatgtaactttccaggccgaatggagcaacgtcatcttgtcgaatacctcttctaatgggaaattgctggcattaatgaataaagacgtttcaaaaaaggaccacgaacacaaatctatctcagtcgtttcgattttcgatgactctgtaaccttgagtttccccctcagttccgttctttcttcacagactcaatccctgtcttccaacaccagatacgtttctagtatggctatagacaacatgggccaacaactggctattgggtttgcctcaggggttataagtatcgtgaacctggctgacttgcaaataaggttgctcaaatggcatatcgactctgttctttcgctggcattctctcacgacggaagctatcttttgtctggtggttgggaaaaagttatgagtttatggcaactggctacaaactcccaacagtttttgccccgtttgaacggtatcgttatcgattgtcaagtcctgggtcctcaaggtaactactattctttgattttacaaatgactgaaaacaattcaaattcggattaccagtttttgttgttgagcgcttccgatttgtcctctaaattatcgatcaatggtcccttaccagtgttcaacacggctataaaacacattcaacaaccaatctccgctgtcaataccaagaactctaattcaatcacctctatcaaccactccaagaaaaagcagttgagaaaactaatcaaatcaaaaagacaggatttcaccacaaatgtggaaatcaaccccatcaataagaatctctatttcccacacatttccgctattcaaatttttgacttttacaaaaatgagcaaattaactatcaatacctaacatcaggtgtcaataattctatgggtaaagtcaggtttgaattaaacttacaagacccaataataactgatttgaaattcaccaaggatggccaatggatggttacatatgaaattgaatatccacccaatgatcttttgtcatccaaggacttaactcacatcctcaagttctggaccaaaaatgataatgagacaaactggaatttaaaaacaaaagtgataaatccacatgggtcaagtgtccctataaccaatattttaccttctccaaggtcaattaatggaggtcaaggctgtctaacggcagataacaacggtgggttgaaattttggtcatttgacgctcatgagggcaactggtgcttgaagaagatctcattaccaaacttcaaccactacagtaattctgtctcattagcttggtcgcaagatggatctctagtattccatggattcgatgataagttgcagatcctagatttcgacacttttaaaaagtttgagtccttagacaacacaaagacagtcagtgaatttacactggattcagaaatccaaaccattaaattgatcaatgacactaacttaattgtcgctactagaacaacacttaatgctatcaacttactgcaaggtcaaatcataaatagctttgacctgtatccatttgttaacggcgtttataaaaatggacatctagatagattaatcacttgtgatgaaaaatcaggtaacatcgcattagtaataaaccaacaattgactaacctcgaaggtgtaccaaccacaaattataagtctcgtattatcatatttgattccgatttatccacaaaattgggtaattttacacaccacgaatatatatcatggatcggttggaattatgatactgatttcatatttttggacatagaatctgcattaggtgtcgtcggaaccactgttaacactcagttatccgatgaagtgaataatgaaggtattttggatggtctagtgaacaatactaccgcgactttagcttccaacaatgatgtttttgcagagcaattgaatcaattgtcatccagaggtaaaagtgaagctagtgataaagatgctaatggtaatgacgaagacgaagaagacatcactttagaatttataaacggtgaaaagaaagacaaactggtcaatatgaatagcttcacaagcatgtttgacaatattcaaaatgtgcaaatggatacttttttcgatcgtgtaatgaaagttattacataa

SEQ ID NO: 2588 - DNA, 762 bp, Saccharomyces pastorianus
atggattataacaattttggaagtagtgctaataaaagatttcaagatgatacactaaacagagttagaaaagagcatcaagaagctctgaagaagttacgtgaagagaactttaattcaaacacatcaaacttaggaagtaagaaacaatacaaagcacaggaaagaatgagcccacctttacgtagactgtctcctgtgaataacccagaaaataagaaaatgagaagtccattagatgataagctcagaagacaattaagggaaggcaatacacgactacctcctccatcgttctccagttatggagcgccttcaaacaacggttccaatctggataggataagaagaagaaccagctcacccgtgaggagcgagcggttcacagcacaagatgtaatagatgatcaaagattagaaataaaatatctggagcgtattgtacatgatcaaggctcagtcatcgatgacctaacatcaaggataacgagattggaatccgttatgttgaattctgcttcagacagaggacaaagcaattttaatgctgtcgaacattctaactcattttccgggtttcctacaaataagacgtatgacttacaaatgggtggactatatgaaaacgaaatgccttatcgaaggggtagcgacaacatcaaaagagaaagaccgagagttaatcgatcttcaccaatccatattgaaaacgaaagtactgaagatatattaaaaattttatcatcgtccttccatgactga

SEQ ID NO: 2589 - DNA, 1542 bp, Saccharomyces pastorianus
atgagtgactactccttgaaacactcagttacccagtatttggaagaaattccccagcaagtgcaaaatagactatacacttcaccagctacatgtttggccatctatagaattttaccacctttagccaaattttttatcatggcaatggtttttaatgaaaacgaagtccctctattagatctggataaatgggttaactcaaatggtaaattgcagtttcaagatgcaatcaaatcaatgaagtctttgcatcttctcataccaaacaagtcttctggtactttgatgatcaacctaaatccaactttcaaaatcagtctgagaaacgcgttgacaggcggagaggttcagaattcttttggtatcgttgtagaagataatgtggttagtttgaacctattggacgaatattcagccaataaatgggaaactatattacatttcatggttggtactcctctagctaaaattccatccgaaaaagttttgaatcttctgaagcacagtaaacttatggaagaaataaactccaccggtgaattcaaaatcactaatgaaggttttcaatttcttttacaagaaattaactcccagttatggtctttactactacagtatttaaaagtgattgaaacgtccaaaatggatttagtcgacgtgttacatttcattttcatgttaggtgcattagaagtcggtaaggcgtacaaaatcgatgcattaagtgaaacgcagaggattatgttacaagatatgagagattatggactagttttccagaaacattcaaacgataccattttttatccaactaaattagctttaatgctaacttccgatacaaaaacgattagatcggcctccaatgcgatggatagtgtattaagacagaacagggaggaaccctcagtgaatgaggacggcaacaatggtaagcctacaggagatatcaatatacccgatgatttaaacaaagttgattcgaaaagtcaggatatacctgatggttcattaattgtagaaacaaatttcaagatttattcatattccaattctccgttacaaattgccgttttgtctcttttcgttcatttgaaggcaaggtttgttaatatggttttgggccagataacaagggaatctattagaagagcactgaccaacggtatcactgcggaacaaatcattgcatatttagaaacacatgctcatcctcaaatgaggaggttggctgaggaaaagttggagaaaaaactagagctagacgccaactgtaaagagccattacaaatcctacctccaacggtagtagatcaaatcagattatggcaactagagctagatagagttatgacatacgatggctctttgtactccgattttgaaaccaatcaagagtacagtatgctgaataaatatgctcaagatattggtgtgttattatggaaagacgacaaaaagaggaaattcttcatttcaaaggaaggtaattcacaagtactcgatttcgccaaaagaaagttaaaaaagaaacagtag

SEQ ID NO: 2590 - DNA, 1857 bp, Saccharomyces pastorianus
atgagtgatttgtcccagaacgtagctaagctaaacattaacgacaaagaaaacggtaacgatggcggcaaaccttcgtatgtcccaccacatttaagaggcagcggtaaaccggcgtttaggagaaccggtcccccaagggaggatagaggttcaggtggaggattctttagtcgttcgagcaagcaggccggcgataatgacggtttttttggtttttctaaaggaaacaatggaggatcgacttataaccgcggaggcagttcaagtttcaagtcatcaggaaacagatgggtgaacgggaaacacgtacccgggccaaagaacgcaaggttggaggctgaactattcggtgtacacgaagatcccgattaccactcatctggtattaagttcgataattacgacgatatccctgtagaggcatccggtaaagatgttccagaaccgctattagagtttgattctccacctctggatgcattgctactggaaaatattaaacttgctgggttcaataagcctaccccagtgcaaaaatactccgttcccattgttactaataatagggatttgatggcctgcgcccaaactggttcagggaagaccggcggatttttgtttcccgtctttacggagttgtttgagtcgggaccttccccgatgcctgagaaggcacaaagcttttattctaggaagggatacccatctgctctagtcctggcgccaacaagagaattggcaactcaaatttttgaagaggctagaaaattcacttacagatcatgggttaggccatgtgttgtttatggtggtgcaccaatcggtaaccaaatgagagaggtcgaccgtggttgcgatttactggttgctactccaggtcggttgaatgatttattggaacgtggaaaaatttctttggccaatatcaagtacctcgtcttagatgaagccgatagaatgttggatatggggttcgaacctcaaatccgccatatcgttgaagaatgtgatatgccatctgtaggtaacagacaaactttaatgttttctgccacattcccagtggatattcaacatttggcccgtgatttcctagataattacatctttttgtctgtaggaagagttggttccacttcagaaaacatcacacaaagaatattatatgtggatgatatggataaaaaatctgctttactggatttactatctgcagagcatgaaggtttaacgttgatttttgtcgagacaaagagaatggctgatcagttgactgattttttgatcatgcaaaacttcagagccacagctattcacggtgatcgtacacaagttgaacgtgagcgcgcattatctgccttcaaatctaacgtggccaatatattagtcgcaactgccgtagcggcaagaggtttagatattccgaatgtcacccacgtcattaattatgacttgccttctgatattgatgattatgttcatagaattggtagaaccggtcgtgctggcaacaccggtgttgctacttcattctttaatagtaataaccagaatattgtaaaaggcctgattgaaatattgaacgaagcgaaccaagaagtgccagcatttttaaatgatatgtcaaggcagaatccaagaggtggtaaaactagaggtggaggcggcggaggtttcttcaataaccgcaacaacaattcaagagattatcgtaagcatgggggcaatggttcctttggaaatacaaggccaagaaatactggaacatcaaactggggttccagcagtgggggagggtttaggaacgataatgaaaacagtggttttgggagtagcaatgcttcatggtggtaa

SEQ ID NO: 2591 - DNA, 1035 bp, Saccharomyces pastorianus
atgactttggcagagttgctgggacggtcaagaattgctcaagtagcaaacaatcataaaccgttgacatatactggtaaaaagttccatccaacacaccaaatcattgaaactaagccatcaacactttatcgacaagaatgggggttgaaatccgctattccgtcaaaaataaagtctaggtacttagtatataacgatttggacactttagaacgaattaccacattcgaacccagaggcggtacccaatggaacagattaagattccaggaaatgggagtacccatcgtgtccaatataggcagacaaaacccatttttcaaggacccctcacgttctgaagatgattcagatgctaagttgtctctattcaaagaaatgacaggcgaggcagatatctcgcccgcagccatggaaaagcgtttagagaagacaatcagactgatcaaatcgtttcaaaaggaattcaaggaatggttggtggagaaccatccagaagaactgagattaaattccaataagctggaagattatgtagtgaaatttttaaaccgaaaattgaaagcaaagacgagcaacaaatttaactccgagattataggtacaggcggtttgtcatacagtttatcaggaaaattgaaaaactcgccaaatggcgtcattcaaagaactgtagtacctggcagagtcttgaatgttgttaaggaaaacaacgacaataaatggcttgcggccattggtgggttcgttgctgatgtagtctttttccaatctccacccaattccttcaattcaatgggcgacttcataagaatgaagactttcttgttcgagattttggaggcttctatggagaaaaatggttctgtttctatgcatgctagactactagagccacagaatgacaagactagagaattttttaataaaagaccaatctacaaacccctaacccctagaaggtctcgtcgaccatcagtgggcaacattcaagaggccaataatcttttgaatataattaagggaaattga

SEQ ID NO: 2592 - DNA, 867 bp, Saccharomyces pastorianus
atgactgccgacaatagtagcgtgcctaatagtgcagtatctagctacgccaagctagtgcaaaatcaaacacctgaagacattttggaagaatttcctgaaatcattccattacaacaaagacctaatactcgatctagtgaaacttctaatgaaaaaaccgaagaaacatgtttttccgggcatgacgaagaacaaattaaactgatgaacgaaaactgtattgtcttggattgggacgataatgctatcggtgccggtactaaaaaggtgtgccatttgatggaaaatattgaaaagggtctattacatcgcgcattttctgttttcattttcaatgagcaaggtgaattgcttttacaacaaagagccactgagaaaatcacctttcctgatctttggaccaacacatgttgctctcatccactgtgtattgatgatgaattgggccttaaggggaagttagacgacaagataaaaggtgcaatcactgcagcagtaagaaaactagaccatgaattgggtatcccagaagacgaaactaagacaaaaggtaagttccacttcttaaacagaatccattatatggcaccaagtaatgaaccttggggtgaacacgaaattgattatattctattttataagatcaattccaaggaaaatttgactatcaatccaaacgtcaatgaagttagagactttaaatgggtttcaccaaatgatttgaaatccatgttcaatgacccaagttccaaatttacaccttggttcaaaattatttgtgaaaactacttattcaattggtgggaaaaattagatgatctttctgaagtcgagaatgacaagaaaatccatagaatgctatga

SEQ ID NO: 2593 - DNA, 2100 bp, Saccharomyces pastorianus
atgtcttccacacaatcagacccgttggagaggttttataggcagtttcagacctttgttcaaaataaccccaatgtcatatcggccgctcgtgcagccgctcaaatcccagagtctgcgaaggccgttgttgtgttatctccttattctttgcagcatgttttccccagagaatgggtaacaaagtcgtacaaaaaaaccatagtcgaacgaccagagaggctgttagcaagttcaatgggtatatcggctgcaattaccatgtatccgtcccttttcactttgaaatcttctcacttgcggaaaggttcgttgatggcacctcatgtgctcaaggtgcacggcagtcattggccaactgaattgattgagctttgtcaaatggcagacgccaaattgttgaagggcgagatcgaagttccggatacgtggaactcgggtgacatttatttgagttcaaagaccatcaaagctctgcagggtacaattggtgctattgaaaccggtgtagactcgattttcaaaggtccttctccggaacatattagtaacagagcctttgtggctatacgaccacctggccatcattgccattatgctactccatctgggttttgcttattgaacaatgtccatgtagccatagaatatgcgttcgatacctatgatgttacacacgttgtcgtactggatttcgatctgcatcatggtgatggcacccaagacatttgttggaaacgtgctggttttaaaccggaggaggagtcagagaattcatcctacgacgattttggtaaaaagtttgctgagtttcccaaagttggttatttttccatgcatgatataaattcatttccaacagaatcaggattcgcaacaaaagagaacatcaaaaatgcttccacatgtatcatgaactctcatgacttaaacatctggaatgttcatctatctaaatggaccactgaagaagaattcaatatactatacagaacaaaatatagaactctatttgcaaaagcagatgagtttttcaagactgcaaaattagaaatgaatcaacaggagaaaacgttcaaaggtttggtagtaataagtgcaggttttgatgcgtcagaattcgaacaaacttccatgcaaaggcatagcgttaacgtccctactagtttttatacgacattcactaaagatgcattgaaattagctcaaatgcactgccacggtaaagttttatccttaatggagggcggctattctgataaggccatatgttctggtgtttttgcacatctgattggtttacaaaaccaagattgggttaaagaatgggggtcagaacaagttgttaaggagatcgttcgtggatgtaaatcaacctggaaaccttacaagacaaggagagctaaagatgttataaggatatgggccgaagaagttatcaggctaggacgagcaatgataccggaattcgatgacatgatctttaaagacattgtcaaaacagcttcacctgattctttacccactaacattgtagagccagtaatgacgtcaacaattgcccaaagaatcataagatctcatagaagcagcgcttctccagagaaagaaatttatgaaagcaagctcaagaatattgaaaaggaaaaaccagaagaaagagaaagttgtaatgaggtcaaagttggtcaaccttcatcaaataatagagctgctgaaactaaagttccgtttttgcaacaagaattttctagtgaagatgaagatgaagaatatgtttacaatgaagaattgaacaaaacgttcaatcgtacagtggaagatattactattgatgacatttctagacatttggaaacattggaaattgaaaaacacgatgaagaagataccgaccaagaaaaaaaggataaaaactggaaaagctcccatcaacgtcgtttacaaagcaatggaatgtataaaattccctctaataccaaacctcatcgcatgagacaaacccaaaatacaaatacaccaacttacgacgatagtgacatatcaatgatttctcatgtttcaagaaaacatacaacaaggagtggtggtagatggtaa

SEQ ID NO: 2594 - DNA, 3411 bp, Saccharomyces pastorianus
atgtcaaataatttgaccactacgcatggtggcagtactacccttgaattactagcacagtacaatgaccatagatcgcaaaaggacaagagtatagaacacatagaaaaaggaacgtcttcagaaaatgataatagaccctcatatgatgaaatattcacggaaaatatcaaactaaagttacaagtccaagaatacgaatctgaaattgagagtttaaaaaaagtcattgacattttgcaaaaaaatagagaagcgtccttagacgtggtactagaacaggtccagaatgattcaatagactcgcatgtccctgaacagtcttttgtgttacctccgagatctgctgaaaggaaaacgcacaacaagagcctaaatttgtctataccgacattgtctccttcattgcaacaaggtaatagtatcccttctgaaacgattgtaacgcccacaatacctcaaatagatgttacgtcaaattcggaccctaaccggtcgagtacttcaataagtaggaagcatttacaaaatatgatactgagcgaggaaatagaaactaacagtggatattcgtcgcccaaaaccgttagtaggtccgcatcgagtcctacgaaagtaaaatcggagcgatcagctagcccggctgcatcagtaacatacacgacttctagaataaccataaaatcgcccaacaagactccaaaatccccattacaagaacgtttacgttcaccacaaaaccccaacagaatgacagctgtcatcaataaccatttacattcaccactgaaggctgctacgtcaaacaatttagacgagctgactgaatgtcaaggccaacaactctctaaaaacatcatgcagaagaatgagcacgcctattcttctgtaacctcttccgcgtataccaatgcaacaccctcttcattaaccaaaagtccattatcacattcgaaaactaaagagaatagtaacgatacgtcgaatttttctccagcatcaaaagagaaacttaataattttacacaattacttgactcttcatttggcgaagaagatccggttaaaccagaaataaaaggttcagcaattgcaaagccaataatgaatgaaagtctacctccaccaccagcacctccaacgtttttttcacctacctccaacactgatgggaaagacactactccactatcaagccatttggcatcgccagtgatcttaaacagaaaagatgatgttgttaatcccaatggtgcaagcaatttgaggaaccctgccttaacttcctcactttccagcccttccacaaaatcatcagcggcaagtcaaaatacttctctcccctcaaatccccccacagaggctctgtcaaaacaaaaacagtctgtagagactgcgtctatcaattcgaacaatactgccaatacattcaactcaaattctcaaggctccagtaaaactttcagaagaccacacgcgagtagcgttagcacggttaaatctgctgctccaagctttaaatcggaaattccattattcgtgcaaccagaagactttggtaccattcaaattgaagtattgagcacgttgtacaaggaaaacgaagatgatttatcaacgttgtttgctatcatagacaggaaatccggtaaagaaatgttcgaattctcgaaatcgattcataaagtccgagaattagatgtttatatgaagtctcatattcctgatttgccattgccctcgttacctgatagacaatttttccaaactttatcacctgtgaaggtagatacgagaagaaatattttgaatcaatactatacaagcatatttagtatccccgagttcccacaaaatgttggcttgaaaattgctcaatttattagtacagacacagtaatgacacccccgatgatggatgataatagaaaagatggatcacttttattaagaaggccaaaaactctaacaggtaatagttcatggagggttcggtacggtgtcctgcgcgatgacgtcttacaactacttgataaaaaccaagcgatggaaacgattaggctgagacaagcgtctatagaactcatacccaatcttcctgaagacaggtttggtaccaagaacggatttttaatcacagagcataagaaaagcggactatcaacttcaacaaagtactatatttgtactgaaacgcctaaggaacgtgaattgtggctttctgcattcagtgatttcatagatccttcacagtctgtgtcactatcaaattcaaggaatataacttacgcaaacgatacagattctgcatctcatttgagtgcaaattcacatttctccaaatttggaaatacaaccacatcagcaactgagactccatcatatgttacagatttaacacaggagtatagcagtaataataacaataacaataatcacatggtgaatggtgacaatattgatactaatttgccatcacattctaatcctcttgccaatccaactttcagtgcagatgaagagaaagataatagaagagtcaaaatgagaagtttgttcccattcaaaaaattaaccgctccgacaagtgcgatgaaccacttgggtatcacagtctcgaacgattctgattcaccaacatcccctgattttgtcatcagatcgccaagcaaaaagttaatggatatcccaaagacgacaaactctttttcaatgggctattcaaccgctgtagtatttgggtcatcattggaaacatgtttgagattgagttcgcataaatatcagagtgtttatgatttgccaagtgttgtttatcgttgcttagagtacctttataaaaatcgtggaattcaggaagaaggtatatttaggctaagcggatcgagcactgtcatcaaaaccttacaagaaagattcgatagagagcatgatgtcgatttatgccgttacaatgaaatcattgaagctaaggacgatggaacgtctccaagtttatacatcagtgtgaacactgtgagtggactactgaaactttacctgagaaatttgcctcatttattgtttggtgacgagcaatttttgtcttttaagacagtagtagatgaaaaccataatgatcctgttcaagtttcattaggatttaaagacttaattcagtcaggtgtagtaccacacgctaatatgtcattgatgtatgcccttttcgaactattggtaaggatcaatgaaaacagcaagtttaataagatgaatctaagaaatttatgcattgtattctctccaaccttgaatattccaattactatgctccaaccttttattactgattttgcatgtatatttcagggtgaagacccaatcaaagaagaggaaagagagaaagtagatatacacattcctcaggtttga

SEQ ID NO: 2595 - DNA, 1185 bp, Saccharomyces pastorianus
atgataaccctaattgacactgcggacacaacacattctgccaaaccaagaatactagtaccttataagaagttatgggaagtggccagtcatcttcctgaataccaaaaactgtctgaaaaagtggaattctacaagtataaaatgtctacaaatgacgactttattgagtttttgaaaacccacagaataaacgccttttggataactgaggaatttttcagtgtgttggggaacccttccaactacattgaattcttcccatcttctttgaaggccatcctggtaccttgggtcgggtgcgattttattaatagtaaactgttgagatcgaaaggtatcactttatgcaacatcggaccacacgctgctgacaacgtcacggaattagccattttcctgaccataagttgcttcaggatgacttcattttgggaatactgcttcaagtatattgaaaatggtagcgttgaacagtgtaagaaatacatttcgagcggctcgtatgaaaccattacagacaaataccataatcagggaataaaattcccccaaagaactgaccgtgttcaaaatgacggaaaggtagtggatttggcaagaaattacaatgttggtggaaagattgtggattcaccaatgaacaagacaactttgatcctaggctttggctctattggtcaaaccatagggactcatttgcaaagaacctttaatatgaacatcgagtattataaaagatccggacccgtccagaaagatctacttctttacgatgccatgtaccactctgatctcgatgatccagacacttggaaaaatgctgacctgattgttttgtccctaccaggaacaccatccacaaatgatataatcaaccgtaaaactttggcgatgtgtaaagatggtgtcaggatagtcaacgtcggaaggggcacatgcatagatgaagattccctcttagacgctcttgaatctggtaaagtgacaagttgtgggctggacgtcttcaaaaatgaggaaaccggcgtcaagcaggaattactacgtagatgggatgtcacggcactaccacatatcggtagcacggtagccgacatgatcttgaaacaaacgcttattacgttggagaatgtccatgacatatttgtcaacgggggcgagggtaaatacgtgcttaactaa

SEQ ID NO: 2596 - DNA, 1206 bp, Saccharomyces pastorianus
atgagtcagttcggtacagatatcgtttccggttcagaaacaccaccttattcggggggcagctatgaagacgctaaagacgataatgccaacgctcactcaccatacgttggcgcagggaaatccggcgacggtagcggtgtaagtggggccagtgcacatggcggctgctcgagaggcagcagcggtgacgatgatgattatgatgactccggcgctaagacgaaaatggtggataacattaccattttgaaatatttgttggattcgctgtctggtagagacaagtttgctaaaattatcaaatatgccttggacatactgaaactgttcattgaaaagtccaagaaaaacctaactgttctagacccttccgtgttgacctactataccaaaatcctaaagaatttgactataaaggtcgctctaaggcatcccatcacagtgattaaggttatgcttttgtctgttctgaaaaattttgataagaaaattgacttcatcagccaacaattaagcacgtttagatacatcctaagattcggcgggaccccattcaggttggttagcttgttggggaagctcaacaggaccaggaaatgcaacttccaagtcgaccaaatcaagaaaatatggtttaatgaagcctcactcagagagtttttggatttgtactacggaatctttgatgaactagacctcctgtacaagttgaaaatttggtcgaacaaatctttctattcctttgtcagtagacaagagtcgctctcatggcagtacgatatcctgctcagcttgaaggataactggctcaacctgcaaaacttacaaagaaaacaaatggaattggaggtccaactaaaagtacaaaataacgccctactactatcgcccataattatgcacaaggcccgtgacgatgcctcccaatcgccaattagaaagcaactgttgagcgacctaaacgcagacaacaagccagaactgctaatacgcaagcaactgaaggccatcaaggacgaaaaaacccttttgtatctagacatcacaagactctctttcgactgtatggccaatacgtctgacattctgaatttgaaaactccaaaggggacgtacgcagttttgtctctagggtccggcttaactggactggtcaaactttggataaccgcaaagaggaagctttgttcctcaaacgattaa

SEQ ID NO: 2597 - DNA, 1002 bp, Saccharomyces pastorianus
atggaaactggtcctcactacaactattacaagaaccgcgaattgtcaatcatctcagccccattcagtggtggccaaggtaaattcggtgtcgagaagggtcctagatacatgctgaagcatggtttgcagtcacgcctggaagagttgggctggtccactgagttggaggccactcttgacgaggctgaatttgtcaccaaattgaaaaaggaaaaagaatcgtccactggaggctcttccgttttggacggaggagttaaggccaagagagccgacatggtcggtgaagccaccgagatggtttacaagtccgtgtccaaagtggttcaggccggcagattcccagtgaccttgggtggtgaccattccgtcgccatgggtactgtatcagccgtcttggacaagttccctgaagccggcgtgctatggatcgacgcacacgcggatattaacactatagagaccacagactcgggtaacttgcacggttgtcccgtttcattcttaatgggcttgaaccaagatatcccaggctgtcccgagtcattgaaatgggttcccggtaacttgagtccaaagaaaatagcattcatcgggttaagagacatcgatgcaggagaaaagaaaatcttgaaagacctgggcatttccgccttctccatgtaccacgtggacaagtacggtattaacgctgtcgttgagatggccatgaaagctatccacccggaaacaaacggcgaaggccccataatgtgctcttatgacgtcgatggtgtagacccactatacatccctgccacaggtactccagtgagaggtgggttgactttgagagaaggtcttttcgtggtggaaagattggcagaaaccggtaacttggttgctctagacgttgtcgaatgtaacccagatttggccatacacgatatccatgtctcaaacaccatctccgccggctgcgccattgcaagatgtgcattgggtgaaaccttattgtag

SEQ ID NO: 2598 - DNA, 3657 bp, Saccharomyces pastorianus
atgaaatttgggaaaacctttgctaatcatcgaattcctgagtggtcaaaccaatatgtgggctataagtcattgaagaaaatgacaaaggaaataacaagacttcaagaggacatatacaggaattataacaggaataactatgatgaaaacgggccaccaacgaaaatgagagactcggctaatagcgctcagaattatttagattccccaaaagtacagaagtcattgggatcttttttctttgcaatcgatagggatattgaaaaagttgacacattttataatttccgatatgctgaatatagaaagagatttgaaaggttacttttgtctaaccaatttaatgaaataaaactgacttcagaggacaatgtcaatgccgaagatggggtagcacaaaccttactcgcaaaggatacatgtgagattgatcaacttttaaaaggagccggccaagctaatcgcacaccttaccacaaagatgatttgatagagattcagtctattctcgctgacttgacgaagcaattcaggaatttgaaatggtatgcagaactgaataaaagggcttttatcaagattctaaagaaattagacaagaaagttggcaccaatcaacaaaggtcatctttggaaactagaatcttaccattacaatttgctgatgatgccctcataactaaagatctgagtttgctaaaaaaagtttgggaacaagtgacgttaaaaataaacgcatacgaaaagttaactaataattccacacttagtgcaaatgtaagtgaaaatgtggagtttttcaaggtaatttccatttttattgaagacgataatagcaaaggcctcattagagagttgacgaacctatactcggaactgtcttcgatccccacaagaataatgattaatgtattgaataaagctgcattatcaaaatcattggcatgtattgatgctattctaaatgttattccttcgttaaatgattcagaagacattaataaaagaaattttttccaccaccatataattgcattaggtaagttaattggaaggcaagacgtttcggataggaagagggtgtcacagccctctaaatacaccagtaataacggagagattataactgatttaaacactttgcataatattttagccgtatcagtagaatcagatgttacagaggaggaaaagaagtctgccctgacgatttcctatattttaaagaaattaccagttcatttaacaccatgcctttttcaacatgataattataaaagaactcccttgcattatgcttgtcagtacggcttatctgaagttacagcattgattattaagctgatgaaagaatggaacgtatggaaaggttttcctatcgatgatgtttccgcattcggagattctgaatctttgacacctttacatttgagtgtgttgggcgcccatccgagagccacgggagttttattacattcattggatccaaacgtaaagctaaaaagttcaagtttgctacacttagctacagaatggaataattacccccttttacatgtccttttatcctcaaaaaggtttgatataaattaccaagataacgaactgcatgagacgccattgtatcttgcttgcaggttaaatttctttgaagcagctgtttgtttattgtataatggagctgaccctgaaattaaagagaaaatatttggttggacagcagtgttcgttgcagcagctgaagggtttaagaagattattagtcttttagtggctaatcgtgtgaattttgatattgaagacgaaggcggatggacgccgatggaacatgctgtactacgtggtcacctagacgttgctgatatggttcaaatcaaagatgaattagtaacacatcctcaaccgcaattaaacagtggtagcgaagacaaggagacgtcaaatgcgattacttctgaaaaatcagacgacagaaatgaaaacgggaatggaataaataaaggacctttaggaccaatcaagtcgtatggacataggtttttgagcaaaaatgaatctctgatattactaacgttgggaagtaatgatacaagaaacagaggcccttcgattttattagatcaagaggcactagcaaaggtcataggtttggagacagaatgtgcgttatcactggtaatttcgtgtagtgattcgattgataagttctccacgattatagacctaccattagatgataatgtagatgcagtagactttaaagtaccattcaaagccgattattctcatacattatattttgatattgtccccacatatggaacacattcattggagtcaaaaaacaatatcgattgccaaaaggataataataatcacgtgatggggaggggtgtttccatgttgaacaagtcacatagctcagtgggagttaatagaagtgtgttaaatgggaatatgaccacccctatcattgccaaccatacattagaggtactcggaacgttgaaatttgaatatattattataacgccattcgaacatgcaaagcttcctttagaaagaacagaaacttattggaagtccttggtagcgacacgggttatagggcatagaggattgggtaaaaataatcctaacaaatcgttacaaattggggagaatacggtcgagtctttcatcatggcagcttctttaggtgcatcatatgtggaattcgatgttcaactgacgaaggacaacgtaccagtggtatatcatgatttcttagtagctgaaacgggtgttgacattcccatgcatgagttgacactagagcagtttttggatttaaacaatgcgaataaagagcatactcaacgagacgccggtcgttcaactcgccatgttaatggggtagaaatggcattacagaaaaacagaagacgttcagtggatgattctaacgtcaacacattgagaagggcttgggatttacataacgttgacccagaggagagatccaacaatgccaactggtccaacaaccgaatgaggctaaccaagacattcaagaagaacaatttcaaggggaacgccagaggccactcgatagcgtcatcttttgttaccttgaaggaactgttcaagaaaattccagccaacgtcggcttcaacatcgaatgcaaattccccatgcttgacgaagccgaagaagaggaattgggacaaatcgtgatggaaatgaaccactgggtagacaccgtgctgcaggtggtgtttgataacgcgaatggcagggacataatcttttcgtcattccacccagatatctgcgtcatgttgtcattaaagcaaccggtgattccaatattgttcttaaccgagggcggtagtgagaagatggcggatttgagagcgtcatcgttgcaaaacggaataaggtttgccaagaaatggaacttactggggattgtgtctgccgctgcgcccattttaaaggcgccgcggttggtgcaagtggtcaaatcgaatgggttggtatgcgttacctacggtgttgacaacaatgatcccgagaacgcaagtattcaaattgaagctggtgtggacgcggttatcgttgacagcgtgctagcaattaggagggggttgaccaagaaatacgaaaagtaa

SEQ ID NO: 2599 - DNA, 747 bp, Saccharomyces pastorianus
atgataagaagtcacggatggtcaatacttagcaagttttatccagctcggaatttcacaagatgttccaagatagatatgacttttgagggaaacactcaggacatttccgcttctgctgaagaaaggatgtccactgtctttggaggtcgtctgaaaggcgagccaccaagatctacaagcagggtgcttacgggtggaatgaagaaaatagctggtgtccctgtacctgcaaaaccgcaggaacctgataactgttgcatgtcagggtgtgttaattgtgtgtgggagatatatagtgaggatttaagggactggaaacacaggagaaaagaagctgcgcaaaagattcagggaacaaaggagaagtggcctaaagattggaatccacctttaggcttgttaagcataaaaaacgttccaacggaactacagaaaaagaaattggaacttgatgatatgaaagcagatcaacctcctgatttatcggctatcagagatatgttccccaagaggaaagggcctctgcctaagagtgtcttagcagccaagaaaaaaaacaatgctctaagatacaagcacgagcaagaggaacgggacaaccaacaaacagcccagctagaagcagacgaaggttgggaggatattcctgtttacgttaaagcatttgctgaatttgagtcaaagaagagattacaaaaaattcatcaacaggaagaacaaaaaaagaaaaccgctttggtttga

SEQ ID NO: 2600 - DNA, 1977 bp, Saccharomyces pastorianus
atgttggtccgttccaaggtttgtttatatacggtcattaggcaattgactagcttcccagaagctagtgtgattaaaaaaaagtttctgttcgaaagaaatacttcgactgtagatcagttgaaagaagtatccaatggccaaaaggtggttctcaatggatggatagagcaaaaacctaaaagaattggcaagaatttgatatttggacttttaagggactgtaacggcgatacaattcaactggtcgataacaagtcgttactgaaaggatttactttagaggatgtaattcaggccaagggtgtcctttctttaaaaagaaagctatcaaatgaggaagcgaataagtacgaagtacagctggaagacgtagtggtattaaacgcttcgaataagaaacctgctcaactgcaggatttcaaattgtctgctagttatccaccggaactccgctacctacaactgagaagtcccaagtttcagaactttttaaagaagaggtcctctatctcgaaggaagttagaaattctttcaataatttgaactttacggaaatagagaccccaactttattcaaagctaccccagagggcgcaagggagtttctagtaccaacaaggaccaagagatttgatgggaaaccctcgttttatgctctcgaccaaagtcctcaacaatacaagcaacttttgatcgccggcggcatcaataaatattatcaaatggctaggtgttttagagatgaagatttgagagctgataggcaacccgagtttacacaagttgacatggaaatggcattcgctaattctgaagatgttatggaagtcatcgagaaggtcgttcctgatgtgtggtgtaaattctctgacaagggaggattattaactttaaacaacaattgttcattagtgcctgcgaaaaaagacgacaacacagtatctatctttcgcatgtcttatgagcaagcgatgtctgaatacggtatcgataaaccggacttaagggcaccagacttgaaaattgttaacttgagtgagttcaacgcgtttagtcatgtgaacaaaatgttccccgtttttgaagtgatgatcttaagaaatgctttttcgaatatggaggaatacgacaatcattggtcattcctaaccaatgaaaacaattataactatagaattccaattgtgcttccaatcgaaaatgacgaacaagctcaatcaaactggttcgagaactttcttggaattgcgactttcgaaaatcctcatttaataaccaagtttttaaaattacgtaaaggtgacataatctgcggctgtaccagagaaccaaaccattctatctttgagaatcccactcctttgggaaggttgagacagttggtgttgcaaaacgaaaaaggaaaaaacctctattatagcaccgataaagatgttgcttcttggattgttgatttcccattgttttcgccggttaccatcgaagagaagcctgttaaaatggaaaagtttgcttatccggaatacgagaaggataagctatgctctacgcaccatcctttcactatggtaaagctcaatgattatgaaaaattagagaagaccccagagaagtgtttgggtcaacattatgattttgtagtaaatggcgtagaattgggcggtggctctacaagagttcatgatccgagattacaaaactatatttttgagagcgttctcaagattgacaatgcacaggaactatttggtcacctattggatgcttttgatatgggaacaccacctcatgctggtttcgcaattggctttgatagaatgtgcgccatgatctgtggtactgaaagtataagggatgtaattgcttttcccaaaagtatcgcaggagctgatttggtggttaagagtccaagtgtgatacccgaaagcgtcttaaaggcttacaatatcagatatggcaattcggaaaagtga

SEQ ID NO: 2601 - DNA, 1407 bp, Saccharomyces pastorianus
atgaactttgtaacccactatgcacgaatgagacctctgtttcagaggaggttaccactgccttgtgaatcaaggctacataagccgcaaacgtcgtggtcgtcgttcaatagacatatttctcaaaagccacgccccacgcagaaatcctcgagaaatttcgtacgtatactcgtgctgtctgttttggtaccttacaccggatacgccttttatgtttccttagctaccatgaaacaaatcgatctacggaatgaaatatgtcaagaattggaagaaaaggacaccgatgttacctacaagggatccttgatgaaatattctccattgcaagttttgggtcggtttgaaaacccgtttgaagaatacagaatacagaccgtttttgaattcttcgccaatagagtgttcgaactgtttgaaagaaatagaggaggtattccgcccgatgtgcaccaaatgaacaagctaatgcctgctcataagcctacctgggggcctgatttagtgggtattgaccccgcggtagaaatcgcacggcctttggaatgtactgtattggacgaacctcatacgctaaccaccatcgcagaaaagaacgacttgacggcccctgtctataacacatggttgggccaatcttgtaactatgcggtctataatggattgagaatactaacagatcctctgttcagtgactatcttattcacaagacactaggtcccaaaaggatctcgcaaatgccatctcaaattaccgaagtgccaaaaccagatatcatcctcgtctcccataatcatcctgatcatatagactcggaaagtttggaatattggagtggcgaagattctcctttatgggtggtacccaaagggatgaaatcatacatgacaagtaatggctgtgataatgtcctggagttatcatggtgggaaactttgcaaattaagaaaaataacgaaatataccacatatcagctacgccagctatgcattggtctggaagatcactcctagatacaaataaatcgctgtggtgctccttcttattgacccataatggcactcctatacttttccatgctggtgacactggttatgtgaaggacttgtatgtaagaatcaaagagcgttttggcaaaggttgtaaattagcactgcttccatgtgggcagtattgccctgaatggcatcaaaggcctcgacacattaaccctcaagaagttcttaagatcatgaaggatttagaagctcaaaacgtcctgggagtccattggggcacttttgtactaagtggagaatatttcttggaaccaaaggaaaaactagaaatgctggctgagtggagcggtattaaagaccactgttattgtcccgaattgggcaagacagaacgtttcgattag

SEQ ID NO: 2602 - DNA, 1398 bp, Saccharomyces pastorianus
atgtcatttcgcaaacgaggagaagtactgaatgacagaggcagcggtcttagaagcccattaatgagaggccctccgaggaccccatcaattccatcaagagggcccaatagaaccacccctggcagcgtgtccctacctgacactgcggagaggctgatgaagctgaatatcgccgacgagcccaagagggtggacgggttggacagcacccatgtaggtatcaggccttcccctgcgacgtctcaacctactacttctacaggaagtagtgatttggacaatatcctgggccatatggggttgcccttaggaaactcccttttagtagaggagcagactaccaccgagtttcattcaatccttagtaagctgtttgccgcacagggaattattcacaacagaattacagacggttctgctgataaaactagaaacggtgacacccatgtcattgttctatcattgaaccagatgtttgctaaggaattgcctggcatatacaagggatctcgtaaacaggtgaagaaaaacctgatatctgaagaggagtctaaagtcaccgttcaaaatttgaaccaaactcaaagatctacaccttcaagatacaaggatctgaaaattgcctggaagtataaattagcagatgagaagagaatgggctctccagacaaaagtgacacgcaacaaagttccgaatacaaggactataatcatcagttcgaaatcacatctcgtttgatgcctgcccccatagcatctgagttaacattcatcgccccaacccagcctatctccaccatcctgggtcaaatggagcaaatcattaaaaagaacgacaagaaactgataagaattgtcatcccctccttactacacccggcaatgtatccgcctaaaatgtttgcgtcatccgaaataattgggctactacatggtataagaagtctagtcaagaaatatgatgaaagggttgtactatttgcctcgatatccacagatatcattacgcctccattattggtaatactgagaaacatgtttgattctgttattgacttggagcccttcaatcaagaaatgtcgcaatttttagaacgtgtctacaagtcccaaccggggaagattcagcatggtcttgtccacattttgaaattgcccgtcttcacagatcgcggtgaaatgagggttctcaggtcggaatgggcatttagaaacggtagaaagaggttcgagatcgaagaatggggtatacctgtggacgacgctgaaggttcttcaaatccagaccaaccacagccccagtcacactcgcattcccatcctcattcagatagcccaaatgaagtctcacacaataagccggctaagaaaaccagaatctcgttggagtattga

SEQ ID NO: 2603 - DNA, 546 bp, Saccharomyces pastorianus
atgctaaaaagaagttcccggatgcttactgctgtgagcagaaacaaattatcatctaggtttgccgttacctactaccacaagactcccttaagccaacaacagagagctactacaacaccgcaaaataaaattaagagcttggaagatttggttaatttgaattctctggatggcgttgatcctgaactaatacgtagtctaattaatgagcgtacaacagaattgaatattaagaacgagttagatatgctcaagaaattttgtaaagaggagaaaacagtccacgaaagcccaatgaagaaattcgtcaggcctctttggatgttcatattgatgagctcctctgtatacttattacttcatctcacgtggtggaaactagaacgtgacgagaaagaaagtgaattaaaacaagaagtagaagccttggagtcccaactgaataaattaatcaaccaagataagaatcacaacagtagcaaagacgacgaaaatacggaattatccgatgccaagccttggtttaaaaaatggttttggtaa

SEQ ID NO: 2604 - DNA, 342 bp, Saccharomyces pastorianus
atgccacctatgccacaaagttatgcacaacagcaaccttcaaattgggacaagttcaaaatggggttgatgatgggtaccaccgtcggcgtttgtactgggattctatttggtggatttgccatcgctactcaaggtgcaggcccagatggtgttgttagaacgctaggtaaatacatcgctggctcagccggtacttttgggttatttatgtccatcgggtctattattagaagtgatggtgacttaagctcagcgcccaatcctaacttgaatctacagcaacaggcaagacttgaaatgtggaaaatacgtgccagattcggtatgcataaagattga

SEQ ID NO: 2605 - DNA, 207 bp, Saccharomyces pastorianus
atgaggccacgtaacctaggggttttggttttgggccttacttactccgtgcttctcaccagtttttctatattttattggttgcgcaataatgaatcgttactacactattggtgtgtattgtcgctatgccctgcaacgctctggctatgggcacttatatcctggtgcgatagtgaaatgtttgcaagcagtaaagacgaataa

SEQ ID NO: 2606 - DNA, 1944 bp, Saccharomyces pastorianus
atgcaactatcatggaaggatatccctactgtcgctccggcaaatgatttgctagacattgtcttgaacagaactcaaagaaagacgcctactgtgatcagacctggtttcaagatcacaagaattagggcattttacatgcgtaaggttaaatacacaggtgaaggttttgtggagaagtttgaagatattttgaaaggtttccccaacattaacgatgtccatcctttccatagggatttgatggataccttatacgaaaagaatcattacaagatctctttggctgctatttcgcgtgccaagtctcttgtggagcaagtcgctagagattacgttagattgctgaagttcggtcaatctttgtttcaatgtaagcaattgaagagagccgctttgggtagaatggccaccatcgtcaagaaactaaaggacccattggcttacttggagcaagtcagacaacatatcggtagattaccttccatcgacccaaacaccagaaccttgttgatctgtggttatccaaatgttggtaagtcctcatttttgagatgcatcaccaagtcggatgttgatgttcaaccatacgctttcacaaccaagagtttgtacgtcggtcatttcgactataaatacttgagatttcaagctatcgacacccccggtatcttggatagacctaccgaagaaatgaacaatattgaaatgcaatcgatctatgccattgctcatttgcgttcttgtgtcttatacttcatggatctttcagaacagtgtggcttcactatcgaagcacaagtcaagctattccactccatcaagcctctattcgctaacaagtccgtcatggtcgttatcaacaaaactgatatcatcagaccagaagatttggacgaagaacgtgcacaattattggaaaccgttaaggaggttccaggtgttgaaatcatgacttcttcatgtcaactagatgagaacgttatggaagttagaaacaaagcttgtgagaaattattggcttctagaatcgaaaacaaattgaaatctcaatcaagaatcaacaatgtcttgaataagattcacgttgctcaacctcaagcaagagatgatgtcaagagagcaccatttatcccagactctgttaagaacctgaagaaatatgaccctgaagatccaaatagaagaaagttggccagagatattgaagccgaaaacggtggtgctggtgtcttcaatgttaatttgaaggacaaatatctattggatgacgacgaatggaagaacgatatcatgcccgaaatcttggacggtaagaacgtttacgatttcttggatcctgaaatcgctgccaaattgcaagctttggaagaagaagaagaaaaactggaaaacgaagggttctacaactcggacgatgaagaagaaatctacgacggtttcgaagcatctgaagtggatgatatcaaggacaaagcttcatggatcagaaatagacaaaagacgatgattgccgaagcaagaaatagaaaatcattaaagaacaaggccattatgccacgttccaaactaaccaaatccttcgggaagatggaagaacacatgtccactttgggacatgacatgtcaaccttacaagataaacaaaagagtgctgctcgtaagaaccgttatgtcgaaagaggttccgatgttgtctttggtgaacaagatgctttgacagcttccaccgacaatggtatcaagttgagacaaaccgatagattgctggacggtgttgctgatggttccatgagatccaaggccgacagaatcgttaagatggagagaagagatagaaacagacacgccaaacaaggtgaatctgatagacacaatcctgtttccttatcgaagcatctgttcagtggtaagcgtggtgtcggtaagactgatttccgttga

SEQ ID NO: 2607 - DNA, 1452 bp, Saccharomyces pastorianus
atgctttctacagccaagcaatctttcaaaactttacagataagaactatgtctacgaatattaaacactacgattacttagtcattgggggtggttcaggaggtgttgcatccgcaagaagagctgcatcctacggtgcaaagactttgttaatcgaatctaaagcccttggtggtacttgtgtcaatgtcggttgtgttcctaaaaaggttatgtggtacgcttctgacctggcgaatagagtttctcacgcaaaggaatatgggttgtaccagaacattccattagataaagagcatttgactttcaattggccagagtttaagcaaaagagagatgcgtatgtccacagattgaatggtatatacgcaaaaaatctagacaaagaaaaggttgatgttgtatttggttgggccagattcgacaaagatggtaaagtcgaggtgcagaaaagggacaacactactgaagtttattccgctgatcatatcttagtcgccacaggtggtaaggctgttttcccagaaaacatcccgggttttgaactaggtaccgattctgatgggttcttcagattggaacaacaacctaagaaagttgttgtcgtcggtgccggttatattggtattgaactagcaggtgtgttccatgggttaggatccgaaacacatttggttattagaggtgaaactgtcttgagaaaatttgacgaatctattcagaacacaattactgaccattatgtaaatgaaggtatcaatgttcacaaattatcccaagttgtcaaggtggaaaagaatgaagaaaccaacaaactgaagatttatttgaacgactcaaagttcatcgaaaacgttgatgaattgatttggactattggacgtaaatcccatctgggtatgggatccgacaatgtaggtatcaagctgaattctcatgaccaaatcattgctgatgaataccaaaacaccaacattcctaacatttattctttaggtgatgttgtcggcaaggttgaattgacgccagttgctatcgcagcaggcagaacgctatctaatagattgttcgggccaaaaaaatttcataatgctaaattagattacgaaaacgtccctagcgtaatcttctcccatccggaagcaggttccattggtatttctgaaaatgaggccattgaaaagtacggtaaggaaaacataaaagtttacaattccaaattcactgctatgtactatgccatgttagaagaaaaatcaccaacaagatataagattgtctgtgctggaccagatgaaaaggtggtcggtttgcatattgttggtgattcctccgcagaaattttgcaaggatttggtgttgccataaagatgggtgctactaaagctgacttcgacaattgcattgccattcatccaaccagcgctgaagaattggttactatgagataa

SEQ ID NO: 2608 - DNA, 1968 bp, Saccharomyces pastorianus
atgggtagacgtaaaattgagatccaaaggatttctgatgatagaaacagggctgtcaccttcataaagcgtaaagccgggcttttcaaaaaagcccatgaactctccgttctttgccaagtagatatagccgttatcatactgggctccaacaatactttctatgaattttcctccgtggatacggatgatctgattgatcattatcagaatgacaaaaaccttcttcatgaagtaaagaatccctccgattatggagacttccagaaaaactcatccgtgaacataaaccaagagctcctgagatcgtcgattgctaataagccttctaaatcaaatatcactccgatgaagcaggtgtacaatgatgacgatgaagaggatgaagaggaagaagaggcacatattaatcttcagatggaacagcgcgcgaatacaagatcttccagtagacaagtatcgaatacacaattgaaactactgtcgcccaccgcgcttatttcgaaaatggacggcaatgacaatagtaaacgacatcctgaaaatgcattgccgcccttgcaacgcttaaagagattgaaaccggatcctctacaggctagtaatagatctccacaacagcaacaacaacaacaacaacaacaaaatatatcgagaccataccacaacaacatgtacaatctcaaccaaccttcatccagttcatcctctccttccacgatggatttccccaagttgccgagtttccagaactcttcgtctaacacccgccgcccaccactctccatctcaccaaataagtatagtaaaccctttacagcctcaaacaccagaactcctaaacaggatcacaagcttgacaatagtaataacgataatagcggttattcacagccctctcccaactccttagaagactcaattcaacacactgttaaagctagaaggaaaatgtccgtgagaccagtgcttcgtgtaagaatcccgaataacaacttcagctgtaattctgccattacaagcgaaccttcttccgcatcatccacatcgggaaacgggaacagtttagggtcttcgcaaattttaaaaggaaacaagacaaaccgatctggtaaggcttcaccactttcggcgtccgcctccggacccttgactcttcaaaaggctagcaatggcagagtcgtaataaaattgcccaacgcaaacatgtctttgattaataatactactaataataacagtaatcaccatcatccatattcattcggaaatggctcttcaccactcttctctgcaactcaaccatatatcgcgacccctttgcaaccatccaatattcctggtggaccttttcaacaaaacacgtcctctttcttggctcaaagacaagcccaacaatatcaacaactccctttcaaaaaacagaaccaacctgccccgctaactacaacgttggcgggacgtcctccaaccttttcgggacctgaaaacggcaatggccccccaactggttcattaccatcgaagttcgtacacgatttgatgagcaattctccaaacgtttcatcaatgccaatgttttcagactgggcaatggggcccaatagcgccaggcccataaattctgtacccggtaatacgaatagcgctggttcattccctcctatacctacaagcatggcccccaaccccaacaataacagcaataacagcaacaaccccaaccccaacaattactacaacaacaccgaagaggcccctgtaaatggacctgctgcgcctgatcattctagtgacggagacataagtaatcatcccaactcaaacacatatgatgttgctgcctcctcatacaatggaaataccgggctaactccatatatcaatgctactcaaacaccattaggtacgaaatttttcaacttttcaaccgacatttcgggagagaaaaattcgagcaagatttga

SEQ ID NO: 2609 - DNA, 954 bp, Saccharomyces pastorianus
atgttgttcagttggccttatccagaagccccaattgaaggttactggggcaaacctacctctttgatcgattggtgcgaggaaaactatgttgtgtctccctatattgcagaatggtcgaatactttcacgaacagtatatttttaatgaccgccttttattctacatacagtgcttggcgtaataaactggaaacgaggttcgtattgatagggctcgggttctcgctggttggtattggttcatggttgttccacatgactttacagtaccgttaccaattattagatgaattaccaatgctgtatgcaaccatcatcccatcgtggagcattttcgcagaaactcaagaactattgatcaaagatgaaaaaaagagaaaggaaagctcatttagaatccagatggtcatttctttcattatgtgtggtatagtcaccgttttgacttggctgtacgttgtcgttcaaaaacctgcgattttccaagttctttatggtatcttgaccgttttggtggtgattctttctggtttattgactttcaaccacgtccatgacccggtcgcaaaaaagaaccttttcatcactatggttatgggtatggtgccgtttgtcattgggttcattttctggcaattagatattcacttgtgttctttttggatttacgtaagaagaacgtatttggccttgccactgggtgtctttttggaactacatgcctggtggcatcttttgaccggtacaggtgtctacatctttgtcgtatatttgcaatatctaagaatattgactcatggaaatgcagacgagtttgtattcatttggagatggagatttttccctgagttggtaagaaagggtttgccaatcggcacctcttactcgaccgagtatatgggaccaattgtcaatgcacaatcagaaaacggaacaaaaaaaaataactaa

SEQ ID NO: 2610 - DNA, 1674 bp, Saccharomyces pastorianus
atggctcgtcatggtaaaggtccaaaaactaacaaaaaaaagctggctcctgaaaaggaaagatttatacaatgttgtgctgatatcacattagagttaacagactctttaacctcgggaacaaccagagagattaacttgaacgggttgattactaaatattcgaaaaagtacaaactgaagcaacaaccgaggctaaccgatattatcaactctatcccagatcaatacaagaaatatttactgcctaaattgaaggctaagccagttagaacagcatcaggtatcgctgttgtggctgttatgtgtaagccacatcgttgtcctcatatagcatacacaggtaatatctgtgtttactgtcctggtggtccagactcagattttgagtactctacacaatcttatacaggctatgaaccaacttcgatgcgtgccatcagggctcgttacgacccttacgaacaagcacgtggtagagtggaacagctaaaacagctggggcattctatcgataaggtcgaatacgttctcatgggtgggacattcatgtctctgccaaaagagtaccgtgaagattttatcgttaaattgcataatgcactctctggattcaatggtaatgatatcgatgaagctatcctatattcgcaacaaagtttgacaaagtgtgtgggtataaccattgaaaccagacctgattactgtactcaaacacatctggacgatatgttaaaatatggctgtactagactggagattggtgttcagtcattatacgaagatgttgctcgtgacactaatagagggcataccgttaaatccgtttgtgaaactttcgctgtttctaaagatgctggttacaaagttgtttctcacatgatgccagatctgccaaacgttgggatggaaagagatattgagcaatttaaggagtattttgagaatccagatttcaggaccgatgggttgaagatttatccaactttggttattagaggtacaggtttatacgaactttggaaaacaggtaggtacaagtcatacagcgccaacgctttggtagatttggttgctagaattctggcattagtgcccccatggacaagaatctatcgtgttcaaagagatatcccaatgcccttagtcacctctggtgttgataatggtaacttgagggaattagcgttggctagaatgaaagatttgggtaccacctgtagagacgttcgtactagagaagttggtatccaagaagtgcatcataaagttcagccagaccaagtagagctaatcagaagagactactacgcgaatggtggttgggaaacattcttatcatacgaagacccaaagaaggatatattgattggtttgctaagattaagaaaggcttcaaagaaatatacgtatagaaaggaatttacctcgcaaagaacttctatcgttagagaattgcatgtttatggttctgtggttccactacattcaagggatccgcgtaagttccagcatcaaggttttggaactttattgatggaggaagctgaaagaattgccaaagaagagcatggctcagagaagatttctgttatttctggtgttggtgttagaaattactacggtaagctaggttatgaattagacggtccgtatatgtctaagaagatttaa

SEQ ID NO: 2611 - DNA, 2535 bp, Saccharomyces pastorianus
atgaaaccttacttagttgaattaaagctaaaagacactgagaagctggactggaaaaacggtctatcctcatatctcaaaaaatcgtacggctcttcacaatggaaaacattctatgatgagaaggctacatccgatctcgaccacttaaggaataatgcgaatggagagctagcacctgattcattatctgaacaaaatttaaaatactactcttttttggaacagctttaccttcgtctgggtagtaaaggatcgaggttaaaattagattttacctggtatgatgcagaatactcgtcagcacaaaaggggctcaaatactcccaacatactttagcgtttgaaaaatcctgtactttgttcaacattgctgtaatatttacgcaaatagctagggaaaaaatcaatgatgattacaaaatctcgattgcaaatttgacgaaagcttattcctgttttgagttcttatcagagaactttttgaactcaccgtccgttgatctgcagtctgaaaacacgaggtttttggccaatctttgtcacgcagaagctcaagagctattccttctaaaactattgaatggtcaactatcacccaagcaatacacgttaatcagcaaacttgccaggaccacctgtaacctctatcaaaaatgtcacgattttactaaggacacaggaagcgaattgctcacatatggtgaacccaaatggaagaccattgttacttgtaaactacacttctacgaatcgctgagcgcatattaccatggtttgcacttagaagatgaaaactgtattggtgaagcaattgctttcctcaatatctctgtgcaagaactgatttcgtctcttccttttaaaacatggctgttggaattcttcgatttcgatggatttaaagagactttagaaaagaagctaaaggaactgatcaaggataacgattatatttaccatgaaagtgttccaccagtcgtacaaattgattctataaaatcactcgatgcgatcaaacctctatcatgggagaaagtattagagccatatatggaagaagttggggataagtgtgatgcgttgtacaaaggtattattcctttggatgtttacgagaaggaaagtatttactccgaagaaaaggccacactactaagaaaggaggttgaagaaactgaaacagcaaatttggagtactcttcctttattgaattcaccaacttgcctaggctcttgagcgatttacagaaacaattcaacgctggaaacattgtgtcaaatacggatactcaagtacaactaatgagagaccaaattcaggcatggtgcaaatttgttcagacaaacgaatttaggaatatagaagaacaaatgaacaagactgtcttgaagagaaagcaaatcttagatattctaccggctttacctactgaccagaaggaaaatgttacaaaattgaaatcttctctaatagcggcctcaaattcagatgaaaaattatttgcttgcgtgaagcctcatattgcggaattaaatttattgaatgacagcggaaaggtatggagaaagtttgaagagttcaataacaatagtcctgcacaacctagcctgttagatatcgatgataccaaaaatgataagattttggacttattgaaacaggtaaagggttatgcagaagacttgaggacattaaaggaggaacgttccagaaatttgtctgaacttagggacgaaattaacaatgatgatataacaaaactattgatacttaacaagggaaaatccgacgttgagctcaaaaaagtatttgaaacggaactggagaagtttgagcctttgagtacgagaatagaagcaacaatttataaacagtcttgtataatcgatgaaatcaaagctaagctagacgaaattttccatatctcaaactttaaggacaagtcctctaaagaagaagagttttcaaacgatcgtaaggttttctttgatagtttacaagacgcagttaaagcttttggtgtttttgcgtctgatttgccaaaaggagtggagttttatgattcgctactcaatatgagtagagacttggttgaaagagtaagaacagccaaacagcatgagacccttacgacaaactctcctgcacctcctctccctccgcttgacttcagggcacctgttgtaggagatcgtccattattgccccaaaatagcgcagcgtctcaatctcaacctcaacaaggcttcaatttagaagcacgttttcgaaatctcaaagtaagttccagcaatgacttactccaaggacctaatattccaccaagaacctatgaatcttcaccatatgcagcaattcctaacacgacaggtccaccaataccaccaaaacaatcgcaagaagatctctacgacgtaaggaggcgtagagcggttgaaaatgaagaacgtgagttgcaagaaaatccaacatctttttacaacaggccttctgtttttgacgaaaatatgtactctaaatacagcaactaa

SEQ ID NO: 2612 - DNA, 735 bp, Saccharomyces pastorianus
atgatcatgagtatgagtgtccgtggcctagcgttaaggtctgcttctaaatcactgttgaatcaaggcattcgccgttctccggtcgtggtcggagctcgttgtatgtcttccactccagagaaacagactgatccaaagacaaaggccaattctatcattaatgctattccaggtaacaatatcttaacgaaaactggggttttagggacttcggctgctgccgtcatttatgccatctccaatgaattgtatgttgtcaatgatgaaagtattcttttgctaactttcttgggtttcactggtttggttgcaaagtatctggccccagcatacaaggatttcgcagattcaagaatgaaaaaggtttccgaaatcttaaacgcttcaagaaacaagcatgttgaagccgttaaagacagaattggatctgtctctgaattacaaaatgttgctgaaacaacaaaagtgttgtttgatgtttccaaagaaactgtcgaactcgaaagtgaagctttcgaattgagacaaaaagtagagttggctcacgaagcaaaatccgtcttggattcatgggttagatacgaatcttccttacgccaattggaacaaagacagttgacagcttctgtcattgctaaagtcgagtccgaactaggaaatccaaaattccaagataaagttttgcaacaatccatcactgaaattgaacaactactttccaagttaaagtaa

SEQ ID NO: 2613 - DNA, 1872 bp, Saccharomyces pastorianus
atggctaggcagttattcacacctccaataacaaacccgaggtttgatccaaaccaatcgattagggaatcatacaagaacacaacaagtagcatgcaatttcaaccaatattgcacgaggatcaaagtggcgacgaaaaaagtagttgtgatatcgatgagaaatctgcatgtagtgaaacgccggatggtaccaaatcccctacattgaccaagcaagaaattgacgatgcattaaatggtgttagtaatttaccaccagagttgtcaagattaatcgatatttttattgatgacttaaagcagcccaaatacgtacggccattatcagtattgcagttgtcaagtcttttccaaagcttttacataaaatttgataaagcgtcatttcagcatgtcagttcaatgaccaataatggtaactatagtactaacgggagccctagttcatttttagctgctaaagaaacattgagcagtggacttagcggaatttttgcaaggagtaggagtagcagtggaaattcaatcatgagaccaaggaggtcttcatcactgttcagtaatgaatcaacttcaaactctaataatgtcactcaaatgttatcaccagaggagatcaaaaggcaattgagaatcaatgaattgaacaatatgaggattgaaaagtacatggagttttgtgaaagagacgtctttaagaaaattcttatagtaggtacatctgtatcctcaccaaataaattaaaaaatttcaaaacacaccaactacaaactttcaaagttggaaatctgtttagaaacagtactgaatttacagaatataataaactgttgaacgataaaatactctgtctatcaaaactctctataatgaataaaatcaatttgataaagtttttgagtcttaataaaggtatcgatccagaacccaaatttgaagagatcaaagaaatcttattcgaatttacataccattcgatttcgccatgtgaaaagatcaaggcattactgaaattgcatgagatcatgacatattctcaagaaatgtccaatgacgactatttatcgttattaatttactacatcatcactattgttccgcgtgatattttcttaaacgcagaattcatcaggttgtttagatataagaaaaaacttgtcgaaacggaatcatttgcattaacgaacttggaagctgcattagtattcgttgaaggcttaactaaaaatgatttttcaaatgaaatgcaagataagttaacagaaagcgaaggtaagatcttagaatgttcaataagtagtaaagtcgcattgccatcaaataacggcgtgatgcataaaaccaacggcaacggcagtggtaacatgggagaaattgtaacccctactattcaaagaccggatgtcactagatcaaattcatatgatgggttcagaactgtctttgactcatcattgaagaatattattggtaaaattagatcgtatacgccaccacaccccaacgccgttggcggcaatactgttcataacagtaacagcaatagcaacaacaacaacaacaacaacaacaatttgaacataccaagaagttcgtcccagttgtccatagaattaatcaatagagatacattagaaatttccagagacgtgtcaacgtcatcgtcatcgcaatcttcggcgtctttagaacgtgggaatcgtgaatttacaggtgatctgacagtaggtgctaatgctagtgttaacagtattgagaaaaaggaactccaaaagtcatggaagaaatacaaaggctacaaatttgaggatttaactatatgcgaactaaaagatttatttgaaatataccaaaagatggtgcaataa

SEQ ID NO: 2614 - DNA, 1008 bp, Saccharomyces pastorianus
atggaggtccagatagacgaactgatcaataatgatccagtttggtccagtcaaaacgaaactttgatttcgaaaccctataaccatattctgttgaaaccaggcaaaaacttcagactgaacctaatcttacagataaatagaattctgaacctgcctgaagaccaactggccatcatctcacaactaattgagttcctgcataactccagtcttttgatcgacgatatagaagataatgctcccttaagaagaggccaaaccacttcccatttgatctttggcatcccatccaccataaataccgcaaattacatgtatttcaaagccatgcaactcgtatcccaactaaccgcagagccgctactctaccataaactaatgaccatcttcaatgaagaactgattaatctgcatagaggccaaggtttggatatatactggagagatttcctgcctgagatcatacccacccaagaaatgtatttgaacatggtcatgaataaaacgggtggtcttttcagattgactttgaggctcatggaaaccctgtctccttcctcgcaccacggccattcgctggttccgttcataaatcttttaggtatgatttatcagattagagacgattatttaaacttgaaagacttcaagatgtccaatgaaaaaggcttcgccgaagacattactgaggggaagctatctttccccatcatccatgctctaaatttcaccaagaacgaacgtcagactgagcaacacgatgaaatcataagaattcttttattgaggacaaatgacacagatctaaaactaaaactgattgaaattctagaattccagactaattctttgaaccatacaaaagattttatcaatcggttagtgaacatgataaagaatgatgacgaaaataagtacttgcccgatttgacccagcattctgatacttctaccaatttacatgacgagctattatatataatagatcatttatccgaactgtga

SEQ ID NO: 2615 - DNA, 885 bp, Saccharomyces pastorianus
atgcaaatgcagctcaggaaaaggaaaagggtcgattatacgggcaaaaattcagcgtccgatccgtccgttactacaatcatacccactatagtcgtccctaagaaacgcaaactgaataagccggggatgattgcgccagtcattcaaagccccaccgcgacactgagcagctcgaatatcataataccgagacctttgcagcgccccagcttccgcaatagcgccgaatcacccacacacgatgatggccttgaagtaattcctgtgttggaaattcagaagagtctttcaagtttgattaaaagacaggaaagcttgttttataaggatttgaaaaggccgactttggtgggtttgaaaaatttcgaaatgctgaggctacctaacgacttgcaacttttacaaaacatcgtaaacctgctgcagtcgttcgaccaactaaagagcagcaacccgaagccaaggccggccggtgttactggttcgaaggcattctctcaagcgcactcgaataacctgaaaaaattaatcgtcgagaaaaaacatctctttagccaccccaatcgcagcagtaccacccaccaaaatgacgttctcattcacgaaatagcgaacctgcattccataaacctcatagacctgctgaacctggaaatgtacaacagcaccagccacgcgaataacaccggatcgcaaactacagcgaattccatgacggttaacagtattgtgaaaaaactcgacaagccaatcttaaaggagagaaacaacggtttgatgtggcctcacaaaagtagattcaaagcgaaaaaaaaccaatcttcgcaaaacgactcatcattgatcaataatactaacatcactttatacaacgatatatag

SEQ ID NO: 2616 - DNA, 597 bp, Saccharomyces pastorianus
atgcagcacgatattgtcggcaacgaccaggtggaggcctgcgagttgaagtgggacgagatcaagggcatcatcgagtccggagaactcgcccgcctgaaacgaagtagagagacgaccgagaagtaccacgaacacaagaggttgaccagcggcttggacatgaaccagtacatgttgcagcaattaggatggtcatcagacaagccgcagtcccaggacgccgttgagagggccttcagtgagcgggcgctgtatgttctacgcgccaacgacttcccgtacagcttcgagccgggcgtcgtgcaccttgttctgtggtccaagatcgccctgcccgtccattccccagacaaggccgtgcgcgatgcggcccaggcacgccttaccgcgttccttcaggcacaaccgctgctgcggtcgcttgtgagcgtgggtcacgtggcctggtttgtcaattacccggctctgcagagcgttgcccggatcttccacgcgcacgtgctactgttcttcccacggaactgctgctccgcggaacaggagcgcatcactgtcgacgagatcctgtcgcacggcttcgagtcgctggcctaa

SEQ ID NO: 2617 - DNA, 1449 bp, Saccharomyces pastorianus
atgacataccctgtcatttcactaaaaccaagctataattctgtaatacgtggttgccctggtttgcccgatacgctgccccgaatcgaatgccaattaagagtgcgatccaatgactcgttgcctttccatctggtaaatattgaaattatcctaaaaaccgttgaactctacttcaacaagaacctgtacggtagtaccaacaactctctcgctcccttcaatcattcttcagactcccctaacggcaattcggatacgaacaacaagaacactaccgttcattacaagaaaaacattgtgctttcccaccctacccatgatatcaccggcagtaacagcaacgatcttatcggcatagatataccgttgacaataggtctacccgacgatatcaaagagacaaactataacccgaaatttggtaagacgcagactttcctagactgtacagtctcctacgcaaatgccaccggggcaacctcgaacaagaagcggaacttcctctacccgataaacgtcgaaagatacacttatctcccttcaccgtcatacttcagaccgatcaacagaccaaatatcacttccccggaccaaaaatttctgatcaactactccattgaaaatccgtgcgtttccatggacaatgatacgttgaagctctccatatcgattaggctaaatccattcccaaatagtgccaccagttcttccccgaatgatttcgatatgtctacgccgacgcttttctccacaaagaagaagttcaagtccaaactcaaactgaaatcgattactacgcaggttcaagagtacttggaaattttgaaaaaccaatccgaattctcatccacccaaacttcaaacgttttgcaaacttccataagaacagttgaccaaacaatttccatgaattcgatgcatttccagttcaacataaaattgctcacaaaggacaaacttctacaaggtttcgaatctcctgactcaagttgtcctgaaacaaaactattaataaataaaatcgatgatatacctttacaataccataattcaataagcacaataggccagcatttcaatgtttctcactctctgtcaataaaattgaaatttaataaaagtttaaaaaactttgaaattaaccatcccataatcatatcattttggtcgataaatcaactaccactgattgaaaacttaatatcgcaggaaaggcaaaccgccaaatttgccaagaaattttataaaacctttggacagattaagaaaaagaacgtaagcaacagcaacactagtgcgaactgtttagaatacccctctttaccgccaataatttactatttcaacgacgccgaaacaaataataatttcaatatactgtatttacaaaaggacattagccgcatagacccctctaaactaaaaagagtccccgtcatacaataa

SEQ ID NO: 2618 - DNA, 729 bp, Saccharomyces pastorianus
atgtcaagaccagatataccgctaaatcagaatcccgatgttttccagttacttcgtgacgaggtacccctgtttgacaactctataacgtctaaagacaaagaaatcatcgaaacactatcagaaatatattctattataataactttagatcatgtagaaaaagcgtatttgaaggactctataaacgatactcaatacacaaatacggtcgataagctattaaagcagttcaagatctacttaaattcgcagaataaagacgaaatcaacaaacatttccgatccatcgaatcgttctcagacaaatacaacattacagcttcaaacgcaataacgagactggaaagaggtataccgataacagcagaacatgccatctctaccaccatcactgctgcgtctggcggtaatgagcaggcttcttctagcgataaaaaatttaatgctaaatacgtcgctgaagccaccggtaacttcatcaccgtaatggatgccttgaaactcaactataatgccaaggatcaattgcaccccttattagcagaactattaatcagcataaaccgtgtcaccagggatgattttgaaaacagatcgaaactgatcgattggattgtcaaaataaataagttatcaattggcgataccctgaacgaaactcagataagagaattattgtttgatttagatctagcttataaaagtttttatgctttattagattaa

SEQ ID NO: 2619 - DNA, 912 bp, Saccharomyces pastorianus
atgtccgctaacatcgaaccgcagacaacagctaaatgcatactgtacactacaaagggaaacattgccgttgaattgtgggctaaagaatgcccccagactagtaggcgatttttaacaaagctgtcagatggtacctacgtcaatgggaaatttagtgaattgaaaccaaatcaactcctaaggtttagtacagatggtactgctgagaagtgcgcagtcgcgcaagagagaaatccgcggataaggttcagtaaagatgggctatttggatgggataggcaaagagatacgtggtttataactgtacaggcagattccaaacatgtcttgaacgattgtaacctatttggaaaaatcgtcggtaaatctatctacgctttcagagagatattgagtggtgagatcgaaaccaccactcaaaacgatgaggttaagcaatttatgtaccctgcagttttaaaaagttctgaaattactataccgtattttaaggatatctctctttcaaaaagaggacatgataatgatgaggaaatacgacaacagccaaagaggaagcttcagagatcatcgaaagtaaagatggtatatgaagatgaagatgacgatgatgatgatgatgatgacattaaagatgacgtctttgagaataagccaaccaagagaatggttcttcctgcatggatcaaggataaccaaagcgttcaacctaagcccgacgtgtccgtagatcagccacaacacccctcatcagacactgaaccggtagagctgcatgatcaagccgacccaccaactaaagacccagaggaagtcgaagaaaaggtgatcgataaaagagagcaagaaacgttggatatgttagcgaaattccaacagcaaataaaaaacaaaaagattctcaaataa

SEQ ID NO: 2620 - DNA, 1443 bp, Saccharomyces pastorianus
atgctatctattctgagaaattcagtgagactaaacccaagggcccttggaattgttccagctgctgctaggacattggcatcggtacaggtgtccaagagactcttaaccaattcgtcgacgctgttacagaaggaaataaaggacgacaagcccaaatccattcttacgaatgacatgttgttcaaagccggtgttgatgttgatgagaatggtcaagccaaaaacgaagggaaaagagaagcagaggaagtggaaggggaaggccaaggccagaatgaaccttcttccaagggtgaaaaatccaagaggagaagacaaacttcaacggacataaagagagaaaagtatgctaactggttttatattttctcactgtctgcattagcaggtggtactatctatatggcaagaaattgggagcctcaagaagaggaagaactgaagaaagacatcggtaatggttacacgatgtcactaatgtacaaaagattcaaagctcgtttcaattccatgttcacttacttccaagaaccacctttccctgatctactacctccaccaccaccaccaccataccaaaggccactaaccttggtcattacattagaagactttctggtccactctgagtggtcacaaaagtatggttggagaactgcgaagagacccggcgccgactatttcttgggttacttgtcgcagtatttcgaaattgttttgttctcgtccaattatatgatgtactctgaaaaaattgctgaaaaattggaccccattcacgcatttgtttcctataacttattcaaagagcactgtgtttataaagatggtgtgcacatcaaggatctttcgaaattgaacagagacttgagcaaagtcatcatcatcgacaccgacccaaacagttacaaactgcaacctgaaaatgccatcccaatggaaccatggaacggtgaggcagacgacaaactggtcagattgattccatttttggaatatctagccacgcagcaaaccaaggatgttagaccgatcttggacagtttccaagacaagaagaaccttgctaccgaatttgaccaacgtgtaaaaaaattgaaggctaaatttcacggagacggctctaatggcaattgggccttaaaagcgcttggtgtcaccaacgacatgggcggcagccaaaagttcccgctcgacctaatccacgaagagggtcaaaaaaactatttaatgtttatgaagatgattgaagaggaaaaggaaaagatcagaatacaacaggaacagatgagcggccagacgttcaccttaaaggactacgtggaaggtaacctgccctcacccgaagagcaaatgaagatgcaaatggaaaagcaaaaggaggtagacgcgctgttcgaagaggaaaaaaagaagaagaagagtgccgaatccaaatga

SEQ ID NO: 2621 - DNA, 1503 bp, Saccharomyces pastorianus
atgactaaactacactttgacactgctgaagcagtcaagatcactctgccaaacggcttaacatacgagcaaccaactggtctgttcatcaacaacaagttcatgaaggcccaagacggtaagacataccctgtcgaagacccttccactgaaagcaccgtctgtgaagtgtcttctgccaccaccgaagacgttgagtacgctattgaatgtgccgaccgcgcatttcacgacaccgaatgggccacccaagacccaagagaaagaggtcgtttattgagcaagttggccgacgaattggaaagccaaatcgacttggtctcttccatcgaatccttggacaacggtaagactttggccttggcccgtggtgacgttaccatcgccatcaactgtttgagagatgccgccgcctacgctgacaagattaacggtagaaccatcaacactggtgacggttacatgaacttcaccactttggagccaattggtgtctgtggtcaaatcatcccatggaacttcccaatcatgatgttgacctggaagatcgcacctgctttggccatgggtaacgtttgtatcttaaagcctgctgccgttactcctttgaatgccctatactttgcctccttgtgtaagaaggtcggtatcccagctggtgtcgtcaacatcgtcccaggtcctggtagatctgtcggtgctgctttgacaaacgacccaagaatcagaaagttagccttcaccggttccactgaagttggtaagagtgttgctatcgactcttctgaatcaaacttgaagaagatcactctggaattgggtggtaaatccgctcatttagtcttcgatgacgctaatattaagaagactttgccaaacttggtaaacggtatcttcaagaacgccggtcaaatttgttcctccggttcaagaatctacgtacaagagggcatctacgatgaacttttggccgctttcaaagcttatttggaaaccgaaatcaaagtcggtaacccattcgacaaggctaacttccaaggtgctatcactaaccgtcaacaattcgacacaattatgaactacatcgacatcggtaagaaggaaggtgctaagatcttaactggtggtgaaaaggttggtaacaagggttacttcatcagaccaactgtcttctacgacgttgaagaagacatgagaatcgttaaagaggaaattttcggccctgtcgttaccgtggcaaagttcaagactttggaagaaggtgtggcaatggcaaacagctccgaattcggtctaggctccggtatcgaaactgaatctctaagcactggtttgaaggtggcaaagatgttaaaggctggtaccgtgtggatcaacacttacaacgatttcgactctagagttccattcggtggtgttaagcaatccggttacggtagagaaatgggtgaagaagtctaccatgcatacactgaagtcaaagctgtcagaattaagttgtaa

SEQ ID NO: 2622 - DNA, 975 bp, Saccharomyces pastorianus
atgagcggatacacggggaataataattacagcaggtattcatctactcctccaagacaaagagggaactaccacgctagacgaggaagaggcgcgacgggcggatcgtactatagaggcggcagcggcacgtcttatggtgctaggtatagcggcaactacgagcagcagccgcaggaggctgactcgaggcagcccggtgcgtactacagaggcggtagcgccgacaccaggcccttctacacgggtaacagcaggcaatatccagcgcagccccatagatacaacaacaatgcgaatgcgttccatgcgccatacggagccaacagccaggatgcggccggcagcgtcgcggatgacctgcgagacgaatacgagtacgaggaaaaacgacccaaatccagataccagaacacggaggcagattatccgcttcagcagcctgtaagcagcagcagcagccccaacaacgggcttccgccgccgccttcggtatcctccgtgggaaacagtaggccatatcacaacaacgcctatccatatgccaacaaccaccactatagcaactaccaccatcgcgagacaccgccacctcctcctcctccccctcctccgtcggacaaccaccacagcaggggttacccagcacatgcgaccgaaaatagaagcaatagctcctccggaggcatgataaccaagaagaaaagagtcgcggacatggaagactcgccgttcctgtacctgacggatttcgacaaaaacattaaaagagccgccaacgctgacaccgaatgcgacaaagtaagagacgtattcaacgaaagtgacgtaatcgataccactctacaagacctaaacctaaaagtcaactccaacgagctggagttgcggcttctaaacaaccagtgcaacaagcatgcattgaacatacagctgacccaggaaaaactggactcgttgctgttgatgcagtag

SEQ ID NO: 2623 - DNA, 597 bp, Saccharomyces pastorianus
atgtttcatctagtcaaaggactttacaataattggaataaaaaggaacaatattcaatactaatattaggtctagataatgcaggtaagacgacgttcctggagacattgaaaaaggaatattcattagcattcaaagaattggaaaaaatacagcctacagtgggacagaatgtggccacgatacccgttgatagcaaacaaatcttgaagttttgggatgtcggcggacaagaatcattaagatcaatgtggtccgaatactattccttatgtcatggtataattttcattgtggacagttcagatagagagcgactcgacgaatgttcaacgactctacagtcaattgtaatggacgaagaggttgaaggtgtgcccatattgatgctggctaacaaacaggatagacaagataggatggaagtacaagatatcaaacaaatattcaataaaattgcggagcatataagcgctagagatagtagggttttaccaatcagtgcgttgactggggaaggtgtcaaagatgctcttgaatggatgattgtcaggctggacagaaataaaaagtcaagaccgccaatttataaataa

SEQ ID NO: 2624 - DNA, 1188 bp, Saccharomyces pastorianus
  modified_base (73)..(98): a, c, g, t, unknown, or other
atgtcgttatctttagtattgtaccgtttaaggaaaaccccgtgtctgaacattttcctgcccgttttggccnnnnnnnnnnnnnnnnnnnnnnnnnnccaaagagatcaatccttactgggacttaatgggcaatcgatttctcaacacaaatgggcccatgagaaggaaaacacattctactttcctttcaccaagaaatataagatgccaaagtattcctataaaaagaaaagcggctggctgtttaatgaccacgtagaggatattattccagaaggtcatatcgcccactacgatttgaacaaattgcactccacaccggatgcagctgtcaataaggaacacattctgattttgaccccaatgcaaacatttcaccagcaatactgggataatttgctacagctaaattatcctcgggagttggttgaattggggttcattactccaagaacaaccactggtgacttagctttaaaaaaattagaaagtgctattaaaaaagttcaaactgacaagaaaaccaaaagattcagtaaaatcactattttacgacagaattctcaaagttttgataagttgatggaaaaggaaagacatgctttagaagttcaaaaggagagacgtgcagctatggctttagctcgtaacgaattattattttccactataggccctcacacttcgtgggttttatggctagatgccgatatcatagagacaccaaaatctttaattcaggatatgactcaacacaacaaagccgtcttggctgccaatatctaccaaagattctatgaccaagaaaagaaacaagcatcgattagaccatacgattttaacaactggcaagagagtgaaactggtttggaaatagcttcacaaatgggtgacgacgagattatcgtggaaggttatgcagaaattgccacttacagaccactaatggcccatttttttgacgccaacgggttacaaaatgaagaaatgacattggatggtgttggtggtggttgtactttagttaaagcagaagttcatagagacggtgctatgttccccaatttcccattttaccacttgattgaaacagaaggttttgccaagatggccaagagactaaactacgatgtattcggtttgccaaattatctagtgtatcacatagaggaagagaaccattaa

SEQ ID NO: 2625 - DNA, 1221 bp, Saccharomyces pastorianus
atgtcacaaggtactttatacgcaaatttcagaatcagaacctgggtcccaagaggccttgtcaaagctttgaagctggatgtcaatgttgttgcgccagaaaacgctgctgcgcagttcgccaaggacttcccattgaagaaggtcccggcctttgtgggcccaaatggcttcaagttgaccgaggccatggccatcaactactatctggtcaagctttcgtcagatgaaaagatgaaggcccaactgctgggtgctgaggacgatttgaacgcccaagcacaggtcattagatggcagtcgctggccaacaacgacttttgcatccagatggttaacgccgtcgcccctttaaagggggacgttccttacaacaagaaaaacgtcgacgccgccatggatgccattgccaagatagtcgacgtcttcgacgacaggttgcggaacaacacctatctggtcactgaaagcgtgtctttggccgacttggtcgctgcttccatcttcaccaggttcttcgaaaacctgttcggcttcgagtggagagcccaccatccggccatcgtcagatggttcaacaccattagggactcctcctttttgaaggacgagtacaagggcttttccttcaccgataaaccattgtcccccccacgtaagaataaggaagaggccaagccagtaccagcaccagcaccagcaccagcaccgagcgcaactccttcccggaggccaaaacaccctttggagctgttgggcaagcccaccttcgccttggatgaatggaagagaatgtactccaacgcagacaccagagcggtggctttgccctggttctggcagaactacaacccggaggagtactccctctggaaggttacctacaagtacaatgaagaactgaccttgaccttcatgtccaataacctaatcggtgggttcttgaacaggttggtcggctccaccaagtatttgttcggctgtctcatcatctacggcgaaaacaacgacaacggtatcactggtgtcttcatggtcaggggccaagaccacgttccagccttcgacgtcgctccagattgggagtcctacgatttcgccaagttggacccctccagcaaggacgaccaggaattcgtcaacaacatgtgggcctgggacaagccagtctctgtcaatggcgaaccaaaggaaattgttgacggtaaggttttcaaataa

SEQ ID NO: 2626 - DNA, 300 bp, Saccharomyces pastorianus
atgaccaaagaaactattaccatagactctatttcaaatgggatacttaataacctgttgactacgctcatccaggacatcgtggcgcaggaaaccactcaacaacagctgctgaagacgaggtatccagaccttcgcagctactaccacgacccaaacggatctcttgatattaacggactacgcaaacaacaagagtcgtcccaatatattcactgtgaaaattgtggaagagacgtatcggcaaatagactggcggctcatttgcaaagatgcctgagtagaggtgctagacgctag

SEQ ID NO: 2627 - DNA, 303 bp, Saccharomyces pastorianus
atgtctcaagatccagttatccttgcctcaaacgataataaagagtacgaaataccacgatctgcagccatggtttcaccaaccttaaaggctattattgagggctccttcaaggaaagtaaaggcaggatagaactcaaggagtttgattcgcacattctagaaaaagttgtggaatacctaaattacaattacaaatacagcggtgttgagggagatgatgatgaagatattccagaatttgaaataccgactgaaatgtcgttagagctgctacttgcggcagactatttaaatatttga

SEQ ID NO: 2628 - DNA, 2397 bp, Saccharomyces pastorianus
atgaagaaccccagctttgattgggaaaagttaaaagatgtattttatagaaatagggccattggcgagttgaaatggcctactcaatacgaagactttagatgtgcgttgtcatcaactgtcattgcagtagagatccaagactttatacagatatacgactattttggacagttactgggtaagattaacttactgaaaactcatgaagatataataaaattcgaatttgataagaacgaaaagctgatattggtaacgagtcgctccgtaaggattgtaaaaagttggacaccattgataatcgaaaatgtgccactggaagactcaaatgtagatacaatctgggattaccataatggaatcatgctgttaaaagaatctcgtgatatatacaagttaaacggcaatgaatgggaactgctttataagaataaagataaaaaatacaatttattaacaaaaaaccattggagttgcaatgacgaagttatcattctactagatgttgaccacgtgtaccaggtgagtacctcaaatggaacgttactgaagctgattgcagattcctcgtggcacaaggtaacgatatcgtctaaaggctttatttgtctttataacatgaagtacaataagttacaaatatttaaagatcccacaagaatattgatggaacacgacttggagtcttcaccagatgatgtatgttggtgtggcaatgatactattgcttgctccttcgaagatgaaatcaaattgtacggaccagatggtctgtatgtaacattttggtacccatataacgtaacaaacctaagggcagaaattgatggtttgaaagtcatcactactgaaaaaatttactttttatcaagagtgcaacaacaaacttcgaatatatttagaattggatcaaccgagccgggggctatgctgctggattcatttagtctactggagaaccacgcgcccaaagcgattgaaattttgaagaatttcgatctaaaaagaggcgtactggattgtattgctgctgcagtagatgaattcgagcccaaactgcagaagatactattgaattccgcatcctttgggaaagcttctttaaattacaagtcctttgatgcaggtatattcgtggacgcttgtaaggtaataagattactgaactgtttcagaagttttggtatttttttgactgcggaggagtacaagagtatttctctgaaaggtgtcgttgataggttactggtgtaccacaagtattacgaatgcatacggatatgcaaaatggcagataaaccaatcctcttaggatacgtatttaccgagtgggcaaaagacaaaatcaaagatagtcctgacatggaggatgatgaactattagagacagtcaaatcccggttggattctgtaggtgatatggatacaatacaaatgattgctatttcgaacgttgcatatttagaaggacggttcaagttatctcgagatttagctctattagaaaagaacgaagaagccaaaattaagcagcttttcaagcttgatgatgatagtctggcgctcaaagagtgtgttcaagtacagaattctagtttgacggtttcacttttggttgcactctcaaaaaaattaacaaactcccaattaacaaagcttttgatccttgatatgtccaacaatcctttgtatatctattacatgaggaacgacaaagcttatttgtacgatttttatcgccaaacagatcgatttatcgatttggctcacgtcctattacaacaaggaaaggaacaacaatctttacacagctttttaccacaaattagagacctttatagcaaaatacagaatagcgaaatggctagcgatgtcaccgggctgcttctaagacaagaaaaattgtgggtgtaccaggagtctctaggcaaaagattcggtatttcattcgctgatatgacattggatcaaacgctttcaaaattgatcgaaacaggacaagaaaagcaggtaaaggaaatagtgaaaaagtttaaagtaaatgaaaagaaattgtatcacctgaaatgtagaatgctggttgaaaccaagaaattcgaccaactgatgcaatttgctcagtcaaagaaatcaccaattggctacatgcccttttatagatacctgagaagcagagggcatacaaaagaagcggcttcttatgtcaatatgatacctggtctttcttaccaagaaaaaaagaaactgtacttggattgtgagagtttctacaatgtaattcaactggcgggcaaagagagagacataccgggcttaaaagaaatatacaacattataccggccaatgaaccagaactaaaggcgctcgccaatgaaacaatgggtaggatatag

SEQ ID NO: 2629 - DNA, 2058 bp, Saccharomyces pastorianus
atggagaagacagcagagaaggttgaaggacctaagagcaacaactcaaaacaaaatgataacggtttagacatgaagaccttattcgtcaggtctattcctcaagatgtcacagacgaacagctagcagattttttctctaacttcgctccaatcaagcatgcggttgttgtcaaggacgtcaacaaaagatctagaggtttcgggtttgttagttttgctgtggaagatgacacaaaggaagctttggctaaagctagaaagaccaaatttaatggacacgtcttaagagtagatgttgccaaaagaagagatcgttcaaagaagtcatctgaaggtgctgaaaagagcgcaccaaaatcctttgagaagactgaagttcagaaaaacgaaaatgaggatgatgttgacgatgaagactctatgctaaagggtaagcctaagttaatcattaggaatatgccatggagctgccgtgatcccaccaaattgaaaaagatttttggtagatacggtactgttgttgaagctactattccaagaaagcgtgatggtaaattatgtggatttgcgtttgttatcatgaagaaaatcagtaactgtagaattgccttagaaggcaccaaagatctaacaattgatggtagaaaagtggctgttgattttgctgttcaaaagaacagatgggaagattacaaaaaagctcaagcagaggccaatgtcgaaggcagtaatgaatctgaagacgaggaagaagatggcgaagacgaggaagacaaggatgaagatttagaggaggatatagaactaggcgatgattctaacgaaatagaagaaccaacgagaaaagtgcaaaacaaaagggaagacttttccgtttttgttcgtaacgtgccttatgatgctactgaagagtctttggccgcccatttcagtaaatttggtagcgtgaagtacgcattgcctgttatcgataagtctacaggactagctaaaggtacagcttttgtagctttcaaagatcagtacacatacaacgagtgtgtcaagaatgcaccagttgctggttctacttctttgttgataggtgatgatgttatgcctcaatatgtttatgagggtcgtgttttgtccattacaccaacattggtaagggaagacgctggtagaatggctgaaaggaacgcagctaagagaaaggaagtcctaggtaaagctccaggcgagaaggatagacgtaatttgtatttattgaacgaaggtagagttgtcgaaggctcaaagatgacagacttgttaactaacactgacatggaaatcagagaaaaatcttataaattaagagtggaacaactgaaaaagaacccatctctacatttatcaatgactagattagctatcagaaatcttcctagagcaatgaacgataaagctttaaaagcattggctcgtaaagctgtggtaggatttgccacagaagtaaagaataatgaaagacatcctttgagcaaggaagaaatcattagatcgacgaaagaaaagtataagttcatgggcccagacgagattgaatctcagaagaaaaaagataaaaagagtggtatcgtaaagcaagccaaggttatcatggaagttaaggggtctactgcaggaagaagtagaggttatggttttgtagaattcagagatcataagaacgctttaatgggtctaagatggttgaattgtcatgctgttactaccgaagaaattttggaagggttgagtgatgaagaaaagaaggaagtagaccccgacttagggaaagggagatgtttatgtgttgaatttgccattgaaaattctaacgttgttaaaagaagaagagaacagttgaaacaggcaaggaccaagagaacgagaccagatgatgaagctgccgaagatgccagcgagtccaacaagaaggcaaagaaggaagaagaaacaactccagccaatcccgacgacaaaaaaatggatgatgatataaaaaggataattgggtttaagcgtaaaagaaagcatggtaaaaagtaa

SEQ ID NO: 2630 - DNA, 1668 bp, Saccharomyces pastorianus
atgtataatggcaaggatagagcacaaaactcttaccagccaatgtatcaaaggtctatgcaggcccaaggacaacagcaatctcaaccgtttgtgggaaagaaaagtacaattggaagtgtgcatgggaaaccgccaatgttaatggccaataatgatgttttcactattgggccctataaggcaagaaaggacagaatgagaatatccgttttggaaaaatatgaagttataggctacatcgctgcaggcacatacggtaaagtttacaaagcgaaaagacaaatcaattcgagtacaaattcagccgatgggtttaatttaaatggtaccaacgcaaaactcccgcagtttgacagcgcacaagcaaaatcaacagcttcactggacatgcagacaaattcaaacgccttaagaggaaacttactaaaggatgagaggataactccaggaagaatacgaaccacgagagatgacggatcgtctcaatataattcgcaaaaacagattcctagtaaaaaacctttaaccgtattttatgctatcaagaagtttaaaacagagaaagacggtgtcgaacagctgcattacacaggtatctctcaaagtgcctgcagggaaatggcgttatgccgagaactgaataataggcgtttaaccacattggtggagatttttctggaaagaaaatgtgttcatatggtgtacgaatttgcggagcatgatctcctacagattattcatttccacactcatccagaaaaaagaatgataccgccaagaatggttcgatctattatgtggcagcttctggacggtgtatcgtaccttcatcaaaattgggttcttcatcgtgatttaaaacccgcaaatatcatggttacggtagatgggtgtgttaaaattggggatttgggtctggcaaggaaatttcataatatgttacaaactctttacacaggggataaggtggtcgtcacaatatggtatcgtgccccggagttactgttgggagctagacattatacccctgctgttgatctatggtctgtcggttgtatctttgcagaattgataggcttacaacccatattcaaaggcgaagaagctaaattagactctaaaaagactgttccgtttcaagtaaatcaattacaaaggatccttgaagttcttggtaccccggatcaaaaaaattggccttatttggaaaagtatccggagtacgatcaaattacaaagtatcctaagtatagagataatttggctacctggtatcattctgcaggaggaagggacaaacacgcattgagtcttctttaccacttgttaaattatgatccaatcaaaaggattgatgcctttaacgctttagaacatagttatttcacagaaagtgatatacccgtcagtgagaatgtatttgaaggacttacttacaagtacccagcaaggagaattcacacaaacgataacgacatcatgaatctcggatcaagaaccaaaaacaacacacaatcttcagggatcactgcaggcgccgcagcaaatgctttaggtggacttggtgttaatagaagaattttagcagctgcagcagctgcggccgctgcggtttcaggaaataatgcatctgatgagccatctcggaaaaaaaacagaaggtag

SEQ ID NO: 2631 - DNA, 636 bp, Saccharomyces pastorianus
atggcaacaatgacgctttttaggcccactcaattacacatgaactccaaaattaccttcaatagacctttcgaactcgtattcaagaaatctaatcaattgaacatgctagcaggcatgggatttggtagactaattcaaacaagatttataacggagaacgcggaatcggcaaaacgaggaaaggataaattacataagataatttctaaatcacgactactaacgaggttgaacaaaaatcccaaattctctcattactttgaccggattagcgaggccggtacggtcccaacaataacgtcatttttcatcttgcatgaattaacagcaatactaccgctttttctactatggtggctattctataatctcgatatctctgatgatctcaagctgcccaacttcttaaacgggttaatggagagttgtcatgctgctatggagagatttgttggtaagagatatcaggaatgtctcaacaaaaacaaactgatcttgtctggcacaatagcttacgttacagttaaattactttatccggtgcgcatttgttttagtatttggggagcaccgtattttggtaaatggttattgcttccttttcaaaagctaaagcaccttattaagaaatag

SEQ ID NO: 2632 - DNA, 948 bp, Saccharomyces pastorianus
atgttaagtgaagaatataagatagacagcgcaaataccatctcatcagcaaagttaacgatggaaaaccagaaaatggtgttgaagaagttcatgataacccaagtgacaaaggggattatgcaacggtatgcgagcctgttagtgactatacatagtgacaacactacgattattgggttaaattatttgaaaacagcggaatttttggaaacagttttgcatagggccaactcatctcatttacagttcaagaaagtctgttgcattgtcataaaatttttagattgctgttcaaaagaaacaaactacatgaggtttttgaaatttaatttgcaaaagctatttgtggctgcctttatattgagcgtgccaaatgttgtgggcgatgatcgtgacaggataactacaagggatgggatttaccaattttactccaagataacagggttgtcgctagaagaggtgacaaattgccgttctatcgtgagacctgtgcttattcggcggagtagacaacaacgcaaacaaatgttgactcgcagtgatcagaattcctatttttccagaggcacttttatgaaccctcattctccagcatctccacctcttcccacaaataggacagccaatgacgcgcttttacatacgcatgcatattcacttcaagaccattccgatggggaggattacgatcggcgggctgaatatagagaaggaaatagcttggaggcagacaccggaacgtatcggcatactacgttcatagcagctataccaaacgttttacattccagatcattgatggaatgcgatattgagcccacacagacaatagattctacagaatcttcaagccaaagcaatggatatgtctcgggaagggaattacaggagtttaacaatatgggcaagaaactggttcaggattcttttagagtagtctag

SEQ ID NO: 2633 - DNA, 528 bp, Saccharomyces pastorianus
atgaaaccggcgcaagacatgaatgcagatgaagtgttcctcaaacaagcggcagaagctatagtggtaacctcatcgagctccaccagttcggaccccataatacaggaactattacagaggatccgacggtccagcccactgaattctgtcatacaagagaatggttcgaacgttgaagcgacagaaaatatggccaagggactcataagagacccagaagcgcagacaaaaatttttggaagcactgaacaacacagagaaggcatgcaactttatagctgtgcgaaatgtcagctaaagttcagcagaagttcggacttgaggaggcatgagaaagtgcattcgctggtactgccgcatatctgctcaaattgtggcaaagggttcgccagaaaagatgctctaaaaaggcattccaatacattgacctgtcaaagaaacagaaagaaactgtgtgaaggctcagatgtcgatgtcgatgaactcattaaggatgcgataaagaacggtacaggcctactgtga

SEQ ID NO: 2634 - DNA, 474 bp, Saccharomyces pastorianus
atgccaattgatcaagaaaaactagccaagctacaaaagttgtccgctaacaataaagtcggtggtaccagaagaaagcttaacaagaagactaactcttctgctggtgccaacaaggacgacaccaagttgcaaagtcaactggccaagttgcacgccgtcactattgacaacgttgccgaagccaacttcttcaaggacgacggcaaggtcatgcacttcaacaaggtcggtgtccaagttgctgcacaacacaacacttccgtcttctacggtctaccacaagaaaagaacttgcaagacttgttcccaggcattatctcccaattgggccctgaagccatccaggccttgtcccaattggcagcccaaatggaaaagcacgaagccaatgctccagctgacgctgaaaagaaggacgaagctattcctgaattagtcgaaggccaaacttttgatgctgacgtcgaataa

SEQ ID NO: 2635 - DNA, 2562 bp, Saccharomyces pastorianus
atgtcgtcttcgtcacttcgagtgttaactgttgggaacaaccctaatattctgttctacacttcaaggttccagttggccaagaacatagaactttatcacgtcaacgattcgaagtcatgccagtttgaaattgaaaccgaatactacggtaaggaccaattcgaattggagaaccatttcacttctctggaacatttgaccgaggctctgaattccgggtcccgtggatccatttttgatatagtcatcatgagcgccccctctctgcaggagctgtcttcactgtcagccaagttggcctccataaccgattcgaactccaagattttcttggagagcagcgggttcattcaattggaaccgtttgttaagttgtcaatggattctccgcatttgaacgtcttcagtatcttgaccgatttggatgttcgtcaaatcggcccaaaccaggtcaaacaattccctagcaatacaaacgaaaataccatttatctgggtgaaagtaaatccaatagtgaaaaatactctgccaatgttgtaacattattgaccacgtttgagaaactattctcgaaattgttctccaacataaaaatcaacttgtgtgggttctcatccattgagtttttatcacaacaatggaaactggccatttccagaatttgttttgacccattactgatcatgtttgaacaagaaaatccaagtgatttagaccaacaaatcattgctaaacctttaatctctggattggttactgaaataattaccgtagcaaagacaatgggtgctaggctgaacagtaattatgataatgagaacaatcttttatccctatggaaaaattcctaccaatcgactaatgaaccgcctgcgctggtttaccatttcgtccatcaaacaacacccttgaatattgatatcctgttgttgcaaacaatcttattagctgacgattttggcattaagacgccatacttggagtttttgtattccgttatgtcccaattcgaaagattaaataatggtaaatctaaatggtttatgagatcaagtgaaaaaaataaaattttacaaaatttacgaaactcacaacaaaatgaattagcttctcaaaatcaaatcactaacctgcaaagccaaattagcaaactgagacaagagatgattatgcaagccaagcaacatgatatggaaaccaacggcctgaaagagaagcaccaagccactttgcaagctcaggctcaggctcaggctcaggctcaggctcaggctcaggctcaggctcaggctcaggctcaggctcaggctcaggctcaggctcaggctcgggaccaaacaccaactgagacagtaaccccaaccgaagctacaaatacatcggccgtcaacgaatatagggcgacaggcactccaaatttgagggatatcgaagatattgcgttatacagtgtcaactatggcgactctccactgaagtccccaccacctactgctggctcgcaacagcaaattagttcaccgcaatccacacactcccaaatatttgaagaggctaatggctccaatgacaaaatactacaagagcgtgaactggaacttcgtaaaaaagagttagagctacaagaacgtgaactggaattccagaaacgggcaattcagcaacaaagattcaacaacaatggtaacaataataatcctataccaaaaaagccttcttaccctcaactacaacagtccgccaacatccgttccagtagtagaggaatgcatggcgctaatgggcctatttcacaacctgcatcggctgggaactttgtggacccagtttctgcaggtatggccacatatgatccacaacaacaaccttcaaccttatctttacagcaacaacagcaacagcagccaccattacagacacaaccttaccacgcacactctatcaaaccaacaagtagaaagaatagaaacagtaatatgcccaatattggtaatccctcctgtatagtaaacatgggtaattttggcaggccaccaaaaaatccaagccaaactcgtttgagctcattgccaacccatagtattgtaaatcaaaacagattgaggtcgcaacagtctaaaagcaaactcaatatgcagcacgctgccaagccaaacaatgtgtttaatcaacctcctgtttctaatttaaacaaccacgtcactactcaaagacaattcagttcgagcaccatgatagaaaccacaaataacaacaatgaaatgaatatcagtagtagtaaccctgatatttctaccaattcagtagttcacaatgcaatgcaatttacaaatacgaacgataacgcaaataacactgtcgacataaacgatcctagcaatatagtggctcctcctacaggctctgtctcagcgccaagtactccaactttatcttcatcaagccaaatggctgatgtaagctctcctagtactgatgatgttaatggtggggaaaatgctggcggtaagaagaaaagatttggcttatttaaaaagaaaaataaatcaaagaaataa

SEQ ID NO: 2636 - DNA, 1704 bp, Saccharomyces pastorianus
atgaccggcaacgatagtgcaactacctcaaataacaaccagaatccacataaagatcacttcaagtttattgtaaatgacaaaaatattttggggcctcaatggttaagtctttaccagacagatggaaaagtagggttcgccaagtctcatttcgagcaggcgatgatgaacgttattagggaaccgaatatcaactccacagttattctgagagcggatattttgaaagagatcaaccatgcctcagaggctggatctgaactgaatccagacgagtctgaattgaaaaagtttgagatcgagaacagtaatgatggcgacgaggaagacgtgaagaagataaacattgaagatttgaacataagatcaaccgaaacctctgaggatttgaaactgtcgccagttcacgaatttgtgaggagaatcatcccaaggaacttttacaaagatgccatcataaaccaaacatgtttgatactaaacagtgaagaccctgaattccaagaatcctcgttgatcatatataccccacacatcgactccgaaacggattgtccgttttatattccaaaaacgcaaaccgtgggcattttattacatcaatcagtcctttctgtacattatatacccttccctgacgacaagacagcctttacagacgaatccgaacgtgttgtaagaaccgcttacagactactgcaaacagccaacaaacactctaaaggtgtcatgcaaggttatgagaagagagtcaatcatgaccaagtggtaaataaagtcaatttccaaaatacatatattgttttgaaaaagaaatactctaaatttttagtggaaaactgggcggaatcgaccgacccaaaaaagcatgtattcgaagatatagccattgccgcattcttgatagaattatggatcaaagtgtatggtccagatttccgttcgaaaatgcaattcagagatttgggttgtggtaacggtgctctttgttatattttgctaagtgaaaatataaaagggctgggtatagatgcgaggaagcgtaagtcttgggccatttatccatccgaagttcggtcatcgttaaaagaacaagttataataccctctattcttttgagacctcaccccgctttaaaaagacaagtgcctcatttggagcataatggaagatttttcccggtcaaagtcacacatgaggtgattgctccagcaactgttgtgtattcgagcaaagacttgctaaaatctccacaggtcaacactgctgagttcccatcagacacttttattatcggtaaccactctgacgaattgacttgctggattccattactgggccatccgtatatggtcataccttgttgttctcacaatttctcaggtcaaagggtgcgtttcaacgtaaggaagcgtgtgccaaaatcagatgaaatcaaaaaccaaaataatagtaagagtacctattctggattagtggatcacgttgaatatatctcctctcgcgtaggctggaaagtggagaaggagatgttgagaatacctagcacaagaaatgcagccattattggtttggagaatgaaactttgaagaacttcccaacgcaagcggtgtacgacatgatttgggaagatggaggagctgaaggctggattcaaaacacaatgactttattgaagaggaatccaaggaatcattga

SEQ ID NO: 2637 - DNA, 1197 bp, Saccharomyces pastorianus
atgtctcagaacgtttacattgtttcgactgccagaaccccaattggttcattccaaggctctctttcttccaagacagccgtagagttgggtgctgctgctttgaagggtgccttggctaaagttccagaattggatgcttccaaggactttgacgaaattatctttggtaatgtcctttccgccaatttgggtcaagccccagctagacaagtcgctttgaccgctgggttaggcaatcacattgttgctacgacagttaacaaagtgtgtgcttctgctatgaaggccatcattttgggtgctcaatccattaagtgtggtaatgctgacgtcgtcgtggccggtggctgtgaatctatgaccaacgctccatactacatgccagctgcccgtggtggtgctaagtttggccaaacggtccttattgacggtgtcgaaagagatgggctaaacgatgcatatgatggcttagccatgggtgttcacgcggaaaagtgtgctcgtgattgggatatcaccagagatcaacaagatagctttgccatcgaatcttaccaaaaatctcaacaatcccaaaaggaaggtaaatttgacaacgaaattgtaccagtaaccatcaagggattcagaggtaagccagatactcaagtgacaaacgacgaagaacctgctagattacacgttgaaaaattaaagtctgcaagaactgttttccaaagagaaaatggtaccgtcactgctgccaacgcttctccaatcaacgatggtgctgcagctatcattttagtctctgaaagagtcttgaaggaaaagaatttaaaacccttggctatcgtcaaaggttggggtgaagcagcccatttaccagcagatttcacatgggccccatctcttgcagttccaaaggctttgaaacatgctggtatcgaagatatcaactctgtagactactttgaattcaacgaggctttctccgtcgttggtttggttaacactaagattttaaagctagacccatctaaagttaatgtatacggtggtgcagtcgctttggggcatccattgggatgttcgggtgccagagtggtcgttactctactatctattctacaacaagagggaggtaagatcggtgttgctgccatttgtaatggtggtggtggtgcttcatctgtcgtcattgaaaagctatga

SEQ ID NO: 2638 - DNA, 1428 bp, Saccharomyces pastorianus
atgctgtcagattgcttgctgaataacttcaggataacgtcgcaaatagggtcgggtgcgtatgggctggtgttccatgtggtggacatactgaccagccgtgagtatgccgtgaagacagttttcaagtcttcctcgatggacgagttttacaacaagaacggcatgaacaacaactcgcaagtggccaggactactcttcttcagacacaactgtatcattttttcaagagtttccaaaagaaactgttcctaccttcagtcgacttagattcgatactgcagttgacagaaaacgaactaaacagattaccacactacagggagattgctttccaactgaaagttcagtctcatgcaaatatcgtgaagatccatcaagtgttagaatcatctatcgccactttcatcgtaatggattattacgatagagatcttttcacttcgatagtagatcataagcatttcatcaacgatggcgttttgatcaaaaaggtctttctacagctttgctccgcattagaccattgccaccgtctcagtatataccattgcgacatcaaaccagaaaacgtattactagatcgtaacgataatgcctacttatgtgattttggtctttccactaaatccaaatatctcgctccaaatgtgtgcgttggcagttcgtactacatggctccagaaagaatattatactgcctgaatactaccaccaacggcatccacgtcgacgaatgctgttcaagcctccccacggacacaggggacatttggtctctaggtatcattctgatcaacctaacctgtatcagaaacccatggttgaaggctcaccaaaaggatgatgacacatttcatcattttgcgaacaataaccacgtcttaaagaaaattcttcctatatcggacgatttgttttcagtgttggcaaaggttttgcaactgaacccatatacaagaatcgatatgaaaactttaatgtctgaagtttcttctttgacttcgttcaccaaagagggccctttgtctcaagttccagccctatcggacgaagtgtatatgacacatatcctaagaaatgaaaacctatattttgacgaaataccacatcttgccgttgaccaagaacaagaccaacaacagccgcaagaacaagaagaagccgagccggaaagtgatattccatcgacttataatagtgatggaagtatggagaaatatgactataccaataataataacaacaacacgtttttaagttcgtcgatggacagtacaccttaccaatccgatatcgatgatattggtgcttccaaagattgtaaattccaacaagatactctgagaaatagactattgtgcctacaaatgaatttttccactttaacggatggtccaaacgagaaatggttaccagaatattga

SEQ ID NO: 2639 - DNA, 735 bp, Saccharomyces pastorianus
atgtcattttcgtccatcttatcgcaagatatcacagacgatatctcggcaccagcaaatgctgctgtgctgggcccaagagaacagcttattttcaaggcttatcagaatgaaccttggttggctggtatagcccagaatcttatcttggacgaaaaactagtcgtagtagacagggaacttttgttccaggtgctgatggtggagaacatctccaagtcgaagctaacgcaaatcgatgatataaaaacgaagctggacccgaaaaaacagaaagtagacagactacgatcgggcgcgcaagtgcacgacgccaagaagtacgaggtcatcactcaagtggatatggaagatgaagggaacctgaatgacaacgacggcgccaactacaaaaataacaacaacaataacaacaatgacaacactgccaagagtaaatctgttttcaagttgacgctgcaaagtaagtcgggtgacatcttcttcgcagtcaactccactccaataccttggaactcctgtatgttgggctcgaaaatcgtcatattgccaggaactgttttcaatagaggcgttttcgtaatgaaggactctcaagtcatttttctcggcggcatcaacagagtttggaacgaaaacaaagatcaaaagttttgcgattatttagaatccaaactacaacgtgacaaacagtttgtgaacggcgcttccaagaaaaggaaagccaatgactaa

SEQ ID NO: 2640 - DNA, 540 bp, Saccharomyces pastorianus
atgttatataacaaagtacaaaaggcaagcagcatcagcggcccgaatcgccgtacgaagcaccatttcgaccggtttgtacagatggtcctattcattgcagcctctcctgaatattgcagtccggtgagtagtatgcaggatactgctgtcaggccaaacttaaaaaaggcagacgttcttgagcagaaaataaaaagcctaaatatcgctctgggcccaaaattggaaaaggcagatcctcttggtgagcctgtacataacccaagtatcctagcaccctcatccagaggaaaggacctttctgcagcacagagacccaaaagcagaaagaagcaaaccattcttcctaatggtcagccgaaagaatgtgccacgtgcggtgacacctggacttcccagtggagaagtggaccggatgggaacgttgaactatgtagccgatgtggcatagcttatagaaagaaaatcgaaaaaaagatacgacaacaacaatgcggtgagaaaggttcgaaaaaatttatatttagtagtcagtaa

SEQ ID NO: 2641 - DNA, 1878 bp, Saccharomyces pastorianus
atgtcaacagaagtggataagcacaggaactcactacagcatcataaaaaaaacacttactctcccttattctctccaatttctacgtataggtactatccagataatcggccatttagaacacaacttgaatccagaagatcggccagttccagcggtgtttataaaaaaagaaccaatacgacaagattcaatcacttgaacgatcgtcgcgttttatcaatggaagaagcaatcaaagatacgcctgagagaactaatcgtggtagctttctagaagggctgaaggattccctttggaattcagggagatatttgtggcacacatttatgaaaaatgaacttcataacgacgatagaaccgaactagatacaaatggtaacgctaatagtgaaagttccagaagcagtagtaggagtagtagtaatagtacgcgatacggtctaagagaggagtctcctctaaatattagaaagcataagtttgatacatcaatatgggtattaccaagtaaaaaaagaagaatcgaatctgaagataaaagcgtgccttcgaactcttcaggtagatcctcagcttatcaagaaggtagcagtgatagatataatactgtaacattctcgaaagatcctttcggttggaataaatggaagacaagtgctattagttctagcccagacactaatattttcgaccaaaatagccatagtagaccacaatatggaaccgcttttattaggagaaataaatttgtgaaacaaaacatcaacgatactaaacttgtctcaagagcacaatctgaagaggtgacgtatttacgacaaatatttaacggcgaatacacggttccaaaaatactaaaggatgaaagagcaagacagctgaaattgatggatatggataaggcgaaagatgccgggctgaaaaattctataatcgatttaactgaaaagattaaagcaattctaatcgaaaataacaacaagaataaattacaagcaaaagataaagatgatgatgatttggtgtttgttaaagagaaaaaagtttcctctttagaaaaaaagcataaagactacctgaatcaaaaaatcaaattcaataagtctatattaaaatttgaaaaagactttaagaagtataatgagattataaatgaaaggaaaaaaattcaagaagatctgaagaaaaagaaagagcaattagttaaaaaggagttagttcctcaactaagcgaaaaagatgatattcaaatcgaaaaggttttggtatcaagagagaatgctcagctaatgaaaagagataacttggagataagcgtgcgtgattttaagactttagcgcccaaaagatggttaaatgacacaattatagaatttttcatgaaatacatcgaaaaatcgaatgctgacacagtagcatttaattcatttttttatactaatttgtcagaaagaggataccaaggcgttcgcaggtggatgaaaaggaagaaaacgcaaattgacaaactagataaaatttttacaccaataaatttaaaccagtcacattgggcattagggataatcgatttgaaaaagaaaaccataggctacgtcgattcattatcaaatgggcccaatgcgatgagttttgctatcttaactgatttacaaaaatacgttatacaagaaagcaaacactcaatgggtgaagactttgatttaattcatctagattgtccacaacaaccaaatggttatgactgtggtatttatgtttgtatgaataccttatatgggagtgcggacgctccattagactttaattataatgacgctattaggatgagaaggtttatcgcacatttaattttaacagatgctttgaaatga

SEQ ID NO: 2642 - DNA, 2514 bp, Saccharomyces pastorianus
atgctgttcggtattaagctagctaacgacgtgtatcctccttggaaggattcctatatcgactatgaacgattgaagaagttgttaagggagagcgtcctacacgacgatcccactgccctcgataactggtctgaaagaaatgaatcggaatttgccgaggccctggacaaagaattagagaaagtttatactttccaaatatccaaatacaatgctgtcttgcagaaattggatggtttggaggaaaacaccaaatcatctgaaaaaatcctgaaactaaacactgagcagttcaaaaacactctagaagagtgtttagatgaggctcagaaattggatgattttgatagattgaatttcaccgggttcatcaagattgtgaagaaacacgacaagttgcatccaaactacccctctgtaaagtctcttttacaagttagattgaaagagctgcccttcaataactcagaagagtattctcccctgttgtataggatctcatatctatacgagtttttaagatcgaattatgaccatccaaatacgatgtccaagtcattggcaagcacttccaagttgtctcatttttccactcttgaaaatactaatttcaaaagctacaagttttgggttcacgaagataatctaatggaggtcaaggcaagaatcctaagacatttaccagctttggtgtatgcgtctattccaagcgaaaatgacgactttgtcgacaatttggaatcagacgtcctgatgcaacctgagagaaggttgaatatagacgtgaagaacaatactctttcgagtgatagtaatagcaatgaagacggtgacgaagggaaaatgaaaaactcgattttcccccagtcatatgatccaacaatcaccacactatattttgacaatgaattattcgatttgtataataatagactattgaagatcagtgctgcacctacattaagattgagatggattggtaaactacaggagaaacctgatatctttctggaaaagagaacttccacagaaaacactcaaactggtaattccagcttcgaggaaatcagattgcaaatgaaagccaaattcatcaataatttcattttcaagaacgatccaaactacaagaattatttgattaatcaattgagagagagaggtactcaaaaggaagatctagaaaaattatccaaagatttcgataacattcaaaaattcattgttaatgaaactttgcaaccggtgttaagagctacgtacaatagaaccgccttccaaattcccggggaccagagtattagaatcaccattgattctaacatcatgtatattagagaagattcctttgaaaaagataggcctattaggaatccaaccaattggcaccgtgaagatattgattctaatgtccccaacccgttgaaatttctgagaaaaggagaatattcgaaattcccatattccgttatggaaataaaaattataaacaacgataattctcaagttcagaactatgaatggatcgacgatttgactacttcacatttggttaacgaagtacccaaattctctttatatttgcaaggtgtggcttcattatttggcgaagacgataaatatatcaatatcttaccattttggttgcccgatttggagacagacattagaaaggatccacaacaggcttatgaagaagagaaaaaaactttacaaaaaaagaaaaacatccatgataaacttgacaacatgagaagattgacaaagatctcacactcggatggagggccctttgaacaaagacaaccagagcaaagagaacaggctgctcgccatctcgttgctgatctagaagatcatgaatcatctgatgaagaaggtgcaggattatccaagagatccaaaacgaaaaaggaaaagaaattcaaaacaaatgcagcctttttgaaaattcttgccggaaaaaacataacattaaattcaactgatccttactctgatgatacggatactgcttctgccttccaactacccgcgggagttaaaagaccagttcatttactaaaaaacgctggtcccgtcaaagtggaagcaaaggtttggcttgccaatgaacgtacattcaacagatggttaagcgttaccactttgttaagtgtgttgacattctccattcataactcagttcagaaatctgaattcccgcgattggctgatttgttagcttatatatatttctctttgacattattttgtggaatatgggcttataggacttatttgaaaagattggccctcattaaagatagaagtggtaagcatctggatgctcctgtggggcctattttggttgcagttgtactgatcgtcactctggttgttaactttagcgtagctttcaaggaagcggctagaaagcaaagagaattaataaatgtttcttcacaatctccattgcccagtgccctgaagccaattcaagatttcatttttcacttggtcggagaatag

SEQ ID NO: 2643 - DNA, 1107 bp, Saccharomyces pastorianus
atggatttcacctctgatacgacaaattcacgggacacttcgaattcccatttaagtctgaacgaggttgtgggcccaaaccaaacgggacaggacgcaaacaccgatgacgaagagaagctgcaactatcgctattagatgacgaggagttacgtgctttgagactgcaggaagagaaggaggctctgttgacgagaaggaatactcttttgcaagagattcaatcataccagaatgttttgatgaaggaaaatgctgcaaaacaaccaagcggtgacattttgcagaacgatatcacgcaagattttcttgacttgatctcgatctcgtcctctaagcccaatcatgtggtgaatgaccgcaaaagagtccaaaatatcaatggtctcaccggtttacaaaaggaactgataacgaaatatgacacactacctttattaaatatgaatctacggttaagttatttaagagaccagacgtacccgcatcttcaggtctctgtcaaatctagaaacagggtgaacaatggcgagattgagattttggtggtcaatttcaaattctgcaggaacacaatgaatccatttgaaatccaattcaaaatgttatataattttggagactccaccttgcagaaatgggaaatcttgcgcatctccacaaacatcaagttgaaaaccaagcaattgttggcaacacgcaacttccagaactgcctactaagtctttacgaattcgacaagatgaagtcgaagaaaatcgagattttccaaaacctaatcaatttgttgaagaagaaaaccaaatgttatctagcgaacaacggagactcgttaatcgtcgagagagtgttcagagaaggacggttaacaacgataaaactacagatcaatttcatcatcgtcatgcccagtgggaggggcaaacctccgaattgtttcctgcccatgagtaaaatatccataaacttgtggaaaggtggtgaaagattcaaccagttaaacttggatgagatctgtcacggattaatcatggagtacggggtgaaagccgggttgaaagaagtttgcaacgtttgcttattcccggacatttatgctcggtaa

SEQ ID NO: 2644 - DNA, 3915 bp, Saccharomyces pastorianus
  modified_base (73)..(122): a, c, g, t, unknown, or other
  modified_base (1668)..(1721): a, c, g, t, unknown, or other
atggacttctttaatttgaataacaatacccgcagcaatagtgacaacagcaacaaccataacaacaacaacnnnnnnnnnnnnnnnnnnnnnnnnnnnnnnnnnnnnnnnnnnnnnnnnnncacgaatgctggtgccaatggtgttgaggacttccaaaatttcttcgacccaaaaacttttgaccatagcctggattctaacaacaacaacgcagctgcagctagcacgaactttacctctccagtgccgatggtaaataacactgccttcactgcaaatgctggtaacttcgttcagaaccaatctccccagtttaactcgccatatgagtcgaacaactcaaacctcaatctgaacagcctgtctccgcaggccatcttggcaaggaattccatcatcgatgcttccaatctgcctctgcaaaatcaacagcaactatatagcggcaatagcaacgcccctgctgccaccacaaacgataatgtcataacgcctcattttattacgaatgttcaatccattagccacgcttcttctgtttctaccccgaatgcgaatgcaaatccaaacgcaaacacaaacgcgaacgtaaaccccacccccaacgctaatcaacaatttttaccttttaataatggagcttccaacaccaacgggatggcggctagccaacttatttccaaccacggtactccgaacttgacgggtagatcgtcttctacaggtaatgaccttgtcccaaacccaaacaacaacaatttgagtagcaacggtaataataacagcaacccagcagcaaccccacttccactccccaatggcaacaatagtacaggaaacaacaacaatgctgctgccgccaataacaacaacgccacttcaaacgccaatacggtattctacgaaagagccgccatgtttgcagctttacaacaaaagcaacagcaacgttctcaagctttgcaacaacaacaacaacaacaacaacaacaacaacaacaacaacaacaacagcagcagcagcaacaacaacaacaacaacagcaacagaatcaacagcaaagtgccaaatatttacaaaatcaacgtcaacaacaacaaagatcaatcttacagagtttgaaccccgtattacaagaaaaaatatccacagaattaaataataaacaatacgaactcttcatgaaatctttgattgaaaactgtaaaacaagaaacacgccgttacaatcgattccagaaatcgctaataggaaaattaatcttttctatctttatatgttaattcaaaaattcggtggtgctgaacaagtaacaagaaaccaacaatggtctctagtggctcaaagactacaaatatcggactaccaacaattagaatccatttattttggaatcttattaccttatgaaaaatacatgatttctcaggaaggtatcaaggaaactcaggcgaaaagaattttcttacaacagtttctgcaagaactactaaagaaagttcaacaacagcaacagcaggccacgttaatcaataataatactaatacctcatcggttcctactcccacagcctccacttccgtccccgctgctgccgttcctgttacgtcaaaaacaagcacaccttcagggacagttccggtttctacaaacatccaaaannnnnnnnnnnnnnnnnnnnnnnnnnnnnnnnnnnnnnnnnnnnnnnnnnnnnncacgcaacaacaatccaaaaaaccaagaaaaccaagagtgaagaaaaaaaccaaaaaggaactggaacaagaacgcaaagaaagggaggaatttcaaataaaacagcaaaaacttttggaaaatcaacaaaggcaacaaaaattgttattagaaacgaaattgcgccaacaatatgaacttgaactaaaaaaattgcctaaagtttacaagagatcaatgatcagaaactacaaaccttcagttaaccccatcaaacactataacggctatgacatcaactatatctccaaaataggtgaaaagatagactccaataaaccaatttttcttttcgcgccagaattgggtgccatcaatttacacgctttatcaatgtctttacagtcgaacaatctgggcgaaatcaatactgctttgaacacgttactagtaacaagtgctgactcgaacctaaaaatatctttgatcaaatatccggaattactagacgctttatcaatactcgggttgaatttgttatccaatctgtcacaagatataaacccgtatcatcaaaagaccccagattatcattatcaagatgttgaatctgatcagtactatgttacccaacatgacaaattagtcgacaaaatctttgaaaaggtcagcaacaatggtgtccctacgccaaacgatcctaatgatgaaaaagttttcactatactagtggactctttgacaggaaatcaattacccactccaacccctattgaagcagagtcagaattcgatccagatctccacgtaaacgaactatcgacctcttcttcggtcaaacagtggaatctcttacctgaaccaataagattcctacctaaccaattccctttgaaaatttatagaactccgtatttacactctctgaaaaaaatcaaagatgaaattgatgatccgttctcaaacataaacaaaagaggagcagaggatcccaagattctaatcaatgatcagttatccaccatttcgatgatcctaaggaatgtttcattctcggacaacaactccaggattatgtcaaggaatttttacttgaaaagatttatatcagatttactttggttgatcttcattcatcctgaaaattttgccagcaacaggaaattattgaacttcaagaaagatttgattattgttttgtcaaacatttcccatttgttggaagtcagttcatccatcgattgctttctgattcttattctagcaacaagttttggtcaaccaaaacagaatccaatgacctcgtcttcatcgtttggctcagactctttgactttcaacgagtttcaattgcagtggggtaaatatcaaactttcggtgtagatattttggctaagttgttctcactggagaaaccaaatttgaaccttttcaaatctattttattaaacaacagcgtcatcacatctaacagtaatcataattgcaacagtaataacaaccataaagacagaaaattattacaaagacttttagatctatacaataacaacaacagaaacaataacaacaagcataatctattaaatgatgtggtttcgtttttgttttcggttataccattccagcaattgttatcacaaccatcagacgcaaattcgttaatcgatcaactttccccagtaatttctcaaagtttaactaccgttttagtcatagtgcaaaaagtgttacttctatccaacgaagcattactgattactgaaagcaatacgagtcataatagtaagaacaaagattccagttttacctttcacaaaaatttaccgtttgtttggttaaattccgaagaaaacattgggtctgggttattgaaattaagtaaattaatattggatatcaacaatagtagtaatgccaccgtcaaaaattctttgctacagcaacaaacccaaccaaagatgcttctgccgtcgattaacatatcctgcattcagttaatcaaatttctgattgaaaaaagtattaattttgaaaactgcttaaacaacgaatcgaacatattaaagaaaatagcatcaattccaaatttgtttcccacggatttagaaattttccagttattcactaatccattaattgatattcaagtgataaatcagtatcagttactttacaacttgaaaaaccaaatcctaactaatttgaaatga

SEQ ID NO: 2645 - DNA, 1143 bp, Saccharomyces pastorianus
atgctgttagaaagactgcacaaaagactacacgctagctcttccaagcgatctcaagagaaaaaggacaaggtccacactccggatggagcgccacccgtgcagccagagcctcagcaccagaagcaggaacctcagccgctgctgaactacgattacgatgatatgatcgtgtttgacagaaacgtgtctactcccgtcttcacccctgtgatgactcctgtgaataataccggctcgaaccaaaccaaacactcggcaaactcttacttcccacctttcctcaataataataggactagacagaatagcgcctcttcgttggcgagttccgtgtccgatttccctcaaagttttaagcaacaagccgttttcaacagtaatccgcaagccacttccttcacacctcagtttgtcggtctgctaatagaagtctaccaagatacttgcagtgatcctacgacaactccctttgacactacgaaccccccctcggggattctcaatagggtggccagggcggccatacagcagtctgaggtccagcaattggacatcggctgtgacagaaatagctggcttttaacgttagtaagacatcgcttactacaagaagtgaggaaagacggttacctatctcgtaacacttccctcacttctctaccaccgccaccgccaccccagttcgctgaaatgctaagagtaccctccccattcgttaacgcagatatcgctgatcctattccgctatcgaacataaactctaatccaaacttaaattcaaactttacgaatacgttaaactggtattcctcgcaaaggtctaccaaccccccaatgaaaagcagaaatggctcatcccagtacatatcagaacttcagccgcaaccgttattggctcgcacaaactcaaacagcagcactaataacagcagcatattctctctacttacaccaactccgaccacagattctccattcaattttaacatagccttactatcaaggcaacgcagtaatattatatcgtctcccttggctagcacccgcctgccaaccacaaacgtgacagccgaagacccctctatattgcctaccgattcactaaggctgaaaagagatttactgcgtcttaagagataa

SEQ ID NO: 2646 - DNA, 366 bp, Saccharomyces pastorianus
atgacctgtggcttagtacgaataaggctagctagattcgggaggaagaatagtccggtctataatattgtagtggctaattcacgtaaggcaagagatgctaaaccgatcgaaatactgggaacttatgtacctatacctaatccattgaccaagagagaggtgaagaggggagttgtacccgtgaaagacatcaaactggattttgatagaacaaagtattggattggggtaggtgcgcaacctagtgagacagtaactaaactgttacagaaagccggtatattagatagcgcctggattaatggcaagaatagaaacatggataggaaagttatatttgaaagaatggaaactttagaatga

SEQ ID NO: 2647 - DNA, 3687 bp, Saccharomyces pastorianus
atggatcaagatcaagtagcttttctattagagctagaagataagctggccaagatccggtttcaagcaacctctaaattagaaaatcaaaaacacgttgctataatattaacggccgtcgaggaaaacattgtgggccaagctaccaatgatatttcgaaaaatatcgtgaactatatcatttccttcatgtccttattggaccaagcagtggacccatctactcatgaaattaaagaccttcagctggcttcttcttccacatatcttttggatctgatatttcgttactctccaaaaccgttgttaagatcaaaattctcggaaatacttaccaagattgcaccatgtattaccgctgaaaaagcaaacgctcctttaattagagccgctattggttgtttagaatctcttctaattgctcaagatgctcaagcctggaacaatacctatgacctaaatgtcactccaaagagaggtttgctaggtatacttgaactttctttggatttgagaccaaaagttagaaagagagcactagatgcggttcatgcagtattatctaatcctcctgcggctccaactgcagagcatgtcgcggctgttttcgtcgctgatttttgtgacaaacagttggcaggtgttctagacgacctgtccaatctatctaataaacaacaaaaggcccaaaatacaaaggaggatatcaacgctagtgtcatgcgttcattgagattagtcacttctgttatctctaccggacaatggccatcctctcaaatcgaacccctttgtgatgtattattaggtgtcactagaagctcagaacagtacctagtctctgcgtcatttgaatgttttgaaagtatgttcaaagctatggcagaaaccaccgtttcttcaggtttagctgaaaacaagtatctgagggttctagataccatcttttcactgaaaccttcaaatgtggacagtctactgaccaaggcttggatcgctgttgtagtcaaaggtatgtctacgtatgcggttcaccaaccattgaaagccttacgtaaggttcctaatgtgtttcgtgttatgtcctcttatttagcaagtgaatctacagaagtatatcaagctgccactcaatgccttatctcaatcctttctgactctattcaagaccatttgttattgtttacaccagatgtagatgacaaggttttcaaaaatgtcgatgacattatatgccaaatttcaaaagcctttatcgacttcttatccattaaatattctcattgttccagagaaattctgaaggtgttggcagcagcctttaacaaattcagatatagatctaaccctcactttttgaaatccttgaaaattgttgatacctggagagtaaacgaagaacagtttatggacttgagaaatgaagttgaattagtaattggtgcctccatttccgctatgggccctgaagttgtccttgcccaagcgccactcaatttggacaacccatccaatgaaagacctggtagagcttggatgttgccacttattagagactataccaaaaatgccaagctctctactttccaaaatgagctggcaccatacatcaaaagttttcaatctaaattcgataaagttccagaagaatctattcaactgaaagttttccaaaccattgtcgatcaaatctggtccacattaccacgtttctgtgagttaccaatggacttgagagaatctttcacagacgactttgcatcagaactatcttcgctgctgtacagtgaagttgaattaagaactacattatgtcatgctcttaaggttttggcagaaagtaatgtcttgtattcagaaggttccctttctgatgatgtcttattgatacaacacttccctatttctgaagcccaaaagaatatagaatacctgtcaaccaaatcgaccaaccttttagcggtcttgtttaatgtttatactcaaaccactccaaacgcaagaagttatattctggaaacgattgatcaatatttgaaaatcacttcaaaagaagatatagaaaagacctttaataatatttgtggtcttttgaagaattctatgaatgaagaaagtagtggaaatggcaacaaagaaaagaaaaaaccccaattgacagccacattattagatttgatcatttgtatgacaacatacttacctgcctcctcttattccgctttattttctatattcggtcttactgtgagttctcccgatgcattaattcaaaagagagcttatagaatcattaccaagctttctgagtttgaatctggttcagcagctgtcgcccagtttatttctgatattgaaaatgttatggtagacaacactactactgttcaaacatcagctaaagctgcgagattggcagcaatcaagactatagtggatttgttacctttggatcatctcggttttattgttagaactgtagccgaggtcatcttaagcactaaggatgtgaacgaaaaatccagagaaacggcttttgacactttgattaatatgggtaaaaaaatgaatgagccaaatggtatcatcaagctatcccaagtacctgggtatgaccctactactccggatcaaccatcatcagtgtcagagttttttaagattatttctgctggtcttattggggaatctcaacatatggttagtagctcgattactggttacgcatgtttagtttttgaattcaaaaatgaaatggattctggtattctaatggacatttacgataccattgaactgtacctgacttccaattccagagaaattgtaaagagtgccatagggttcacaaaggtctgtgtcttgggtcttccagaagaagtgatgaggccaaaggtgccagaattgctattaaagttgttgagatggtcccatgaacatacaggtcacttcaaagccaaggtcaagcatattattgaaagattgataagaagatttggatatgactatattgaagccagcttccctgaggaagacagaaaattattaacaaacataagaaagacgcgtaatagaaacaagcgtaaagatgaggaggttgctcccgcaactgaagctaacgctggaaacaccacaaagggttcaagatttatgtctgcttttgacgaagctgtttatggatctgacaatgaaaatggtaacgagtcagaccaagaggaaaatgcagctggaggcagaagaaagaatgggcaaaagcaatttattgtggaatctggtgaaaatccactggatttgttagattctcaaacattagcacatatttcatctactagaccaaagaaattcaataagaatcaaaataagggtaggtttgaagatgacaccttcaatttcgactcagaaggtaaattggtcgtcaagggacaagctaaaccctctacgaatgctgatgatccactaagcgcagtcacaagcggtatcaatgcgtacctagaagccgtaaagagcggtccagtaagaggtcaaagaaacaaattgaagtttaaaaagaatggaagagattctgacgagttcggtgatgacggtgaaaaggatgataaggtaatgagaagaaaagtagatccaagaaacaagatcggtaaaggtggtaaaagaggccctaaatttaaatccaggaagaagttatag

SEQ ID NO: 2648 - DNA, 570 bp, Saccharomyces pastorianus
atgtcttctttatcgctatataccgttcaggctgttttaatactggatcagcaaggagaaagaatttatgcaaaatattaccaacctcctcatagatccgatgacggacatcaattgctctttcattccgtaaagaaacaaaaggagtttgagaaacaattgcaccgcaaaacccacaagcaggattcggaaattttgatcttcgaagaccgtctggtcctttacaaagaatacattgacgtcacgatctatttagttgcttcgctagaagagaacgaaatagttctgcagcaagggttttcagcgatcaaaggatcactggatttgattctaaattcaggtctagacaaaaaaaatatccaagaaaactacgacatggttttactagccattgacgaaaccattgataacggcgttatcctggaaacagactcaaacaccattgcatccagagtttctaaaccacccacaaatgaacctcaaatgtcattggatttggataaggggttcttaggtgcctggggttttgcaaagagcaagtttcaagaaaggttgcaacaaggcttataa

SEQ ID NO: 2649 - DNA, 1821 bp, Saccharomyces pastorianus
atgaatacattaaggtgtttaacacatgcgctatcgaaaagtggaagagaagctccaatactatatcaaaaggtactattcccagatttgttcaaagagaataagcccgttgcagatgttaaaaaggggaaccaagggaaaatcattaattctaaattggtgtcacgagatgaaggagtaaggaagatgtcaaagtcaggtttcaagtttgaaagggagcaggccagggagtacctttcaaatctcccgactttgacactttccagaaaggaaattagggacgactacaacgagcaccgtgcaaaacaaatgtatgtaatctctaaacaaacaaaatcatcgaacaagcttcagaaacttctaacagcaaagtctcaagaatatacgagagaaatgctggcattactgataggctgtacatcaggcgaagtgagttcacggcctgaacgttttactcgtaagtttctcaaattcagcaaccaggaagtccctcctctccctgatttttcaaagaatcctcagttattcgaaaactatattggaatattaactcatacagagtttcattttcgctcatcttcaaaactaaatggcattgtacgaaaattattgcgacacttacttcatccaaccaaccatactactctaccattacgttccgtccaagtctacaacgacgtgatatacttttttagcgaacacttcgattttgcaacttgtagagagatattcgcacaaatgaaggccgaaggtgcaaaaccaaacacagtcactttcaatattttattgcgaagtataatcaaaaactcacatatcagaaaaaccaaacttcctgacgaggaagtgctgttttatctgaaaaatatgcgagaccacggagtctctgcagatattataacttggacgacgtgctataattttcttcgcgatgaaatttcgaggcaattgtatattgtacaaatgggtgagcatttaggaaatttcaacacaaattttgtctacactgtgctgagaaatggtgattataaagctgaagattgtttgaaagtcttagcaacaaattcgttacccatttcgcgaaatattttttacttatgcatagaaagattattgagcgaggaacagctcaaagccgcgtccaaattacttaattatggctatcaacacttagggaataattttagattaacttcggaagtagttaaccattttatgcgcatattcgccaataagggaaggagtgacttggcgtttctctgttataatacctgttgtaaggtttacaaaattaaaccagattccgaaacatttgaaatgctattcaaagctttagtgagaaacggtaacacgaaaaacttcggtacggttctccggtatattaaagggttaaaggctgctgaaggattcgttctgcgtacaacttattggagtctcaaagcggaatcaatgttcaagattagtagcgctacgcctccgtcagaaagttcactcgaaaaagcaagcaaattgctgggcagtctagtctcttccccaggtggattttcatggaaagtttggaaggaaagcgattctacacaaaagaaaatattccggtttttaggttgtatccccacaactctacgccccacaagtatggtgcagtgccacaataagcccttgggtttaccttcggagctctcccacagaaaaagagagtaccgaaaccgggtcaaagcgatagcaacaagggctgcatttgagaagagattggcatacgtcgaagacaatgaatcagccttcaagaatgagctacttgaaagaaggatattaaaagaggtttga

SEQ ID NO: 2650 - DNA, 1041 bp, Saccharomyces pastorianus
atgcacagaacctactctttaagaaaccaaagagccccaacggctgctgagctccaagctccacctccaccaccatcatccaccaagtccaaatttttcggtaaggcctcaattgcctctagtttcagaaaaaacgcggcaggtaattttggtccagagttggcaagaaagttgtctcaattggttaagactgaaaagggagtcttgagggctatggaagttgtctccagcgagcgtcgtgaagccgctaggcagttgtccctgtggggagctgacaacgatgacgatgtttccgatgtcaccgacaagctgggtgtcttaatatatgaattgggtgaattgcaagaccaatttattgataaatatgatcaatacagagtgactttgaaatcaatcagaaacattgaggcatctgtccaaccttcgagagatcgtaaggataagattaccgatgaaatagctcacttgaagtacaaggatcctcagtcaaccaaaattccagtcttggaacaggaattggttcgtgctgaagcagaatctttagtcgctgaagctcaattatctaacatcacacgtgaaaagttaaaggctgcttatagttatatgtttgactctttgagagaactgtctgaaaaatttgctttgattgctggatacgggaaggctctactagaattgctagacgattctccggtcacaccaggtgaagctagaccagcttatgacggctacgaagcatctcgtcaaatcatcatggatgctgaagcagctttagaatcttggaccctagaaatggctgcagttaagccaactctatcgttccatcaaactgttgatgatgtgtatgaggacgaggatgaagaagaagaagaagaagaagaagaagtagaagtagaagacggagaaagtcaaaatggtgctcttcctgggcaagtggttgaagaggaagaggtcgaatggaccactgaagtccctgccgaaaatggggccgaacatcaggggactcaaaacagtcatactaccggttctgaaaacatctaa

SEQ ID NO: 2651 - DNA, 1389 bp, Saccharomyces pastorianus
atggagagatatgacagacaggtgagactctgggggccatcgggccaagataatttgaatcaagcccgtgtgtgcgtgctaggacctgctacagctttgttgcaggaagtctccaagaatctggtgcttgctgggatatcctccctaacttggctcaaagaaaagagtgcggttcaacctggcccgctgtttttagccaagctcaaaagagaccttgagcctttgacttccaaacagctggaatatgaggaaaaggggctcgaagagatcttaatgcattctcactacgactggtcccaattttcggtgataatcttgacttgtattggtaagcaaacgactctggttgatttaaatgaagtcagagggagaatcgggacaaaatttcctcctgtactgaatacttctgtctctgggttttatgggtatatgaatctggttttgtcagaaccacattttgttttacagtcacatccagataataaaaaatatgatttacggttacagcaaccatggcctgaactaatcgactatgtaaatacatttgatctaagtaaaatggacgttgtagccttctctggtataccttacatcattctgcttattaagtgcatcgctatactccaaaaggacggtagtacgaaagagataacggctggtcgggtgagggaggctttagaccaagtttgcctctccgtaggagaaaacgctctttgcgaatcgaattatgtagaagctagacgctatgcatacttggcttgctctcaagacggttctccaaaggaacaagacgacttgctccgaactgtggaaacaccaaatgatgcgcatgattggcatgatgtctacaactatgaagttctaacattactattggtgttaaaaaacatgtccaggggaaacaagaactctacctttcaacctttaacgagcgctctcccggatatggaatctacgacgggaaactacatcaaactcaaaacactgtatgaagcaaaagctgagcttgacaagtcccgcatacagcaaagtttaatattcagtagaaaaacggtttcgaaagatgtcctaaacgcgttttgctctcactccggagagatcaagatagtactaccgccgaaaggagatctactaggtattttcaatacttcgcattctcttttaagcgcattattgacggtacagttccaaggggaatttatagctacggtagcgttagaggatgagttcaaaggtttacaacttgattgtaactacccagttatggcattttttggaggtgcagtagcccaagaagccattaagctcataacacaccactacgttcctactgatgatttatttctatataacggtataaacaattcttctgtgatgtataaaatataa

SEQ ID NO: 2652 - DNA, 702 bp, Saccharomyces pastorianus
atgaaacagtttgggttagcagcattcgatcaattaaaggatggaaagtacaataatgtgaataaaaccatactagaaaagcaatcaatcgaattaaaggatcagttaaacgtcttccaagaacggctcgtagaatttgcaaaaaaacataataatgagctccaagcgtctccagaatttcgctcaaagtttatgcatatgtgctcatcaattggaattgacccattatctttgtttgatcgagataaacatttatttacagttaatgacttctactatgaaatatgtctaaaagttatagaaatctgtcggcaaactaaagatatgaatggaggcgtcatttcctatgaagaactggaaaaagtgcattttcgaaagctgaaagtaggaattgatgatttggagaagtctatcgatatgctgaaaagcctagaatgttttgagatatttcaaattcgtgggaagaaatttttgcgtagcgttccaaatgagcttacgtctgatcaaactaagatcttggagatctgctctattttaggttactcgagtatttccttgttgagagcaaatttggaatgggaagccgtgaggagcaaatcagctctagatgagatggtcgccaacggtttactgtggatagattaccaaggtggtgtagaggcattatattgggacccctcctggattaccaagcaactgtga

SEQ ID NO: 2653 - DNA, 2127 bp, Saccharomyces pastorianus
atggcttcgaatacttcattattagggcgtagaagaacatcatactcctctaccaacccaacaagagtgaaaaagtcggttgaccagcatgaaattctttttgataatgttgactacaataatgataacctcgatgataacaataggatatttgaaaccgtaccttattacttaccatgcttctcgtggcttccggaatatactttcaataaactatggggagatatcattgcaggtatctccctagcatcatttcagatacccctggcactatcgtacacaacttcgatagcacatgtcccgccattatgtggactatattccctggctattagtccgtttgtgtatggtatcttgggttcagttccccaaatgatcgttggcccggaaagtgcaatttcactggttgtaggacaagcagttgaatctataacactacataaagacaatgtatcactaattgacatttcaatagttattacatttgttagtggtgcaattttactcttttctggcatttccagatttggttttttaggaaatgttcttagtaaagcattactacgaggtttcataagttccgtaggactggttatgataatcaactctttagtttctgagctgaagctagacaaatttttaatgagcttgccccaacattatcatacacctttcgagaaggtacttttccttattgattacgcaccagcgcaataccacaaaccaacggcgatattcagtggatgctgcttcattattctcattgtcatgcgtgtattaaagaggaaattgatgaaacgccacaagggtgcagtattctttccagatatactattggtggtaattgctacaattctcatttccatgaaatggaacttaaagcagaggtatggtatatctatcgtcggcgattttagtatggataacctggataaattaaaaaatcctttgactcactccagacgtaagctaatgccagaattatttagtgcatccttgattgtagcgatgttaggttttttcgaatctactactgcatccaaatctctaggaacaacctacaacctaaccgtttcctccaacagagaactggtcgctttagggtgtataaatatgttcatctcgttatttggtgctcttccctcatttggtggatatgggagatccaaaatcaacgctctgtcaggagcacaaagcgttatgtccggagtctttgtgggtattatcacccttgtcacaatgaacctattgcttcaattcgtgcattatatacccaactgcgttttatctgttattacaactgtgattgggataagtttattagaggaagtgcctggtgatataaaattccatttacattgcggtggctatagtgaattattcgttttcgctgttacgtttggcattacaatattttattcaatcgaatcgggaatatgtataggatgtgtttattctattttgaatataataaagcactcagcaaaatcaaggattcaaatcctggctaggatagcaggaacatcgaaatttacaaaccttgacgattatttaaggaccacaaaaaagaacccactagcagttgagggcagaatcgaagagattgaaggatgtatgattgttagaattccagagcctttgacttttaccaacagcgaagatttaaaacagagacttgataggatagagagatttggttcatctaaaatacaccctggaagaaagtcatttcgatcgaaggactccataaaatatgttatttttgacctaggcggaatgacttcaatagactcctcagccgcccaggtactagatgaaatcatttcctgttacaagaggcgtgacgttttcatttaccttgctaatgtatcgattaatgataagatacggacgcgattgttgaaagcaggcgtaacacctaatgtggaaagggtacaaacaaatgccaatgaaggcaatactagaagtgcatgcgatgatatgcaagagtcatattctccttacttcgacagtattgatgcggctctttatgaggttgaaaaaatgaaaattaaaggaaataatattcaaagcaatgattcggaaagttttatgtctaatactcttttcaactctagtctggtgtag

SEQ ID NO: 2654 - DNA, 2043 bp, Saccharomyces pastorianus
atggcacctctttcgttgaacttcaaagacgataagaaatacaagggcctcacaacggtgtggttactttctacattgggaaattcgattgtgagagaaaataacagcctttattcgaacaaaagcgactcctctgcaaacatttcagcgtctactgttaagaaaaaggatatcgttaatatttccataccaaagacatgtgacgagattcaaaattttgaaaacgatctatcactcagatatatttccaacctcctttatggggtaaccatatgctacaataaaaaaacagagtatgtgttaaatgatctgaatatcctgcttgtccaattacaaaaaaatgaggcgtatgcctttaaggcaaaaaataaatctaccaaaataagtgggctgaataacaacaacagcattattgggagcaaaattaataattatgcttgggaagaaggtctcttttttgatgatgaccccttgtatgatattgctaaagttcccgcattggattttcttgataccactctgcaaaacaacgtatcctttgttgaagaagctaaatcaataagaagacaagactatataaacgaattaagcaattctaacaggtttgaactccatacagacaaaactaattcagacgggcaacgcaaactagggtctaactataaaaattcattttctctggacgagattcctattgatgtggattttaacttagacttggaggatatagtgagtcaccaagggacacccctgggttctcattcaagttcccagaaggaaggtaatgattttaagtttaattatgaaggcgatgagttagtgctaaattttgacaatgatgagaacaatgccaacgaaaatgaacaaacgccaattgaaaacgaaagaaccgtagctaacctcaaaaactacgaactgggtttagaagagcacgaatctgaagatgaaaacaacaacgaaaaaaatgaagcggacattaaagtacaagtgaggcaacgtgccgggaacgtcagctcattgtccaaagtacaatttgatgcgaaaacaagttacccaaatgaaattctcaaatttaaccatgggaattacagtaacttaatggaacaaactaaaaaaagaaaatcgagcgcccaaattacatcccattctaatataactagtttgctaagatcaaacggagaatctgaccttacttcttcaaattggataaatctctttaacgatttttctggtttgaagattggagagttagattcgaatggtcaagattttgccacaatcgagaggggaagaaaaagagcacattctttagtgtcaactcaaagttcgaatagtgtcagaagcaatgagtatggcaggaaaagtttccggaataataagaacgacaattattcttctgatttggagaacgataacatgctattgaatctagaacaaatcaatgaagacctagaagatcgacactacattgaagaaaactctcaagaaaatgtcttagatttcaacttgaacttacctccttcgagttttggaagaagccatacaagaaactcaaccagatctagtggtttcaacgacgacatagttggtgcacttaggcgaagaattgtaccctctgagcagaattttgccgaggaaagcgattccagcgacaaatatcactccgacagcactcagcagaatccacatcacggggagagaaactttcaagatgtaatcctggattatcaaacaaggaagttttatgattatattaaagagaggtcggttgccatcggtagaacaacacattcgaatccaccattcgggaaaaaagtgctattggttgacatcattccaagccgcatgggcgaaacccaacccggatccaactctgataattcggaaaaaggcgtgagcaggcaaatagccgccagcgccttcctatccttgctgaacctagctacaaaaggaatggtcaaattggatgagtatccggcttcggaaacggctgttgaagagtttaagctgagaagagaagacgaaattatcatatatgcctga

SEQ ID NO: 2655 - DNA, 2163 bp, Saccharomyces pastorianus
  modified_base (1041)..(1041): a, c, g, t, unknown, or other
  modified_base (1100)..(1159): a, c, g, t, unknown, or other
atggtcttgataaatggcataaagtacgcctgcgagagatgcataagaggccacagagtaaccacatgcaaccacacagaccaaccgcttatgatgatcaagccaaaaggtagaccttctaccacttgcgatttctgcaaacaacttcgaaaaaacaagaatgcaaatcctgaaggcgtttgtacatgtggccgattggagaagaaaaaactagcacagaaggctaaagaagaagcaagagctaaatcaaaagaaaagcaaaggaaacagtgtacttgcggaaccgaagaaccttgcaaatatcatgcccaaaagagacattcaagaaaatctgcatcaaaccctcaaaagaaaggaaggtccatttcacgttcacagccaatgtttgaaagagtcttatcttctacttcacttgatagcaacatgctatccggccatggggggctatcagatacttccagcatattgacaagcacatttttagacagtgaaccaggtgtgggcaaaatctcaaaagactatcatcacgttccttccttggcttccatttcgtcattacaatcttctcaatccttagatcagaactttagtgtgccacaaagccctccgttatctacaatgtcattcaattttctaacgggaaatattaatgatactaaccaaaatcacaacagtcatcagcattccaatttaaccagcagctggcaagacagctcggcaagcttaccagcgaaaactgattcgcgtttcaatttgatggataaaaatcatataaatcactctgcgggccttgatctattgggccattctaagcgaatatctcccatatcgaacactcgtgtaggcgaggttagcgtcccactagaagaatatatcccctcagatattgatggggtcggaaaagttactgataagagctctttagtctatgattggccctttgatgaaagcatggagagaaattttagtacaactgcaactgcagcgacggattcaagtaagcttggcataaatgaccatactagtaacactaataatatnttttatgcgcataataacaacttgattgataacactatcaacaatggccactgtatcgnnnnnnnnnnnnnnnnnnnnnnnnnnnnnnnnnnnnnnnnnnnnnnnnnnnnnnnnnnnnacattgacggtaacaataagaataacaataacaacattcctaaacaagaacaccaaagtaatggtctattcgatatgtttaccgattcttcatcaatttcaacactatctcgagcaaatttactcttacaagaaaaaataggttcgcaggaaagcccaagaaaagtagaacactattcaaaggtcccacaattccgtcaccagttgaactccagaagtaaatcattcattcataaccctggaaacgagtatttgaaaaccggctttggcaatacaagtaacaatgacatcggaaaaggcgttgaagtactgtcactgacgccaagctttatggacatccctgagaaagaaagagatagggaaagggaaagggaaagatcaccatcatcaaattatatcactgatatgccttttactcgaaaacctaggtcgtccagcattgatgtaaaccataggtacccacccatgggacctgtgaacatagcaacctctcctagtgcgttaaacaatgcggtaacaagtaatcttgatgatcaactcagtctaacctctcttaattcgcagccatcatcaattgcaaatatgatgatagatccttcaaacctggtcgaacagagttccgttcattcaatccctcaaccaatcaactctccaagaatgtctaagaccggaaatcgtcaagaaaaaagtctccaaatgaaaaaggaagaaagaaacccactaaattgcatacaggatttttcgcaactggatagttcgtcaagcgacatgaatcaaatgttttctcctccactgaaaagtgtgaacagaccacccaccatgagggaaaattcgtccagtagtaattttatatttcaaggaaatagcattatttctacgccttctgcaaggaacgaccttccggatacttccccaatgagtagtattcaaacagcatctccaccaagccaattacttaccgatcaagggttcgcagacttggataactttatgtcttcgttatga

SEQ ID NO: 2656 - DNA, 807 bp, Saccharomyces pastorianus
atgaggccaaatatccgaacttgtgatgtaattaataacaaagacgaatcactacctgcacttttattaccggccctgagaagttatacatgtggcgacttactgcaaaaagaacagatttcgactaatgtcaactatcatctgttcgattcatcagaccgttcgttactcccaaaatattctaaattacatcaagatcaaagttcggttccagtttcatcggttcaatacttcgatcacagttttaataaatggcaaaaagaattagaaaataccaagcttcccaaacttggttgcttaacagattgcaaggaattgtacaaaactatttcttccggtgaaacgaccgattcagctgctatttcatcaataacgaccaacagtctgaaaaggaaacgccaaagagacggtccaagttgcgattcatgtaggacaaaaaaaataaaatgcaatgcaacgattattgtctttttacaagatagagaccttatatcatcaatctcttcaagcttgcattacactctttcccaagaggatattgaaaggtttcgagctaagtttttcaaaaaactgcctgagttgatgaattcttacgaggtcatcaaacatctggataagatagtgcttttcaagccctgtacttcttgcagcaggaaaagcaaaaaaaatgggaattgtacattttcaagaggatttacaaaatctgatatgaacgtcttttctaaaataaatagtaaacttgagagaaaaaatatctttgagatgactgtcgctgattatatagccgctggcttccaaaccctttag

SEQ ID NO: 2657 - DNA, 981 bp, Saccharomyces pastorianus
atgtcggaagtactggccgtcttcgaacagccgaactcaattaagaattttctcaagagagattcaaatattgcatttctagctggtggtgtggctggtgcagtttcccgaaccgttgtttcgccttttgaaagggtaaaaatattgttgcaagttcagagttccacgaattcgtataatcaaggtatattccagtccatacgacaagtttatcgtgaagagggaactaaaggtcttttcagaggaaacggtttgaattgtataagaatctttccttatagtgcagtccaatttgtagtttatgaggcctgtaaaaagaaactgtttcatgtagatggttatgatagacaagagcaactcacaaatactcagagactatttagtggtgcattatgtggtggttgtagtgtggtagccacttatccgttggacttgatcaaaacaagactaacaatccaaacagcaaatttaagtactctgaaccggtcgaaggcaaagaacatagcaaagcctccagggatttggaaattgctgaccgaagcttacaaatcagaaggcggcctcaagggattatataggggtgtctggccaacaagtcttggagttgttccatatgtggccttaaactttgcagtttatgaacagttaagagaaataggtatcgatagttcagactcacgacctccctggaagagtaacctttacaaactaacaatgggtgccgtaagtggcggtgttgcgcaaacaatgacttacccttttgatctgctgagaagacgattccaagttcttgcgatgggtggaaatgaactgggattcaaatattcgagtgtctgggatgcgctggtgacaattggtaaaacagaaggtttcagtggttactacaagggtcttactgcaaatcttttcaaagttgtcccttccactgctgtaagttggctagtttacgaaattgtgtgtgactcgatgagaaattggtaa

SEQ ID NO: 2658 - DNA, 954 bp, Saccharomyces pastorianus
atgaattttccgctttcaaggcaaagttcagagaggcggacaacatatacagacaaatcagaatctcctaatatcggaatgtgtacgatcaactataaatcaaaccttcccctacaagtgcaaacagctgaacatctaacccctagtataaataatcaattgtacggccaaaatagctacaaaaacgaacaagaatgttacaacaatgctaaaataaacttaccgccaatttcgtctcttttacccaattttgaaagtggctcacgtgccaatgccgacacaaggcttcagctccctccacagcaggtctaccatggtatgaatatagtgcctatggttaacgaggtttacacgccgatttctatgaatgtaacacctgatcaatatcctatatatttttctgataaccagcaacaaataccacataaccaaccggctcatataacgtcatcagctccccttatgatgccagtcatcgtaccaactctctataagccgatgggaccatatgaaaaagagccgataacagtagctcctgaaccaaattttgctgcattatcaatggttgctccctcgaataccactatagatgtatgtcagagtaggccaaaatcagtcccgcctaaatacagcataatcccaggtatacatgaggacggtaatagtagaactaaaagcgaacctggtacttcttcaaattcttcagcagcattctccgattggaaaaacggtagtcgaataacatctgcaaaactaagaaagcagtgccctgtatgtggcaaaatttgctcgaggccctcaacgttaaagacacattatttaatacatacaggggatacccctttcaagtgcacttgggaaggttgctcaaaatcttttaatgtaaagagtaatatgctgagacatttgaagagccacgaaaggaaaagaaacaaggtcttaaacacaacttaa

SEQ ID NO: 2659 - DNA, 744 bp, Saccharomyces pastorianus
atgtggaaaacaaaaacactagaacccatgctttgtagccctgtaaaacgctcttcgcctaacatagggacaccatatgcccaatcttcgaagagagtctcagatacggttaaagaggatgtgcatcttcctccctgttcgtcgatcatgcgcgcctcaattacttctgaagtaaatcaggctcaattaccacccccagcctaccattacgctccctctcctctgcaccagacagaagaccctgtttggagatcgggttccaactctgttattttctcgccagttgtagcatcaccacagccttttcccttaacgttcattgaacgccaatcttactgctctgtttattcaacagcaacacctccatatagtccccagtctgtgaccccacctatgcaacattttcaaaatgaaagtcgtaggtcggcgagcgatggacaatactctctcacgaatgttcatacggggcaaaatcctgggacactgctatcccaaacacaaacagacttggatcttatacaaaagcaattacgtgccgtggtgaagctacggaagcaatgtcctatctgtgggaaggtttgttcaaggccttcgacgttaagaacgcattatttaatacatacaggagatacacccttcaaatgcacttgggaacactgtaataaatctttcaatgttaaaagcaacatgttaaggcacttgaggacacaccaaaagaaaatagcaaagaaaaaacatcagtga

SEQ ID NO: 2660 - DNA, 738 bp, Saccharomyces pastorianus
atggcttccagaactcaatttgaaaattctaatgaaatcggtgtcttctccaagttgactaacacctactgtctagtagctgtcggtggttccgaaaacttctactctgcatttgaagctgaattgggagacgctattcctatcgttcacaccaccattgctggtacccgtatcatcggtagaatgaccgctggtaaccgtagaggtttgctggttcccacacaaaccacagatcaagaattacaacatctaagaaactgtttgccagattcagttaagatccaaagagtagaggaaagactatctgccttgggtaacgtcatctgttgcaatgactacgttgccttagtacatccagacatcgacagggaaactgaagaattgataagtgatgtgttaggtgtggaagtcttccgtcaaaccatatcaggtaacattctagtcgggtcatattgttctttgagtaatcaaggtgggttagtgcatccacaaacaagcgttcaagatcaagaagaattgtcctctttactacaagtgcctttggtggctggtaccgttaaccgcggtagtgctgttgtcggtgccggtatggtcgtcaacgactatttggccgtcacaggtctagataccacagccccagaattgagtgttattgaaagtatcttccgtttgcaagatgctcaaccagaatccatttcaggtaatctacgtgatactttgattgaaacctactcatag

SEQ ID NO: 2661 - DNA, 432 bp, Saccharomyces pastorianus
atgagcagggccacgtgtttgtttgacggctgtcacagcgccgtcatcgtgattgatgaagacaatatagtgagtttgccggaaggggcgtatagtcaatttaagctgctggaaaacagagcggaggggtacgcgcccactagcgacaacaattttttggttgtccctgatgtatgggacttcgacaacattggcgtatctagagacattccctcttctctcttgggggacctaggcgataaggacgagttcacctttgattacggagattccagctggaaaatcaagaagtgtctaaagtacttaatatgcgcagactgtgacaagggccctattggtcttatatgccaggtacaagaccaagacaacgacgaagaaaaagtgatccatttactgagcctgcgcagtcttcaggtcgtgggaaaaaactag

SEQ ID NO: 2662 - DNA, 2802 bp, Saccharomyces pastorianus
atgtctcaacaacctagctcgccagtgagagaggacagcaattccagttccccaatgattccaaatcccgattcagttccaccacagccttcttctccagccttgttttatagctcatcatcatcacaagctgatacctatggtcgcaacaatagccagaaccaaagtcaaggggacggtaacattagagctgctataggttcttcaccactaaactttccatcctcttcccaacgacaaacctccgatatcttcctatctcagagaagacagggcagaaatggctcttccgctaatacccctggaagatcgagataccatactgatttgagaagtgatagagcgttacctagttcttcatcttcgttaggcggtaatagtcagaaccgtctacacatgagaagaaatgatattcatacatccgatctatcttctccacggagaattgttgattttgacgctagatctggtgccaataccatggcgtcttcgtcttcttctgctcctccatccgaaatcagtgaaccgttgagaataatttggggtactaacgtcagcattcaggagtgtacaaccaactttcgtaattttttgatgtcttttaaatataagtttcgtaaagttttggatgaaagggaagatttcattaacagcaccaccgacgaggatctatactacatcaaacaacttaatgaaatgagagaacttggtacctctaatttaaacttagatgcaagaaacctactcgcttacaagcaaacagaagagctatatcatcagttactaaattaccctcaagaagttatttccattatggatcaaacaataaaggattgcatggtttctttggtagtggacaaccatttagactatgatctggatgaaattgaaactaaattttataaagtgagaccttataatgtaggttcctgtaaaggtatgcgagaacttaatccaaacgatatagataaactaataaatttgaaaggccttgttctaagatcaactccagtcatccccgatatgaaagtagcgtttttcaaatgtaatgtttgcgaccacacaatggctgtggaaattgacagaggtgttatccaagaacctgctagatgtgaacgtattgattgtaacgagcctaattccatgtcattgatacataacaggtgttcatttgcagataaacaagtcatcaaactacaggaaacaccagattttgtcccagatgggcagacacctcactctatttcattatgtgtgtacgatgagttagtcgattcttgtagagcgggtgatcgtatcgaggtaaccggtacatttagatctattcctattagagccaattctagacaacgtgtcttaaaatcgttgtacaaaacatatgtcgatgtggttcacgtaaaaaaagtctcagataaaaggttagacgtcgacacttccaccattgagcaagaactaatgcaaaacaagctagatcataatgaagttgaagaagtaaggcgaattactgaccacgacctggcgaaaattcgtgaagtcgcatctagagaaaacttgtatagtttgttggcacgctctattgctccgagtatttatgaactagaagatgtcaagaaaggtattcttcttcaactttttggcggtacgaataagacttttacgaagggtggtcgttatagaggtgatataaatattttgctttgcggggatccatctacttccaaatcacaaattttgcaatatgttcacaaaattactcctcgtggtgtgtatacttcggggaaagggtcatctgctgttggtttaactgcttacataacaagggatgttgatacgaaacagcttgttttagaaagtggtgcgttagtactgtctgatggtggtgtgtgttgtattgatgaatttgataagatgagtgactctacaagatctgttttacatgaagttatggaacaacaaactatttctatcgcgaaagcagggattatcacaacgttgaacgccagaagttccattctggctagtgctaacccaatcggttcacgttacaatccaaacttacctgtgacacaaaacattgacttacctcctccattactttcgagatttgatctggtttatctggttctggacaaagttgatgaaaaaaatgacagagagctagccaagcacttaacaaatctttatttagaagataaacccgaacatgtgtctcaagatgatgtcctaccagttgaatttttaacgatgtatattagttatgcaaaggagcacataaacccagtgatcaccgaagccgccaaaacagagcttgttcgagcatatgtagggatgaggaaaatgggtgatgactcgagatctgatgagaaaagaatcacagctacaacaagacaattagagagtatgattcgtttagctgaagcacatgctaagatgaaattaaaaagcgctgtagaattggaagatgttcaagaggctgtgagattaatcagatctgctatcaaagattatgcgacagatccaaagactggtaaaatcgacatgaatttagttcagacaggtaaatctgtggttcaaagaaaattgcaggaagatttatcaagggaaatcgtaaacgttttgaaagatcaggtatctgactcaatgtcattcaatgagcttatcaagcaaataaatgagcactcgcaagatagggttgactcttctgatatccaagaggccttgtcgaggttgcaacaagaagataaggttattgttcttggcgaaggtgtaaggagatctgttcgcttaaacaaccgtgtctga

SEQ ID NO: 2663 - DNA, 348 bp, Saccharomyces pastorianus
atgctaggcagaattcaaaattacacaagtggattagtttctaaagcaaatcttttatcaacaaaggctttgtactatggtaaagttggtgccgagatttcaaaacagatttatgtaaaggaaggtctccaaccaccaactgcggcccaattcaaatcagtatatctaaatctctacaaacagagccttaactttgtgttgaagcctacggaagttttatcgtttttgaaaaacattcaaaagaacgaattattaaaatatggtgcatacggtgttcaaatagtggggttttattcagtaggtgaagtaattggaaggagaaagttggtaggctataagcatcattag

SEQ ID NO: 2664 - DNA, 3660 bp, Saccharomyces pastorianus
atgcatagtaaagaatttgctaatagaatcaagaaaagggaaaacgagaatgacttatcaccgaattcaagctcgtcttcatccgctgacagattcaggtgtccacatcctgagtgcaacaaaaccttttcacgacaagagcatctgtcaagacataaactgaatcactggccgaaagaaatatacgtctgttctttcgtacttcctaccacaaattcgccttgtaataagacatttgtgaggaaagacttactgatcaggcatgaaaagagacactcgaagatgaaaaataggttaactaaaccaaatagagattttatctccccagtagacaacgatttctctaaacagttgccatataattccagtgaaacgctagtttctgggcaacccagtgcttcggtggtaaacccatcaaaaaactctgttgatccaccttcagtcgctcccggatcaaaatttcgtcccttccttcagcagccccaacaagtacaacaaatacaacaacagcaagtccaacaacagcttccggctccgctgcagcaacctatgtttcagcagcaaatgcatacacagccggcaagccctgcgtttccttatgaccctcgaatgagaaataacggtcaaagtgttaaccaatttttcaattggatattcgataaccgtgcagggactagtgcattcgatatcgaaggagctaatagtactagcaatagcaatgaccagaatgttaatatcaacatagctgctcaacaacgatatcaggacagaactgttccgaatactgtatatcaacagccatttcagccactttctcaagatcgacaacaggaacaatatcttcaacagcagaaagatgcacaacaacaacagcagaaagatgcacaacaacaacagcaacagcagcagcaacagcaacaacaacaacaacaacaacaacaacaacaacaacaacaacaacaacaacaacaacaacaacaacaacaacaacaacaacaacaacaacaacaacaacaacaacaacaacaacaacaacaacaacaacaacaacaacaagtacaagtacaacaacaacaagtacaacaacaacaagtacaacaacaacaagcacaacaacaacaagcacaacaacaacaaatactacagcagcagcaacaacaacaacatcagcagcagcagcagcagtcgccacaacagaatctatttgcggatcaattaacttcgtctgctagctgcgctaacctgacaatgatgcaggaccttttctccacaaatttcttgaacagcgatcctttacaatctttcatgcaagagctttctgaagccccacaagtaaatatcgaagacacattctctgataagaccataatccctaacaatgaaaaacgcccacaaaatgataaatttgaaggatttcaaaattctccagttacatttgacctgcaacaggctaacatcgaaactcccaagactcaatccaaatttactaacaaccctagtactctcggtaaagataatgtttccactgagaaactggatatgaatgaactaaaacggcagccttctaaagacttagagatgacaagcaactcttccttaaactataaggagcaattgcgccattctatgaagagcgttccgtcatttttccatccacatcccacgacaaaatacaaggtatcaaaagagaaatgtcaagagatgtttgcacttgttccagaattacgttacgtttctataaacgctatacacaaatcactgaagtcattctggttcaattttcatccacaatatggtctacttcacaaaccttctttccacgtggacaagcagcctggaattttaaacttggcgttaatcatgactggtgcaagtttcctaggaagtgaatatcgtgaacaaatcagtgacccaatttgtggtcccctacgttggataattttttcccatgccgatttccaaccgccctccaaaacatacatcattcaaagcttactattactcgaaggatacgaaaagacaagtacgaatagacatttccacgaaagatcttttttgcaccatgggacgaccattcaattattgaggcgaacgccttccttaggtggccatccattaatggtcaaaaccgggaaaacttccggggaaaattcaattaaagatccacaagaagtttataaaagatggattgattttgaaatgttgaaaagaatcgcattctacgcattttacatggacaccacacatgctgtagtgtttgggtattggaatttattcatcaacagcaatcaaattcagctaacattaccttgcccagaccaagtttgggaatcttatgatttgagctacgaaactctaatggaacatggatatggcagtaccaaaagggatgaaaataatacattcctgtcagcattgatgcaattaatgaaaaacgtcgttcaaattttacaaaacaacaatatacaaagaaacaaggtcaataatgacgccaaagagagcagcccagtaggcctggaaaacactgaagactggaatatccaaagtctttttggtaaaaagatccttctttcaggaataatttctatcctattccagtgccaagaggaagtaaatggtgagtatttcatgacaaattttcgaagcggtattacagatcatctaggtctttcatggaaagatattctatcatttgcaatgaattattggcttcgtgaagttcaaataagttgcactaatccgaaagcatgcaggataaacacgccgagtgattttgaaggggtctcaacggatggagaaggtgaccaacctcatgtgaactacgaagacaaggcaaatgatagcagcttagatttactttcttcagataattcttcaagttgtaaaatgcctgcaattcatatttctcaaatcgtcttacgtattctccatcacgattattacatatacgcaggggcgccttggagaatgaatgtcccaattgggtttgaggaatatgacatgatcagtcgaaggatactccagtttgcaaaagatccctataatggtggtgtagccgtcgtttacgctttccaatttttgtttgaaatgttcattgttaaggacaataatcgtctaaccgttgtggaagactacgcggtgaattctgatcctatatttactaggccatatgctattgcattgacgtcgcttttgatctggtcttgtaattttgcactacacggctgtgaagttagcatatggaataatgttgacgcctcgaaagaagaaagttttaagtcaagtgacaccaatggtgaatgtactactagccccgagggcgataaggaatcaaaactttcgagtagcaatctaaaagaaaagaacaattacattccaaaggagagcttccaagtatacttgttaagaatgtatccgattctgtacgtagatggttcacttgacttagttagcttccagaatgaaatttgggcaaaagcaaatatgctacaacacatttctaatactcatcatttgtgcgggatgatgcaatttatgaaggacatttttagcaaaagctactgggatttagggcgcgaattcggaaggctttttgacaattgtttagagagaagtatggggaaagcatcgcctacatgtcatgacatgttcgatgtttag

SEQ ID NO: 2665 - DNA, 2244 bp, Saccharomyces pastorianus
atgaacgtttccaaaatactggcgtcgcccacaatcacatcaaatgttttgcgcatactagctcccaggttgcctcagattggcgcctctttgctagttcaaagagggtggattttaagatcgagacaatcccatcgtttctactcggaaaaggccaacgacgaaccaccttcgaaaaagggaggtgaaagcaccaggaaggcgtctggcaaagctacggcatcttcaaacgacaatgctgcaccaccaccgccatccaacactaatgataaaattaaacagccgaatgtagctgtatcgcatgctatgctagccacaagggagcaggaggccaacaaagatttaacgagccctgatgcacaagcggctttttataagcttcttctacaatcaaactatccccaatatgtggtatccagatttgagacccccggtattgcttcatcgcccgagtgtatggaattgtacatggaggcattgcaaagaataggcagacactcggaagcggatgctgttaggcagaacctattgacagccagttctgctggtgcagtcaatccatctttggcgtcatcttcgtcgaaccagtcgggttatcatggaaacttcccatctatgtactctccattttacgggtctcgcaaagaaccgctgcatgttgtcgtttcagagtcaacctttactgttgtgtcgagatgggttaaatggctacttgtgtttggtgtattgacctattctttctcagaaggtttcaaatatatcacagaaaacacaacattactcaaatcatcagaagtagcagataaatcggtcgatgttgctaaaacgaatgtcaagtttgatgatgtatgcggttgtgatgaagctcgtgcagaattggaggagattgttgacttcttaaaggatcctaccaagtatgaatctttgggtggtaaactacctaaaggtgtattattgactggtcctcccggtacgggtaaaaccttattggccagagctacagccggggaggctggtgtagacttttttttcatgtccggttctgagttcgatgaagtttacgttggtgttggtgctaaacgtatccgtgatttgtttgctcaagcacgttctcgcgcccctgctatcatttttatagatgaactagatgctattggcggtaaacgtaatccaaaggaccaagcgtacgccaagcagaccctaaatcaattattggtcgaattagacggtttctcgcaaacaagtggaattatcattatcggtgccactaatttcccagaagctttagacaaagcgttaaccagaccaggtagattcgataaagttgtgaatgttgatttacccgatgttcgtggtcgcgctgacattttgaaacaccacatgaaaaaaataacattagcagataatgtcgatccaacaattattgctcgtggtactccaggcttatcgggtgctgagctggccaacctggtcaatcaagcagcagtgtatgcctgtcaaaagaacgcaatatctgtcaacatgtcacatttcgaatgggctaaggacaaaattttgatgggtgccgaaaggaaaactatggttttaacagatgcggctaggaaagccaccgcttaccacgaggctggtcatgcgattatggccaaatacaccaacggtgctacccctctatacaaggctactattttacccaggggcagagcattaggtattacttttcaactaccagaaatggataaggttgatattacgaaaagagagtgtcatgcccggttggatgtgtgcatgggaggaaaaattgctgaggagttaatttatggcaaagacaacaccacaagtggttgtgggtctgatctacagagcgcaaccggtacagcaagagctatggtgacgcagtatggtatgagtgatgatgtgggccctgtaaatttgtcagagaattgggaaacttggtcgaataaaatacgcgatatcgccgacaatgaggtgattgagcttttgaaagattcagaggaaaggagtagaagattactgaccaagaagaatgttgagctccacagacttgctcaaggtcttattgagtacgagacacttgatgcgcatgaaattgaacaagtttgcaaaggtgaaaaattgaataagctcaaaacatctacaaatactgttgtggaaggtccagacagtgacgaacgtaaggatataggaggtgacaaaccaaaaattccgacgatgttaaatgcatga

SEQ ID NO: 2666 - DNA, 2514 bp, Saccharomyces pastorianus
atgggttcttcgctgagaagctttattaaagatgttcgcggagctaaaactctggctgatgaaagagctaccataacaaaacagtctgccaaaataagaacaaagttaagagacgatcatctgccacatgagaaaaggcgagtaaatattcagaaactgttgtatctatacattcttggagaaaaaacacattttggccaagtggaatctattaatttgattgcttctgatgatttcgtcgataaaaggttaggctatctagctgccactttgttgctggatgaatcggaagacttgttgactctattgacaaacatgctgaacaacgatttgcatcacccaaacaagtacgccgtgtcactagcattgacttcattgggctttttaagttcccctgaattggctagagatttatacccagacgtggaaaacatcatcaaaaattcgaaagaccctttcctcttgaaaaaagctcttcaatgtgctgccaaactaatctccaaagatacctctctcctagaaatcttcaatattgaagacatcaccaaaatactatccaatcattcaatttgtacccatggtgtcttgctaggtatcaccaaaattttacaatccgttttatcaattggtttacaccctgagaatgacgacgatgacgacgggatcgattacgccaacgatgtcctatctccattatctctactcttgcgtgattttttcactcgtttggagaatttaaattctaaaaacatcgaacctggatacgatgttcaaggtatttgtgacccatttttgcagtgtgaaatgatttacactctaaaactctacttccaaaatggagaattattgaattcgaatcacgtactggactacaaggataatttctgtgatctattaacccgtatagccaccaacacagactcgacaaaaaatagtggacaagccattctttacgaaactgcaaaggcaattttttctttgaatttgaaccaaccactacgtgtccttggtgtcagtattttggcaaagttccttgtaggaaaagacaacaacacaaaatacgtttcgctaaacactttattaaaagtcgtccctcaagaacctactgcagtgcaaagacacagaaaattcatttctcactgtttgcaggacaacgatatttcgatccgaatgagagcgttggagctaagtttcgccatcttggatagttcaaatttagtagagctgattaacgaactaatgaaatttttggccaaacaagatgaggattcaaaagatttaatcatttacaccattgaccacctaatcgatacttttgatactcacactgtcaaggatgaaaactggaaactagatgtattcttaaacgttttaaaattagtggggccatttatcaattatgaaaagattaatgatatcctaatcataataaataacaccactcaattatctgataaatacaattttttgcggaaactactaatcatttcgttagacgaaaaatcaatagaaatttctgacgaaaaatcaatagaaatttctgacgaaaatattggctggaaattagtattaatttggtgtattggcgaatattgcgatttgctattaaacgatgatgatgaaagcaacgcgaaaataatcaatgaatcgtctataacgaattacttgttgaacttacaagagtgctacaccacaacaaaccacaagattattaattatatcctaacaacggcattaaagttatcaataaaattccaggaccccaaaaatattgaaaagttaagacagttaatattgagctatgcagactccactgatctattactccaaatgaaaagcaaccaatacgaaatattattcaatcagccagtatctgttaagagaatcgttttagaaacgatgcctaagtttgaaaaggtcgccgagaaacaagataaagtaaagaagacatcgaaaaatcttgtatctaacgaacccgctgatttactatctgattttttgagtgacgataataaaacggatgccatagctgccacagataacaacgttgaaccaacggacatattagaggagattttcggaggaaagaaagatacaaaacgaccattgaagaatggtaaggaagagtcaattgaccaaccgttaccagtgactgccgattcaaacgtcacactaccttcaagtgctacaaagatccatgacagtgcttcattgaatgtatacgctactttactctcagcaaattctggattagcatatatagagttattttttcaagcaaagtctatgctatctgatctgcaaactttctgtgccgttcctaaagctcaaaaactcacactaggtcaattacatccgtcttcaacaataagggccaaccaaatctgcaaacaatccctaaagatttccggatccgggaagttgaaattaagagttaagttgggttttcatttagatggttccccatcagctaccaatgaacagtttgatcacaaattcgatacaactttataa

SEQ ID NO: 2667 - DNA, 3102 bp, Saccharomyces pastorianus
atgttcaaaagcagacgtttaaagaacgtcaaagaagttttcaaatctataaaaggtcagggttcagagacatccattgaggtttcatcacctaaatctgcagattctgagccatcccataaatcccaaaattcgaaatcttccacctcatttaaacttcctacgggctcaagtaacaagaataagatattttcattaaaagaagcaaacagatatggtatgagtagtaaaccaacctctgctgcattcgacttcacgcaaaatttattggctattgctacagctacaggagaagttcatatttatggccagcagcaagtggaagtacttataaacctggaggataggtcacccgttaaggagatgagatttgtaaaaggtatctatctggttgtcatcaactcaaaagatgtcatgtttgtcctatctttatattctcaaaaagtacttgcaacagtgtttgctccggggaaaataacgtcgattgatacagacgcatccttaaattggatgctgattggtcttcagagcggttcaatgacagtttatgacattgatagggaccaactttccacgttcaagttaggcaacttacaaaaaaactcattttttccggatgcaaggctgtcacccatggtgtcgattcaatggaaccctagggatattggcactgtgctaatatcatacgagtacgtaactctgacatactgtttaattgataacgaaattaagcaatcatttatatacgagttgccgccttttgctccgggaggtgacttttcaaagacaactagtgaaaagaggacacccaaagtaatccaatccttatatcatcccaattccctacacatcctaaccgttcatgaagataattctttagttttctgggatgctaatacaggacatatggtaatggcaaggacaatattcgagactgaaattaatattccgcagcctgattacatacgggactctagtacaggtgcggcggcaatttcaaaagtgttttggatgtgtgaaaacaatccagaatatacgtcactacttatctctcacaaaccagtcggtcaagatggcaaccaaagtctcaccatggtggaccttggttacacaccgagatattcaataacatcatatgacggtatgaaaaattactacgcgaatccgaaacagatgaagatatttccgttaacaaccaacatgccgatagtaaaggtactgccgattccaagacaatccccatatttttcaggatgccataatccaggattaattctattgattcttggaaatggtgaaatagaaacaatgctatatccttctggaatatttactcataaagcctctttgttccctcaaaatctttgttggcttagaccaacagctacagtttctgtggccacttctgtacccaacaaactatggctaggagtgctatccgcagctcaaagtaaggattgcgtattgaaggggggtgttcgaacaaaaaggcaaaaatccccagcagaatacggtacagctctcattactggccactcaaatggctcagttagaatatgcgatgcttctcatggggatatacaagacaatgccagctttgagatgaacctatcaagaacattaaatagagcgaataaattagccgtcgacaaactatcctttgctgcagaaactcttgagctcacggtatcgattgaaacaggtgatgttgttttattcaagtacgaagtaaaccagttttatagtgccgaaaagaggccagacagcggtgacctaaatatggactttaggcggttctcattgaacaatacgaaagatgttctcgttgatgtaaaggacagagcacccaccaatattaaacagggatttatgccatcgacagctgtacatgccgataacggaaaaacttctgccttaaataacagtaacatcgggtttgttggcattgcgtatgctgtcggaagccttatgctgatcgatagaagagggccagcaatcatttacatggaaaatattaaagaattaccaggggttaagagtacatgcgtttcctgcattgaatttgtaattatggaatatggagatgacggttactcaagcatattaatgctttgtggcactgatatgggcgaactgatcacctacaagatccttcctgcacctggtggaagatttaatgttcagtttatggacatcaccaatgttaatagtaaagggccagtacgtaaaatcgatgctttcacaaaggaaacgaaatctagttgcttggcaactattccaaaaatgcagagtttaagcaagggactttgtattcctggatttgtattgacaactgcatttgatgatataagaatgataactttaggcaagtctaaagatatacacaagagtttcaaatatccactggccactacaggtatatcgtatattcctactttagaagggaataacagccgaaaaatattagcggttatagtcacgttagaaatcaacggccatgtcaaagttttttcagttccagattttaaggagcagatgtctgaacatattccatttccaatagctgcgaaatacataacagaatcttccgtcctaaggaatggtgatttagcgattagagtgggtgaatttcaagcatcgttattttctaccgtcaaggaacagagtacagcaccaccagcacaagtttccgacgtactgtatattaatggagttcgaatcccgtataggccacaagtaaattcattacaatgggtgagaggtaccgtgtattgcacacctgcccaattgaatgagttacttggaggtaaaaatagacccgattccaaatacaaggagagtgttattgctcaaggaactttttcggaacgtccttcggataataatcatgaagagggttcggagtaccagtacaataaaccctcacggaaaggtaggaatagtaactatggtgtactgagaaatgtttcccgtgttgttgaaaccagatgggatgccgttgaagataggcttaacgattatgctactgccgtgggcgaaacaatgaacgaggccgttgagcagactgggaaagatgtaatgaagggtgccttaggattttga

SEQ ID NO: 2668 - DNA, 1641 bp, Saccharomyces pastorianus
atgcttagtagaactataaatagagtagtttcatctataaagccatcttcaatagtcagaatgtcttctactactgttcctgctgctcctactcctactgctgatgctgctaaggctccaaaggctccaaaggcttcgaaaaaaagcaagttgcaagtctctttgaagacacctaaaggtaccaaggactgggctgacactgatatggttatcagagaggctgtctttaacactttgtccaatatattcaaaaagcatggtggtgtcactatcgacacgcctgtctttgaattaagagaaattttggcaggtaaatacggtgaagactcaaaattgatttacaacttggaggaccaaggtggtgaattatgctctttgcgttatgacttgacggttccatttgctagatacgtagcaatgaacaatattcaaaacatcaagagataccacatcgcaaaagtctacagaagagatcagccggctatgaccaagggtcgtatgagagagttttaccaatgtgactttgatgtcgcaggtagtttcgaatcaatggtgccagatgctgagtgtttgtccatcttagtggaaggtttaaccagtctgggtattaaagatttcaaaatcaaactaaaccatagaaagattcttgatggtattttccagatctctggtgtcaaagacgaagatgtcagaaaaatctcatctgctgtcgataaattagacaaatccccatgggaggccgttaagaaggaaatgacagaagagaaaggtcaatctgaagaaaccgccgacaaaatcggtgaatacgttaagttaaacggttctcttgaggaagttcacaccatcttatcccaagatgcaagcattacctcaaacgaactggccaaacaaggtttagatgagattgccactttgatgaaatacgccgacgcattcggtatcgattcatatatttcatttgatctttccttggccagaggtttggactactacacaggtttgatctacgaagccgttacatccgcttccgctccaccaaaaaatgcttcagaattgaagaagaaggctaaatctgtggaagatgcctctgaatatgttggtgttggttctattgcagccggtggccgttatgataacttagtcaacatgtttgctgaagcctctggtaagaagtctactaaaatcccatgcgttggtatttcctttggtgtcgaaagattattctctttgatcaaacaaagaattcaaacctctacagacatcaaaccaactgcgacacaagtctttgtcatggcctttggtggtggtaaagactggactggttacttgcctgaaagaatgaaggtcactaaacaattatgggacgccggtattgaagcagaatacgtttacaaagccaaggctaaccctagaaagcaattcgatgccgctgaaaaagctggttgtcatatcgctgtgattcttggtaaggaggaatacttagacgggaaactacgtgtcaagagattaggtcaagaatttgcggatgatgatggtgaattggttaatgcagccgatatcgtcgccattgtccaagaaagattatctcaagttcacgaagacggtcttgatgaagttactcgtttaattaaaggattataa

SEQ ID NO: 2669 - DNA, 1113 bp, Saccharomyces pastorianus
atggctgaaacgagtattgaaaaaacccaaattttacaaaaatatctagaactagaccaaagaggcagaatcattgccgaatatgtctggatcgacggtaccggtaacttgcgttccaaaggtagaactttgaagaagaaggtcacctctatcgaccaactaccagaatggaactttgacggttcctctaccaaccaagctccaggtcacgactccgacatctacttgaagcctgtcgctttctacccagaccctttcagaagaggtgacaacattgtcgtcttggccgcttgttacaacaacgacggtactccaaacaagttcaaccacagacacgaagccgctaagttgtttgctgcccacaaagacgaagagatctggttcggtctagaacaagaatacactctattggacatgtacgacaacgtctacggatggccaaagggtgggttcccagccccacaagatccatactactgtggtgtcggtgccggcaaggtgtacgccagagatcttatcgaagcccactacagagcctgtctgtatgccggtttggaactttccggtatcaacgccgaagtcatgccatctcaatgggaattccaagttggcccatgcaccggtattgaattgggtgaccaattgtggatggcgagatacctcttgcacagagtggctgaagaattcggcattaagatttccttccatccaaagccattgaagggtgactggaacggtgccggttgtcacaccaacgtctccaccaaggaaatgagactaccaggcggtatgaaatacattgaacaagccatcgaaaagttgtccaagagacacgccgaacacatcaagttgtacggtagcgataacgagatgagattgaccggtagacatgaaactgcttccatgaccgccttctcttctggtgtcgccaacagaggtagttccatcagaattccaagatccgtcgccaaggaaggatgtggttacttcgaagatcgtagaccagcttccaacattgacccatacttagtcaccggtatcatgtgtgaaaccgtttgcggtgccattgacagcgccaacatgactaaagaattcgaaagagaattctcataa

SEQ ID NO: 2670 - DNA, 1080 bp, Saccharomyces pastorianus
atgtccaagagaaataccgcccccctcagatccccagggataaacactgtccagataaacgctgccagagagatgcatgcgcagaccgtacgcgctcgaagaatgcccatcccagccggcagcatcaccgcatcctcgatgaccgcccccgtagcagcaacggcagtgccaccacgacatatctgcaataacccgaacaacccgccctgcgtgagctgtggctcggtcatcatcccatcgcccagagccacgctgcccttggaggacaatccttccatctccataaacgactggaccatctcttccaggaagaagcccattttgaactcacaagaactggacgtctgggaaaccgagaagctcaaggggctgaccttgcccgagatgatcttcggcaacaactacatccgaatcgagaacccgcgtctagactggtctatagagttcaacgccctggacgccctgaagaacgtgcaactgcaggattcgggcatccgcgtggcgtactcgaacgattggataaactccaagaggaaacagaacacatcgggcacgggcactgcgcagcggttttccaacgatgtgagcgcagattcccttaacattatacacaagtacgactggacctacaccacaagctataggggcacggagaactcccccgagtcgaggttcaaactggacaatgaccaaacgctaccacttgacaagttagccgtgcacgacaaaatcctattctacgacgacatgattctcttcgaagacgagctcgcagacaacggtatatccatactcaacgtgaaaataagggtcatgaacgaacgcctgctgctgctgagcaggttcttcctgagagtggacgacgtgcttgtgcgggtctacgacacgaggctatacgtggagttcgacgagaacagagtgatcagagagtccaaggagtacgagggtaaataccacgacgtactggccaagcataggctgtcccaatcgcatgaccccaaggccgccctgagagatagcaactgggttgctcagaacacacccatgatcaaaagagagtgcgaaacgatccagttctag

SEQ ID NO: 2671 - DNA, 3213 bp, Saccharomyces pastorianus
  modified_base (3058)..(3148): a, c, g, t, unknown, or other
atggacaacaaaagactgtataacggcaacctatccaacatcccggaagtcatagatcccgggatcacgattccaatttatgaagaggacatcagaagagatgtgcttttgaacgtaagccctcgttcggcgggcgtgtctgacaagcgggaccgttcgaattgcgcttccccacagaaaattggctcgtatcgtactcgcgctggcaggttttcagatactataaccaacctgttaccttccattagtgcaaaactgcaccattcaaagaaggccgctacagcagtcgttgctcctcctgctagtagcactccggagagcttgaatacgaccacatatgctccaagattgtctaatgattcttttacaagaggtacgccactgtcactgcagtctactacaagccggacccgaacaagaaacaacacagtatcctcgcaaatgacagcgaattcttcatctaccagcggtgcgggtgcggccaataccacgaatacaaacatttggagtacaaatacagaaactaacacgtcatccagccctttgtttgattatccccatgctacttcctattttgagccattgaccagatttaagtccaccgaaaattatgccttgcctcaaacagctcagttgaacagttttttggaaaagaatgggaattcgaacatatggtcgaatacaggcaataacacagactacctcaatactcccatagttaatagacagcgttcgcagtctcaatcaactataaacagggtatacacagatgctccttactatcaacaacccgcgcaaaatcaccaggttcaagtgcctaccatgatccaaaatagcacccctcaatcgcttgttattcttgacggtgttgatccagcctcaatcaactggattaccacaaaccaaaacgttccattgatcaatcaaatatctacgcttttgcccactaatacaatatctatttcgaatgtatatccattgcaacccactcaacaacaacaaaatactgtaaaccttacaagtacttccctagcgacattgtgttcgcaatatggcaaagtcctctcggcaagaacgctacgtggcctaaatatggctttggtggaattttctactatagaaagtgcaatttgtgccttggaagccttgcaaggtaaagagctttcaaaagtaggtgcttctagcactgtgtcctttgcacgggttcttcctatgtatgaacaacccccaaacgccagtgcttatagtagcaaaccaaagcagcctttattgcaggaacaactgaataacggagtgcttaattaccagcagcaacagtcaacctcatttaatcaacccaatttttcatacagcaaccccacccaaaatatgagccatttgcaattgtcttcgaatgaaagtgaaccatacccctttccattgcctccaccatcattatctgataatgaggtcaatctattaaataccataaaatcatttccattaggatatgaccaattagagttgaatcatctgttaaaaaatgcgttgaaaaataagggagtttctaatacaaacgattttggtccactacctgaacacaactctaaactttctaaaaagaagagctttttcgatccgccaaaactgcgtgagttaaggaaacaatttgattcaaattcattatctaatatagaaatcgaacagcttgccatcgtcattttagatcaattaccagaattgagttcagactatttgggcaataccgttgttcaaaagttatttgagaattcttcagatataataagagatattatgcttagaaaatgtaacaaatacttaacatctatgggtgtccacaagaatggaacctgggtttgtcaaaagattatcaaaatggcgaagacaccaaggcaaatcaatcttgtgactttaggtgtcaaagactattgcatctcactttttaatgatcagttcggcaattacgttattcaaggtatcttaaagttcggttttccctggaatagttttatttttgaaagcgttctgtctcatttttggacaatagtgcaaaacagatacggttctcgtgctgtaagggcttgtctcgaggcagattctaccatcactcaaagccaactgttgacgataagttcgctgataattgtactctccccttatttggccacagataataacggtactttattgattacttggttgttggatacctgtacattacccaataaaaacataatcctttgtgatgaactggttaaaagtaatttggttaaactatgttgtcataaattaggttcattgacaatcttgaagattctaaatttaagaggtggtgaagaagaattattatccaagaataagatcatccgtgcagtttttgatggcccagtctctaatgattctatcttattccaaatactggatgaaggcaactatggcccaacattcatttacaaagttttaacctcaagaatccttgacaataatgtaagagatgaagttatgactaaaatccgtcagctaattttgaactctactatcaatttacaaagccgtcaactgctggaagaaattggattatcatcatctggaatatcccccaagcaatcctccaaaagtcaccgtaaacaacattctcaagggttccattctcctaggcgtgcaagaggagtctcggtttccagcgtgagaagttcaaattcaagacaaaatagtatcataccaatcaatgctgctagtccagctccaattttgaactttaacccggttccgatgagtgaaataaattcatactttaataatcaacagttaatgtaccctgggaatggaaattcaaacgcaaatactatgtctaatgggtacgaggacttaacaccacactttgactcactcgcaatcgctaatggaacaaatttgtctttaccgataatcaacctaccaaatggtgcacagcaaccaaataacaacgacagtaatatcagcaataatactaataatagtacttgttactcaatgaacatgaatcctttaagtcgctcagtgagccacaataataatnnnnnnnnnnnnnnnnnnnnnnnnnnnnnnnnnnnnnnnnnnnnnnnnnnnnnnnnnnnnnnnnnnnnnnnnnnnnnnnnnnnnnnnnnnnaacaaggcaatgttaacgataataatgatacaaatttgtcccgatacaggtcatacggatattaa

SEQ ID NO: 2672 - DNA, 1413 bp, Saccharomyces pastorianus
atgcaaaatccttacggccattttactaacgataccacgggggacagaaagacatcgtctcaaaccgggctatttggacaaagtctgaatagtcctttgggttacgccagatcttttccttctttgacttctaataatgataactttaaagccaaccagcaatcatcgataccgttgccagaaccacgtttgccttggaataacattaatcaggtgtccaatcctttgatggtaacaccgcttcctggattacataaaaatatgcctaaaaatactaaaaagaaactaccaaaggtatccaaaaagattccgaactcttctaacaccataccaaataaactagtgagtaatagtactacagtggggaaaagtacttttggttcgacatcgggaaggaaagctggaacggatgacagtgctgaattagaaagaagaaagagaagggctgaaagatttagtaagggcccatcagcaacgacgaatagtaacgacaacttgaatgaagattttgcgaatttgaacgcaatcagcagcaagtctcataagtatgataaaaaaatacatgtggtggggcgttgtcaaactcttgaaaaatcatatttgagactgacatcggagcccaatccagatttgattaggcctccaaacattttgcaaaaaacgtattgtttattgatggagaagtaccaatcgaaagcggccacgtatacttacctttgcgaccaattcaaatcaatgagacaagatttaagggtgcagatgattgagaattcatttactattaaagtttaccaaacgcacgcacgaattgccctggagaacggagaccttggcgaattcaaccaatgccagaatagaatcatggcgttgtttgaaaactctacgataccgaaaaaatcatactcggaatttatatgttattctattttgtattcaatgttaactgaggattatccagcgatttctcagttgaaactgaagttgatggacgataacgcgtcggaaatcttgggggatgagcatgtcaagataattttcgagttgagtaacatgaaactagtcgggaattatcattattttatgaaaagttatacgaagctgcacaaattcgaaaaatgcctgatcaactcatttttaaatctggaaaaattgaaatttttgaccgtgatttgcaagagttataatcaaatcaatttagattttatcaaaagtgagtttagtttcaccagtatagatgaaacaataaatttcttgagtgagcaaaacttgatcgacttcatagtaactaaacagattagtgacactaatggtaaaatgaaagatatcaaaattttaaatacgaagggttgtagggtacagttgatacagaatttcatgaaattcaagaagattgatataaagggacaaaaatag

SEQ ID NO: 2673 - DNA, 546 bp, Saccharomyces pastorianus
atgaccagtggtactgaagagcaatggcaaaggatccagcatttggaaaaggagcatgtggaagtatataaagaactactaactgcgttagataaactgtacctgatcaggaaacacaatcatgcagtagtattgaactccagccagaaacgtctcttggaaatcagacaccaacttcaaattaatcttgaaaaaaccggccttctcataaggcttctagaaaaaccagataatagtaatatattatttgtgaaactacaaaacctattagaggaaagcaattctctggacaacgagctcttgcaatcattgggtacccaatcttcattcaacaaacaattgatcgaatcaagactggagcgagatcagttgatggcaaaactggtagaggtatcctcgaggtttccaaatgaaactttacgtgcagacgatgatgaaattgccgaaaaccaggttgagttggaaagggagaatgaaactatacaggaattacttattgctttacaaatacattctgggtatacagatatatcttacgcaatttag

SEQ ID NO: 2674 - DNA, 1872 bp, Saccharomyces pastorianus
atgccatcgagcaagaagatcgtcatcctttatggatcagagacaggtaatgcgcatgattttgctacgatcttgtcccatcgactacatcgctggcacttcccacatacattctgttccattggtgattatgacgcacaggatatcttaaagtgcaagtacctttttatcatatgctccaccacaggtcagggtgaactgccaaggaatgctacatcaaaacgtgaaacaccagtaacactttggtcttttttgaaaaagaaaaacctaccgccgaacttcttaaaccatattcaaaccgccatgttcggactaggtgattcatcttatcccaaattcaattatgccattagaaaattacaccaacgaattgtaacgcaattgggtgcaaatgagttattcgataggttagaggctgacgatcaagccatggctggtagcaataaaggaactggtcttggcgttgaatcagtatattttgaatacgaaaggaaagcattggaatttctattaaagaagttccccaatagaaggttgggcaataagataattaaacgggaagagctggatccagaaatttacttagagccaatatcttatttacaaattgcagacgagaatgcgaatgaagatctcaatgaaactaaaatcgaatttcaaggtgatgaatcggtgaagattggtaaagttaacattaacaaaagaatcacatctcatgatcatttccaagacataagacagtttacgtttagtagtattgaaaatatagaagaagaaaagtatgatcctggggatacagcagctatttatccctgtaatacagatgaagatgtgtcgaactttttagaaaatcaaagccactggttagaggttgccgacaaaccattggattttatcaacggagttccaaaagatctcaaagatggtgggttaatcaaaccgctgactttgagaaacttactaaaatatcattgtgatttcatgagcattcccagaacaagtttctttttgaagacttggacttttgcaacagatataactaaaatggaacgtggcaaagaacagctaaatgatcaaaaggaaaaattacgtcaatttgctaccgatcaagatatgcaggatttgtatgactactgtaatagacctagaagatcaattcttgaggtattggaagactttctttctgtaaagttgccctggaaatatgtgttggattatttgcctatcattaagccaaggtattactctatttctagtggtcctagagatccaaacatcgaactaacagtagcggtagtgaaatataaaactattttaagaagaattaggaagggaatatgtactaattacattgcgctcttgcaagagggggaacaagtgaggtacaaattacaaaataatcacataatcaagcaagagtttttaaatagaccaattattcttgttggaccaggtgttggtttagccccattgctatccgtgattaaaggagaagtatccgacaacatgagactatttttcggctgtaggtataaagacaaagactatatatatagagatacattggaagattggtcccgtaaagataagatttctttgtctacatccttttctagagatagtgaaaactcaccaggtgtcaagtatgttcaggataatttgtggagattgggcgaagaaattactgaactggtgatcaacaaagatgctattttctttttatgtggctcatcaggtaagatgcctattcagattagattgacatttgttgagatgttgaagaaatggggtggattcaaaaatgaggaggctgccaaaaaatacctgaaagacatggaaaaatgcgatagatatattcaggaaacttggtga

SEQ ID NO: 2675 - DNA, 3525 bp, Saccharomyces pastorianus
atggcagattctggtggtaaaaacactgcatctgcagagcagacaacaatgccgcttcaaactactgctactatcattaatgcaatatctggggaatctattacaactaatgtgaacttctttgtttccctggacgagtttaaacagttcatgactagaaaatggaatataccccctgatcggttgctgattttgttgccttacggtaataaactaaaaccgtccatgtttaaagagttgctaataaatagatccttcacgttaaatgagttttatgtgtatgatagaagactgttttcacttgttcataaacctacaccagtgaatgccgccacttcgcaggacattagctttgaaaatacccttaattctaaagatttaacccagactttggaatatttaatcaaaaatagtcacgtaggtgaaggtagcgacactatcatgatcaagcctatgccctcacccttagaagatgcagatgtgactgttccgcgcttagattaccacaccgtaactagcttactaaccacgaatctgggttggttaagcgctctggaaatagacgtccattatttcagaagtctcataccagacatcatagcccagattacccacatatttaacagtttgacggtttgctcacaatacctaaaattgtactgctttgatgtcgaaaccttgtataattcaaacgttcaattcttaaatcaattgatagacaatggcatgacctcaaaatgggaaaaatgtttcaaagacactctgagtaaattgactggtttagagggtgactctttacaaaagtttactaatgtcgaatctctcctggaaaatgaaaaatctgtaaagtttttgaatcattccattaataataagctgaacaagatcaagagagaaattgacgaaaattcgaatttcagagacaccatcacaaaaaacattgaccaactgcggcaacagttcactcccaatgaatctaaatatgaactagaagacaaaatggctgcaagcttcaaggatttggtatcagatttgcgatcaagaagcagagatgttcttgataaagaaccagaagaattcaacgatcaagcatttctaaaaagtatgaatgagacgttggaaaaggataagaaaaattctataaagtccttatttactatctcccaagccctatactgtcaaactgaagaactcatgaatttgaagaaaagattgcaaatgcatgccattgtcacgttggggaacatagcattcactcaaatggaaattttaggcataaagaagttgttgttaaatgactgtaataaggatttagaactatacaagaaatatgaagtggaattcgcccaagtggaggatttacccctaatatatgggctctatctaatggaaaaataccgtaggctatcatggtttcaacaaatcgtgtcatttgtttcgagttttgatcaagatttagagttgtttaaacaaaacgaactgcacacaagaagtagatggattaaaaattttggttccattgcaaccgttttctgtgaagatttattatcctcttcagattttgataaattgaatgaatatcattccattcctcctccacctaatgataaagaaaaacataaggacaagaatgcaatcactcaatatcacaaaggtctacaggaactatctcaggtcattgacaattacatggtacaaattaaagaaacaaacgtcccagaaccaatcatcgatttgctatcgaaaacactcaccgaagccaaaagatttcatataatttactctaatttcaaaactcataacaacaatagttttaacagtagtaataattctctcgaagaatctgtcatgttgagaagcgatgaactagttaaagggtataaaacaagaataaaaaaactagaatcacttttgcatgagcttcagtattctgacgtaaaccactggcccctgggtattttgaacactcatatcaaaccgttccatagtatcattccaagtgtaaataaaagaaagtttttaagcgcatctgtgttgttagaaccttctgacttaaacaacagtagtataccacaaattaacggtcatcgagttgaagagttggagagtaatttgcaagatttattgcaacaaattcaatcattgaaggatgaaaacattcaaaaatcgaaggaaatctctgatatgaggagaaatttgagcgatgcggaagtggaaaagacagcatatcgcgaaacgttaactaacttaaatcaggaactggcacggttaactaacgaagaacagtcgcataaaaccgaaatctttgcacttaatgtctcatttaaaaagcacttgaacgatatagttgaccatgataatgagaaattgataaacatcaataaactaaaaagcgactatgatgatgtgtttaaatccagggaacgcttacaagttgagatgagtgaaattcgtaaaacgcataaagaagagattgattcattaaagaatgctatcgaaagattaaatggacaaattacaactttggaaaaaagtgaaagtgaggccaaatcaagttcgatcgaaaaaatcgaaaatatcgataccatttcctttcgcaatgacgggaatatgaacgatatggtttccacacaagctttgcaagataagatgtttgatattatctcaacaaatgttttcatcttggagaatattgggctattgctaaccttcgataataacaataacattcaaatcaggcgtgtcaaagggttgaaaaagggtgtcactcaaagcaatattttggatgaaagtactcaaatgttggacactgctgataactcggtaataaagagtccagtttttcaaaaattaaaggacgaatataacttgataaagtcgagcgtcaatggagttgataaagatgcccagcaaagcatatttgtggaaaatattgcacaattatatgacaataaactgtacgaagttgcagtcattagaagattcaaagacattgaaactttggcaaaaaaattaaccaaagagaataaaattaagagaacagtattggaaaggtgtcaaagggaaaaggttaccttgagaaattttcaaattggcgatttagcgttatttttaccaacaagagaaaacgttaactccgttgggtctatgtcatcgtcgacttcatcgctcagctcatcattttcgtccgttgacttatcaacaccgccacctttagatgccatgtctatacaatcctccccctcgataatacacagcaatattgtctcccaaggaaatactgctagcaaggaaaagagcaagcaaatgagaccttgggctgcatttacagcgtttgaggaaaacacaagatatttcttaaaagacgagaagggattgacaaaagggaaggaatggtttgtaggaagaatcatcacattggaacattttgtagcggatagctcctctaataacccgctccgattacccaagggtgccgtttggtttcaagtcactgctgttgtagtctcctaccaaggaatttga

SEQ ID NO: 2676 - DNA, 282 bp, Saccharomyces pastorianus
atggctgccccaagagaacctaagaagagaaccactagaaagaagaaggacccaaacgcccccaaaagggctttgtccgcctatatgtttttcgctaacgaaaacagagacattgttcgttctgaaaatccagatatcacgtttggacaggtcggtaagaagcttggtgagaagtggaaggccttgaccccagaggaaaagcaaccttatgaggccaaggcgcaggccgacaagaagagatacgagtccgaaaaggagttgtataatgccactttggcttag

SEQ ID NO: 2677 - DNA, 1026 bp, Saccharomyces pastorianus
atggatgctatatctgatccaacgtttaaacacactaggtcaagaaatcaagtaaccgaagaatctccatcattacttaccgttattatagagattgcaccaaagttatggacgactttcgatgaagaaggaaatgaaaagggtagtataataaaggtactagaggccttgattgtatttctcaatgcgcacctagcttttaatagtgccaacaaagtagcagtcattgccgcatattcccaaggaatcaaatatctataccctgaaagcacttctagcacaactacctcgaaagctcctaggtctgataataggaaccgtagtgatctcaagattatcaattccgatatgtataggcgattcagaaacgttgatgagacactggtggaagaagtctacaaactatttgaactagagaaaaatcaaattgaagaaaatagccaaaggagcacattagctggtgccatgtcagccggattgacatatgtgaacagaatttccaaagagtcagtaactacttcgttaaaatcaaggctaatggtccttacatgcggtagtggcagtagtaaagatgaaattttccaatacatccctataatgaactgtatcttctctgcaacgaaaatgaaatgtcctatagatgtagtgaaaatcggtggttcaaaggagagtacctttttacagcaaactacggatgcaacaaatggtgtttacttgcatgtaaattctacgcagggcttgattcaatatttagcgacagcaatgtttattgacccatcactaagacctataattgtcaaaccaaatcatggatctgtggatttcagaacttcgtgctacttaacgggaagagtcgttgccattgggtttatctgttcggtatgcttatgtgttctgtcaatcataccgcctgggaataaatgtcctgcatgcgactctgaattcgacgagcacgtaattgccaagctaaagaggaagtccgtcgttccaaggttaaagcctaagaagaaggtagcgaaaccgtga

SEQ ID NO: 2678 - DNA, 924 bp, Saccharomyces pastorianus
atgtctgaagaattcccaactcctcaattaatcgatgatttggagcaacatccacagcatgataatgctcgtgtcgtgaaagatttgcttgcaggtacagcaggtggtattgcacaagtgctagtgggccagccctttgacaccaccaaagttagattgcaaacatctagcactccgacgacagctatggaagttgtcaaaaaattgcttgccaatgagggccctcgtgggttttacaaagggactttaacgccgttaatcggtgttggtgcatgtgtttcattacagtttggtgtcaatgaagctatgaaaagattttttcatcagcgtaatgataataagtcatcaattctatcattaccacaatactatacatgtggtgtcacaggtggcctagtgaactcatttttggcttctcccattgagcatgtcagaattcgtttacaaacccaaactggttcaggcagcaacgtagaatttaagggtccattggagtgtattaaaaagttaaaaaataataaagggttgatgcgtggtttgtcacctacaatgttaagggaagctcacggatgtggtacatattttttggtgtatgaagcattgattgctaatcaaataagcaataatcatggcctggaaagaagggacattcctacatggaaactatgcatttttggtgcattatccggtaccgccttatggttgatggtatatccattggatgtcattaaatctgtcatgcaaactgacaatttacaaaagcccaaattcggtaattctatttctagtgtagcaaagaccttatatgctaaagaaggtattagtgcgtttttcaaagggttcggtcctaccatgttaagagctgccccagcgaatggtgccacttttgccacttttgaattagcaatgaggctgttgggctag

SEQ ID NO: 2679 - DNA, 771 bp, Saccharomyces pastorianus
atgtatttcactagaccagaaacagttttaaatctacaaaatattagaaatgaattagtgagaatggaagatacaattatcttcaaattcatcgaaagatcacattttgcaacgtgtccttcagtctacaaagaacaacatccaggtttaacaataccaaactttgaaggctccttcttgaattgggtccttttgaatcttgaaattacacaatctcggataagaagattcgaatcgcctgatgaaacacccttcttccctgacaaaattcagaaatcattcttaccaagcgttaattacccacaaattttggcaccttatgctccagaagtcaattataacgataaaatcaaagatgtttacattgaaaaaattattccattaatttcgaggaaggatggtgatgatagtaataattttggttccgtcgccactagcgacatcgagtgccttcaaagtttgagtagaagaatccattttggaaaatttgttgccgaagccaagtttcaatcggacattcccctatacacgaaattaatcaaagacaaagatgttgaaaggataatggaaaatatcaccaattctgctgttgaagaaaaaattttagaaagactaaccaaaaaggctgaagtttacggtgtggaccccactaacaaaaaaggtgagaaaagaattacacctgaatatttagtgaagatttacaaagaaatcgttattcccattacaaaagaagtagaggtggaatacctgttgaggagattggaagattag

SEQ ID NO: 2680 - DNA, 903 bp, Saccharomyces pastorianus
atgctgcaccataagctcgtatacccagttatattcaagtggcggataccatgtttagggtcttccccacaaatcaccttcaccgccaactatgctacagtggatggccaaaatggtaataagatgcttcccataagagacgatcaatggcctcagttgcaagaaccttccccctacgatatctttggaatttcaaaaacgggctcagaaagtgctacactggatagaaaatcactgaagaagaagtatcatcgctacgtcaaattgtaccatcctgatcattcagataacattatgatcttcagcacagataaagtttccgattgtagcagcaaatcgccactactgttaacatcgagtgaaaaactgcataggtttaaagtgatctctcaggcgtatgatatccttcgcgacccgaagaagaaaattatttacgacacaacaagacaaggctggagcaccccattttcgtcatctaccaacgtcaaaactgaaaattatcactatgcaggctcttatgggtaccactccagctcgcaatacaagtattggaatgctggaacctgggaagatgcaaatagtatgagaaatgaaagaataaaggaaaactttaatccatggaccctaattgccatagtctgcggcctggctatatgtatcgaaggtaccgcgctgttgaccaaaatccaggagtccctaagcaaggctgagtttactcatgaagaaagtgaaatacacttaattcaatcatacacaaattatgggctggatactgataaatattccagattaaggcggttcttatggtttagaacttggggcctttacaaatcaaaggaggatttggatagagaagccaagattaatgaagatatgatacggaaactgcaaacaactaagtga

SEQ ID NO: 2681 - DNA, 1149 bp, Saccharomyces pastorianus
atgaatcctaaatcgtccactccgaagattcctagacctaagaacgccttcatcctgttcagacagcactaccatagagttctgattgacgaatggactactcaaggcgtggaaataccccataactcgaacatctcgaagatcatcggtaccaaatggaagggtttgcagccccaagagaagtctcactgggagactttggccaagaaggaaaagttagaacacgagagaaaatacccagaatacaagtacaagccaataagaaagtctaagaagagacagctgctgttaaaagagatggagcaacagcagcagcagcagcagcagcaaccacaacagaaaccacaacagaaacagcaaccacaacaacagcagcagcagcagcagcagcagcagcaaccacaaccacaacaacctcttaacagcaataacatcattctcatgaaaaaagcacattctctttccccatcttcttcggtctcgagctcaaacagctaccagtaccagatcaacaacgatttcagaaggctgcccaccccttcaatcaactcccctgctggtaactacatggtttccaggccttcaaccggacttcctccagcaagagacctgccacaaatatcctcacaactgcatcctatgccgtactacccatccacgtacgactctactacgagaaaccacttcctcaacattgctcaagctcaaccaagagccaactcgactcctcaactgcctttgatatcatcaatcatcaacaacaacaacaaccaaacatcagtcactaccaccaccacaaccgcgacatcttcacctggtaagttcacctcctctcctaactcttctgtttccgaaaacaacagacttaacagcattaacaactcgaaccaatacctaccgccacctctgctgccctctttacaggactttcaactagaccagtatcaccaactaaaacaactaggcccaacttatattgtcaagccattatctcataccagaaacaatctactgtccacggccgcccccgcccccgcccaccatcaccatatccctcacattccaaaccaaaacattccgttacatcaaataatgaatgcaactaataatgaagtcactgccaaaactggtttggtttctccaaaatga

SEQ ID NO: 2682 - DNA, 1419 bp, Saccharomyces pastorianus
atgtcaaaactggtcatatcaacatcagtctttcagtcccaagtagcagacttactaccatgcaacaaccaccaaaaatcgcaattgacacattcgctattaaacgcgtatagtcttcttccacactttgatgaagtattaacattcccatacgttaaaaagaatgaactacttgagttccattccaaagcgtatatcaatttattaattaatgagaaactcaatagaatattgcctcaagatatcgacgatcccgtagtggagtctaaatggtgtgagttggttgaattgacaacgaattggaaggaaaaagtcaatcggaacttagtagaagggtttcagaggttcacttcaagagaggatctctatggttattacaagagtcagttaaaagcttttaatgacgacgaagacgacattagttttaatgagatggattcagatgaagaagggagcacaaaagaccattatttcctcgagcttgaaaaaagagagtacaacctggagggtgattgcccaattttctcttaccttcccatgtactgccaggtcataacaggagccactttaaatttgctggatcatctttcgctcacagaacgccttattggtataaattgggatggtggaagacaccatgcctttaaacagaaagcaaacggattttgttatataaatgacgtggtattgctaattcaacggttgaggaaactgaaattgagcaaaatcacatatcttgatttcgatctacatcatggggatggcgtagaaaaggcttttcaatattcaaaacaaatacagacaatttctgtacatctttacgagcctggattttttcctggaactggctctttgaatgattcactaaacggtaagaatactgttaacattccattgaagcatggttgcgatgacagttatttgaacttggtcgcatccaaaatcatacatcctctaatagaaaggcatgatcctaaggtaataataattgaatgtggcggtgatgggcttttaggtgataaattcaatgaatggcaactaacgatacgaggtctttctcagacaatcgtaaatataatgaaatcgtatccgcaagcgcacatgtttctacttggaggaggtggatacaacgatttattaatgagtaggttctacacgtacttgacttggtgcgttaccaaggaattttccattgcaagagaaggtgaggaggacaaaagccaagataatccattcactactcgttatgatgatgattcagaacaattcataagggagcatgaactggttgagatgtacaatgaagagaactatcagtactggatatatgagatggaaggtagttcgcgtatgaaaacgttaagaaatgacaacaaggttgaacatatagttgaactaatggatttttataaattgtga

SEQ ID NO: 2683 - DNA, 882 bp, Saccharomyces pastorianus
atggcacaagaaattacacacccaactattgtagacggctggttcagagaaatctctgataccatgtggccaggtcaagctatgaccttgaaagttgaaaaagtgctacaccatgaaaagtccaagtatcaagacgttttgatcttcaagtccactacttacggtaatgttttagttttagacaatgtcatccaagccaccgagcgtgatgaatttgcctaccaagagatgattgcccatcttgcgttgaactcccatccaaaccctaagaaggttcttgttatcggtggtggtgacggtggtgtcttgagggaagttgtcaagcacgaatctgtcgaggaagcttggttgtgtgacattgacgaggctgttatcagattatcaaaggaatacctaccagaaatggctgcttcttactctcacccaaaagttaagacacacattggagatggtttccaatttttgagggactatcaaaatacttttgatgtaatcatcaccgattcctctgatccagaaggtccagctgaaagtttgttccaaaaggaatacttcgaactattgaacagtgctttgacagaaaagggtgtgattaccactcaagctgagagtatgtggatccacctgccaattattaaggacttgaaaaaagcttgttcagaagttttcccagttgctgaatattctttcgttactattccaacttacccaactggtactattggcttcatggtttgttccaaggacaagacttgcaatgttaagaaaccactacgtgaaatctccgatgagaaggaagaagaactatacagatactataataagagaattcatgaagcttccttcgttctgccaacttgggccggcaaggaattgaattag

SEQ ID NO: 2684 - DNA, 1719 bp, Saccharomyces pastorianus
atggtcgaagcagactcctatatggagactttgaactccatgattgaattatttaaagattataagcctgggtccataaccttggaaaacattacgagactttgtcagaccttgggcctagagtccttcactgaggaattgagcaacgaactttcaaggttatccactgcatccaaaatcattgtgattgacgtagattacaataagaaacaagacagaatacaagacgtcaaattagtgctagcttctaatttcgataacttcgattatttcaacgtaaaagacggcgaacaagaaagaagcaatattcttttaaattccttaaccaagtaccccgatttgaaggctttccataataatttgaaattcttatatcttttagatgcatattcccatatcgaatcagattcaagctctcataataacacttcttctgacaaaagcttagattccagtaacacatctcttaataatcaaggaaagctggacctgtttaaatattttactgaactatcacactacattcgacaatattttcaagacaactctttgaatttcaaagtcagaaccaacttaaatgacaaatttggaatatacatctcaactcaggacgagaataaccaggaggtacctttagttaagatctacctagatgaaaacaaaagcgattcacagtaccgattctatgaatatatatactcacaagagactaaatcctggataaatgaatctgccgagaatttctctaacggcatttctttagtaatggaaataacagcaaacacaaataaagatgattttacagagttcatctggtttcctgaagattttataccatcagaattggttatagataagctttcgaatttgtcgaattttccttcttcaccttcgacgccgcctattattgatttattttctagcaacaactataacagtaagatacatttgatgaatgattttaccacgaaactgatcaatattacaaaattcgacataagcaacgataatctggatctaatatctgaaatattgaagtggatacaatggtcaaggatagttcttcagaaagttttcaaactagtttccacgcccaattcaaatttaaattcgccaaaatttgaaccggaccaaacagcttcattccccaaattaactaaagatataaattccttgacgagtaacgccgacccgacgccaagaactaatcggcatggaagtgtggtagaagcgtccagaaggaggcgttcttcggcgaacaagggcaagcgtcctagcataaccgaggcgatgatgttgaaagaagaaggccttcagcaatttaatttgcacgaaattttatctgagcccgttattgaggaagaaaaagatgaagaagataccaaggagcaacctgtagtggcagatagtacgaatgacctcggatttaatcgcaccatttctaatcaagcaaataccgagactagtattgttatggaaagccaaagtgtaccaccagatgttaataacggcattccgggatacagaattgctggagcagaggatgacatagaaatgaaggacgttagcgataatgccaatgagaatgactcaacagtcttacagttgatcgtaagtgaggaccaggtaattctggacactatttctgaatgtaacctgtacgatgacatagaaagctggagaacctttatcaatcagttccaagatattgttagttga

SEQ ID NO: 2685 - DNA, 1698 bp, Saccharomyces pastorianus
atgtctcagagaaaactacaacaggatattgataagcttttgaagaaagtgaaagaaggtgttgaagatttcgacgacatatatgaaaaatttcaatctacagacccctcaaactcatcgcatagagaaaagctagaatcagacctgaaaagagagataaaaaaactacaaaaacatagggatcaaataaaaacatggctaagcaaagaggacgtaaaggataagcagaacgtgctgatgacaaatagaaggctcatcgaaaatggcatggaaagattcaagtccgtggagaaattgatgaaaacgaaacaattttccaaagaagccttgacgaatccagatataatcaaggatcctaaagaacttaaaaagagagaccaagttgtgttcattcatgagtgtttagacgagctacaaaagcaactagagcagttcgaggctcacgagaatgaggaacagacagaaagacacgaatttcatatcgccaatttagaaaatatcttgaagaaacttcaaaataatgaaatggagccagaacctgtgcaagaattccaagacgatattaaatactatgttgaaaataacgatgatccggatttcatcgagtatgatacaatttacgaagacatgggttgcgaaatccaaccttcattagttaataatagtgaggctcctaaagaagctcccaaagaagcaaacaatcaatcttctgtatccagtattcgttcaacaaaaaaacaagagcgttctcccaagaaaaaagtcccactaaagcagacttccacgctggatacggtggaaaattcatcggcacaagctgctgaatcggtttctcaatcggcgtctccttctcctacgcctgtatcaatcgacacgccattgaatacagtcaaagatgatacaatgaagctggatgattccttccacagtccaccagctaccaatgtatccatgaaaaagaaagaatccgaaaacgattctgaggaacaattgagttttccgcaagatagaacggaagaaatccaaaaaattattcaaaacgatatagaaacgaacccagcctttcaaaatccgttatttagcgacgaattaaaatactggttagactcgaaaaagtacctgatgcaacctcttcaagaaatgtcgccaaaaatggtatcacaactagaatcctctcttttaaattgtcctgattcattagatgctgattcgccatgtctttatacaaaaccgttatctttacctcatccaacgtcaatatttttccccagtgagccaatccgatttgtctatccctatgatgtgcccttaaatttaacaaatagcgaaaacgacacaaccgataagttcgataaggacggtaaaataaaatcgaaaaagcatgacgatatctattctagaacttctttagcaagaatattcatgaaattcgaccttgatactttgtttttcatattctatcattaccaaggttcctatgaacaatttttagccgctagagagctttacaaaaatagaaactggttatttaacagagtcgaccgttgttggtactataaagagatcgaaaaattgccaccaggaatgggcaaatctgaagaagaatcttggagatatttcgattataaaaagagttggttagcgagacgctgcggaaatgattttgtatataatgaagatgattttgaaaagctgtaa

SEQ ID NO: 2686 - DNA, 486 bp, Saccharomyces pastorianus
atgacagttggaaaaccaaaaatttcagttgcgttcatatgtttgggtaacttttgtagatcgccaatggctgaagctattttcaaacatgaagtggaagaagccaatctagaaaatcgttttgataagatcgattccttcggcacttctaattaccacgcaggagaaacccctgatcatcgtacagtatctatttgtaagcaacatggtgttaagatcaaccacaggggtaagcaaataaagaccaaatgtttcgatgaatttgactacataattggtatggatgaatctaacatcagaaatctgaaaaaaatacaaccaaaggattctaaagctaaaatatgtctcttcggtgactggaacactaatgatggtaccgttcaaactattatagaagatccttggtatggggacattcaagatttcgaacacaatttcaaacaaatcacgtatttctcgaaacagtttctggaaaaggagttatag

SEQ ID NO: 2687 - DNA, 2043 bp, Saccharomyces pastorianus
atgactcaattcactgacatcgataaactagctgtctccaccatcagaattttggctgtggacactgtctccaaggccaactctggtcacccaggtgctccattgggtatggctcctgctgcccacgtgttgtggagccaaatgcgcatgaaccccaccaatccagactggatcaacagagacagatttgtcttgtcgaacggtcacgccgttgccctgttgtactccatgctacacttgaccggttacgacttgtccattgaagatttgaagcaattcagacaactgggctctagaactccaggtcatcctgaattcgagttgcctggtgttgaagtcaccaccggcccattgggtcaaggtatctctaacgccgtcggtatggccatggctcaagctaacttggctgctacttacaacaagccagagttcactttgtccgacaactacacctacgctttcctaggtgacggttgtttgcaagaaggtatctcttccgaggcatcttctttggctggtcatttgaaattgggtaacttgattgccctctacgacgacaacaagatcaccatcgatggtgccaccagcatctccttcgacgaagacgtcgcaaagagatacgaagcctacggctgggaagttttgtacgttgaaaacggtaacgaggatctagccggtattgccaaggccattgcccaagctaagctatccaaggaaaagccaactttaatcaagatgaccaccaccatcgggtacggttccttgcacgccggctcccactccgttcacggttctccattgcaaccagatgacgttaaacaactaaagaccaagttcggtttcaacccagacaagtcctttgttgtcccacaagaagtttacgaccactaccaaaagaccatcctaaaaccaggtgtcgaagcaaacaacaaatgggataagctgttcagcgagtaccaaaagaaatacccagaattaggtgccgaattggccagaagattgagcggtcaactacctgccaaccgggaatctaaactaccaacctacaccaccaaggactccgctgtcgccaccagaaaactgtcggaaattgttcttgaagacgtttacaacaatttgccagaattgatcggtggttctgccgatttgacaccttctaacttgaccagatggaaggaagcgctagatttccagccaccttcttccggtctaggtgactactccggtagatacatcagatacggtatcagagaacacgctatgggtgccatcatgaatggtatctccgccttcggtgccaactacaagccatacggtggtactttcttgaactttgtttcctacgccgccggtgccgttagactgtctgccctatccggtcacccagtcatctgggtcgctacacatgactccattggtgtcggtgaagatggtccaacacatcaacctatcgaaactttggcacacttcagatcccttccaaacattcaagtttggagaccagctgatggtaacgaagtttccgccgcctacaagaactctttagaatctaagcacactccaagtatcattgctttgtccagacaaaacttaccacaattggaaggtagttccatcgaaaaggccgccaagggtggttacgtactacaagatgtcgctaacccagatattattttggtcgccaccggttccgaagtctcattgagtgttgaagctgccaaaactttggccgctagtaacgtcaaggcccgtgttgtctctctaccagacttcttcactttcgacaaacaatctctagaatacagactatccgtcttgccagacaacgttccaatcatgtccgttgaagtcctagctaccacatgttggggcaaatacgctcaccaatctttcggtattgatagattcggtgcttccggtaaggcaccagaggtcttcaagtacttcggtttcaccccagaaggtgttgctgaaagagctcaaaagactgttgcattctataagggtgacaagctcgtttctcctttgaagaaagctttctaa

SEQ ID NO: 2688 - DNA, 1377 bp, Saccharomyces pastorianus
atgggtaaagagaagtctcatattaacgttgtcgttatcggtcatgtcgattctggtaagtctaccactaccggtcatttgatttacaagtgtggtggtattgacaagagaaccatcgaaaagtttgaaaaggaagccgccgaattaggtaagggttctttcaagtacgcttgggttttggacaagttaaaggctgaaagagaaagaggtatcaccattgatatcgctttgtggaagttcgaaactccaaagtaccaagttaccgttattgatgctccaggtcacagagatttcatcaagaacatgattactggtacttctcaagctgattgtgctatcttgattattgctggtggtgtcggtgaattcgaagccggtatttctaaggatggtcaaaccagagaacacgctttgttggctttcaccctaggtgttagacaactgattgtcgctgtcaacaagatggactccgtcaactgggacgaatccagattccaagaaattatcaaggaaaccgctaacttcatcaagaaggttggttacaacccaaagactgttccattcgtcccaatctctggttggaacggtgacaacatgattgaagtcaccactaacgcttcttggtacaagggttgggaaaaggaaaccaaggccggtgtcgtcaagggtaagactttgttggaagccattgatgccattgaaatgccatccagaccaactgacaagccattgagattgccattgcaagatgtttacaagatcggtggtatcggaactgtgccagtcggtagagttgaaaccggtgttatcaagccaggtatggttgttactttcgccccagccggtgttaccactgaagtcaagtccgttgaaatgcatcacgaacaattggaacaaggtgttccaggtgacaacgttggtttcaacgtcaagaatgtttccgtcaaggaaatcagaagaggtaacgtctgtggtgactctaagaacgatccaccaaaggctgctgcttctttcaacgctaccgtcattgttttgaaccatccaggtcaaatctcttccggttactctccagttttggattgtcacactgcccacattgcttgtaaattcgatgaattgttggaaaagaacgacagaagatctggtaagaagttggaagaccatccaaaattcttgaagtccggtgacgctgctttggttaaattcattccatctaagccaatgtgtgttgaagctttcagtgaatacccaccattaggtagattcgctgtcagagacatgagacaaaccgtcgctgtcggtgttatcaagtctgttgacaagaccgaaaaggccgctaaggttaccaaggctgcccaaaaggctgttaagaaataa

SEQ ID NO: 2689 - DNA, 432 bp, Saccharomyces pastorianus
atggcttctgtgttactgccccaattgcgtacaggatggcacgtagaccaggctattgtcacggagaatgaacggctcgtggtcatccgttttggtaggaaagatgatagacagtgcatgatcatggacgaactattatcttcgatcgctgaaagagtgaggaacttcgcagccatctacttatgtgacattgacaaagtcccggactttaatgagatgtacgatctcacagaccccatgactgtaatgtttttttaccagaacaagcatatgatgtgcgattttggtacggggaacaacaataagttgaactttacggtggatgacaaacaagaaatgatcgacattctagaaactatatttagaggagccaggaagaacaaaggactggttatctctccgtttgattacaatcacaagcgtgtttcatga

SEQ ID NO: 2690 - DNA, 1740 bp, Saccharomyces pastorianus
atgaatggaaaccgcatagtggagccagactatgacctgaagggactcaattcgggaaattcaagatcaaaaatggacgaagatcccattattagcaaatttcatagggctggtctcaatggtacagaggacgatgaagacagtagagccaatagcaaccgtaatactggctggatctcttcgatgataaacgacgaaaaacgaaaggtggaagggaaaataaagctgaatgacgaggaggatttacatttatccaaggccaccttgaataattgtgacgctttagtgaagattctaacggacataattaagctagagtttgttatccatcaatcatggtacattaggtccctttataagagtgttttgattcaatttgaagtcgaaacgaccaggagtaataaagaaagcgctgacaatagcgatgatgatagcgataaaaataacggtaacgaggacgatagtttttacaaggatttgagcctgaaatgcatcaaaaagtgtgaaaaatcgtcccttgcgcttgagtcgttatctaaagacattgacaagatgagagatttcataatgtctaggacgatagagaataatagagttgacatactattgcagaactcgatgacattattactagagtgttggatatacaccatgaagaggctgcgccatttgagaatgaaaatcgcaggcatttttgttagatccaagcttttgcttattgatcatgagctggtgaccatatggcattttctacaggaacaaagcaacgaacacgaaatggtaaataatgagaatgaactgaaactaagagaaacgataaaatcgtacagagcgttcattaagatatttattcagcagctagaagattctgaagtgggatctccgtcttcctccttatttgaagagtgtttacacgtcttcctggatatagaatcgatgtacaattcattaaacctgaattggttattgaatgagaataaggcattacaagaacgactgctgtcatcgtccccttcaccggaaaacggtcgtttcaagggtcttcccgttatcgatgaaagaaaggaaattgaagatattagctcatttgtcaatagtattgtcgatgcatccatgttaacgcatgatctgacaccaattaattcatcggacagtgatgacctatctaacggagtactcgatcgtctggatgaaagaagactatcttcgtctacctcagatatgtcattgatgatgcaaagaacatcactacagaaacaacttcccaccttattgaccgcttttagtaatgctagaaggctggaacaagaattgcaaaatgcatgcaagatggaagatgataagcatagcgctagcgatattaattccaacatacgacaaaacgaaagtggtatgtcttcgagtatctcctcactcatctctcaaacctcaacattggcatccccgtctcctccattgtcgtcatcctttctatccacagcaccttcgcaatcaagtccgcgcatggccacactaccattttcatcctcttcttccctactggaaacacaatcacaaacactaaaaaacaacatgtctcaatggctaaaccaaccgcgatctggcctcaatggcgcaaaacctatcccgacaaaccatatcggattccacagtaatgtcttaaatacgctttacggcatcggcggcggccccacaacaagagcttataagtctaatcaatctccatcacaaaacacatga

SEQ ID NO: 2691 - DNA, 1368 bp, Saccharomyces pastorianus
atgtcagaaaagatatctgaagaaagaccgatacggctggccgttctggggggaacatctaccggtaagacatcgctgatatctaggctgacagtcaatatagttcatgaggttcactacccaacaagaaaccaaactaactggctttttgactttgttcctacatcgatcttggctagaactatattagacgaacaagctcatgaaagactttcccttcgctccccaagcagccaaactctagagcctattttcccatccccagaagtctctagaaatgtattactgtcaccattagtatttcaagcatccaccgataattttcaagcagtgagattacagaataaaagccattctaagaggtctttgtcattagataagtccgattcgccgttctaccagactttttctaatgaaaatcaagaaacagatgtcctcaagaataacaaaacagataagtttaatattgctaaccattttaaattgcctctgaattacattcctcctgaatacacacctatccaaattgatattattgatacacctggtttcagtcctgatagcgtagtgccattcttggaagtatcacttttcagggatctaggaagatccattttgcatgggttagcagacgagccaagacagcctgtatccaccacttcattgttggttgcctctggtgcttctgagttaaatggtaaaattgacggctatgtttttatctatagtgcggtccctgaactaaaccatgctggaggccccccagaatatggagatgatgtactgagaacagatgcggagagagttgatgatggtggatttgagttattaaaagtaatcagaaattgcattttggatgcttggactgaattccgaaattatgagaaaagatgggaagaaggcaaagaagacgacatatattcattggtttacagtttgaaacatctttggagcaaaaataacaaagaaaagaccgccaagatagagcaattaagatcttataatactaaactgaaatccattgaactagacccttcgtctcctgattcaccgccaccatgtataattgtttgctctcatgttaatcatgagttggcgagtccaatgctaattgagatggggagacagctggcaccgaaatggaagtatgggtttgtgggtatagatagcatggatgatctcaatgttgatgtggccattagtctgctcatcaaggaactatcggaaaagatgaaactactaatcgcaaaccctgctggaagtggcagctgtttaaattcaacctacaaccctcatttgataaacgacaagaagaaaaacagcacatctggtttaaactcaagtatgtttaaaaaagttattaaatga

SEQ ID NO: 2692 - DNA, 1038 bp, Saccharomyces pastorianus
atgatgtctagggagagtgtagatagaagagcaggaagaaggggtcctaatcttaatatcgtcttaacgtgcccggaatgtaaggtctatccaccaaagatcgtagaaagatttagtgagggggatgtcgtatgtgctctttgcggccttgtactatctgataagctggtggacaccagatctgagtggagaacgttttccaacgatgaccataacggtgatgacccaagtcgtgttggtgaagcatcaaatccattattagatgggaataatctatcgacaaggatcggtaagggtgaaaccacagatatgagatttaccaaggaactgaataaggcgcaggggaaaaacgtcatggataaaaaggataacgaagtacaggccgcgtttgccaagatcaccatgctgtgtgatgctgctgaattacccaagattgtaaaggattgtgccaaagaagcctataagctttgtcatgatgaaaagctattgaaggggaaatcgatggagagtgttatggctgcgtccatattgattggttgcagacgtgctaaagtggcaagaacttttaaagaaattcaatcattgatccatgtcaagaccaaagaatttgggaagacattacaaatagtgaaaaacattttaagaggcaagagtgaggacggtttcttaaagatcgataccgacaatatgagtggtgcgcaaaatcttacttacatccctagattttgttcccatttgggtttaccaatgcaagtcaccacctctgctgaatacactgcaaagaaatgtaaagaaatcaaagaaattgcaggtaaatctcccattactattgctgttgtctccatttatttaaacgtcctgctatttaggatccctatcactgcagcaaaagttggccagaccttgcaggttactgaaggtaccattaaatccggttataaaatactgtacgaacacagggacaaacttgtggacccacaacttatcgccaacggtgttgtgtccttggacagcttgccgggagtagaaaagaaatga

SEQ ID NO: 2693 - DNA, 1620 bp, Saccharomyces pastorianus
atggttttggctgatttggggaagcggattaactctgctgtgaacagtgcgatctccaacacacaggatgatttttccacatccgtggatgttatgttaaagggcatcgtgactgcgctgctggagtcggatgtcaacattgctctggtttccaagttacgaaataatataaggtcccagctgctgagtgagaaccgtaacgagaaggccacaacaaatgcacaaacgaagaagctgattcagaaaactgtgtttgatgaactgtgtaagctggtcacttgtgagggtagtgaagagaaggcctttgtgcccaaaaagagaaaaacgaacatcattatgtttgtcgggctgcaaggttctggtaagactacctcttgtaccaagctagcggtctattactcgaagagaggtttcaaggttggtttagtgtgtgcggatactttccgtgctggtgcgtttgatcaattgaagcaaaatgctataaaagcaagaattccattttatgggtcatataccgaaacagatcctgccaaagttgcggaagaaggtattaacaagttcaagaaggaaaaatttgacataatcatagttgatacttctggtagacatcgtcaagaggaagaattatttcaagaaatgattgaaatatccaatgttatcaagcccaaccaaaccatcatggttttggatgcatccatcggtcaagccgcagagcagcaatccaaggctttcaaagactcatctgactttggtgctattatattaaccaagatggatggtgatgctagaggtggtggtgccatttctgccgtagcagccactaacactccgattatctttatcggtacgggtgagcatatccacgacttggaaaaattctcacccaaatcattcatatccaaattactaggtatcggtgatattgaaagtcttttcgagcaattgcaaaccgtttccaataaggaggatgcaaaggctactatggaaaacattcaaaagggtaagttcacattgttagattttaagaagcaaatgcagaccataatgaaaatgggtccattatcaaacatagcacaaatgattccaggaatgagtaatatgatgaaccaggtaggagaagaagaaacctcccaaaagatgaaaaaaatggtttacgttttggattccatgacgagggaagaactagagtccgacggtagaatgtttatcgaagagcctaccagaatggttcgtgtggccaaaggttcaggtacatccgtatttgaagtggaaatgatattaatgcaacagcaaatgatggcgagaatggcacaaactgcaacacaacaacaaccgggtgcacccggagccaatgccaggatgcctggaatgccaaatatgccaggtatgccaggtatgcccaatatgccaggtatgccaaaagtatcgccacaaatgatgcaacaagcacaacaaaaactgaaacaaaatcccggtctaatgcaaaacatgatgaatatgcttggaggtagcggaatgggcggtggaatgggtggaggaatgcctgatatgaatgaaatgatgaaaatgatgcaagatcctcaaatgcgacaaatggcaaagcaattcggtatgggttaa

SEQ ID NO: 2694 - DNA, 3687 bp, Saccharomyces pastorianus
atgagtcaatctatttcatcactgatcaaacttaagttccttcaatcacataacagtgataagaatagcgacagaaaagataggaccaacggtccaaggaacaaagacaaaaacagagaagatgaaggctataggagacctttcattcaattggcagaaatacaggagcatgcatcgaatgatgaagataaagcaaaccttagggaattcaagcctaccaaaaaacacagcaaactaagcagaatacgacataagatgagtaggctagatttgaattttaggtcaactagtgagagaggctccgaagaggatgagaatgcggatgctcaacacaatagcaaaggacaagattccaaggaaaagcatctcatatccgaatatgatacaaattcaatagagagagagcccaatcttaaccccgagaaaacgtcaattgtcaattttgggtctgataacatgaggaagaattcaaaacatatttctctttcgcttagtcctaccaaatccaccacggaaaaatttcctacctctaatagatcttctaaggaatatagaatgtcacaggactgctccttgtttaatggtgaaagattagctccgacgctccctacgatgagtagaatatctacaacttcttctattggttcgtctacagcggcttcaaggtacttcaacccatcaaaaagaaatgttgtagcatcatcatcgtcttcatcgtcagtgaagttcaatcctttacaccctataccaattgacacaacgcctcaaatagagttggccaaacaacaagacgaattatttaagaagagatttggaagaaggcgtagtaggaccgttgatgtatttgactatataaagaagaataacgcagctagaaacaagaccccattatctccaccaccttttattaggaccatcgatgagacgaatgcgagtattatgagaccggaaattattaggtctcacagtcctcttttgtccgatgataataacatttcaagctgtagtacaaacgagatagacacgagtcatttagatcatcaaaaaccatcaagatctagatcccagagtacatcttttgtacaaaataagagcggaaagagcaagtccaccgataacgaaaactataacggaaaattaggcttgcctcatgggtcgggtcctgcttcggtctacaataatacaagcaatgctaactcgactattatagggacgtcgagaagaagtagttcgatagtcaatgctttgagcagttttgttaatcttcgctcccccagtttatcatcatctaaacaacagcatcttcaacaacaacatcaactccaacaaaaattggacatctcgttgaatgatctaccaccgattccaacaccggaattcggtgattcatgcaaagattttttaattaaattggcgccatatgggaagttcattggggtcattctaactgagaaggaagatgatttcaacaaaaattgcttaagttatttattaacgaaccatttcgaatttaaaaacgatcccttggacattgccctccgaaaacttttaatgtttttagagcttccaaaggagtcccaacaaattgatagattgataatggaattcagtacagcatattataaatcacagaaaagtttctgtaagaagacgggaattgaatgcacctggttaaactcggatcaagtttatttcataacgttttccttattaatgctgcatacggattattttaatcctaacaacaaatgtaagatgacgaagcacgattttgtggatttggttcataatgataaatattcaaatggtagcgaggttcctattgatatactgtcatacttctatgaaaatgtcacagcaaaagagtcccctaagttcaattatttcgtgatgtcaccaatggccttggacgatagtgtctttgataaagatacatttgatacaaattttgctatttcactttcatccaactccatgtattctcctatagatatgataaaaaagggtagcatattatctaaggaatcctctatttcaccgaactattacccgttaacaacttcaaccagtggttcaaatatactcccatcgacaacagtttcttcaggtccatccaatacttctgccggtaacgggactaacctcggagtcaacaataataataatactagaccggcttcaaactcaatatcatcttatttttcacataacccaagttccggctctagcggatatgctacattatgtcaagatgatataaacatttattcgcatattttaaatgattcgttatgtgacgtaaatttgttttcagaggtttcgaaatactggaaaaaaaattccatgaaaatggatatgttaggaaaagaggaacatagatacgagaagtgtttcagtattatgagtggtaccaagggtggatacctacgtttccacagaagccaattaaataagttgcatttaccaaattttgaaatattaaatgatgatagccaagctggtttcaagaattcggaatataaatatagcaaaatccttcaaatgggagggataatgaacttgggtatgcccactaaaaagttttctattgtaaattcaggtaaaatacactggaaaaaggaatttgccatattaacgtcatttgggcttttgatctgcgataaaatggattggataaacccgcaaatgatgaacgatccaaaatcaggaacatcgaattatataattgatttcaaatccggcttttcctttgttccaggaaatatgatagatgtttttaacggattgtttgctgatagtgaacgagattcattggggaagtcgcattttgcaagtttgattcttgcgtattcagatcattattcggcaggaaatcataccaataatgtcacggcatcaagttgtaatatcaaacatggtgaaagaaattctgactcatcttcagatgatgaagaaaacgacagcgggcatatagatagcagcagcagtaggagtgacaacgaaagtggaactgatagtgtttccagtgcagacgccgcatcaaatgcaaatgtggacgaatataaagagggtggctctggcgaggatgacttttcgattcttcaggatgaagatggcgattgcctattatatctacacacatgtcatcgaaatttcatctggaaatgtgccaacaagtatgaaagagacaactggattgattccattaatttgttttcagcctacgacggatgctacgtggaaattggtagtatagcaaacacaatttgtaacaagcggaaaatcactgtttcacaacgattagaaagcctaaactcaatgagatcagaaaaacgggagaaactgaaaaaatgtgaacgaatcttgatgttattggggaaatgtgtacctattagtacgaagaccaggatggatatgatcaatgttataaggcagctggctgtcagaatggattggttagtttacgaaatcaaaagaaatgaattgtttataggtgtcataaagtatgtgacgtataaattgcaggtggggaaagatgaattgcataatggtaaaggggataagaaagaccagcatgggggtcatgataacgatgatattgatatcgacaaaagctttctgttcaacgaagatagtctacaagaatgtctggatgacagcggtggtgatgagtacaataacgagtaa

SEQ ID NO: 2695 - DNA, 3210 bp, Saccharomyces pastorianus
atggccggtcaagacgaacaggttttgaacccaactgaagaacactacttaaaaagagagctgcttcgatttcaactggaatatgaaatggaagggctaaatgatcagtttgccttgagaaagtttgggtatcctttttcgccaaacgatccaaaagcttcagagtccgttttcgatcacaattcatcatcacttcccagtggcaaaggcagttttagcgcaaattatcccatgttgagttatgttctacaagaattcatatctacttttcctttactttcaaccaatctatccgttgacgaaaagttttggcaaagcaaagtccaagtattttttgagcattttatgagtcttggttttagtgaaagttatgacagagaagaagcttcaaaaaggagaaaaatttccaaaaagttatcaaaggttatattgttgcttttcaattctggggtaggatcctctcaagagaaggcatattataatgaggacaagtttgttttacaatcgggccaagctaggaaaaggtccaatattgaaaaattcgcgatgccaactagagaaaatttggagaatttgttaactaacgaatctatttttatcaatggttgggatatcaatatcatatccgtgttcaacaagaatacgcggaaatctcatgataaggcagataatgagaggcctcccaaaaataaaccgatttcaacttctaagagctatggcatgaagtcgctggcatccacttccaaatggatgaagaacacgttcaacagcactatcaacagtacgataaacagtatgccagaatcttccgcatctttattttctaaattatctcttggcgtgccttcatccaaaggcaatagatctagaaagcatcattcttttttgataaaaattaaaaagcaagaaaacgatgatggcaacagcacagtaaacaacgaaaatggaaccttttctgaatatggctatatttctaaaacctacagtgatttcaaaaaattatctcatgatttgaagtctgaatttccaggtaagaaatgtcctcgcttacctcataaaaacaagaaagtcacatcgatggtgactaaaactgaagtgctgcgtaatagccgatctaaggccacaacgcgagaaaggattgttaatacctacgacaccgatattcaatccgcatcggattcggaaacgtcctcgttcttacaaacaactactgaaccatctgttaccgaagcaactcttactgaaaaggatactgaaactttgaagaaaaatatcttaaaagaaattaaagaagaagaaaacgctgaggaagaagacgaagacgaagaaggtgaggaaagtgattttgacgaatacaaagatgcgtcggattcgaaagtcaatactttggttggcgaaaaaatgagaacttcattaaggcaatacctgagaaatttgtgtaaagacttggaagtttctcaaagtgtctctcttcatcggttcttcttgagcggacccaaactagatgcgaaaaatttagaaccaaaaatagttgaggatatcaaaaacagagctctaattgatgttagtaatttggaaaatcaagtacgttttcaacaaatggcattggagaaatctttaaaattacaagattcaatgaaagatttcaaaacctccctattaaaagatgagaaatacttattaagtctattaggagaaatcaagaataatacgaaagttgagaatctctcaccacttttacaggactttgttgaatggtgtaaaatttatatttcctcgatgatctatcagatgtttctgggcaatgataacagttatgagctgtatactcaaatcaggcggttacataagctcatgccgtacacggtaatgggacaaatcatgaaattcactaatccaattgccgtcatgaggggaatgattgagttattcatggctcaaccctttggtggtcattcccttctacaaacgatgttctctacaattttaacagatgatttgaaaactcaaaaagtagctataaaagaattagaaaataaaatttctgagatggacccaggagcgccaaatgtggttaagtgtttgaaagattttattttttgtaatgataccaaggataaagacgacgccagacactttactatggatgcagtcaacgcggaggcagaatccatgaacatgcctgtaccattgatcatattgatgaagagtgcatccgcaaacttaatttcagatggcgttgtcgcaggactgattgaatcctattcttcgtggaaactacaaagagaagatatgggcacggtagttgagactgacgaagatcacacaggtgtctattttgctcatgttaaggatttattgcaattatatataaaagagcatgacaagcgattgatgaggcaattatggcaagatcctgaattaactcaaatgctgaaggcgatagtaacaatgatttatgagccaatggtcaagattttcaaaatcgcaagaatggatgttgcattaaagaattttgaaaaatttatgagtgatttgatcaagctagttgatgatgttatcaatggacaattgggcgtttctactcaattcaatatcgttgaaggaatccataacttagtgactaaacatcaagacgccttttttgagtttatacacgatgtgtatttaaacgattcggaaggtatttttgaaggttttattacctggattactacgatcgtgaaatttttgcaaaagagcaaatttgggcagcctggtgaaagaatcgatctgaacaatttgatttctagagatgacatcgatatcgatgttaaactactgaagattcaagtcaatgatgttcttaacaagaaaataaatgcaagaaaaatgtacaagaaactgctagatttaaaagttaaacaaggggccaagcagaataataagcatgcaacaagtatgctccaaaaaaattgggacgatattaactcattagtaatgccatcaagttctggatcatttggactcggggatggtgatttggttgacttggatcttgacacacacgattatgattttctgcataaagagaatgaaattgaactggagaaagaatatcaggatttgttgaatcatgttattgatgaaagtgaaattgataaattgagatcacaagttttcgcacaaaaattgaaggagtatctagaagcacaagtagctaaaaagtaa

SEQ ID NO: 2696 - DNA, 327 bp, Saccharomyces pastorianus
atgcaagctgcctcacctgtcatcctggctctcaccgctccgattgctctaactgctgcgccattaacctctttggtggtggcttctgttagtggattaactaatctattctggctattaccctggacccatagagtcaaggaacttagaaaagatgtcgctaaaaaatacagtggcgatgaattggaagcaaaggactctgtactacgcaaagaattcggcaaatctcacgggttgagtcttttatttaaccttttaaacgtgtgcggcatgcttgcatacggtgtctgtttgtcaagggggttattaagaaaaattccaaaatag

SEQ ID NO: 2697 - DNA, 423 bp, Saccharomyces pastorianus
atggttgttaaagctattgctcgaaattccataggacgtaacggggtgggagcatttgtgtttccatgcaaaaaggttactttgcagtactgcaactggggaggatcttcagaaggcatgaggaagtttttgacttcaaagaggctagacaaatggggccaggaatttccatggatacagtttgaagtgttgagaaagtctggacacccgctactgagggcggagtatacgaatggacgtgaaaaagttgtatgtgtgaggaacttgaacattgataatctagaaaacaagctaaaactattgaaagattccagtggagacattctgcgtagaagaacaaagaatgataacgtggaaagtttgaatagtagtgtaagaggtatatggtcccctctacatgctgcacagaagcatagggtttag

SEQ ID NO: 2698 - DNA, 525 bp, Saccharomyces pastorianus
atgtctgctaaagctcaaaacactatgcgtgacttgaagatcgagaaattggtcttgaacatttccgtcggtgaatctggtgacagattgaccagagcctccaaggttctagagcaattgtctggtcaaaccccagttcaatccaaggctagatacaccgttagaactttcggtatcagaagaaacgaaaagatcgccgttcacgtcaccgttagaggtccaaaggctgaagaaatcttggaaagaggtttgaaggtcaaggaataccaattgagagacagaaacttctctgctactggtaacttcggtttcggtattgacgaacatatcgatttgggtattaagtacgatccatccattggtattttcggtatggacttctatgttgtcatcaacagaccaggtgccagagtcgccagaagaaagagatgtaagggtaccgttggtaactctcaccaaaccactaaggaagacactgtctcttggttcaagcaaaagtacgatgctgatgttttggacaaataa

SEQ ID NO: 2699 - DNA, 864 bp, Saccharomyces pastorianus
atgcaagctattgccgatagttttagcacaccaaacactttggtaaaggaacttcagtacgacgatgaacagaatttagaaaacgatttcgtaacaggtgcatccaaatttcaacatttggcgccaacactcacggttccaccaattgcgtctccacaacagtttttgagggcacatacggacgattcgcgaaacccagactgtaagatcaagatcgctcatggtaccactactctagcattcagatttcaagccggtattgttgtggcagtagattctcgtgctaccgctgggaattgggttgcttcccaaacagtgaagaaggttattgagattaacccattcctattgggtacaatggctggtggtgcggcagactgtcaattttgggaaacttggttaggttctcaatgtaggctacacgaattaagagaaaaagaacgtatatccgttgctgctgcatccaagattttaagcaatttagtataccaatataaaggcgctggtttatccatgggtacgatggtttgcggttacactaagaaggaaggtccaaccatttattatgtcgattcagacggtacgagattaaaaggtgacatattctgtgtcggttcaggtcagacattcgcatatggtgtcctggactccaactacaaatgggatctatccgttgaggatgctttatatttaggtaagagatcgattttagctgctgctcatagagatgccttttctggtggttccataaatttataccacgttaccgaagatggttggatatatcacggtaatcacgatattggtgaagtattttgggaaatcaaagaaaaggaagggtctttcaataatgtcattggctaa

SEQ ID NO: 2700 - DNA, 2604 bp, Saccharomyces pastorianus
atgaaagaacaggtatcgagcacgtcatgggagggctcggtcattgaaggccgattgtctcggaatctagcgagatatactttgttgttagacaaaatagcgacattgtctcaagtcgacaaactatctgaggttatagctaatgactatgcagaacagtccaaacaattgagtacattcgtgcaagagtcgcagtcatcgcttaacaaacaatccaggaaactggaattacaaagaactgatcttacgactactttgactcactttcatgaaacagtgagcactatatcttcctcgaatacaagagcaaaggccatccacgatgatatcgagacagtggatcaagagcgtgcgctagtcgacaaaacactgcagtttgtgagagacgttagaacgctgaaaaataatatttcattggcacattcagctttggaaactaaagattatctagtcgctgcgacagcaatcaatgaaattagaaacttgccagacaaaaaattgattgtttctgagtttgccaagaaagtggtaccttcgagtgaaatccctgaagaaccgtctatactaataaaaaactggtgcaaagaattaacaggtttgttccaggagcacttcatgaaagcaacaagaacccagaatattaaagaattaacattgatgttcaagatgttccccatgattgggcaagacgtgctagggttagacttgtattccaagtacgtttgtgatattattgctgatgaaagtaggaaaattatgtctaattcaatggaaaacagtaccaagtttcagggatttttttcccaagtactattgcatcttttcaaaattgtatctactatcataaacgaccactcgaaagttattgccacatgttacggaaaacagcacatggtgcacgttatggaaaaagtagaaaaggaagctgatctccaggccagtttagttcttgacattttcatcgaaacacgaaaactagatagaactataagcgatatcaatgaatgggaacgtttacaaaagaataacgatcggaacaaaggtagtaatcagtcagattctgaaacagatgaggaggctcagcaaggctcagtcacatccatccatgacctggcggttttgatcgtagaattctcccagatattacaaaactggtccatgtatgctcgattctattcagttaaatggaatgaatttactgacttgcatccggatatcttgcaaccgcctccgcctatagctgacggtaaatttgcattgaaattgaaacaagatggaatcttggacgatttccaggttcttgtgttgagtcatcttcacaggtcattcaaaaacagtatcccattagaagaattaccttcactaaatgaccttattaccacagttccactcagtgacaacgatagaaactcatatcctgtgacatctgttttggatgatctaatattattagttcggaaaaacctgatatcagcggttaatactggtcaatttgaacttttatcaagttttctaaatgaagtagtcaagttctttcaaaatgaatttctggtcagattcatgcaaaataagttcaagtcgttacagtcaaaactaacaccaaacatatctttgaaaagatacatcccaaaaggagaagagcaatcttcagcatctaatgcatacgcatcatccagatcagtgtctccacctgcgaataaattctccccattaagcagattcacttttagaggtgcagctgcaagtgcattaacaaacatccaatcaaatttacaagctgttgtcgctgacgatgaggattccatcctggcactacatcactatttgatttatttgaacacgctgtatttgaacaagatgtatgtccacagactcttgtccatagaaatattagaagacgattcacaaaaaatcttaaaggacaacttccccttcaacaacgatgcagcgcagctacaaacgctgatagtaaattcagaaaaattagtgttggaacaaactgacaagctcagcaaatgggccgtcaaatacctgtttcaaaatattctacaaaacaaggtccgaaatttattagccgcagtttttgttaacattaatccatccaattcttcgacatcgaaccaaaaaaatatgtctcgtgataactctgcaggcgtaaaccaaaaaaattacatcacaagcatagaagatttcgaagatctgtcacaaataaacagctttaataacaaatggaaccaattaattactccttacagaaacattcttcacaaggaagcatatgtggagttattgtctaatatagttggttacattgttggaacactggaacaaaggatatggactctagagttcaatgaacttggcgttacaaaactagatagagaactaagcctgtttattggtaatatctgtggtctccactacaatctaagagaaatgtttttgaaattgacgcagattgtgttacttctcggcttagatgatgatagttttgatttgactacaggtgacatcaaggatgatttcgatggtacttttgattgggtgataacttcccagaaaagaatcaaagctaggagcatgaagattgatagaagacagtag

SEQ ID NO: 2701 - DNA, 1323 bp, Saccharomyces pastorianus
atgaacagcacaccccccacgcctccctttactggcccctccgatggcgtctttccgtctacaagtaagaacattgcttatcatcaaccgcaaaaacgtaatgctacctctacgtactcgcacctggtctcaccagtagaggaatcaactgcgaaatttagcgaagctttccaaatcacttattctgataaagattcagaagcggcctcagaaacgtaccttaagagcgatttggatatgttatttgcaacccctcggttctattccacagaaaatttagctgaaatgttccatctctctaagactgttccttcctcagaatttctaaacgaatttttgatgagtatgctactcgccccacagatggattttttatcgaacccagattatattcttccgtccaataaactggtcggccagggtagttactcgtatgtgtacacaatatcatcaaccatatcgtcggcgtcgagcaaggatctgccctttgttttaaagttcgccaaatcacaacacaagagcaaactggttttgcaggaagctctgacacttgcgtatcttcaatatgtgagtccgtcaactagtgacagccatatcattcctttttatggactgacgtacattaacaagtcacattttagaaggttgagatctaatgagcgtgtcccaggtattattcttccgaaatgcgaaatgaacttgtatgatttcaattcaacggtgtcagacaaactatctcccataggaaagaaagaaatatggcagaagttgctgatacagatggtgaatgcattaagaactttgaaaaggaacggtataatacatggcgacataaaaacagcaaatattcttttaacaacaaaaccaacccttaatgaaggttactccaacaattttgacttttatttggcagatttcacttcagcattccacatcaaccagctgcctactgacctgaacactacagtagagtactgtgctccagagcttattgatagctctttcgaccacgtttcaacttttgagacggacttgtatgctgtgggactttgtcttctgtcattcatctcccaacatgaaccctataacgaaattcaatcattagtgtcgcacggatcctcccctggtattggcagctcatccatacagcagtcccaatggttaataaatgcccttttgaaaagagatcccataaatttaaatgtgttgagaaacgacttgtttcaagactggagattggagttagcactcctgtccaaaattttggttgagagaatttcattggagaatctcataactatacttgaaaaggactatgtatga

SEQ ID NO: 2702 - DNA, 1290 bp, Saccharomyces pastorianus
atggtagatatggaagagaaaaaccaggaagttgaatatgtcgacccatccgtaaatagagtgcccaattatgaggtttccgagaaagcttttcttttaacacaaccaagggtgagtgtcgaacaacgtaaagaagcagcggattttgttttggcaaagatcaaagaagaggaaatggccccttattataaatacctttgtgaggaataccttgccaagagtggagaatcggatttggaacatgatggaaagtcaggatctcccaaagaatggatccaatttgaccaaaagctatacgatgatttgtgtgcaaagaatgaaaacaaaatcaatgaattgcacgagaagatccagaaattggaagaggacgatgaaggtgcattggagcaagcgcaagcatggatcaacttaggagaatactatgcacaaattggtgacaaaaacaatgctgaaaagactttagagaaatctctgtcaaaagctatttctactggagctaagattgacgtcatgttaacaattgctagattagggttcttttataatgatcagctttatgtcaaagagaagctggaagcagtaaactcgatgatcgaaaagggtggtgattgggagagaagaaacagatataaaacgtattacggtattcactgtttggctgtaagaaactttaaggaggcagcaaagttattagtcgattctttagccacttttacatccatagaattaacatcctatgagagcattgctacgtatgcgtccgtcactggtttgtttacccttgaaaggacagacctaaaatctaaagtaattgattctccagaactattatctttagtgtctacaactgctgctcttcaatctatctcgtcattaacaatctcactttatgcttccgattatgcgagctacttcccatatcttttggagacttacgcgaatgttttgatcccatgtaaatacttgaataagcatgctgacttctttgtcagagaaatgagaagaaaagtttatgcacagttattggattcatacaagacattatcattaaaatccatggcaagtgcatttggtgtttctgttggatttttggacaacgatctcggtaagttcattcccaacaagcaactaaattgcgttattgatagagttaacggaattgtagagactaacagacccgataacaaaaatgctcaatatcatctgctaataaaacaaggtgacggtctattgacaaaattacaaaaatatggtgcagctgtaagattaacaggatcggatcgtgtttga

SEQ ID NO: 2703 - DNA, 1695 bp, Saccharomyces pastorianus
atgtttcctcaaagtgatcaagaagtggacgatttgactgggaatatgagccatttggggtttcatgatttaaatacccccaagcttacttccctaaatatgcattatggatccgctaaaaactgtgaaaatgaaaaaccttctcccaaggccctaatggcacacaaatcaggtgatccgaatggtaaagatgccttgaaaggccgcatctctttgaaccaatcgccgaagaagctacctaaggatttttacgaacgtgcttctaagagtcagacccagagggtcattactgtatgccagctgtatttccttgattattattgtgatatgtttgattacgtcatcagtagaagacagcgtacgaaacaagtgctaaaatatctcgagcagcagagaaacataaaaaatgtgccaagtaagaccttaaatgaagaatggacatcatacttgcaaaaagaacatgaagtactgagaaaaaggagactgaagcctaagcacaaagactttcagatactaacacaagttgggcagggcgggtatggtcaagtgtatcttgcaaagaaaaaagacagtaatgaaatttgtgctttgaaaatacttaacaaaaaattattattcaagctaaacgaaacaaaccatgttcttactgaaagagacatactgaccacaactagatcagcttggctggtaaagctactttatgcattccaagatgcagaaagtctatatttagcaatggaatttgtgcctggtggcgattttcgtactttgttaatcaatacacgaattttgaaaagtggccacgcaaggttttatatcagcgaaatgttttgcgctgtgaacgctctgcatgaattgggctatactcatcgggatttaaaaccggagaattttttggttgatgctacaggacatattaaactgacggactttggtttagctgcaggaactgtatcgaacgaaagaatcgaaagtatgaagatacgcttagaggaagtaaaaaatttagagtttccagcctttacagaaaggtctattgaggatagaagaaaaatgtaccataacatgaggaaaaccgaaattaattatgctaattcgatggttggttcgcctgattatatggccttggaagttcttgaaggtaaaaaatacgacttcacagtggactattggtcgctaggatgcatgctttttgaaagtttggttggatacacaccatttagtggttcttccaccaacgaaacttacgaaaacttaagatattggaagaaaactttaagaaggcctcgtactgaagatggacgggcagcattctctgatagaacttggaacttggtcacgagactaatagcagaccctatcaatagagtgcgatcttttgaacaggttcgcaaaatgccgtacttcactgagattaatttcgaaacattaagaagaagctcaccaccatttattcctcaattagataacgaaacggatgcaggctattttgacgattttactaacgaagaagacatggctaaatacacagatgttttcaaaagacaagataaattatcttccatgatcgataactcttctgtgaattccaaattagttggttttacctttagacatagggacgggaaacaaggttcgagtggaattctatacaatggttcggaacattcagatcctttttcaaccttttattag

SEQ ID NO: 2704 - DNA, 663 bp, Saccharomyces pastorianus
atgagttcgcatactacaccagaaaaggtcactacagagcatgttctgtggtacatccccaaccagatcggctatgttcgcattatcactgcagcccttgcttttttcgtcatgaagaaccacccaatgatgtttacatggctgtacactacgtcgtgtatgctggacgcactagacggcaccatggccagaaagtacaaccaggtgtccagtctgggggccgtgttggacatggtcacagacagatcaagcactgctggtctgatgtgtttcctatgtgtgcaataccctcaatggtgtgtttttttccaattgatgttgggcttggacatcaccagtcattacatgcacatgtacgccagtttaagtgctggtaaggcttcccacaaaagcgttggcgagggcgagtccaaactgctacatctatactacaccagaagagacgtattgttcactgtttgtttcttcaacgaactattctacgcagggttgtacatgcacatcttccctcaatacgccaactttgggaaatggacctctctaataagtttccccggctatgttttcaagcagatcgcaaatgttgtgcaattgaaaagggccgctttgattctagccgacaacgatgccaagaatgccaatgagaagaacaagacttactga

SEQ ID NO: 2705 - DNA, 948 bp, Saccharomyces pastorianus
atgaatgtcctattgacgcttcctcagccggaattatttaagacgacggtgattccgtgtttggtgaaacacaatctgatcaagtcggaagcaattctctccaacttacattcggttttttacgtcgctatattttaccatatctggttcctttttggtaagtggatcctattcccaccgctggttagatggaaactgaactacgatcaagtgcatggcgaaaagaaagatgagaaggttagtcctgaacgtcaagctcaacattacaagaagaaaagcacctctttgatcaaccaaagttccgttcacttgatatctcttctacaaagcatagtggttttatactactcattgaagttcttactagatccaaaggcgtcagccgagccctatcaaacttcacattctcgagtatttgcagaaaccagagacacccaagtcatctgtattttcgccattggttacttcgtttgggacatttacatctccaccatgtattccacctttccctttgttgtccacggaatcatctccacagtcgtgttctgcatcggattgaaaccgtacatccagtactatgctcctgtgtttttgatgttcgaattgtcgaacccctccttgaacttcagatggttcggtatcaaattcttaccccacaaaagtaaattctgctccttaatgctgctgctgaacaatatggccctcatggtcatcttcttcgtggccagaatcgcctgggggtggtaccaaattgggaagctatcctacgacttctaccaggtgcgcaacgaacccggatttgctgtcttcgacaccatcgtcatcctcgcaggtaattttgtcctggacgtcttaaacgtaatctggttctctaccatggtctctgtagctgcaaaggtctttaagaaggggaaagccgaagacaaagtcactaagactgagaaatga

SEQ ID NO: 2706 - DNA, 1473 bp, Saccharomyces pastorianus
atgtccaaccaaacagaagatacagaaaactcacagaataccagctcatctagatttttgaggaatgtacaacggttggctctaaacaacgtaacgaacacaacttttcaaaagagcaatgtcaataactcatctctgacgaatttcaaatcctcattgaactctgcaaaaaaggaagggagccggattccacaatttagtgtaccaaggccaacagccccattggaggagaaaaaaattattctgacagataacaagacaaattcactccccatcaacaaatcttcagatgacaaagagaaccaagatccaagcagtaaaaaattcggcagcttggcttctataaaagagggaagcaatgaattgcctgctattaaaagtatacaaaaattcacttctactgaggaggtgatccaacacaatcccttaaaaagcataggctctggaactgatactgttaagaaaccagttgaaaatgaaaaatttcatccagctagaaatcagcttgaaatcagaaacaaagaagttgaaaatgatagtggcaagaaaagaccaatttctacgattgtcgaacaagaattacctaaaaaatttaaagtgtgtgatgaaaatgggaaagaggaatacgagtgggaagatttggatgcagaggacgtcaatgaccccttcatggttagcgaatacgtcaccggtatattcgaatatcttcaccaactcgaagtcatcactttacctaagaaagaagatctttaccagcacagaaatatccatcaaaaccgagatattctggtcaactggttagtcaaaattcataacaagttcggcttgttgccagagacattatatcttgccattaacatcatggacaggtttttatgcagagagctagttcaattagacaaattacaactggtgggtacgtcatgtctgttcatcgcctcgaaatacgaagaagtatattctccaagtataaaacattttgcctcagagacagatggggcatgcacggaagacgaaattaaggaaggcgaaaaattcattctaaagacgttgaagtttaacttgaattatcctaatccgatgaattttctaagaagaatttccaaggcagacgactacgatatacagtctcgaacgctcgccaagttcttactagagatatcattagtggattttagattcattggaatattaccttcattatgcgccgctgctgcaatgtttatgtcaagaaaaatgttgggcaagggcaaatgggatggcaatctgatacattatagcggcggatataccaaagaggaacttgccccagtatgccacatgataatggactacttggtcagtccgatagttcacgacgaattccatagaaaatatcaatcaagaagatttatgaaagcgtctataatttccgttcaatgggctttgaaggttaggaaaaacggctatgatataatgactttgcatgaataa

SEQ ID NO: 2707 - DNA, 3627 bp, Saccharomyces pastorianus
atgtccttgagagaggtatccaattatgagattcctttttacatcccactgtcttacggaaacaggacccataaaatttgcaaactcccgaatggaatcttggccttaataatatcagatccaacagatagctcaagctcatgctcgctgtcagtttgcacaggctctcacaatgatccaaaagatattccgggcttggcacatctttgtgaacacatgattcttgctgcaggttctaaaaaataccctgacccaggtttatttcatacactagtcgccaaaaataatggctcgcaaaatgcttttacaaccggagagcagaccactttctactttgaattacccaatacccaaagtaacggcgaacttgcattcgaatcaactttagatgtgttcgcctcatttttcaaagaaccgctctttaaccctttgttgataggaaaagaaatatatgctatacagagtgagcatgagggaaacatgtcatcaacgacaaaaatattctatcatgcaacgaggatgttggccaatgcagaccacccttttagccagttctccactggaaacatacactcattgtcaagtattccacatttggagaaaataaatctgaaaaactctctgaacacatatttcaagaataatttttatggggaaaatatgacgctctgcatgagaggttcacaatccgtaaatattcttacgaaattagccatttccaagtttggtgatataagccttaaaaataacataagagggagcaacttttcgattaaggcagggtcatttcgaagatcgcgatcatttcgaagatctcaggacgtctctcgaattggttcctggaatttagaaaactctaaaatatcagacaccgtatgggaggagaaatatgggaatattagttgttttgaagatgcttcaagatataattcaatattcatcaattcaagcaaagctccaattatgaggtttttatttccagtctctgacaaaaataccagattcacgaagaaagacattaaaatatacagtcatttatggcgcgaactctttggtgatgagtctccaggatctttgagccattacctagtgtcaaaaggctgggctaccagttctttcgcctttacctcagaatttgctgtcggtagtataggattagtgttagagttagaacttacaaaatccggctggaaaaacgtggagagcgttgcaaccacgatattttctgagctactgccttccttttgcgcaaaaaacgttgaccatttaatcagttttttaagagaacagaatttaattgacatagctcgttttttgtatcagaattcacaggatttgcctatggaagaatgttcacagttaagtggcgttctccaagaaaatttagagtgcctgaccccctgcaatatttttaaaggtttcaaatctctcatagaaatcaatgatcctaacattgaaaaatatgaagacagtaagcccaacgttcaatggtggacaggtcaggcaattaagtttcaaaacttcttgaaatcatttatgaatcatgagaatacgcgacttttattgttaggagatataaaatcttgcaatctgtttgataaaatcgaagataagagcgaaatacacactgagtttttctatgagtttgaatattatatggggaaagttcacttgtcagaagatcacgatcctcactcacaaagcgcatatgaatttaatttcccgacaaataatccatttttaccagattttgttaatgatcctttaaggctgcagcagctttacttagagtgttcactaaaatcaaaatttgctacgctaaggccccaaattcaaagtgaacccatcaaaatactacctcagttagtcagcaaaaatttgaattatgaaatgtgggtcttgaaagaagatccaaatttcacttcagacaatgtatcagtagtatcttttgaagtaataggactgggcattaaacctagcccagaagcgacgattcatttggaagttttggcacaaatattgtttattaccacctcttcagacctctatccagctctaagggctggttatacttacgagatcgcgtcctctagtaagggcaatgtcacactccgatttaccatttctgggttttcagagggtgttttcaagataacaaaagcattcgtagatacgttaaaactaattgcaacagatcccacgttcccttcaaaagacgctttgagaaaagcaagaattctggttagaagcaaatacgagagtgcatcatcggataactgcgtgaaactggctagcattggtttgttgatcgtcttggaggaatacatgtggaccctacaggatagaattgatgcattagagcttacggacatggagtctctaaaaaattttagttcttcattttggaacaatccaaaacagttggccttgctcattcaaggaaatcttgaatatgcagacgaaatcaaccactacctgaataataattttacgcagcacctaaaagtgtccaatgaaaggaacaagccgactatacgcctttatccttcgcccaatactaaagatatagatccgggcacaaatgccttcatatcttgcaacggtcatcaagatgaccccaacaatagtcttgcatattttattcaaactgcacaaagagacgatatcgaaaacctgacattaacgttcctcacggaatatatattttcactaacattagtacctgatttaaggaataagaagcaaatagggtacatcgtcttaagcggactcagaatcttgacagacaccataggaattcatataactgtgatgtctggaagctcggcgcatagccttgaaactaagatcaatgagtacttatcttatttggagctccaggtccttaataatttcaccgaatccagttttcgaaggatacttctggaacccttcctagccttactagagaagaacaatttcaacaaacttaaaacactgtccggtcctgcaaaccttttaaatgaaatagtggccaatgttcaaaacggcgacaattatattctcaataataggcaaatgaaacatcaccgaaaagtaagaaatagcattagcgagaaacgactccatttccaagaggataatgaaatggttgacatcctattcttgcaaaaattaactttaaaagaatatttggaatttttcagatcaaaaatttctatatattccaggcaaaggagtaagctatcaataatgattacgagcccaatggcagaggaagagattgcaagtagaaaaatgtttctgcaattagaagcctttctgaaaatgaaagggtttgcgataaaaagtagagacttggaaaaaattgttgaggactcaaaaggtagtcctgttcttcttctcaagaacctcttcactttttttcgtaaaagaagtgaagcttttaaacttggtactgttgtattgaaggagatatcgaagatcatcgccattaatttcaagcagacgtacggctctgtactaggcttttcttctcaagacagcgaactgcaaggcatagacaagtactggaatgcagatgtagaaccgattgttcctcttcgagagcttccttgcccaaacgttttccggaaatacgcattttaa

SEQ ID NO: 2708 - DNA, 1359 bp, Saccharomyces pastorianus
atgctcagatatagctctttgccaatcaagagagtaatccctcatccggtcccaagaaccgcgctcactgcatctcgtcttgcgttgtcaagatcaagcataataccgctttacaatccaagtttccaccgttggaactcttcgacgtctaaagacccaaaagacgattcgaagacagtgaatgaaaagcaggaaaagttaacagaggttcttccagtaaaaaagaagctaccattgaaggtcaagatccaaaacgctcttcgtcattattgggacggttccaaacttttagggttggaaataaaaatctcttctaaattgttgatgaaaagtgccgcaggttacccactaacaagaagagaaaacctacaattgaaaagaactactcaggatatcatcagactggttccgtttgccgcgttccttattatcccatttgccgagctacttctaccgtttgcattaaaactattccccaatttacttccatctacttacgaatcgagcaaaaaacgtgagaacaaactggaaaatttaaggaacacgagaaagttaatgtcccaaattattaaaaataacaagccccatttcaagcccaacaacatctctgaggaacaaaaggctttattcaacagattttacactcatgttcgtgctactggggtgcccgaatctcgtcaacagttgattgaggtagccagactatttactgacgataccgtgctagacaacgtcacaaggccttacctaattgcattggccaaatacatgaacttgcaaccgtttggcacagacgtgatgttacgttaccgtatcagatacagtatgcttgaattgaaaaaagacgatttgtccatttactatgaagatgcggaacaactttccctgcccgaattgaaaaccgcatgcgcttctaggggtattagaagtgtggatgtggatgctagcgtattatattcgaatttgagattatggctgaatatgaggctcaaggacaagatcccagcaacattgctgatcatggctactgcttacaactacggtaacgtacaatcgaaggagtccttgtacgattcattatgcgatgtcctcatcggtattccagatgagctataccacgaagttaaagtgaatgttgtcaaggaagacgaagcgtccgccaagcagaaattgagacaattgagagaacaggaagaaatcatgaaggaagaagaacaacaagaagaaaatgccattgtgagcgtgaaggacgagctgagcttagacgaccaagaaaagaacttggacgcagccgtcccagaagtccaactaaaagaaaccaaaactgctggagaggctgactccaccttaaagaagtag

SEQ ID NO: 2709 - DNA, 1053 bp, Saccharomyces pastorianus
atgtcacagtacatcggcaagaccatctctttagtctctgtgactgacaacagatatgtggggcttttagaagatatcgattctgaaaagggtaccgttactttgagggaggttcgctgctttggtaccgaaggtcgtaagaactggggtccggaagaaatctatccaaaccctaccgtatacaactcggtgaaattcaatggtagtgaagtcaaagacttgagtattttggatgccaacatcaatgacattcagcctgttgttcctcagatgatgccacctgcatcacagccctctccttcccagcaagatcagtcgccacgccaagcccaagctcaagcccatgcccagccacaagctcaagcccaagcccaagcgcatccacaggccgtaaagcccgaatccaatgtacctgctgcggttgctggatatggtgtttatacaccatcttccacagaggccactactgccaggaaagataatgtgaacccaccgaatagggatgaacgtaaagacggtgattttgagcaaagatatcaaaggaacaaaccaactaaccgggctcctcaatcgaaccgcagccacaaggtcgaaattccaaatgaagactttgactttcaatccaataacgcaaaattcactaaagaagattccactgatttggaaaaggaacaggaattggaatctgctgctgaaaaagaggacgaatccgatgaggcgttctataacaaaaaatcgtcattttttgacactatttcaacctccacggaaaccaataccaacatgagatggcaagaagaaaaagtcttgaatgttgacacattcgggcaagcttctgccagaccaagattcaactcaagaggtcgtggtcgtggccgtggcggcaattacagaggtaataggggaaacagaggaagaggtggccaacgaagtggctaccaaaacagaaataactaccaaaacaacagaggtggctatcaaaactatcaaaatgattctcaagataggtcctccaaccaattctctcaacctccttccaatgtcgaattttag

SEQ ID NO: 2710 - DNA, 588 bp, Saccharomyces pastorianus
atgacgacaattcagccttttgagcctgttgacttgttcaaggctaataatgtcaacctcgatattctgacagagaatttccctttagaattttattttgagtacatgatactatggccagatctctttttcaaaagtctagaaatgacagttgatcctgatttcaagcacaatatttctggttacatgatggcgaaaacagaaggtaagacaacggaatggcacactcatataaccgcagtgacggtcgctccaaggttccgtcgaatatcgctggcttcaaaattatgcaccactctagagaccatgacggatgttatgccccacgaagtcaactttatcgatctttttgttaaatgcaacaaccaattggccataaaactttacgaaaaattagggtacagtgtctacagaagggtagttgggtattataactcaagcgaagatgggtatccagacacattgaaaaaagtagatgacaacaaggacgcctttgatatgagaaaggctatggctagagataaggccaaaagtgtacggccagatggaagaaaccataagtgttatccgcatgatgtaaggttttag

SEQ ID NO: 2711 - DNA, 153 bp, Saccharomyces pastorianus
atgtttggtctacctcagcaagaagtctccgaagaagagaaaagagttcatcaagaacaaaccgagaaaacattgaagcaggctgcttacgtggctgtgttcctctgggtttccccaatggtttggcatttggtgaaaaagcaatggaagtaa

SEQ ID NO: 2712 - DNA, 1722 bp, Saccharomyces pastorianus
atgtcagacgccacccaacaaagaaagaagaagagatccagagaagaggttgatcgttcaagacctgcagtagatgaagaaattacggatccatcctcgaatgaagatgaacagccagaaattactgacgaagaagatgaattggagtctgaagaagaatttgagggggaaaatcctgctgataaaagaagaagactagcaaaacaatatttagataatctgaaaactgaagccaatgatattttaaccgaaaacggaaatgatacagaagaggctcagaagcatatgacggagaaatccgttgataattacaataactttgatgctggtgatttggataaggatatcattgcatcgagattgaaagaagatgttgctgaacaacaaggacgagtctttagacattttgctgataaacttctaatttccgaagcaaagaaaacctttaccagagtaggagaaaaaaatcctacctgcattagttgtttccaaccagtcttgaacaagtttacttttgaagaatcatccaatggtgataagaacaagggcagactatttgcctacacagttagtaaagacttacaactcacgaaatatgatattaccgatttcaaccaaaggcctaaaaagttaaagtatgccaaaggtggagctaaatacatacctacaaataagcaagaatatgagaataccgcagaaggtcactatgatgaaattttaaccgtagcagcttcgccagatggaaaatatgttgttacaggtggaagagatagaaagttaattgtttggagtacagaatctttatcacccgttaaagtgattcccacaaaggaccgccgaggagaagttttatccttagcttttagaaaaaattctgatcaattgtatgcatcctgcgctgatttcaagataagaacatactcaataaatcaattttcccagttggaaatcctttacggacatcatgacatggtagaagacatatctgctttggcaatggaaagatgcgttactgttggtgctcgtgacagaactgccatgctttggaaaattccagatgaaaccaggttgacatttaaaggtggcgatgaacctcaaaaattactaagaagatggatgaaagagaaagctaaggagggagaagatgggaaagttgaatatcctgatgagtcagaagcacctttgttcttctgtgaaggaagtatcgacgttgtgagtatggtggatgactctcattttttaacaggctctgacaacggtagtatatgcctatggtctctggcgaaaaagaaaccaatttttactgaaagaattgcccatggcattttacccgaaccctctctaaatgacatctctggtgaaactgacgaaggattaagaaaaagacaggtgcaaggtaagaagttgctgcaaccattttgggttacatctctgtacgctataccatattcgaacgtatttgtctcagggtcttggaacggaactttgaaagtttggaagattagtgataatctaagatcatttgagttactgggtgacctatctggttgtaaaggtgtagtgagcaagattcaggttgtagagagcggtaaacacggtaaagaaaagttccgtattttggctagtgtagctaaagagcataggcttggtagatgggttgcaaatgttccaggtgcaagaaatggtatatattctgctgttattgatcaaacaagtttttaa

SEQ ID NO: 2713 - DNA, 1470 bp, Saccharomyces pastorianus
atggctcgtcaagacggacatttatggacagaaacatatgatagttccacggttgctttcatgattttaggggcagccctggtcttcttcatggtgccagggttaggttttctttattccggtttggcaagaagaaaatccgccctggctttgatttgggtggtgatgatggctaccttggtgggtatattacaatggtatttttggggctactcactagcgttctccaagactgcaccaaataataaatttatcgggaatttggattctttcgggtttagaaacgtttatggtaaaatctcagatgactctacatatccagaattgatttatgcagttttccagatgatgttcatgtgtgtggcattgagtattatagccggtgccactgcggaaagaggtaagcttttcccacatatggttttcctctttgtttttgccactttggtttattgccctatcacttattgggtttgggctcccggtgggtgggccttccaatggggggttttagattgggctggtggtggaaatattgagattttgagcgccgtggccggtttcatttattcctatttcttaggaagaagaaaagaaaatctcttaatcaattttagaccacataacgtctccatggttactttgggtacttgtgttctctggttcggttggttgcttttcaatgcagcaagctcattgtcgccaaatatgagatctgtctatgcctttttcaacacaaatattagcgcgaccacaggtggaatgacatggtgtctattagattatcgttcagaaaaaaaatggtctactgtcggactgtgttcaggtattatttgcggtttggttgcggccactccaagctccggctgtatcactctctatggctccttaattcaaggtatagtggccggcgttgtctgtaatttcgccacgaaaataaagtattatctgaaagtagacgattccctggatttactggcagagcatggtattgccggtatagtgggtctgattttcaatgcgctatttgcggctgattgggttattgggatggacggtaccaccgagcatagaggtggctggttaactcataactggaaacaaatgtacatccaaatcgcatacatcgctgctgtggccggatattgtactgttgttacagcgtttatctgctttgtgttaggtaaaatccctggtatgaacctaagagtcacggaggaagctgaagctttgggtttggacgaagatcaaatcggcgagttcgcttacgattacgtggaagttagaagggattactatcaatggggcgtggacactgatgccctccataccacttgtaatggcggaaaagctgcgcctgagacaaattctactgaagacagccaaaactcttcactatcttcagccaccgtaagtggccaaaatgaaaaaactaaccatcttaaaccacagcactcaaaagaagcatag

SEQ ID NO: 2714 - DNA, 1155 bp, Saccharomyces pastorianus
atgtcctttaaagatgttttagatagaggggatgaatttttagaagcatatcccagaagaaaccccttttggaggttcatgtcatatagcacatcgttgttaaccttcggcgtctcaaaactgcttatatttacatgctataaagtcaaattgaacaattatgaaaagctagaatctgttttggaacgctccaagaatgaaaacagaggtcttatgacagtgatgaatcatatgagtatggttgatgatccgttggtttgggcaacactgccgtatagtctatttacttcgttagataatataagatggtgtttaggcgcacacaacgtttgtttccagaataagtttttggccaattatttttcactgggccaggtactgtctacagaaaggttcggggtgggaccgtttcaaggatctatagacgcctcgataagattgttaagtcctgatgacactttagacttacaaaggtcttctcattcggagagttctgtttcgtctcgaaaaatgcaggaaacctacactccacccattataaggtcaaagccatcttgggttcatgtttacccagaaggatttgttttgcaattatatccgccttttgagaactcaatgaggtatttcaaatggggtatcacaaggatgattttagaagcaacgaaaccacccattgtggtacctatattcgcaacagggtttgaaaaaatagcttccgaagcagctaaagattcaatgctaaagcaaatcctgccgaggaatttcggaactgaactgaacgtaacaattggagatccgttggatgacgatttgattgaccgatataggaacgagtggaagcatttggtcgaaaagcattacgatcccaaaaatccaaacgatctctctgacgaattgaaatatggcgaagaagcgcaagatttaagaagtagattagccgctgagctaagatgccatgttgctgaaattagaaatgatattcgcaaattgccacgtgaagacccaagattcaaatctccttcatggtggaaacgatttaatacaacggaagggaaatcagatccagatgttaaagtaatcggtgaaaactgggccataaggagattgcaaaagtttttgccctcaaaagatgatcccaattgcaaagacgattag

SEQ ID NO: 2715 - DNA, 720 bp, Saccharomyces pastorianus
atgggacctaagaatacagtaaaagctacacagaaaaagagaactagaagagacgcagaggatgggcacaaaaaaaataaggtagagttgaaaaaaaaactggaaaaagaggctgcatcggaagaagaagaggaagcaagtgaacaagacaattcggatgacaaatcatctggagatgacaatgaggacggcgctgaagtagaagaagatgaagatttcccaagaaaaaggaaatcgaagaaaagtaagcatgacgatggttctgctgacttctctactgccgtcaatgctattctgtcatcgcacttgaaggcatatgacagaaaggaccctatcatggccagaaataaaaaagtgctgaaacaaactgaaacagaaaagctagaatacaaggccaaaaaggaaatgctagccgaaaaaaagaagctgttaggaaaagctagaaaacgggatattattcccattacggcgggagaaggaaaatctggaaatgtcagaaaagtacttgaaaaagaaacaacgcttagaaagattgcccagaagggtgccgtgaaattattcaatgccattctagccactcaagtaaaaacagaaaaggaagtcactgagaacttgagtggaataaagaataaagaagaaaaaagagaactaatcactgaagtttctaaagaaaagtttttggatttggttaaagccgccgcagtaaacgacaatgaatag

SEQ ID NO: 2716 - DNA, 1719 bp, Saccharomyces pastorianus
atgtgtggtatttttgctgctttcaagcacgaagacgtgcacagatacaaaccaaaggctctacaactatcaaagagaattagacaccgtggtccagattggtccggtaatgcggtcaagaactccactattttcgttcatgaaagacttgccattgttggtttagactctggtgctcaaccaatcacctctccagatgaaaactacatgctatgtgttaacggtgaaatttacaaccacattcagctaagagaagaatgtccagactaccagttcaagacgctaagtgactgtgaacccatcatcccaatgtacttgaagcatgacatcgatgctcctaagtacttggacggtatgttcgcttggactctatacgatgccaagcaagatcgtatcgtagcagccagagacccaatcggtatcaccactttatacatgggccgctcttctgcttccccaaagaccgtttattttgcatctgaactaaaatgtctcaccgacgattgtgacaccatcactgcattcccaccgggccatgtatatgactctaagaccgacaagatcacacgttacttcaccccagactggttagatgaaaaacgtattccaaccacaccaatagactacttggctatcagacactcattggaaaaagctgttagaaagagattaatggctgaagttccattcggtgttcttttgtcaggtgggttagattcctctttgatcgccgccatcgctgcccgtgaaaccgctaaggccaccaacgatgtggaaccatccacctacgataacaaggccagacacctagcaggtgtcgacgacgaaggtaacctacacacagctggctggacaagtctccattcctttgccatcggtttgccaaacgctccagatttgcaagctgccagaaaggtcgccaagtttatcggctctacccatcacgaacacactttcacactgcaagaaggtttagacgctttggacgatgtcatctaccatttggaaacctacgatgtcaccaccatcagagcatccactccaatgttcttgctatccagaaagatcaaggctcaaggtgtcaagatggttctttccggtgaaggttcagacgaaattttcggtggttatctatatttcgcgcaagctccttctgccgcggaattccataccgaatctgtgcagcgtgttaagaacttacacttggctgattgtttgagagctaacaagtctactatggcttggggtctagaggcccgtgttccattcttggacagagaattcttgcaattgtgcatgaacatcgacccaagtgagaaaatgattagaccaaaagaaggccggattgagaagtacattttaagaaaggccttcgataccacagacgaacctgaaactaagccatacttgccagaagaaatcttatggagacaaaaggaacaattttccgatggtgttggttactcctggattgacagtctaaaggatactgccgaagctgtcatttccgatgaaatgttcgccaatcctaaggctgaatggggcaccgacatcccaaccactaaggaagcttactggtacagattgaagtttgacggcttgtttcctcaaaagactgtcgctgacaccgtcatgagatgggttccaaaggctgattggggttgtgctgaagatccttctggtagatacgctcaaattcatgaaaaacacattgattaa

SEQ ID NO: 2717 - DNA, 915 bp, Saccharomyces pastorianus
atgtctatacaagagtacaccaaatccaagttaccgtgctcgatattgaatattaagcccacagttaccacagacaacaaagatgctccattgctggtgtgggtccctggtaatcctggacttttacactactatcaagagatgatccatcatttacatttgaagcatcctgagtgggagattcttggtatatctcatgctggtatgagttcgaatgcgcattcaaataccccgatattttctttacaagatcaagtagatcatcaggttgaagtaattaataatttttcgcacaaggacagaaaaatcattatcatgggacattcggttgggggctacatcgttcaaaaagtttgtctctctaacgagttggtcggttctgtaacaaaagtcggtttaattactccaactgtgatggatattcatgcctcagagatgggcgttaagatgacaacggcattacattatgtccccgccttggctcatgttttatcacttattagttatgttattttttattgggtcttgtcagaagggttttcaaaattaattattaacaaatcaatgggttgtggaaccaccgattcccgagctgtactgtccacgagattattcttgactcacaggcagttcgtccgtcaatcgctcggactggcctctcaggaaatgaaagagataaccactaactgggagtttcaagataaatttatcaactactgcgaagagaacgagatttttacttggtttttgttcagcactaaagaccattgggttactgatgaaactagaaaacatctttcacattactatcatgataaagtcaagcaagaaaagttaaggattgatgtcacggacaagatacctcattctttcgtggtgaaacatgcagaatacgccgttaatgcctttttttaa

SEQ ID NO: 2718 - DNA, 522 bp, Saccharomyces pastorianus
atgctagccccagtcgataacattctgcgtataataaattttatatttctggtcatttccattgctctgatcagttcgttgctgaacaccgagagtggcaatagttcaagaataaactattgtatgtttgccgttgcatatgctatagtcaccgattcattgtacggtgtctttgccaatttctttgaaccattggcatggccgctaattttgttttcacttgactttttgaatttcgttttcacgtttaccgccggtaccgtgttagccgtcggtatcagagctcactcctgtagaaaccagtcgtacctattaagcaacagtatcactcaaggttctgctaacagatgtagagagtctcaagccgctgttgcattcctttacttctcgtgtgccatcttcttggccaagaccctcatgtctgttttcaacatgatctccaacggtgccttcggctctggttctttctccaagagaagaagaactggccaagtcggtgtcccaaccatttcccaagtttaa

SEQ ID NO: 2719 - DNA, 648 bp, Saccharomyces pastorianus
atgtctgcttcattggtcaatcgttctctaaccaacatcagaacagaattagattttctaaaagagtcgaatgtcatctcgaatgacgtctttgatcagataaataagagcctaccattgaaatgggatccctccagtgcccctcgtggttctaattcggcttctctggaatacgtagaagccctttaccagtttgatcctcaacaagatggcgatttgggcttgaaacaaggtgacaaggtccagctcttggaaaaattatctccagagtggtataaaggtagctgtaatggtcgcaccggtatttttcccgccaactacgtcaagccagttttctctgattccgatgcgcaacaacgcctcccaccacctccacaatataaagctcaagaattacaacaaatcccaacccagaatagtaatgtgtcatcctatcaacaacaaccattccccccaccttccactaactactaccaacaaccaccacagcagctgcaacagcagccacaacaacctcctcctcaacaacaacaacaacaaagctcgtcaaataatcatttaaagagctttggtagcaagttgggtaacgctgccatctttggtgcaggtgctagtatcgggtcggatatcgtgaacagtattttttaa

SEQ ID NO: 2720 - DNA, 1842 bp, Saccharomyces pastorianus
atgatcaccaataggcgtattttaaaatcttttgaggagataaaccattccttagaggagtctttacaggatgttacatttgacttacaacaacaattagttcaagatgacaataaagaaaatggagagctagcaaaactgcaagaccaattgcaacgggtcaggtctattgttgagaaagtttgcgtttcaattaagagcgacgatgttgaatcctactactcaatatcttttgattcgttatacaatatatgcaaagacattgcagatccttcttcctttgaagatggggatttgcaatatcttgtgagtcaagccatatttgaatacgtcatcttattgtgttactattcagtaaccaatgaatgtgtccaaggtttaccagccgtgtacgaagccgaacaatactataagacgattagtgattcaacattgagatcattactttattgtttacaaaattcagtgtcaactttacgaagtttatttcaagatgttcaaaagaaaatatataggaaaaatcagctacaccaaacatggtcactacgagctttattgttagatttattagaagaggtacgtccaacaataaataagtttatggtagttagaaactttagatttgttgggttgccaaagaaaccgcttgaaatagcttcatttgcttccgacattccgcgcggcgtagttcatgaaaggctagatataatcaatcggtcatcaaagaactatactatcaaactgggccatttgattgccgaattcgctcaaccggcagacgcagatgacaaactgcaactaccaaactacgaaagacgtctacaatctttgcagagcttctttggtttatcggcgtctgacacaaatttaacagatatcgtacaacgttcagctaaatttcatagagatcatccgctgaaaaagtttaccaaaccaagcgtattgaccagatactggccttcgatgttgttatgtcttttgtatggtccgtcatcgattatgactatatggaattcccgttacgttattcaagacttcattagaaataatgttgttgattttgccaagggactggtattgaattggttatggactcctctaaagcaagtttggtccactgtgagacatgatgaaggaagtgccatttcagtcacatcacaagaaactttaaactctgatatggactctctgactagaatgattgttagctttgttgtagataatagtaactcggctcccgatcaaaccatagaccctattctgttaagcagcaaagtagaacacggtgatttgacagaattcatggaaatttatgaatcacaattgcaccatccaattaaaaatatagccacaggtggtctagtaagatcattattgattcaactacaaaagacaaaagtggatgggtctatggcgttgaatggaattgataaaatgttaaagtcacaacagttagtatttggagtcgtagcattatccccagctctagtaatactgtattcagttactgtggcattgaaaagattcattaagttgggcaacatatggtccaatgtaaaacgttacaaagaacaaatcagcataagtttaaataacgtggaaaggattttgaattactctgaccaaggagcagactccaatgaagagcatttaaaccaagggctattagtgatagaggtctccaatttatataaattgggaagttacttaattccacattcaagaaggaaggagtggttcagagatgtggaagagttggtggatactgaccttgactccaaagctcaccttaatgtcgttgacagaatataccatgtctacggtagatttttgattcattaa

SEQ ID NO: 2721 - DNA, 1869 bp, Saccharomyces pastorianus
atgaacagacaggaatccattaattcgttcaattcagacgaaacatcgtcactgtctgatgtggaaagccagcagccgcaacagtatatcccttcagaaagaggctccaagtccaatatggctcctaaccaattgaagctgacacggacagaaaccgtgaagaccttgcaagacatgggtgtgagctccaaggccccaattcctgacgtcaatgctcctcaatccagtaagaacaagattttcccagaggaatacactctagaaacccccacggggttggtccccgtggccactctgcattcgataggtagaacgtcgactgcaatctctcgtacaagaacaagacaaatcgatggtgggtcttcgccctcttcgaatgaagacgctctggaaagcgacaataatgaaaagggcaaagaaggcgactctagcggtgccaacgatgagggaccagatctagatccagaaatcgagtttgtcacttttgtcactggtgatccggaaaaccctcacaactggcccggatggatccgttggacctacaccgtgctgttatccatcttggttatttgcgtcgcctacgggtccgcttgtatcagtggtgggctgggaaccgtcgagaagaaataccacgtcggtttggaagccgctattttatcgtgttccttaatggtcatcgggttctccttgggtcctttgatctggtctccagtcagtgacttgtacggtagaagagtcgcttacttcgcgtctatgggtctttatgttattttcaacattccttgcgcattggccccaaatctaggttgtcttttggcctgtaggtttttatgtggtgtttggtcctcttccggcctatgtctcgttggtgggtccatcgccgatatgttccccagtgaaactagaggtaaagccatcgctttctttgcctttgctccttatgttggtcccgttgttggtccattagtgaatggtttcatttccgtttccaccggccgtatggacctgatcttctgggtcaacatggccttcgcaggtgttatgtggatcgtggcctctgctattccagaaacatacgctcccgttatcttgaagaggaaagctgccagattaagaaaggagaccggtaaccccaagatcatgactgaacaagaagctcaaggtatcagtatgagtgaaatgatgagagcttgtttgttaagacctctatactttgctgtcaccgaaccagtcttggttgctacttgcttttacgtgtgtttgatttactctctgttatatgcgttcttcttcgccttccctgtcattttcggtgaattgtatggttacaaggataacattgttggattgatgtttattccaattgttatcggtgctctctgggccctagccaccaccttttactgtgaaaacaagtatctagcaatcgtcaaacaacgtaaacctacacccgaagatcgtctgttgggtgccaagatcggtgctccattcgctgctattgccctttggattttaggtgccacctcttacaaacatattatttgggtcgggccagcttctgccggtttagcttttggttatggtatggtgttgatttactattcgctaaacaactatatcattgattgttacgtccaatatgcatccagtgctttggccacaaaggtcttcttaagatcttgtggtggtgctgccttcccattgtttaccattcaaatgtaccacaaattgaacttacactggggttcttggttattggctttcatctctactgctatgattgctttaccttttgcattctcttactggggtaaagaattgagacataaattgtccaagaaagattactccattgacagtgttgaataa

SEQ ID NO: 2722 - DNA, 1404 bp, Saccharomyces pastorianus
atgcgttgcgtaacatcgcagatattgctatggttcttgataatgatcgtaagcgtggtagacgcgctcgtccttccgcccttggaagactacgatccattggagccattaatgaaaagagacacatccacgtcgcagcacagcaatgctcaattcgacaatcgattgccgcccatactaaacccctcggatgttacagaagatcagagatcttttcatgtcccgggagaaatcccgtcttatgtcatcgatcattgtcccttggttcatctatatagcgaagagaagtactggccctcggatattgccgagtttgtgcaaaacttccaaatcaaagacaaacatggcaatttcatacctactcatgaaaacttgacgctgcatgatttaaaggcggaatacagcgcagacttgctggccaacggaactgagacccgtattcctagtagcgacgtgtttttgacaagttcggatgatttcgacaaagatcccaagtggtcgctgggccacccgccagaatacggaacaggccacaaccccaaggcgcctgcagtcctgttcgtggtcgacaagggtaacggatgggtcgacgcattttggtttttcttctacccgttcaaccatggtcccttcatcatgggccagggtccctggggcagtcacgtcggtgactgggaacactctttggtcaggtttcacaatggtgtaccaaagtacttttggatgagcgcgcattccagtggtaccggctacagatacgaagctgttgaaaaattcaagaagctgaccaaaagaaaacagcaagatgacaattttgacgaggacaccatactccaaagaccgctgatttttagtgcgagaggcactcatgccaattacgcttccgtcggacagcatgctcacgacattcccttttttttcatgcccttgagcgattttaccgatcgcgggccattgtgggatccgtctttgaacttttattcctacacttttgacggtaaaactgtgaccccttccacagagagagaagaatctctgggcttagattggttacattttcaaggaggttggggtaataagcaactaccctcgaaggatccaagacaaaaatggtgtttaggtcaatggaaatatattggaggcccccgcgggcccctattcaagaagatggatagattgaatctatgtggtggggtgaaaaaatggaatttttggaacggcgggtgccctgctaggagattgattaagaaagctgagggcttagacgctgaaacgacagaacttatgggtgacaattgcggtgtcttgctatacaagattagaccgcggtggctaagaggcattctcagaatcttaatgtggagaggcatgctgtgctctcttatggagttcttcaccaattga

SEQ ID NO: 2723 - DNA, 2160 bp, Saccharomyces pastorianus
atgccattaagaaacctgacgggaacacataactttagtagcacaaatctggacacggaaggtgcagatggaggtcgcgatcctccttctctttctccgtcaccatcttttgcacagctgcatgacaagacagacaacaatgctgctcttacaaacccttttataggtagtgacgaagaatctggtgaacgtgacggtgagtctttttcttcttctgttcactatcagccacaggggagtgattcttcactactccatgataattcgcgtctggatataagtcaaaacaatggcatatctgattacaaaggttactattcaaaaaataatagtagagttgtgagcacagccaacgacaactcatttcttcagccgccacataagactatagcctcgtctccttctctaaattctagtttttccaagaacgacattctctcgcctccagaatttgatagatatcctttggtaggttccagagtggcttcaatgacccaactgaacaaccaaggccgttccccgtcgtcatctccaggtaatgaatcatccgcatcattctcttctaatccatttttaggtgaacaagatttctctccattcggtggttatcctgcgtcatctttcccactcatgatggatgaaaaggaagaagatgattacttgcacaatcctgaccctgaagaagaagccagactagataaaagaaggttcattgatgactttaagtacatggataaaagatctgctggtgggtttgctggtgttttgcttttgttcatagcagctgtcttcatttttattattttgccggcgctcactttcacaggtgccattaaccacgggaaagatgtcgaagaagtttcatatttaaccctgtatcaatatcctcaattgtccgctattagaacatctctggttgacccagatacgccagatactgccaagacaagagaagccaaagatggctccaaatgggaactagtattttccgatgaatttaacgcggaaggtagaacattctatgatggagatgacgcatattggactgcccccgatgttcactatgatgccactaaggatttagaatggtatagtccagacgcttccactacagtaaatggtactttgcaattgagaatggatgctttcaaaaatcatggcttatattacagatcaggtatgctacagagttggaataaggtttgtttcacacaaggtgctttagaaatctctgccaatttacctaactatggtcgtatttcagggctttggcccggtctgtggaccatgggtaacttgggtagaccaggttatctagcaagtacccaaggtgtgtggccatattcttatgaagcatgtgatgccggtattactccaaatcaaagttctcctgatggtatttcttttctgccgggacaaaaattgagtgtttgtacctgtgatgacgaagatcatccaaaccaaggtgttggtagaggagctccggaaatcgatgttttggaaggtgaaactgacaccaagcttgctgttggtgtagcctctcaatctttacaaatcgcaccttttgatatatggtatatgccagattacgatttcattgaggtctacaatttctcaacaacaacaatgaatacgtatgctggtggtcccttccaacaagctgtgtctgctgtttccaccttaaatgtaacttggtatgaatttggcgaatatgccggttatttccaaaagtacgccatcgaatatttaaatgatgacaatgacggttatatccgttggtttgttggtgataacccaaccttcaccatttacgctactgccttacaccctactggtaatattgattggagaaggatcagtaaagaaccaatgtcagtggtgctgaacttgggtatctctaacaattgggcttatattgattggcaatacattttcttcccagtggtcatgtcgattgactatgtcagaatatatcaacccagtgatgccaagtccatcacgtgtgatccagatgatttcccaacatatgattatattcaagcgcacttaaacgcctacgaaaatgcaaacttgacgacatgggaagctgctggctacacgttccctaagaatgtcctaactggcagctgttctagttccaaattcaaactatcttcataa

SEQ ID NO: 2724 - DNA, 2718 bp, Saccharomyces pastorianus
atgccgccagcaagtaccagcactaccaatgacatgattactgaggaacccacttctccacgtcagatccctagattgaccaggagattgacccggtttctgccacaagaaatcaagtcaattgacactgtgattcccttgaaatcaagggcgctgtggaacaagcaccaggtcagaaaattcgacaaacctgaggacttccaggataggtttatcgaccatgttgaaaccacattagcacgttctctttacaattgtgatgacatggctgcttatgaggctgcttcgatgagtgttcgtgacaacttggtcatcgactggaacaaaacccagcaaaagttcaccacgagagacccaaaaagagtctactacttatctttggaattcttaatgggtagagcgttggacaatgctctgatcaacatgaaaatcgacgacccagaagacccatctgcctcccaggactctaagggagaaccaagagaaatgatcaagggcgccctggatgatttaggtttcaaactggaagacgttctagaccaagaaccggatgcaggtctgggtaacggtgggctaggtcgtcttgctgcttgtttcgtcgactcaatggcaacagagggcatccctgcatgggggtacggtctgcgttatgagtatggtatctttgcccaaaaaatcatcgatggttaccaagtggaaaccccggattactggttgaattctggtaatccatgggaaattgaacgtaacgaagttcaaattccagtcacattttatggttacgtcgataggccagaaggtggtaagacgacattgagtgcatcacaatggattggtggtgaacgtgttcttgccgttgcctacgatttccccgttccaggtttcaaaacttccaatgttaataatttgagattgtggcaagcaagacctaccaccgagttcgattttgctaaattcaataatggtgactataagaactctgtggctcaacagcaaagtgccgagtccattaccgctgtgctgtatccaaacgacaactttgcccaaggtaaagaactgagattgaaacagcaatacttctggtgtgctgcatccctgcacgatatcctaagaagattcaaaaaatccaagaggtcatggaccgagttccctgaacaagtggctattcaattgaacgatactcatccaactttagctatccttgaattgcaaagagtcttggttgatttggaaaaattggactggcacgaagcttgggacattgtcaccaagacctttgcttataccaaccacactgttatgcaggaagccttggaaaaatggcctgttggcttgttcggccatttgttgcccagacatctggaaatcatttacgatattaattggttcttcttgcaagatgttgcaaagaaattccccaaggatgttgatcttttgtctcgtatatctatcatcgaggaaaactctccagagagacagatcagaatggcctttttggctattgttggttctcataaagtcaacggtgttgcggaattgcactctgaattaattaagaccaccatcttcaaagatttcgtcaaattctacggtgcatcaaagtttgtcaacgttactaacggtatcacaccaagaagatggttgaagcaagctaaccctaacttggctagattgattagcaaaactcttaacgatcctacagaggactatctactagacatgacaaagttaactcaactggcaaagcaccttgaggataagaagtttttgaaagagtggaatcaagtcaaactcaataataagatcagattggtggacctaatcaaaaaagaaaatggtggtgaagacatcattaacagagagtatctagacgatactttgtttgatatgcaagttaaacgtattcacgagtataaacgtcaacaactaaacgtctttggtattatttaccgttacttagcaatgaaaaatatgctagagaacggtgcttccatcgaggaagtggccaagaaatatccacgtaaggtttctatcttcggtggtaagagtgcacccggttactacatggctaagttgatcatcaaactggtcaactctgtcgctgaaattgttaacaacgacgaatcaatcgacgacttattgaaagttgtcttcattgctgattataatgtatccaaggccgaaattattattccagcaagtgatttaagtgaacatatttcaactgctggtacagaagcgtcaggtacttctaatatgaagtttgtcatgaatggtggtttgattattggtaccgtcgacggtgccaatgtggaaattaccagagaaatcggtgaagataacgtcttcctatttggtaatttaagtgaaaatgtcgaagatttgagatataaccttcaataccacccacaggatttgccatcgagcttggaatccgtcctatcttacattgagagtggtcaattctccccagagaatccaaacgaattcaaaccattggttgacagtatcaaatatcatggggattactatctagttagtgacgactttgaatcctacttggccacccaagagttagtcgaccaggagttccacaaccaaagaccggaatggttgaagaagagtgtcctgagtgttgcaaacgttggtttcttcagtagtgaccgttgcatcgaggaatattctgatacaatctggaacgttgaaccagtgacttaa

SEQ ID NO: 2725 - DNA, 1971 bp, Saccharomyces pastorianus
atgagtaataatgggtctcctgcggctccttcaaaaacagaattcaataaatataaaatcggtaaagtgaagagtacaccagctatccaacgagatttgaagactaatttaacattcattgagttgaaaaagagaagtagtgagaaggtttacggatgtactgttttccaagaccattatcgtgaagacgaaaaactaggtcaaggtacttttggtgaggtttataagggtattcatttagagacccaaaggcaagtggccatgaagaagattatagttagtgtggaaaaagatctctttccgataacggctcaaagagaaattaccattttaaagcggttgaaccacaaaaacataatcaaactaattgaaatggtgtatgaccattcaccaggtacgataaattcaacatccaacaacttgcataaatcattttatatgatcctgccgtatatggtagcagatctctcaggtgttctgcacaatccaagaatcaatttagaaatgtgcgatatcaagaatatgatgttacaaatatttgaaggtttgaattatattcattgtgcaaaattcatgcatagagatataaagacggcaaacattttgattgaccataatggtgttttgaaactggctgactttggtttagcaagactgtattacggttgtcctcccaatctaaagtatccaggtggtgcaggttcaggagcaaaatatacatcagtagtggtaacaagatggtatagagcaccagaacttgttctaggtgataaacactatacgacagctgttgatgtatggggtgttggatgcgttttcgccgaatgttttgaaaaaaaaccgatactacagggtaaaaccgatattgatcagggacatgtaattttcaaattgttagggacacctacggaagaagattgggctatggctcagcatttaccaggtgctgaactaacaaaaacaagctacaaatcaacgataaaagagaggtttggtaaatacctaaccgagacaggcttggacttcttgcgacaattgttggctctagatccttataagagactgaccgccatgtccgctaaacaccatccttggtttacagaggaacctttgccttcagtaaaaattacactaccaactgaagaaagtcatgaagctgatatcaagagatacaaagaagaaatgcatcaatcattatcacagagagtgcccacggcaccaagaggtcatacagttgaaaagggtgaatcacctgttttgaaaccccgtgtagcaattccaagaggtcccaagaaggatgacgcaatccctatagcgcccttgagagatatatcttctaggccgccttcgtcaaattcgagagatcagcatcaaaatcctaggtcgtatcattctaataacggatattcgaaaaccgtggcaccaccatcagctacacccgtgggaatcaacaggtatgggaccaataatattccgagaaacaatcgcttcgacggcagccatgcaggtccaaataacaacaggaatccaataaatcggtttcaaccagagacaaatgtcaactctaaatacactaacacaccactgccactgggaccacaatcaagataccagggcacctcaacagattcgaggtacaaaagctcggcaaacgactctagataccacaacccaaggtatcctaacaaatcggacacaagtttcaataaaccagttcaaaactacagtcgccaagaaccccatgtaataagcagaaattataatcctccgaacggtccccgcaacgccggtttcaatcatcatcaagatccaagaccaccccagacacagtttccagtatcatcctcgcagaaccaaaatcaaattttaaataaaccactagataataaaaatggaagtttgaaggacgagagagcaaaaccagatgaccaaaggagtcatgacaataatgatattgcagatctatattag

SEQ ID NO: 2726 - DNA, 1590 bp, Saccharomyces pastorianus
atgacaacaaacaaagccagcctaccaccaccagtcaatcttattccaataaagcgaccttcgaatgaagaggttcaagacacaacatccattctgaaaaagcgtagtaaagatcaagaaaagcaaaaaaatgctgatcctgattttacttctcttcaaaaaagactattacaacaattgaatggcactattcccataagcgagaaaatcatctttaggtacttacaagacagtcaacaagagatcgatagaatcataaaacagtccgtcattcaaaaggaaagtcattcggtaattctcgtgggtcccagacagagctataaaacatacttattagactgtgaattggctttattacagcaaagttacaatgagcagtttatcactataaagctaaacgggtttattcactcggaacaaaccgctattaacggaatagccacccagttggaacagcaattgcaaaaaattcatggaaatgaaacgaagatcgatgatgcctcgttagaaaaaataagcagcggttccttgacagaagtttttgagaaaattttattgcttttagactcggctacaaaggcaggaagcgaagatggtgataacgctgacggaagcagtaccacaaagataaccgtggtcttcgtgtttgacgaaatcgatacctttgctggaccagtaaggcagaccctgttatacaatctctttgatatggtagaacacgctagggtacctgtttgtattttcggctgtacaacaaagttgaacattttggaatatctggaaaaaagagtgaagagtagattctctcaaagagtgatccatatgccacaaatacaaactttggacgacatgatcgaaggggtaaaggatttacttactgttcgtttagaagtctcgcccttggcttcaaactggaatgatactatggaaaaggagttatccaaccctcggtccaacttgaatagacatatcagaatgaattttgaaactttcagggcatttccagtcttaaaaaattgtttgactccactgatagcgacgtcccaaaacttcgattcactctgtagtgccataaagtcatgcgcctttcttgaactttacaatacgaaccaattgtctaatagcttaaccggaagactgaaatccttgtcagatttagaattagccattttgatttcagctgctagggttgccttacgagccaaagacggatcctttaatttcaacttggcgtatgcggagtatgagaaaatggtcaaagctatcaattccaggatcccgactgtggcaccaactattaattcaggaacaggacaaactactttttctatcgataatacaatcaagctgtggttgaaaaaagacgttaagaacgtttgggaaactttggtgcaactggacttttttaccgagaaatcggcggtaggcttaagagacaatgcaaccgccgcattttacgctagcaactatcagttccaaggtactatgatcccatttgacctgagaagttaccaaatgcagatcattttgcaggaattaagaagagccatccccagatctaatatgtactactcatggacacaactgtga

SEQ ID NO: 2727 - DNA, 1323 bp, Saccharomyces pastorianus
atggctccaccaaagaaaaccgtcaagaagatggatcttacgtcatttttgaatgatgacacttttggttcatcttgggctgaagaagatgttgatttgaacaagatcaccattcctatcgaaacggccaacgcaaataccattccgttatccgagttggctcacgctaaaaataacagcaacaacatgcactccggcggttttggtggcagtttcggtggcagtggtggtagatccagactagaccctgccttgggtgggggtgtttccgacagaagagaggaatatcctgttccagatgctccaccatacagagctgtcatcaacaacattccatgggacatttcctcagagggtgttcaagcgtgggttgaagacggtttagtcaagcctgaagccgttgaagaagttgttctaccaaagaatctaagagacccaaccagattaaagggtaacgcctttattactttgaaagaaaaggaagatttggttgccgttttgaaatttaatggtaccaaattgaacgaaagaaccgtttacgtctctgttgccgctccaagaagaatgggtggtgatgatgtcgactggagtagtgccaggggctctaacttccaaggtgacggtagagaagatggacctgatctagattggggtgccgctagaggttccaacttcagaggtccaagaagagaaagagaagaagttgatattgactggaccgctgcaagaggctccaatttccaaaactcctcaagaccgccaagaagagaaagagaagaagttgacatcgactggaccgctgcaagaggctccaatttccaaaactcttcaagaccaccaagaagagaaagagaagaaccagacatcgactggagtgctgctagaggttccaacttccaaaactcttcaagaccaccaagaagagaaagagaagaaccagatatcgactggagtgctgctagaggctccaacttccaaaactcttcaaggcctccaagaagagagagagaaagagaagaaccttctttggactggggtgccgctagaggttctcagtttggcaagactcagcaggccaagagctcccacaaggataaagcagcatccaacaagaagcctaccgaagaacaaccaaaaattcaaaaatctgcctatgatgttttacgtaccgaagatgatgatgaagatgaagacgttgccgaaaagaaaaatgaagacgtaaaggaaagtaaaaccgatgctggagttgaagatttacaagaaaaaaccgctcaattgactgttgaagatggcgacgattgggaagttgttggtaagaaataa

SEQ ID NO: 2728 - DNA, 4221 bp, Saccharomyces pastorianus
atgctaggtttgcgaactcatggtctagacaaatatgaacattatgtcagtcgcccgtcggattttggcaagctcgagttgcaggactggttgaataataagacgttccgagtttcgccaaacttattgcacgattgcaatcccacacgtgaatggaacgaacctgaactcttttaccagagtggagattgcgcttacacttgggttgagccttgtaaagagacaaaacttgagccatcaatgatgatgctcagataccatgactcaaacattggacagatgcctcaatcttgctatccgattactactccagtggattccgaaccactgctgaaatacattatgcaagaacgtgccgacctgtcaaaagatttcccccacaagtacaacgccttattaggtagcctctttgatgttgataagaacccggaaactctagacgactctgatatagaagcattagatgacacagaaatatacgatagcagtgaagaaacacgaattgaactgcaaacactaaatgaactccaacaaaaacactccagtttgatagtatcgaacaatgggatttttcaagcaggcaatacactaataacgaacatacgacatggcatatctaatagtttagctatcaaacccaatgacgtagcgactctactcttacttactcagccaagtggtcatttattgtctcttttaccattgaacgacgaaaacgagacgtatctactacaatactggaatctaggacaaagaggccagtgggacataataaaacatcagaacgagaaacaatttgttcttatacataaagaactgggcatttgcaaatttttcgaatttcatttgccattcacttttcaattggtgaacaacttaactttgacagattcaataatcatgaatggttccttctttccaactgtttattatgattctgatccatatttcatcattttcgtaacagctataaggtacgggagaattgtttattttgtgatagaatggaatggtaatgaaataaagaaaaaggaagtttaccaattgaccgtattcgatggtgaaaaaacaaacatggctctccccattggactaaatgcttgtctcgttgagactccgctcaaattttccttggtctctgcaaaccaaatcatgtctggagaaactgaatttcactcattcgggctgaaagctttgaaaggaatcaagtcgttctttccagctcccttattactatcaaaactgcaaaaactagatccggatacgtttgaaaagtttcaatattgcaccgtgatatcttcctcaacaggaaatatttgtttctgtgtcactgaacgatcgacaataataaacggcaacttgaaatttttcgaattgacgagattcaaagggttgaagtccatttcgtcattaccttcaaatccactgaatctagattccaaatctcccagctataaactaatagtgataagttttagtaggactttggagctaacattgaccttaagagatttgagatgtttggatacaaaagatatcatcaaacctctgaacaatattacttttaaacacacaatcgatagctcgaccgaggaaaactttcaaatattagcgtttacatcttccaaaacatataatactcatacaggctctaacatcaatgataaaagtaattcccaagtttggctaacttcaccaaatgcaattactcagccctgtattgactataaactaaggaaagttcaccagattgtgcatttaaagcagtttcagattttcaaccatttaaaaatttggaaatgtaagagtttaaatatatctttgttgcaaaggcttggaatagaacatcaaaagaccgagagctcattgatttttacgactgatgccgtttcaaataataggatgtgtttattagacttgaccataactgcaactgatgccaatgatgaatctgcccaaggactgataaatatagaagacttgttatgcgactctgaaaacgaaactatctttttggattttactgagaagaacttgattcaggttaccaggaatacaatatacattgattcttttgatgctgatggaaccctggtcaagatctctcccggctgggaatttgaaaacgtagcatacaatgatgggatcttaatagtttggaataccaaactgggccaagtctcctatattaaagacgtagatgcaattggtgaatttagcacccctatactatccttaatcgatagtaaatgcgtgagcctattcattaggcagctgggaacagtgaaaaacataaattttaagattacaaagtctgcagatgatccgattgaacatattatttggattcttttgcatgacagaatcatttgcacatacttttccagttggatatccgatacagtggtcttttctaaggactataactctaaaattcagcaggcgttaatttttggtccccacttttgtgttgttgatcatgaatcttttttccaaacatacagctttaaaaataatcctttaaacaacgatttcatatgtacaagccgaataaattttcaaggcaaagacgtaaaactaagaaaatttggccagaatcaatgtttggcgtttaattcgtttgaaatttttgttattaatctacaaccaatatcgcaaagtgaagaattggacttttacaaattaaaattaccgcatttaggaaatttcaactctataatagaagtttgtccagacacaaacaataaccagttgttcatattgtactctgatggtctgagaatctttgagttgtcatatttaacctcaaataatggaaatttcttattgaaatctacaagaagtaaaaataagaaatttttgtatctagacaaaatcaaccgaatgctaatacttaaccaagacttaagagaatgggaatgtgtaagactgtcagatggtaaagcggtgagtctggattcccgatttctcaaagacgattccggagaaatccttgaaataaaagaattaccaatggctatcgaagataatcccttagaaaaaaaaataatactattaattacttttaccagctcacttaaactagttttattaactgcagccaaaaacaagatttctaatgaaataatacattcctatgaacttgaaaattccaggttactggatcatttggttgttacaccgcaaggtgaaatttttgttttggattacaaagttatgggcactgataatgaaatgtcctttaataagttaaaggttgtaaagcaccatgctgacaatgaaaaacgcgagaatagcgcacgtttacaaatcgccttggaaagaaaatttacgttcaagagctggagcacggtgaagacgtttacagttgtaggcgataatataattgctgctacaaatttgggtcagaagctttatcttatcaaagatttctccttgacctataatgaaggaacgagagtataccctttagagatttacccagattctaaagttcaaaagataataccgttgaatgaatgctgttttgttgttgccgctcattgcggcaatagaaacgatttggactcccgaataatattctattccttacctacaataaaagttgggctcaataatgaaacaggcgctctaccagatgaatacggtaacgggaaagtcgatgacatatttgaagttgacttccccgaggggttccaatatggcgtaataagcttatatgacgttttgcatggaaagaagcatgtagataattccgatagtgtcatagggccagataacgatgaaatagaggacgctcttgcaaagcgtaacaaatctctgctgttttggcgtaaacatcgcgcaacaccaaagcctacaatacgaagcaatactaccattgtatatgaggaacatgtatcatcccgctattttgaagatataagttctatattaggaagtaccgcaatgagaaccaaaagattatcgccttacaacgcgatagccctagataagcccattcaagatatgagttacgacctatcggctcagactttatacgtgttgatggcggaccaaactatacataagttcggcaaggataggctgccccatcaagaggggtatgagcccgggtggaactcgggttatttcgtctcaaaaaggtcgctaatcaagcccgacctcatctgtgaagtcgggttatggaatctaagcaacgagagaaagaacatgatataa

SEQ ID NO: 2729 - DNA, 630 bp, Saccharomyces pastorianus
atgtcccaacaagtcggtaacagtatcagaagaaagctggtaattgttggtgatggtgcctgtggtaagacatgtttattgattgtcttttccaagggccaatttccagaagtttacgtaccaacagtcttcgagaattacgtagcagatgtcgaagtcgacgggcgtcgtgtagagctggcactatgggataccgctggtcaagaagattacgatagactaagaccattatcatacccagattccaatgtcgtattaatttgtttctctatcgatctaccagactccttggagaatgtacaagaaaaatggattgctgaagtattacatttctgtcaaggtgtgccaatcattcttgtcggttgtaaagtcgatttgagaaatgacccacaaaccattgaacaattaagacaagagggtcaacaaccagttacatcgcaagaaggccaatctgtagcagaccaaattggtgctaccggatactatgaatgttccgctaagactggctacggtgtgagagaagtgtttgaagccgccactagagcttcattgatgggtaaatctaaaacaaatggtaaagctaagaaaaatactaccgaaaagaagaagaagaagtgtgtcttattataa

SEQ ID NO: 2730 - DNA, 348 bp, Saccharomyces pastorianus
atgggtaatttcagatttcccataaagaccaaactaccacccgggttcattaatgcccgtgtactaagggacaacttcaaaagacaacaattcaaagaaaatgagatcctgattaaatccttgaagttcattgccagaaacttaaatttaccaacaaaattgagactagaagcccagttgaagctaaacacgctgcccaactacatgagatctacacagattaaaaatagatgcgtcgactcgggtcatgcaaggtttgtgctgagtgattttagattatgcagataccagtttagagaaaacgctttgagcggttctttgcctggcgttaaaaagggtatctggtaa

SEQ ID NO: 2731 - DNA, 786 bp, Saccharomyces pastorianus
atgaaaagttaccatttgaacaatgacattattgtcacacaggaacagttagatcattggaacgaacaattagccaagttggaaacggcacaagagattatcgaatggtcgctagtggctttcccacaccttttccaaaccactgcgtttggactgacaggtttggtcaccatcgacatgctgtcgaaactatccgggaaatactatatgccggaattattatttatagacactttgcaccatttcccacagactttaacactgaaggatacaatcgagcaaaagtattatcagccccagaagcaaactatccatgtttataagccagatggatgcgtctcagaggcggaatttgcctcgaagtacggtgatttcctatgggagaaagacgacgataagtacgactatttggctaaagtagaacctgcgcaccgtgcttacaaagaactgcgcgtaagtgccgtcttcacaggcagaagaaagtcgcagggttctgctcgctctcagttgtcgcttattgaaattgacgagcttaacgggatcttgaagataaatccattgattaattggacattcgagcaagttaaacaatatatagatgcaaacaatgtaccatacaatgagcttttggatctcgggtatagatccgttggtgattaccattccacacaacctgtaaaggaaggtgaagatgaaagagcaggaaggtggaagggcaagacaaagactgagtgtggaattcacgaagccagtagattcgcccaatttctaaaacaagacgcctag

SEQ ID NO: 2732 - DNA, 1746 bp, Saccharomyces pastorianus
atgacccagtatgaacgtgaccctgagctggtgaattttttgtcaaaagtagaagacctggactctaaaagatacaatagtagttcaatcacgaatccagccagacaacccctttcgcctgtgaacaacgactcaccaggacacaggaacgttaggagagccaatacaacgacaaccgaaaacgaagaacgcaggaacaggtcggccaatttagcttaccgatctgcttataattatgaaatgacattctcccccaagaaaactcactactcattaaaagagctggatcttgaacgggcgacaccaaactcgaatttgaatgaacctcgccctcaaaacgcaaaggaatttgttatttccgaagaggattatttacttttacagaagatgaaagcttctcaatcacctaatgattatagttgcagtaaaccatcaccttcttttagaaaggaccatcgcgtaccaagtcgaggccgacccagagacaaggaaatagtcactgttcaatatgattttgacttccaagagacagctcgtttgcccgcttcgtcttcttcttcctcacccacaccaccaccaatgcccaccaggcgtagccatgttcaagtcattgaagatgaagagaaaccaatgcttccaataagacccgctaaggcggaaattgtcgaacgcccgctacgaaggatcactaagccggaattgccggtgcctgagcccgtcaagcccaaaccgcctgtttcacgttccacgaagccgacaagctttttgagctctttgcaagataacaagttaacaatggcaaatagccatggttcagaagtagagactcctacgaaaatagtaaagaactctcacattgactacctggattccatacaattaaaaccagccactttatcatctacaataaataataagcctaagcctacaccaccttctcccccggcgaagaggcttcccaggtctgaaagctttattaagtctgcattgaattcgaacttaacgacaacatctaaaccttctttacctgaaaaacctcaggaactacgaaatgcaaagctgaccgtccaaagggcaaaaccgagcataccgccaaagaaagtagagctaaacctcgcgttgcctgacttgcgtcctgtagagacttcttcaacgaaacaaaaatttgaacattccatcgatttacctaaattacgatccagtaaccgtaacgtcaagaaacaagaagatgatagcattccagaagcaattaaaaatattcagaacttaaaaaaaacaaaacatgaaaagcctgcaattccacagaagaaaacattcctggccaatggcttaaaacccacagcagttaaaaccgacggtgatgtgagcaagctaaaaaacaatgagccggaagctctctcgttaagaaataatctcaaaaagagccctccaaaagcaccagaacgtaagatttcaatgccagaagcattacgaagaattgaattaatgaaaaaatccaaaactgagcccgcgctggagcctgcgaaggaacttagtataaacgcgagattggatgcaataattgcgtccaagaatttgaggtcctccaatactgtaccggagtttaacagtgttaaaaccactgctaagacttctgacgacatcaatgtatcctcacgggacgaagcaaaggaaacaaaacccctggtacacgttaataaaaatagggcccgtggtcctagaagaaaacctcccacacacgtatga

SEQ ID NO: 2733 - DNA, 603 bp, Saccharomyces pastorianus
atggcttggactagcacattaccggtacacctattgaatttgatcaaaaattccaagtatgttcacgtagctacctgctctaaagagtgcatcccctcagtggcattgatgaactatatctacgtaccaggtgaaaagttgtttggtcaaacagacatcaaaaacgattacattatatttgttactcccgagaatacgcaaaagtttaataacatcaaggaaaaccctaaagtggctttactatttcatgactggatcatcgctaataatttgtcagttgggaaggaaagcatatcagagactccaaccccaacaccagtttctcaagacgaacaacgccaaagtaagcttctgaatttgttgcaagaacttaaccaagctgaattgaaccagatgagtgcgtctatcgggggccaaactgaaatcatagatccaggaactgaagaatcaaagtactacaaggacttaatactaaaggccaaccctgacgctagagcctttatatttgaagaaaacactgctgtaattaaggttagaattgacaacgctagagtgtccaataatgagaacagaacaatgtttttaagtaacgaaaaaagttga

SEQ ID NO: 2734 - DNA, 1314 bp, Saccharomyces pastorianus
atgagtacgggagattttttgagcaaggggatagagctggtccaaaaggccattgatttggacacggcaacgcagtatgaagaggcttatacggcgtactacaacggattagactatttgatgctggctttgaagtacgaaaagaaccccaagtcgaaggagttgataagagcaaagttcacagagtatctgaaccgtgcagagcaattgaagaagcatttggaaactgacgagacaagtggggggaagaagtcccctagtgccggtagtggttccacgagtggtaataagaaaatctcgcaagaggaaggtgaggataacggtggtgaagacaacaaaaaactaagaggtgctctatcgagtgccatcttatccgagaagcctaatgtcaaatgggaagacgtggctgggctggaaggagctaaagaggcccttaaagaagccgttatcttgcctgtgaagttcccacatttgttcaaaggtaatcgtaagcccacaacaggaattttattatacggaccaccgggtacgggtaaatcgtacttggcgaaagctgtggccaccgaggctaattctactttcttcagtgttagttctagtgacttggtctctaaatggatgggtgaatctgaaaaactggtgaaacagttgtttgccatggcaagagagaacaagccttctatcatcttcattgatgaagtggatgcgcttacaggaaccagaggtgagggggaaagtgaagcaagcagaagaatcaaaaccgagttgctagtacaaatgaatggtgtaggaaatgactcccagggtgtattggtcctcggtgccacgaacattccatggcaactagacagtgccatcagaagaagatttgaaagaagaatatacataccattgccagatttagcggccagaaccactatgttcgagattaacgtcggcgacaccccctgcttgttgaccaaagaagattatagaactttgggtgggatgactgaaggttattctgggagtgatattgccgtggtggtaaaagatgctctgatgcagccaataaggaagattcagggcgccactcatttcaaggatgtgtctacagagcaagatgattcaaagaaactaacgccgtgctctcccggtgatgatgacgccattgaaatgagttggactgatatcgaagctgacgaactaaaagaacctgaccttgccataaaggatttcttgaaggccattaagtcgacaagacctactgttaacgaggatgatttgctgaaacaagaacagttcacaagagattttggccaagaaggtaactaa

SEQ ID NO: 2735 - DNA, 666 bp, Saccharomyces pastorianus
atgggagttcaagacaaggcaccaggaacacagaggaaccgcaagttagcgtccgtatctcgtgaaagaagcaacgtccggcacgcttcgcagaggacacgttccaagaactacaagaatatctcaaagaaaagggcccaacagcatgcgtttgggttcagcgtttcaaagatggttgcgatgatccgggcacgtgtgtggggaacacccgccgaggaggaagaagaaagcgtaacctcttcgtctgcgtctccttacgactgtgtgcctctgcaatggcaagccaaattcgcgcaactacaactgcaactgcaatccacgcaaaaggaactacaatttgtcaaggagaagtgccacttgctgcaatcggtgctggacgatgcgaacatcgaccaaaggtacctcgagtcccgcagagacatgaaaaacattgaacgggacaatctcaagcctactgaaattttgccgccctctccagtgagagcggtgaacccactagtgacttcgagcccaatccacatgtcgccgctccagtctcgccagagaccactttcggcattgcagccccccaagggccccaacttttacgccaagtatccgaaactaccccagacgaatatcctaagagaatctcccactgaggaatcgctttcccaggcccaatag

SEQ ID NO: 2736 - DNA, 978 bp, Saccharomyces pastorianus
atgtcgggactgtctgcgttgcttagggagaaacatattcgctacattgaatcactagattccaagaaacacaattttgaatattggcttacggaacatcttcgtttaaacgggatgtattgggggcttacggccctatgtgtgcttgattcttccgagacatttgcaaaagatgaggttatatcgtttgtgctcagttgctgggacgacaaatatggcgcatttgcaccatttccaaggcatgatgcacacttattgaccacattgtccggggtgcagattttggccacgtatgatgccttagacgttctcggcgaagagcgtaaagctcgattggttgcatttattcgtggcaaccaattggaggatggctcatttcaaggtgacaggtttggggaagtcgatacaagatttgtttatacggcgttgagtgcgctgtcgattttgggcgaattgacgccggaagtggttgatcctgcagtgaaatttgtattaaagtgttataattttgatggtggatttggattgtgccctagtgctgaatcacacgcagcgcaagcttttacgtgccttggtgctttggctattgcgaacagattaaacgcgctaaatcatgatcaattagaagagattggatggtggctttgcgagcggcaattaccagaaggtggattgaacggtaggccaagtaaactacctgatgtgtgttacagttggtgggttttatcttcactggctattattgataaactggactggataaactacgagaaattaactgagttcatactaaattgtcaagatgagaaaaagggcggaataagtgatagacctgagaatgaagttgatgttttccatactgtctttggggttgctggcctaagtttaatggggtacggtgatctagttccaatagatcctgtatattgtatgccaagctccatcacagccaaaatcaaaaaatatccatacaaatag

SEQ ID NO: 2737 - DNA, 1398 bp, Saccharomyces pastorianus
atgagtaaaggtgtttcgtttgaaaatcttccagtggatttgcaacataagagtgttacacaaaatgaaagcaccgctgatatattaagccagttaccacatgaacgattacaagctgtccttgagaaggtgccagaagatgacgttgaagtgagaaaagtactattgttattgaagaagccagaagtggtggataacgaagatgtgcagcagagaagggtacgactggctgaagcgctgataactgatgaagttgatccatctggtatctcaaatacagcagaagtaaataccgaagaggaagacgaggaagatgacgaggagttttttacgccagcaacttctgagctaatatctgctaggaaatttctagtcaaatactcattagagagatctcgaaagaggttacaggcagagatgcaaaggcaccaaaatttcaatataaaggaagagttactcagtcgacgggcagaactagaacgtatggcaaatttagaacttgctggatctcaattagtatctactaggcctatatcagctgtctctttatcaccaaataatgattatatcgcaactggaagctgggcgggtgatattaacatattgaattctcaaacgctacaaccgttagcacagaaactcgattctcacatagggaaaattggggctgtacaatggcatcctggatcaaacaatcaaataatatcatgtgcagaagatggactcataaaaaatttccaatacttaaacgaggaaggggacttacggttattgggtgaccttgtggggcacgaaagacgtgtctctgatttgaaataccatcccagtggtcagtttataggcagtgcctctcacgatatgacgtggaggctctgggatgcttccacgtaccaagagcttctattgcaagaaggtcatgccaagggggtattctgtttgtctttccaatgtgatggatcgcttgtttgcagcggtggaatggactcccttgcaatgatatgggacatacgatctgggaataaggtgatgtctctaaccggacattcaaaacccatctacactgttgattggtcaacaaacggatatcaagtagccaccggtggtggtgatggattgatcaatgtttgggatataagacaacgagatggtggtcaagtacaccaaattttggcacaccgaaacatcgttactaaagttcaattctcaaaagacgataatggcaaaaaacttatatcttgtggttatgataatctgattaatgtatatagtagtgataattggttgaaagtggcaagcctggaaggtcatactgataaaattattagtttggatatttcaaacgactcccagtatttagtgagtggcggttgggacaggtcagtgaagatctggaattga

SEQ ID NO: 2738 - DNA, 2307 bp, Saccharomyces pastorianus
atggacttcgagaccaatgaagacatcaacggggtccgtttcacctggaacgtgtttccctcgaccagaagcgacgccaacagcaacgtcgtccccgtcggctgcctgtacactcccttgaaggagttcgacgaattgaatgtcgccccatacaacccggtcgtgtgttccggcccacactgtaagtccattctgaacccatattgtgtgatcgaccctcgcaactcgtcctggagttgtcccatctgtaactccagaaaccacttgcctccgcagtacaccaacctgtcgcaggagaacatgccgctggagttgcaatcgaccaccattgagtacgtcaccaacaagcccgtcaccgtgcccccaatcttcttcttcgtcgtggacctgacttccgagacggagaacctggactcgcttaaggagtctatcatcacctcgctgtcactgttgccccccaacgccctcatcgggctgatcacgtacggcaacgttgtccagctgcacgacctgtccagcgagacgattgacaggtgcaacgtgttcagaggcgacagagagtaccagcttgaggcgttgaccgagatgttgacgggccagaagcccacaggccccggcggtgctcagtcgcatctaccgaacagcataaacaagatcacgccgttctctttgaacaggttcttcctacccctagagcaagttgagttcaagttgaaccaactactcgaaaacctgtctccggaccaatggtccgtgcccgcaggccacagaccactaagagccaccgggtccgctttgaacattgcctctttgcttctacaaggctgctacaagaacattcctgcaagaatcattcttttcgctgctggcccaggcaccgtggccccagggctgattgtcaattcagagttgaaggaccccttgagatcccaccacgacatcgactctgaccgcgctcagcactacaagaaggccagcaagttctacaaccaagtcgcccagagggtcgccaccaacggccacactgtcgacatctttgccggctgttacgatcaaatcggtatgtcagaaatgaaacagttgaccgactccaccggtggtgtcttattgttgaccgattccttttccaccgcgatcttcaaacaatcctacttaagactgtttgccaaggatgaagaagggtatttgaaaatggctttcaacggtaatctggctgtcaagacaagcaaagacctgaagattcaaggcttgattggtcatgcctccgccataaagaagacagacgccaacaacatcagcgagtccgaaatcggtatcggtgcgacttccacttggaaaatggttgctttgtccccttaccattcgtatgcaattttcttcgatattgccaacaccgcggctaattccaacccaatcatgtctgcgcctggttctgcagacagacctcatctagcatacactcaattcatcacctcttaccagcactcttctggtaccaaccgtatcagagtcaccaccgtggcaaaccaacttctacccttcggcacccccgctatcgcagcttccttcgatcaagaagctgcggctgtgttgatggcacgtatcgccgtccacaaggctgaaactgatgacggagccgatgttattagatggctggacaggactttgatcaagctgtgccaaaagtatgcagactacaacaaggacgaccctcaatccttcagactggctccaaatttttcgttatatcctcaattcacttactatttaagaaggtcccagttcttaagtgtctttaataattcccccgatgaaactgcattttatagacatattttcacaagagaggatacgactaattctttaatcatgatccaacccactttgacatctttctcgatggaagatgaccctcaacctgtcttgctagattccatctccgtcaaaccaaacaccattctgttattagacactttcttctttatcttaatataccacggtgagcaaatcgctcagtggagaaaggctggttaccaagacgatccacaatatgccgatttcaaagcccttctagaagaaccaaaactagaagccgcagaattattagtagatagatttccgctaccaaggttcattgacaccgaagccggtggttctcaagcaagattcttactatctaaattgaatccatctgacaactatcaagatatggcccgcggtgggtctacaattgtcctgaccgatgatgtatcgttacaaaacttcatgactcacttacaacaagtcgctgtctctggtcaagcatag

SEQ ID NO: 2739 - DNA, 261 bp, Saccharomyces pastorianus
atgagcgaggccagtgacagcaacgtgatgcaacccgtaaacccgaagccctttctcaagggcctggtcaaccaccgcgtgggcgtcaagctcaagttcaacaacaccgagtacaggggcacgctcgtgtccacggacaactacttcaacctacaactggaagataccgaggagttcgttgcaggcgtctcgcacggtgtcctgggcgagatcttcatccgctgcaacaacgtgctctacgtcagacagctgccgaactga

SEQ ID NO: 2740 - DNA, 804 bp, Saccharomyces pastorianus
atgagcattgagtactccgttatcgttcccgcctaccacgaaaggctaaacatcaagcccctaaccacccggctgttcgccggtatgggccccgagatggccaagaagaccgagctgatcttcgtcgacgacaactcgcaggacggctccgtcgaggaggtcgatggcctggcccacaagggctacaacgtgcgcatcatcgtcaggaccaccgagcgcggtctttcctccgccgtgctcaggggcttccacgaggcccagggccagtacctcgtgtgcatggacgccgacctgcaacacccaccagagagcgttcctgacctgttccggtctctacacgatcacgcgttcaccctgggtaccaggtacgctcccggcgttggcatcgacaaggactggccgctgtacagacgcgtcatctcctccaccgccaggatgatggccagacccttgaccgtggcctccgaccccatgagtgggttctttggcctgcagaagaagtacctggagaactgcaacccacgcgacatcaactcggagggcttcaagatcgcgcttgagctgctcgccaagctgcctctgccaagagaccccagactggccatcggcgaggtgcccttcactttcggtgtgagaaccgagggtgaatccaagctctcgggcaaagtaatcgtccagtacttgcaacagctgaaggagctttacgtcttcaagttcggcgccaacaacctcatcctcttcatcgccttttggtccatcctatttttctacgtgtgctaccagctgttccatctggtcttttaa

SEQ ID NO: 2741 - DNA, 4611 bp, Saccharomyces pastorianus
atgaacagaactctactgctacgtttgtccgacactggtgagcccgtcacaagctgctcttatggcaaaggtgtcttgacactaccccccatcccactccccaaggatacccccaaggaccagccgctgtacacggtgaagctgttgatatctgcaggctctcccatcgctagagatggcctggtgtggacaaattgcccaccagatcacaaaacgcccttcaaaagagacaagttctacaaaaaagtcgtccgctccagcttccacaaggacgactccatcggcctggacatttacgccccgggctcgtactgcttctacctctccttcagaaacgacagcgagcagctcgaaacaactaggaaatactactttgtcgccttacccattctccacgtgaacgatcattttttgcccttgaactcgatcgccatgcaaagtgtcgtgtccaaatggctgggctccgactgggaacccatcctgtccaatatcgctgccaaaaactacaacatggtgcatttcacgcctctgcaggaaagaggggaatcaaattcgccgtactcaatatatgaccaactgcagtttgaccgggcccacttccagtccccggaagacgtggcagatctggtcaagcacctgcatcgcgacctgaacatgctctccttaaccgatattgtgtttaaccacaccgcaaacaattctccttggcttgtcgaacaccctgaagctgggtataaccacctcactgctccacatttgatcagcgccattgagctcgatctagaacttctcaacttcagcaacaacctcaagtcctggggctacccgaccgagctgaatactatagacgatcttttcaaaatcatggatggtatcaaagtgcatgttctagggtcgttgaaactttgggaattctacgcacttaacatccaggcaaccctacaagacttaaaggaccactgggacgacgaatccaacgaaaccttcgagttccccgaagatattaaagatgcctcgtcagacttcgtgaaactggcctcatttgttaaagataacgttaccgaacccaatttcggcacactaggcgaaagaaactcaaacaaggtccatgtggctaaacttatacagctactgaagcttatcagcaacggagatagcaacaacattgaaccctcattagctgttgcccagaacatcttgaatgaattaaacttgcccctgtataaagaatacgacgatgatgtcagcgagattcttgaacaactgttcaaccgaattaagtatttaagaatagacgacaacgggcccaagcagggtccggtcactcccaaggtgcctttaacagaaccatactttaccaggtttaaggggaaagacggcacagactatgccctcgccaacaacggttggatatggaacgggaatccgttagtggattttgcatcccaaaattccagggcttacttacgtagagaggttattgtctggggggattgtgtcaaattaagatacggcaaaagccccgaagactccccctacttgtgggaaagaatgtccaagtatattgaaatgaacgccacaatatttgacgggtttagaatcgataactgtcattccaccccattacacgttggtgaatatttcctagatctggccagaaaatacaatccgaatctttatgtcgtagctgagctgttctccggttcagaaaccctggactgtctgtttgtcgaaagactcggtatttcttctttaatcagagaagccatgcaagcttggtctgaagaagaactatctagattggttcataagcatggtggcagacctattggctcctataaatttatcccgatggacgatttttcgtatccgggggatttcgatttagatgaagaacattgtttcaacgatccaagcgataactcgttaaaatgtgtttcagagatcataattccgaaaattctaaccgccactccaccgcatgccttgtttatggactgtactcacgataacgagactccatttgagaaaagaacagtggaggataccttacccaatgctgcgctcgtggcgctttgctcctctgccataggatctgtttatggttatgacgagatttttccgcatttactgaatttagttactgagaaaagacattatgatagttccacctctaccggtagttcttctgcagggattactaaagttaaggccactttgaactcaatcaggacaaatattggccaaaatgaatatgatatcgaagattcagaaatgcatgttcaccaccaaggacaatatatcacctttcatcgtatggatgttaaatcaggaaaaggatggtatttaatcgccagaatgaaattttccaataacggcgattccaatgagactttacccccggtggtactaaaccaatcgcagtgctctttgaaattttcatatgctttggaaagagttggcgataaggttcctgatgatgacaaagtaatccgaggtatttccacaaaattaaaagagcttaaagggtttgagatctcttatgatcacgtaaagaagctctccaccatcaaattacccgacgaattccctcaaggttctatcgccatttttgaaactcaacagaatggtgtggatgagtctttggaccatttcataagatcgggtgccctaaaagcgacctcaaaattgactttagaatccataaattccgtcctgtaccgtagtgaacccgaagaatacgatgttagcgctggcgaaggcggtgcttacgatattcctggtttcggcaaacctgtttattgcggattgcaaggttgggtctccgtcttgagaaagcttatgttttgtaacgatttggctcatcctttgagtgcaaatttaagaaatggccattgggccctagattatactgcaagcagactaaattactacaatgatgaaacaggaatcattgagatacaaaactggttgcgttctagatttgatagagtcaaaaaattaccaagctacctggtaccaagttattttgccctggttataggtattctttatggatgttgtcgtttaaaagccatccagttgatgtccgataatattggtaaatctacgttgtttgtacaaagtttatcgatgacgtctattcaaatgatttctagaatgaaatcaacctccattctaccaggagagaacgttccctccatggctgcaggtttaccacattttagcgtaaattacatgagatgttggggtagagatgtttttattgcattaagaggtatcctattgaccactggtaggtttgatgaagcaaaggcgcacatactagcgtttgccaaaacattaaagcatggtttgattccaaatttactagatgcaggtagaaacccaagatataatgctcgtgatgctgcgtggtttttcttacaagctgtacaagattatattcatattgttccagatggtgaaaaaattttgcaggatcgagtaacaagaagattcccattggacgacacttacattcctgtagatgatacaagagcatttagttactctagtagcctagaagagatcgtttacgaaatcttgagtaggcatgccaagggaattaaatatagagaagccaatgcgggtcccaatctagatcgtgttatgactgataaggggtttgatgttgaaatacacgtggattggtctactgggttgatacacggtggatctcaatacaattgtggcacctggatggataaaatgggtgaaagtgacaaagccggctctgtaggcatacccgggactcctagggatggggccgctatagaaatcaacggccttctgaagagtgccttaagatttgttgttgaactaaaggaaaaagggttatttaagtttacagatgtagagacacaagacggtgacaaagtcagctttactggctggaatcaattggttcaagacaatttcgagaaaaagtactatgtaccagaagatccaactaaggatgcggagtatgatgtggaggtcaaatcaggcgttaacagaagaggcatctatagagacttgtacaagtcaggaaaaccttacgaagattatcagttaagaccaaactttgccattgccatgactgtggcaccagaattatttgtccccgaacacgccatcaaagcgattactattgcggacgaagtgctaagggggcccgtgggtatgcgcactttggatccaagcgactataattaccgcccgtactataacaatggagaagattccgaggatttcgctacttcaaagggaagaaattaccatcaaggccctgagtgggtctggctctacggttacttcctaagagcgttccatcactttcacttcaaaactaacgctcgttgccaaaacgcagccaaggaaaaaccgtcctcgtacttgtaccaacaactgtactaccgattgaaaggccacagaaaatggattcgtgatagcgtatggacagggttaactgagctaactaataaggatggtgaactatgcaatgattctagccccacacaagcctggagttccggctgcttgttggatctattctacgatttatgggacgcctacgaagacgattcatga

SEQ ID NO: 2742 - DNA, 492 bp, Saccharomyces pastorianus
atgaaccatagtgaatcgctaacgttcaatcaactcacgcaagactatataaataaactcaaggatgcgtttcaaatgctagatgaagatgaagatgggattattagtcggaaggatcttgccaaaatgtatgctaccttgggaaagacattgacagacgaagaatggtccaacatggtacccagtaatgaaaataccacaaaagaggttggtgaagagggtgcgagcttccccatttttttatctattatgggaaaaaacctgtcacaatttcccgaacgtgaagaattagagaaaagcttcaagtcacttagtgagaaagatgacttaaacattcctctcaatgaggtgattgaatcgttaaaggaggcgggctttgaaaatcctgaagaagaatttgctaaacttttgaaattgtttactacaaatcagcaaagcactgatgagaaaacctttcgaggtaagcttttcttggattcaatcaccgattaa

SEQ ID NO: 2743 - DNA, 4257 bp, Saccharomyces pastorianus
atgtcggacgtcaaacaactgttgaaagaagccaagctagaattgacgagacgggactacgaagagaccattgaaatttctgaagaagttcttaaattagaccctgacaattactttgcacatatctttttaggcaaagcgttttcgagtcttccacctagtaatgaaggcaactcaaatcgtcatttggagagtgccactgctcattatatatctgctaccaaattggcccctgacaaccttttagcatggaagggtcttttcctcctattcaagaccaccgaggccgttccaaatatactttcgtatgatgtatattttgatttatgtggccaatatgccgatattcttttgaagcaggagcagtctcaagtagggctgataaatgacgtaaagcttttaaagaaaactcatacagactgtaggaaggccttttatgagcatttgaaacccggatctttaatggccgaaaccattggtcgtcatttagctacaccacaggacgccttattgaatctcataaaaattttgtccaatacagaagtcacagaaattggtaaggccgttagtcagaatagattaagactaaaagccagtgatccagattatcagattaaattaaactcattctcctgggaaatcattaaaaactcagatattgatcagctatacaaccaattagtaaatattctcaccgatgatcaactgagaagtgacatcgaaaatgagtggttggaatatagaattaaagtcctaaaatctatgccgttagatgtgaagaaggatttcttcatgaaagtcaaagatatggttgaagatatggttcttgtagatcaccagtctttactcgcctggcagaaattttttgagtggaaggattacgaaggtctggacaacatggatgctatgctaatattacagtattttaagaagtttcctaaagatcctttagcgatgattctttattcttgggttttttcaaaactatcaaaatatgatatcaagagtttggaagccactaatcaaccgactgaaagtcatgacaagaaaaataaggaaacagacgtcaagaatacagatgaacatgtaattaaggatcaagatgaaaatgaaaatgaaaatgagccaaaagaagatgacgaagaagatcttgatgatatggaaatcggtttattggaagatgaagttgtaactgcattaacagaaaatatcgtaaagtgcaagaataatattttggcacatcggattttatgtcagtattatttgctcaccaaggaatacgaagcatctttgccgtatatcaaaacgggaatttcattaatcgcttataacattaaggatttgggagtttatttgccattaactaaaagagagttttctctggatctggcaactgtttatacatatgttgatgctccaaaagatcataatgctgcgttgagattatacgacaacattttatctggtgattctgacaatatacaagcaaaaatgggtaagggtataattttcattgaaagaaagaactgggaggaggcaatgactttattgaccgaagtgcatgaacaatcccctaataacttggaagttttatctgaactatcgtggagtaaagcacacatgggtttcatggaagaagctctgattggcctagacggggtggtcaaggctatcaaaggtatggatttgcgttcgattgatttcagagcattgaacttatggaggcaagcaaaagtttatctaatgaaacatgcttcacttgacgatgaaaatcaagaaaatatcaagtttgcatttaaactattagttcaaagtattaagatcttggatacttttgcccctggtttctcaacgctgggtgatatctattgccactattataaagatcattcaagagctttcaaatgttacttcaaagcgtttgatctggatgcaggtgattatacggctgcaaaatatattacagagacatatgcaagcaagcctaattggcaagccgcctcctccattgcttcaagattgatcaaaggcgaaaaggccaaggcagaattacgttcgaacaattggccatttagagtcgttggggttgctcacctggaaaagcaagaagaaagtgactctattgagtggtttcaatctgctttacgcgttgaccccaatgatgttgagtcatgggtaggtttgggacaagcataccatgcgtgtggccgtatagaagcatcaattaaagttttcgataaggccattgaattacaagcttcacacacttatgcgcgatatttcaaagccctatccctatgtgacatgggtgaatatcttgaaagtttggagacgctagaaaaagtgtgccaagaagtggctaccgaagaatctttccagattggtttggtggatgtacttgtaaaatactccttggatttatattcacaggggtttttaatgaaatcagtagcaatcgccaacgatactattgaaaggattaggataataatcaccgagttgcaatgcacaaaccagcagatttggatttgcctttcacaagtcttgagattgttcatttggatagaatccaaggttgatactttacctgttgaatcactagtatcaattttccaaatttctgggcttactgaaactaaagaagttgattccatcgacaatattaaaattgacaccttgctggatagtactactgacgataatgtatccattgcgtgtaaatttttgatattggcttcaaaatacagtgtttccaatcaaagcatgtcagatgccgcaggaacaattagagcttcatactggtataatattggtatctctgagcttaccgcatttgttactttgaaagattctcattatagagatgctgcagtttttgctttcaagaaatcgattcaactacaatccaatacaagcgaaacttggattggactgggtatagcaactatggatataaactttcgtgtttcacaacattgtttcattaaggcaactgctttggagcccaaagcgaccgatatttggttcaacttggctatgctgggcttgaagaaaaatgatgctgagtttgcccagcaagttctcaataagttacaaagccttgcaccacaggattcatctccttggctaggaatggctttaatacttgaacaacaagggaatattgtcgaaagctctaaattgtttgcacactcctacatattatccaatggtagctcaaaggccgcccaagtattatatgctaaaagtgtacttgaaaatcatattgacaacggtgatgacgaaagagatattgaaacagtagaaaaactaaccactgtttcaatagctctggatcagttcttcaagaaaagccctgaaaatccgttcgctattcagtgtgctctgctaacctttgaaaggttacatcattacgagcctgctaataagttagctgaccaactggcaggaatattggagaaaagatttgaaaaaactcaagacgaaaaagagttatttaattttggtatcatcaagggacagtttgcccgtattcatctaggtctgggacattttgaactctccattgaaaatgcagaattgtctcaaggtattatatccgaatccagtgacaaaaaagcattaagaacaaagatatcgaatcatatttctctaggattgagttattttttcctgaatgattttgatcaaacattaagacaatttcaagagttgctaagaatttcgaagaaatctaagcatttagtgattttgatcgctaaggtactttatgatgtaggtgaaaatgatgcgaaggaaattgccctacaagaactaacagaatatataaccacaaaaggggcagacttgttaataacactaaccattgcagctatgtcaattctggatgacaagcgtgaagatttaagtattattgtaagtaaattgaaggccttaccattgtccagcctgatagcggataaacacaaagatgcaccatatctgatagaagagataacgaaaagactttataatgatgacacctgtaaacaaacatggcaaagaagcgcatattttttccccaataatctcgaggtttggaatagattgaataaaaatattcagcgtaaaatagcttctaacggtcagaataaagttactgcagaggagatgagtaaactatactgtgaaagtaaaaatttgagaagcgtgcaaagaagtgtgttcctgtgtccttggaacaaaactgtagtgaatgcactaaaagagtgcttttag

SEQ ID NO: 2744 - DNA, 1971 bp, Saccharomyces pastorianus
atggacgagctactgaaggatgtggtaagtgcggaaaatcaagcaggtcaaggcggggcagagtccgagagactggtcacgcccgaagacgttatgaccatatcttccttggaacagcggactttgaatcctgatttgtttctatataaggaattggtgaaggcacatctgggtgagagggctgcctctgtggtcggaatgctggctgcactgggcagattgagtgttcgggagttggaggagaagatagatggcatgcatacggagagcatcaagaccacgttagtgtcattgacgcaattgaggtgtgttaagtttttgcaagaaacagcgatttccgggaaaaaaaccacctattattattataacgaggaagggattcatctactgctttactcagggttgattattgacgaaattacatctcaaatgcgtgttgacgatgaacataagcaattagtggcacaaatcgtacaaaacgtcatatcattgggctccctgactgtcgaggactatttaagtagcgtcacatcagaatccatgaagtataccatttcgtcactcttcgtgcaattatgtgaaatgggatatcttattcaaatatcgaaattacattatactccgattgaagacctgtggcaattcttattcgacaagcattataacacaatccccagaaactctcccttatcggatttgaagaaaagatctcaagcgaagatgaatgcaaagaccgattttgcaaaaattttgagtaaaccaaacgacctttcacaaatcttaaccgttgacaccaagacttcattgagggtcgttaagtctacggtctccttaactattaatttagataggtttatgaagggcagaagatccaaacaattgaccaatttggccaaaacgagagtcggatccattacagctcaggtttacagcattgcattaagactcacagagcaaaaatctccctgcattatagatctattaactcaaactggtcttttacaggatttagatgaggcaaaatcgtttcaggaagaactagagctcattgaggaaaagacgccaggtttaacctttaacgctattgacttggctaagcatatccctaaagaattggacctgcgcggcagcttagtaaccaagaagccctctgacaataagaaacgttccggttcgaactccgctccaccaccagcaaataagaaactgaaaactgaagatggatttgccattcctgcgctacctgctggcatactcaaatctgttcaagatagtgaagaaggagaacaaggaggagaacaagaagccgaggacgacgatgaattggatgcagatatggaaaatccacactcagcttcgttaataaatagccatttgaaaatcttagcatcatcaaattttccattcctaaacgaaacaaaaccaggtgtttatcacgttccgtatagtaaattaatgccaactttaaagtcatctgtttatgaatatattattgcttccacactaggtccatccgctatgcgtttgagccgttgtattcgtgataacaagctagtctctgaaaaaattattaattcaactgcattgatgaaggaaaaggatataagatcgacattagcgtctttgattagatacaactcggtggaaatccaagaagttccaagaactgtcgacagatctgcttcaagggcagttttcttattcagatgcaaagaaacacattcctgcaatttcatgaagcaaaacttggagtggaatatggcaaatttgcttttcaaaaaggaaagattaaaacaagaaaactccaccttattgaaaaaggcaaatagagatgatgttaagggaaaagagaatgagcttttactaccaagcgaactgaatcaattaaagatggtcaatgaaagagagctaaatgtttttgcacgtttgtcgagactattatcactttgggaagttttccaaatggcatga

SEQ ID NO: 2745 - DNA, 1779 bp, Saccharomyces pastorianus
atgtcttcaattattaaggaaatctttgtagacccctacaaaaggttgaaatgggggtttatcccggtgaagagacatgtagacgacttacaaggcgatctagactctacaaaaaactcaacccactcgggtgataccaacaatcgcgaaacgaaagagagtaatattaataatacaaccgagaaggccaatttgtattctgaaataactcatcacgatcgaaataatggggacgatactacagtatatgaatatagagatgaagccagtagaccatggtggaaattcttcgatgaacaagaatatcgtatcaatagaaaggaaagatcacacaataaatggtacagttggttcaaagagggaacaagctttgaagagaaaaaattattggttaaattggacgttcttttggctttttactcatgtatcgcttattggattaagtacttggatacagtcaatgtaaacaacgcctacgtctcaggtatgaaagaagatttaggtttcaaaggtaacgacttggttcgtactcaagtaatgtacacaattggtaacattatcttccaattaccttttttaatatacctgaataaaattccattaaattacgttttaccaatcttagacttatgttggtcattattgaccattggtgctgcttatgtaaactctgtcccacacttgaaagcgatcagatttttcattggtgcttttgaagccccgagttatttggcataccaatatttattcggttctttttataaacatgatgaaatggtacgccgttctgctttctattatttgggtcaatacctcggcatcctatctgccggtggtattcaatcagcagtattttcatcgctaaatggtgtaaatggcttggaaggttggagatggaattttattattgacgcaattgtatctgttgcggtgggtatcattggtttttatgtcctaccaggtgatccatacaattgttattcaattttcttgactgacgatgaaattagattagctagaaaaagattaaaggaaaatcaaactggtaaaagtgattttgaaacaaaaatatttgatactaaactatggaaatctatttttggtgattggaaaatctatattctatcgctatggaatatcttctgttggaacgacagtaatgtgtcgtcaggcgcatacttgctttggttgaaatctttaaaaaaatattctattccaaagattaaccaactatctatgattactccaggtttaggtatagtctatttaatgctaaccggtgttattgcagataaatttcattcccgttggtttgcaattattttcacacaagttttcaatattattggtaacactatattagccgcttgggacgtcacaggaggagccaaatggtttgggttcatgctacaatgttttggctgggctatggcacccgttttatactcgtggcaaaatgatatctgtcgtaaggatgcccaaactagagctatcacattagttacaatgaatatcatggctcaaacatctactgcatggatcagtgttttggtttggaaaacagaagaagctccaaggtatctaaaggggtttaccttcaccgcaagttcggctttctgtctttctgtttggacttttgttgttttatacttttacaaacgtgatgaaaggaataatgccaaagaaaatggtattatactttacaactctaaatatgacgaaaacccaacatcaaaagaggtcgaaattgtatcaatagccaaagaaaaagaattttaa

SEQ ID NO: 2746 - DNA, 741 bp, Saccharomyces pastorianus
atggcttctcatcaaccaggcaagtgttgcttcgaaggcatttatcatgaagggactcccgagggacgtcatgaacaaatctttggtttggatacgtacgtgacagggtctacatcacctcaggaaaaagttatcgttgtcatgacagatgtgtatggtaacaggttcaataacatattgctgactgcggatcagtttgctaacgctggatacaaggtctttatccccgatattttattcggtgattctattccgctggacaaaacaattgatcgtaaagcctggaaggaaaaacattcacccgaggttacgaaaaaaataattgacggattcgttaagtcgttgaaggatacgtatgacccgaagtttattggtgttgttgggtactgttttggtgcaaaatttgccgttcaacacatcaattctgacagaggtcttgccaatgctgcagctattgcacatccttcgtttgttagcatcgaagaaattgaggctattggtagtgggaagccattattgatttcggcagccgaagaagatgcgattttcccagccaatttgagacacttgactgaagaaaaattgaaggaaatccatgctatctatcaaatagacctctttagtggtgtttcccacggatttgctgcaagaggcgatatcgccaagcctgctgtgaaatatgccaaagagaaggccttgcttgatcaaatctactggttcaatcatttttcaaaggcttaa

SEQ ID NO: 2747 - DNA, 2559 bp, Saccharomyces pastorianus
atggtggtccaagcccgttttgcctcgggcacctcgttgccagacttgaaaccaaaatctacttccacttccatatccatacccatgcaaaatgtcatgaacaggcccgttaccgaacaggactccctttaccacatatgcgccaacatccagagaaggctcgaggctctgcctcagctgaagccgtttttacaattggcctaccagtcaagcgaagtcctgagcgaaagacagtctcttctgttgtctcagaagcagaatcaagagcttctcaagtccaacgatacgaatagagacagtagcgacatggcacccacgttgcggtcgagctccatctccacggccacaagtctaatgtcgatggagggcatatcgtacacgaattccaacccgtctacaaactctaacatggaggacacactgctgactttcagtatgggcatcctgcccattaccatggactgtgaccctgtgacgcagctgtcccaattgttccaacagggcgctcctctgtgtatagtgttcaactcggtgaaaccgcagttcaagctgcccgtcatagcctctgatgatgtgaaagtgtgtaaaaaatccatctacgatttcattttgggctgcaagaaacattttgcatttaacgatgaagagctctttactatctctgatgtgtttgccaattcgacctctcaattggtcaaagtggtggaggtagtggaaacgctactgaattccagtccaaatatcttcccctccagagacaaaacacagcaaaccttgactgcagaaaatcaacagcatcttcaacagcagattccttcaaaaaaacatattgagtacgttaagattatcaaagaattcgtcgcaacagaaagaaagtacgttcatgatttagagattttggacaagtatagacaacagctattagacagtgacctgatcacgtctgaagagctttatatgttgttccccaacttgagcgacgcgatagattttcaaagaagatttttagtatccctggagatcaatgctctagtagaaccttctaagcagagaaccggtgctcttttcatgcattccaaacattttttcaagctttatgagccttggtccattggtcaaaatgcggccatcgagtttcttacttccactttaaacaaaatgagatctgatgaatcgcagaagttcataatcaacaataaactagaattgcagtctttcctctataagccggtgcaacggctctgcaggtatcctctattgattaaggaattggtggcttactctagtgatgacaacaatacaagagaactggaagctgccttggatatctccaagaatatcgcaaggagtatcaacgagaaccaaagaagaactgaaaatcaccaagtggtaaaaaaactttatggtagagtggtaaattggaagggctatagaatctctaagtttggtgaattattgtacttcgataaagtgttcatttccacaacaaacaattctacggaacctgaaagagaattcgaagtttatctttttgaaaaaattatcatattgttttcagaagtaatagctaagaaatccacatcatcactaatgctcaagaaaaaatcttccgcctcagcatcaatgtccaactcgggagcaatggacaacaataacagtcctcaccataattatcataagagacgcagcaatagtagtagtagtaataatatccatttatcgtcttcgtcagcagcggcaataataaattccaatatcaacggcggtgataacaattccaacaattcatcgttatcttcattattcaatatatacaccaatgaacctaaactggatctgagaggtagaattatgataatgaatctaaaccaaattataccacaaaacaacagatcattaaacattacgtgggaatccataaaagagcaaggaaatttccttttaaagttcaaaaatgaagaaacgagagataattggtcatcttgcctacaacaattgatccacgatttgaaaaatgagcagttcaaggcaagacaccactctacgacatccacatcatctacagctaaatcatctttgcttatgtcacccacagggaccatgactacgccaaatcaccataatagtcgtcatacccatgatagcatggcgtcttactctagttcccatatgaagagggtctctgatgttttacctaaacgtagaactacttcatcaagtttcgaaagcgaaatcaaatccatttcagaaaatttcaaaaattccatcccagaatcttctatacttctaaggatatcatataacagtactaccaacgttaacaacaccgaaatctttacgcttttagtagaaaaggtatggagtttcgatgatttgatagccgctattaactctaaaatatcgaatacccataatagttctgctttgcccatcaataaggttaagtaccaagacgaagatggagactttgttatacttggcagtgaggaggactggaattttgctaaggaaatgttggcagaaaacaacgagaaatttttaaacattcgtttgagttga

SEQ ID NO: 2748 - DNA, 831 bp, Saccharomyces pastorianus
atgggttggttttgggctgatcagaaaaatactaccaagagcgcagcctgtggtgctgcatctgcatctgcatctgcatctgcacctgcatctgcaccatcagagtgcccagtcatgcacaagtcgtcatcgtccaagtgccctgtcatgcaagcagacacagagcagataaacccgctcaacaacatgcccgagctcaccgccgccaggcagcctggccagaagctcgacctgcccgccgaccgcaccgtatccagcatcccgaagagcccggacagcaacgagttctgggagtatccctctccgcagcagatgtacaacgcaatggtcagaaagggtaagataggcgatagcgctgacgtggccgaggacgccgtagagtcaatggtgcaggtccacaactttctcaacgaagggtgctggcaggaggtcctcgactgggagcaaccgcacacggaccagagccacgtgcagcccaaactactcaagttcatgggcaaaccgggtgttctgagccctcgcgcccgctggatgcacctatgcggcctactctttccctcccgcttcagccaagaattgcccttcgacaggcacgactggatagtgctgcgaggcgagcgcagcgagcaccaacagcagccgaccttcaaagaagtcagatacgtcctcgacttctacggaggacccgacgacgagaacggaatgcccacgttccacgtcgacgtccgcccggccctggacagcctggacaatgcgagggaccgcatggcccgtttcgtcgaccgaatcaagccggatccgtcctcgtcatcatcgtcccgggccccttaa

SEQ ID NO: 2749 - DNA, 507 bp, Saccharomyces pastorianus
atggtgcgtttaaagagcagatacatcctattcgaaatcctgtaccctcctacagacatcagtgtcgaagaatccttgtccaagggcgacattctgttgtcgcaccacagggcatcgcccgctgaagtatccataaaggctataatccaagagatacgacgctcgctgtcgttgaatctgggcgactatgggtctgccaagtgcagctctctcttgcagttgaagtacttctctaataggacgtctacggggataatccgatgtcatcgagaggattgtgatcttgtcattatggcgttgatgctgatgtcgaaaattggtgatgttggtgggctgatcgtgaaccccgtcaaggtgagtgggaccattaagaagatcgagcagtttgctatcagaaggaactctaaaattttaaatttgataaagtgcgataatgagttcctgattaacgactttaagaaactcgagaacgaaaacgaaaacgaaaaccaaaacgacaccgattag

SEQ ID NO: 2750 - DNA, 1143 bp, Saccharomyces pastorianus
atgttcagcagcagactaccacctccgaaacactcacaaccccagacttcgacggatttgagctcggatcgtcttgagccagcaatattaactaatgaaatcgcgcaaagcgtcaagctggatgattttgtacccaagagacaatcgaatttcgaattaccagtgcccctaccaacccaaactgacatccaagaatgtgcagcaagaaccaagtcatatattcagcgactggtgaacgcaaaattgtcgagttcaaacaacaaggcctcatcgagatacgtaaccgaaacacatcaagcccccaccagtctaacactggataacggccgccaaattgaagtggtatctaagcaaatggacccattgctgccaaggtttgttgggaaaaaggccaggaaggtggtagcacccacggtaagtgatgaagtggtgcccgttcttcatatgggtggtagcaatgaaacgggtgaggctgatccaaatgactggaagataccagcagctgtttcgaactggaagaaccccaatggatatactgtggccttggaaagacgtgtggggaaagccgatgacggtgaacgtgtcattaacgatgggtttatgaaactatccgaggcgttggaaggtgctgacaagaaagccagacaagagatcaagtccaaaatggatttgaaacgacgtgctatggaacaagaagcgttggccaaggaatctaagttgaaagagttgagccagcgagccagacaacaccacggagcccctcaaacgggggccgtggtgaaacccaagaagcaaatgagcacagtggctagactaaaagagctggcctactctcaaggaagagatgtgtcggataaagtgattctgggcgctgctaggcgctcagagcagcccgacctgcagtacgattcgaggtttttcaccagaggtgccaatgcctcctccaagagacacgaggaccaagtgtacgacaacccactgtttgctcaacaggacatcgacagcatatacaagaccaaccacgagcagctggaccaagcggtcaatgcgaaaagcgaaggtgccagcgggtctcatggccccattcagttcactaaagcagaatccaaggacaaacctgatgaatatggggttcagaaatga

SEQ ID NO: 2751 - DNA, 789 bp, Saccharomyces pastorianus
atggccccaagcatagcaaccgtcaaaatagctaaggacatggtccttcccctacgtatatttgttaacagaaagcacatgcttcaaagcaataatagcagtaataataatccggacgcaactatatttcaggcacctttgttatcaaacaactccatcgtttgcttaaaatcgccgaatacaagaatatatttatctcaacaggataagaagatcctttgtgatgaaatcaaggaggacctgttattgatcctttacgaactagcatctcctgagattgttacatcggtgctaagcaaaataagaattgggcataccatagatttccaaacgggtgttttgcccaaacttttcgcaggagcttgcacggaggacacgttgtcttctcatatacagacagtaacaaggctggctaaatttaagtacaagctgcattacaaaaacaagtgggaactagacatatacatcaataacatcaagaacattgctaacatcaggcattacttgacgtttcaaacgttaacaatcaacgggttttcactcaatgcaggtcccaaaaccctattgactaggaaaatagaagcgcaaccacaggtgcctactttatcagaagagaatgaggaatcgggtatattagatttgccagtagaagagaatataaaaccagtgatagaattcaagtacaaacccgttatcaacttgggcgaaattatcgatatccacgtgttgcagagaccaagaagacataaagtacgtgttcaacctgatcaacatctagaagaagaatga

SEQ ID NO: 2752 - DNA, 1014 bp, Saccharomyces pastorianus
atgagctgtgtgtatgcgtttgggtccaacggacagggtcagctgggactggcgcacgacgaggacgtggacacgccgcagaggtccgtcctggcaggtgagagtaaagtgtcgaagatagcgtgcggtgggaaccacagcgtggtgctgatgagcaatggaactctggccgggtgtggggataacaggcgaggtgagctgcagggcacggctgccctgcagcaggtgcctggttggacgcccatcgaggtgccggcgccggtagtggacgtggcatgcggctgggacacaacggtcgtggtcgacacacgtggccatgtatggcagcgaggaggcggtcgttacgagttcgagcagcgccatctgccggttctggacccggcagatggccgcatagcagtatacgggtgcttccagaacttcgtggtggtgcagggcccgcaagtatacggctggggcagcaacaccaagtgtcagctgcaggcgcgcaagtgccggtcggtggtagagcccacgctggtgtgcgatttggggtctgtggccgtggactacgtggccatgggcaaggacttcctggtcgtggtggacaagaacggccgcatggcgcacgcatccggtcgcctgcccgcagggttccagctcgagcagcaagaagcaaggctcggactcgaggtccgctgcatgtggacctcgatccacgtctgggacaggcgccagggcaccgtggagtcgtttggcaggggcacgcatgcccagttgttcccgcaagacgccgtggccgtgggcgtgcccatcaccaacttcactgccggcagtgagcatggcatcctggtcactgccagccaagaagagcccctccactacgacgtgcactgctggggctggggagagcacggcaactgcggccctcaacgagggtcgcagcctgggctgcaactcgtggggcggtacgccaccagccctcgcgtgttcggcgggtgtgccaccacctgggtcgtgctcgaccagtactaa

SEQ ID NO: 2753 - DNA, 3375 bp, Saccharomyces pastorianus
atgaacggttcacattccaacgatgaggatgacttagtgcaggttcccgagacgtcttctccgactaagacgatgtcgtcgtctcccctgaagtcggggtcggcggctccggacgccaacgtagcctctttgaggagcaggttcacgttcaagccctcagaggccagcgaggggccccatatctcgaatcctgcgccatcggggagtcctgaggtggctttagtcaacctggcgaaggagtttccggacttttcgcagacactggtgcaggctgtcttcaagtccaactcctttaacatgcactctgctagggaacggctcacgcggttgaggcagcagaggcagaactggacgtggaacaagaacgcatcccccaagaaaccagagatcccgccgcctgccaggaagacgctgccgctggccaacaccagccgtctgtcatccattcacggtaacggcaacaacaacaagtcctccaagatcacggtggccaagcagaaaacgtcgattttcgaccgttactcaaacgtcatcaaccaaaaacagtacacttttgaacttcccaataacttgaacatagactcggagacgctgagcaagctgcccgtgagttacaacaaaaagagaaggcttgtgagagcagatcagcacccacagggcaagtcccaggtctctgccaccacgcaattgggctctgcaagagagaaactgcttgcaaaccgcaaatacggccaccacaccgatgacaataacgaagaggaggaggagagcatgatgaccgacgacgacgacgacgcaagcggtgacgactatatggagtccacgccgcagataaacctggatgaacaggtcttgcagttcatcaacgactccgacatcgtcgacttgtctgatctttccgacactacgatgcgcaaggcccagctcatagtctctcacaggccgtatgtctctctgaatgcgtttgcgaatacagacttcaacgataaggacactgaagaagctgcctcaggcaagaggaaacgacgctcggcggccaccgccaacgaaagcgaacggttgctcgacaagatcacccagagcattagaggctacaacgccattgagtccgtcatcaaaaagtgttcgtcctacggtgatctggtcagcacacagatgaagagatgggggcttcaagttggcgataactccgagttggacgtgatgaatctcggtgaagacgacgacgatgatgatgatgatgatgatgatgataaagacggccacaatggtaccggttctgcgggtacacacgaccagcgcaatgataaagaggcggccagggccgtggtggagggctttgatgagaccagcgctgaacctactcctgcactagaggaaagagaaacacggaccaggaacacatccgagccattggtcaagtcggacgaagaagatgtggatctagaggcaattgatgacgagttgccgcaatccgagcatgaagacgacgactacgaggaggaggacgaagactacaatgatgaagaggaagacgtggcatacggcgacgatgatgacgacgacgatgacgatgacgaattcgtggccacgagaaaaaacagacatgtggcctctaccacaaacagaaacggccggaaaccgattgtcaaatttttcaagggcaaaccaagactgctaagctccgaaatctcactaaaggattaccagcaaaccggtataaactggctgaatctgctctaccacaacaagatgtcatgtatccttgcagatgatatgggtctgggtaagacgtgccaagtcatttcatttttcgcatatttgaaacaaatcaacgagccgggtcctcacttggtcgttgtgccatcctccactttagaaaattggttaagagagtttcagaaattttgtcccgctatgaagatcgagccttattatggctccttgcaagaaagagaagaattgcgtgatattttggaaagaaactctgggaagtatgacgttattgtgaccacgtacaacttagccgcgggcaataaatacgacgtttcgtttttgaagaatagaaacttcaacgtggtggtctatgatgaaggccatatgttgaagaactccacttcggagagatttgccaagttgatgaaaattcgtgcaaacttccgtcttttattgaccggtacaccattacaaaataacttgaaggaattgatgtcactgttggaattcatcatgcccaatcttttcatttccaagaaggattcattcgatgcgatctttaaacagcgagccaaaacgacagatgataacaaaagccacaacccgcttttggcgcaagaagctatcacaagagcgaaaacaatgatgaaaccgtttattttgagaagacgcaaggaccaagttttgaagcatctaccaccaaagcactcgcatatccaattttgtgagttgaaccccgtacaaaggaaaatttacgacaaggaaatcaaaaccgtattagagcacaaaagaatggttaaggatggagaattgcccaagaacgctaaggaaagatccaaaatacaatcttcgagctctaagaatctcataatggcactccgaaaggcttccctccatccacttctattcagaaacatttatgacgacaaaatgattgctaaaatgagtgacgccattctggatgagcctgcgtatgctgaaaacggtaacagggaatacatcaaggaagatatgagtttcatgaccgattttgaattgcacaaattatgttgtaactttcccaagacactgtcgaaatatcaactacataataatgaatggatgctttccggtaagatcgatgcgttgaagaaattgctgaagactattatcattgataaacaggaaaaagttctgattttctcgttattcactcaagtgttggatattttggaaatggttttatccactttaaattataagtttttgagactagatgggtccacccaagtgaatgatagacagcttttgatcgataagttttatgaagacaaagagattccgattttcatcttatctacaaaggcaggtgggttcggtatcaacttagtgtgcgccaataacgttgttattttcgatcaaagtttcaatccgcatgacgataggcaagctgctgatagagcccatcgtgtgggtcagaccaaagaagtcaatataaccacattgattaccaaggattctattgaagagaaaattcaccaactggccaagaacaaactagctctggattcttatattagtgaggataaaaaatcgcaggatgttatggaaagtaaagtcagtgatatgctggaggacataatatacgatgaaaattcgcaacaaaaggaaaataaataa

SEQ ID NO: 2754 - DNA, 984 bp, Saccharomyces pastorianus
atgagtttcactggttcgttagtgttggctggtgttggcggtttggtgtacaagttcgctgggggccaatcgtacgagaagcttccagctgtcactattcccttcaatgagtactcagacaaggtctacaaaaaacacttcacaaaggtagtgggccgtaccaagtacatcttgatgaacttcttcaaggatgcgttcactggtggcgccttcatatacccttttaggggttttttggagtttaacgccaacaagagcagctattcgaccacaatgctgagtgttttatcgagctacttagtaatgtttgcgctggtgagctttgtttattgggccaccatcacgccaatgtacacggcatttttgattgtgctgggtcccattggtctcttcattgccattttgcactcttttttgcaagctaacgtattcactttgttgtttatgagactgagccacttcaacaaccatttggtggaggtttgcctaaaaaagaagggcctacagcaagattcccacctggggaagccaatcaagtactatgtgcctgttaattcggtgtatttctgggcttattatttcccctttaagttggtaaagtacatcctggggctagtggttcttctggctctcttatccgtatcatttttcccactggtggggcccgtgcttttccatgttttgatttctcctttcattgcccaaatttacttttcaaaagttttacgtttacaaaatttcaacaacctacagagacgtgaaaacatttatcttcatgcaggccaatatgcctcgtttggattgttggcagggttgatagagtctgttccagttttggcaggatttgccatctccacaaataccattggtagtgttttattgaacattgattatccgatggttccggaaatcgtaaccgtcgttgaaactaatattgaaattgaaacagtaccccaggaaaccaatgaacaggtaaattattaa

SEQ ID NO: 2755 - DNA, 1287 bp, Saccharomyces pastorianus
atgaatatccttttacaggatccatttgctgttcttaaggaacatcctgaaaagctcacacatacaattgagaaccctttacggactgaatgtctccagtacagtccttgcggtgattacctggctcttgggtgtgccaatggagcacttgttatttacgacatggatacattccggcctatctgtgtcccagggaatatgctgggggcacatgtgagaccgattacttctatcgcatggtctccagatggccgttttttgcttacaagctccagagattggttcataaaactttgggatctttctctaccaagtaagccattgaaggaaattagctttgattctccaatttgggggtgccaatggctggacgctaagaactggctctgtgttgctacagtatttgaggaatcagacgcatatgttatagattttagtaacgatccggtggcaagccttctcagtaaatctgaggagacatcattgagctcaacacccgatcatggatatgttcttgtatgcactgtgcatactaaacatcaagatatcattattactgggacatcgaaaggttggttaaacttctataaatttcattctatctttcaatcggaatgtattcattctctcaaaatcacgagctcgaatatcaaacacgtaataatttcgcaagacggtgggagattggctattaactcttcagatagaacaataaggcagtatgaaatacatgttaataacaaaacctccaccgtagagctaattttagagcacaagtaccaggatgtaattaacaagttgcagtggaactgtatcctcttcagtaataactcagccgaatacttagttgcttctacccatggttcttctgctcatgaactatacatctgggaaaccacaagtggaacgttagtgagagttttagaaggtgtagaagaggagctgatagatatcacttgggacttctatagcatgagtatcgtgagtaacggttttgaatctgggaatgtgtatatgtggtccgttgttgtacctccaaaatggagcgctttagcgccagactttgaagaagtagaggaaaatgtggattatttggagaaagaagatgagttcgacgaagtcgatgaagctgagcagcagcaggggctggaaaaggaggaagaaatagttatagatcttcgaacaagagaacagtatgatgtcagaggtaataatttacttgtggagcggttcacaattcccaccgattatatacggatcataaaaatgcagtcatcgtcaggttga

SEQ ID NO: 2756 - DNA, 1452 bp, Saccharomyces pastorianus
atgatgaacggcaatgatagcgaggctgagaatcaacgtctcttggacgaattgatgaaccagaccaagattcttcaggaaacattggacttttcgctagtggcacctactgcgtaccacaacaacgattatgaaatacagggcagtgcttacccaggtggcgagactccggctcagcagcatgagaaactgtcctacatcaacacacacagttccaacgataacaacttgatgggcagccaagcgagatcgaattcacaaacacctacgccctcgaccatatacgaggaaggggagccacattcgtcctaccttgatgacatgttcagaacaaaccatggcagtaggcctgccactcagaattctatatcttccatagggcaggctcccttgagggcatccttttccatgtcttacgattcgcctgtggagaaggtattgaatgcaccatcgcagcaacatgaaggtatgaaagctgaattaccgcaagactttctgttccaacacggtgcagacgacacgatgtacaacttaactgacgatctaagctcctctttatcttccagcattaattctgatatgatgacccctcacacgtattcatcatctttctcctataacccacaaactctgggcccagcatcggtttcatctacatattctccaaaagttagatcgccatcttcgtcattccgtgcaggaagctttctttcctcgtcctttagacatggtagcataaatacgcccagaacgaggcatacttcaataagtagtaatatgactgaaaacatgggacccgggagtattccaaaggtcctggccggattaacctcagacgaaaagttgagacggaaaagagaatttcataacgctgtggaaagaagaagaagagagctgataaagcaaaaaataaaagagcttggtcagttggttccgccctctctattgaattatgatgacttaggtaaacaagttaagccgaataagggtatcatattggatagaacagttgaatatttacagtacttggcagaaatcttagaaatacaatcgaggaaaaagaaagctttactaaacaagataaaagaattagaacataaaaaaatttcagtcgccactgcatctccttttgccaatgaccatcatgcaaacactagaccaattaataaccaaaaaaacgaggaaagaattatagatatcagatccgttccggactcatcttcaaatgaacgggatatcaagactgaatttcacaattgggggccatcaatatatgattcaacgaaaaaccacaataatactatggaagcacagccacacgcaaatattcatgatgatttaaaagaatttttatccggggatttgatcgaggccgaggataacgcaaaattaatgtttggagatgacaattctaaccctgcagattaccttctagaatttgggtcacgatag

SEQ ID NO: 2757 - DNA, 1647 bp, Saccharomyces pastorianus
atgatgttagctcgtactgctgctatccgttctctgtcgagaactttactgcactccgccagagctgcaagacctgccgctggtgttgctgctttggcctccgccagaagattggcttccaccaaggcgcaacccacagaagtttcctccattttagaggaaagaatcaagggcgtgtccgatgaggccaacttgaacgaaaccggtagggttcttgccgtcggtgatggtattgcccgtgttttcggtttgaacaacatccaagccgaagaattggtcgagttttcctccggtgtcaaaggtatggctttgaacttggagcccggtcaagtcggtatcgttcttttcggttctgacagactggtcaaggaaggtgagttggttaagagaaccggtaagattgtcgatgttcccgttggcccaggccttttgggtagagtcgttgatgctctaggtaacccaattgacggtaagggaccccttgactccgtgggtcgttcaagagctcaggtcaaagccccaggtatcttgccaagaagatccgtccacgaaccggtccagaccggtttgaaagccgttgacgctttggtccctatcggtagaggccaaagagaattgatcattggtgatcgtcaaaccggtaagaccgccgtcgccttggacaccatcttaaaccaaaagagatggaacaacggtaacgacgaaaccaaaaaactttactgtgtttacgttgccgtcggacagaaaagatccaccgttgcccaattggtccagactttggaacaacacgacgccatgaagtataccatcattgttgccgccaccgcatctgaagccgctcctttgcaatacttggctccgtttaccgctgcatccattggtgaatggttcagagataacggtaagcacgctttgatcgtatacgatgacttgtcgaagcaagccgtcgcataccgtcaattgtctttgttgttgagacgtcctcctggtcgtgaagcctaccctggtgatgtcttttacttgcattcaagacttttggaaagagctgctaagttgtccgaaaaggaaggttccggttctttgaccgccttgcctgttattgaaactcaaggtggtgatgtttcggcttatattccaaccaatgtcatttccattaccgatggtcaaattttcttggaagctgaattattctacaaaggtatcagacctgccattaacgtcggtttgtccgtctctcgtgtcggttccgctgctcaagtcaaagctttgaagcaagtcgccggttctttgaaattgtttttggctcaatacagagaagtcgctgcttttgcccaatttggttccgatttagatgcttctaccaagcaaactttggttaaaggtgaaagattgactcaattattgaagcaaaaccaatactctccattggctaccgaagaacaagttccattgatctatgctggtgttaacggtcatttggacaacattgaactatcaagaattggtgagtttgaatcttctttcttatcttacctaaaatctaatcacgatgaacttctaactgaaattagagaaaagggtgaattgtcaaaagaactgttggcttccttaaagagtgctacagaatcctttgttgccactttttaa

SEQ ID NO: 2758 - DNA, 2961 bp, Saccharomyces pastorianus
atgaatttcgaagaaagaactctaggcaagaggtctaacgttccccccctatatatttccgtgaacgaatattctaaacgaatggaggacgaactcaatatgaaaccaggtgacaagattgaagtcattacagatgatggggagtacaatgatggttggtattacgggcggaatttaagaaccaaagaagaaggtctgtacccagcagtattcaccaagaagacaactctgaacaaacctgaaagtttgcgtaagacacgaactcaagagagtggcaatgcaagtggcaacgcgattaacaattacggaacttcgaatggatacaccaataaactaagtaagcttccctcacaacaacaggaaaataggtacacttcattgaaaagtactatgagcgatatagataaagccttggaagagctaagaagtgattcaattgaactacaaacaaaaacatcacccatcaagctacctgaactaaatgctatggttatgccagatgaagaaactttaattctagagaaacctcaaaacgtgggaaacacaacacatgactctgtcttttcgagtacggcagatttgaatctaagctctgaatctctaaaggacacaagcaaatcggttatatctacgaaatctttagaggcaagttcaagttccactaacccgttagaccctaaaatggcaaaaacttggacaccagaagaggttactgattattttattatggtaggattcgatcataccaattccaataagtttaagcaacatcaaatttctgggaaaatactattggaattagaattggaacatttgaaggaactagacataaattcctttggtataaggtttgaaatattcaaagaagttggcaacatcaaatctgcaattaattcgtcgtcaaatgaggtgcacaacagctacatcccttttgctcttgacaaagaaactactaaactaatgcctgcagctactgtaaatagggaagaaattcagcaaccaatctcctctaagtttgacaccaacaggctaccaaacgtaaatttcaatagaagatcatcttcaaatacaacagagcctcaaagaccaagctccgttgttgtaaatccaaattttaaactccaagactccaatgaacaagttttagatataacacaggttcctgatgtgtttactgacaaagatatttttgaatctccagggagagctccaaaaccgccatcgtacccgagccccgttcagccgcctcagtcaccatctttaaataataggtacatgaacaacaatgccaggttccctcctcaaccagcaacatcatctcgaaacagaaattcagtcgtttattcaaatgcggcaattcctaactcttccacatcttcagataattcgacaaataagttcaaatttcctgttatgaatggtcatgattcgaactccaggaacacaactttgacatctgccactataccttcttttaatacagtcaataccgatgattctcttccaacaatttcaaatatctcttcaaatgcgacgtcccaccacccaaacagaaattctgtcgtgtacaatagccacaagagaacagaatctgggagctcatttgtcgatttgtttaatagaatttcaatgctgtcaccagtaaaaacagattttgacgaagaagaaacaaaaccagcttcaaagtctaataaaactgtattcgactcgacactcaggaaaccatctcttgcacattcaacagatccatcactttcggaactaaaaaaacatagaagaaactcgtcgatattatcctttttctctttaaagagtcaatcgaatccaacgtcgccaacaaaacaatcttttaccgtctatccttctaagatgacatcccattctcgctctcagtcaaattcctattcacatgcaagatcccaatcctactctcacagtagaaaacactctttggttgctagtcctttgaaaacttcattaagccctataaactcaaaatctaacattgccttagcaaagaaagaaagtaataatagcagcgagaataaaaaggaggaaattgtccaaccgcttgaaagcaaacataaacataaacataaacacaggagtaagcataagcataatacttccaaaagtagtgcctccgaagaaaagggtcgaaagaaacttttttctagctcaaaagagtcttcagctggaagcaaagaatcaaaaagatctcctagtgaactctctcaaaaacctaccaagtcgatacttcccaggtctaatgccaaaaaacaacaaacgtctgctttcactgaaggtatacgttccatcactgcgaaggaatctatgcaaaaggcagattgttcaggctggatgagtaaaaaaggttccggtgctatggggacatggaagcaaaggttttttactcttcatggaacaaggctttcttatttcacaaataccaatgatgaaaaggagcgtggtttgatagacattactgcacatagagttttgcccgccagggatgatgatagactaatttccttatatgctgcaagcttaggaaagggcaagtattgcttcaaattggtcccgccacaaccaggatctaaaaaggggctaacctttacagaacctcgcgttcactattttgcagtggaaaataaatctgatatgaaggaatggttatcagctataataaaagctactattgatattgatactagtgtccctgttataagttcatatgccacgccgacgatatctttgagcaaagcgcaaacgctactggaagaggcgagattacagactcaattaagagacgctgaggaagaagaggggagagatcaatttgtatgggatgaaacagaaaatagaagaaatccaaaatatccaactgatcaagaagaatttgtaaatcctcaagactatacagagagtactgaatttgaatacccaggtgggagattttga

SEQ ID NO: 2759 - DNA, 354 bp, Saccharomyces pastorianus
atgaagtctacgttcaaatctgagtacccgttcgaaaaaaggaaggccgaatccgaaagaatcgccgagagatttaagaataggatacctgtgatttgcgaaaaagctgagaagtctgatattccagagattgataagcgtaagtacctagttcctgctgatcttaccgtcgggcaatttgtttatgttatcaggaagagaataatgcttccccctgaaaaggccatctttatttttgttaatgacactttgcctcccactgcggcgctgatgtctgctatatatcaagaacacaaggataaggatgggtttctgtacgtgacttactctggagaaaacacttttggtgggtag

SEQ ID NO: 2760 - DNA, 1287 bp, Saccharomyces pastorianus
atggcagtagtaccagatgaaaccatacaacagtttatggcattgaccaacgtttcgcacaacatagccgtacaatacctctcagaatttgaagatttgaatgaggcgctcaattcgttttatgcttctcaggtagatgatcagaatgacagaagggaagaagcacatcggaagggtcagcaagagaaagagtccaaggaggagactctatcttcttttgaatctttgaggaaagctgtgggtacggagaatgttggtgggtccagttccagattagggtcctcccagggtagtaatgagcatttgaagaaaaaaagctctacttcccctgaaccagccaaaaacacaagccgctcagggagtggcaataactccaggtttatgagcttttccgatatggtaagaggacaagcagatgatgacgatgaagaccatccaagaaacacttttgctggtggtgaaacatccggtttagaagtaactgatccttcggacccaaattcgctgttgaaagacttattagaaaaggccagaagaggaggacaaagcgatcttgaaaacgaatcgcgtgacgaaaatgacgaggagcatgaggatgaccccaaccgcttctctggaagaggttttagattgggttcaacagctgatgctcctgaccaagtggtagaaactagtgctccacaaccacaacgtacaaagcctcagaaggttacaagagaaatcacattttggaaggaagggttccaagtggccgatggcccgctttaccgttatgacgacccggcaaatagtttttacttgagcgagttaaaccaagggagagcgccattgaagctactggacgtggaatttggacaagaagtggaagttaatgtgtataaaaaactggatgaaccatacaagacccccaagaggaaactgggcggcttttcaggccaaggtcaaagactaggatcgcctattccaggcgagtcattgtcaccggtggaagtcgcaaaggatgaagctccaattgttgaggaagaatccgaacctaaagaagagccaaagaagggggatacctccgttcaaatcagatacgcaaacggtaagagagaagtcttgcgttgtaactccacagacactgtaaactctttatacgatcatgtctcatcaaatgcaaacactgacgcgtcgagaaattttactttaaatcatgcgttccctgttaaaccaattaataacgatgacaccacattaaaggacgccgatctgctcaactcagtggtcgttcaaagatggacatga

SEQ ID NO: 2761 - DNA, 1167 bp, Saccharomyces pastorianus
atgtcacagttcttcgaatccgctactcccgttgccatccccacagtcaacgccaacaatggcgccaacgatgccggcagccccgccaccggcgctgctcccgcagctggggctggcgcccagcccaccatcaaccacaggctcttactgtcgttgaaagaggccgctaagatcatcggtaccaagggctcgaccatctcgcgtataagagctgccaattccgtcaagatcggcatctccgaaaaggtgcccgggtgctccgacaggattctgtcttgcgctggcaacataattaacgtggccaacgccgtcggcgacatcgtcgacgtgctcaacaagaaggacgttgagaaagaggacaccgccgcggccgccgaggacgagggtgaagaacactactatttccacttcttgaaccatatcttgcccgcaccctctaaggacgagatcagagacctgcagcagctggaaaacattggatacgtcagactcatcgtggccaactcccatatctcctccattatcggcaaggccggcgccactatcaagttcctgatcaacaagcacggcgtcaagatcgttgcttccaaggacttcttacccgatagcgacgagaggatcatcgagattcagggcttccccggatccatcaccaacgtgctcatcgagatcagtgagattatcttgaacgatgttgatgtcaggttcaacaccgagaggtcctatttccctcacttgaaaaaatcgcccggcgagccctcgtctcctccagcctcctccagcaccaaaatcgaattgaagattccagaactgtacgtgggtgccatcattggccgtggcatgaacagaatcaaaaacttgaagaccttcacaaagaccaatatcgttgtagaaaggaaagacgacgacgacaaggacgaaaactttagaaaattcataatcacgagtaaattccccaagaacgtcaagctggctgagtcgatgcttttgaaaaacctaaataccgagatagagaagcgtgaaaactacaagagaaaactggaaagctcggagggtcacgccgcccccgctgcaactgaacattctgacttcatgtcctcctccgaagaagaagaagaggaagaaaaagaggaagaagaaggacaggacaatgaagatgaacagtag

SEQ ID NO: 2762 - DNA, 4731 bp, Saccharomyces pastorianus
atgatactaattcacgggctttatgccgtctgggcacttctgatctttcccttgaccaatgcggagggattttcccccaaagtgaccaaaactatttcagaagattcgttcactataatgtgttttgatgattctaacactctacttagaacgcaagattcttccctggccattagctttgatgctggggaaaagtgggaaaaggtcaatgacattaaaggaaatgtcaattgggtatatatggaccccttcaatgggcacgacagagccatcgcaacgccaatgaacggatcatacttttacatgaccaatgatcaaggtaaatcgtggaacactatgttcatcgaagaggattctccggctcattattgccaggtgattactcatcccacaaacaaagactatcttattgcaacttgtagctattgtgaaaaccaagaaggcagcgacgaaggtgaacaagccggtgacgatggcacaactattatagattttggccgtaggcgttgttttgataaaacttacggatcaagtgatggtgggaagtccttttctgagatcaagacctctttggaaaagaacgagaaaagtctttatagcaccgctcgttgtgacttcatcaaatctagcaaagattccgacttgggtgacaatgacgcctcaataatttgtctttaccaaaatacttgtttccctgaaaaccaagttggacttactatcactgagtctcaattatttttaactagcgattggggtaaatcgatcaacgaattcgaccaatttaaagataaagccgttgatttctacaaagtgttgaagtctcacgtggtaatcttgacccaaggtgatagatacaataagatgtcttctatggatatatggatatccaatgatctgtcaacttttcaaatggcccacctgcccactcaactaagacattctgtccagagagggatttctgaagactctatcggaagaatcatcctacctatatctagagaaatgaacgatgacgaaaaagacaagtccagcacgtcagaaatcctaatttctgactctcaaggttttaagtttacccccattaaaagaaccaatattgaccaatttggatatattagtcttgctcaacctgatttcttaaaggggacaatcattgcatcgctttaccctatatctggtcgtcataagggtaaaaaaaaaggaaaaagaagcaaaggagaaaccaaaatatccgttgataatggtgcgacatgggcaaatttaaaagttgttgatccagagaatgaagactcatttgactgtgatatcactgaccctgaaaattgctcactctacactatgtttagtccattagagtactcggctccttctgccgggattataatgactgtcgctattgttggcgatgggggcgtattcgattggggagatcaaagaaccttcatctccagagatggtggtttgacttggagtgtagcttttgattttccttgtttatttgctgttggtgatttgggtaacgttatagtagctgtaccatatgactctgaagaagacgatgatccccaatctgaattttactattctttagatcaaggtaagacttggaccgagtacgagttagaagccactatcttcccaatagatttgatcaatactacaccagatggatctggaagcagatttattttgaacgggttaaccatgtccaatatggacaggagcggttcaggaaatttcatttattctattgacttctcaaatgcctttgatggaaaaacctgtgaagatgataaagatttcgaagactggaatctggccgaagggaagtgtgttaatggtgttaagtacaagtacaggagaagaaaacaggacgcccaatgcttagtcggcaaagtgtttgaagatctaaagctgtataaaactacttgtgacagttgtactgcaagtgattacgaatgcgcgtttgaattcgtcagggatgcaaacgggaaatgtgtgcctgactataatctgattgttctttctgatgtatgtgacaagtcaaataagaagtccgtgtctgtagagccaatgcaattaatcaaaggtgatgaatgtaaaacgcccctgaaaatcgagcctgtggaaattccttgtgatggagtcccaggtaagggcaccaatgacaaggaaatagcggtcaccgaaaacaaacttgacttcaaacttgagttctatcaatacttcgacacagttacagacgaatcgctggtcatggtagactctagaggaagtgcgtttttgtctcatgatggtggacagacaataaaaaaatttgacgttgacaacgagaacattgtcgaagttatcttcaacccatacttcaattcttccgcctatctatttggctccaaaggcaatattttcatcactcacgacagaggatacacttttacgaatacgaaattgcctgaagctagacaattggggttgccattagactttagtgcgaaggatcaggatacgtttatatactatggtggcaaggattgcgagtcgatattgagtccagaatgccatgctgttgcataccttaccaaggatggtggagaaacgtttacagaaatgctggataatgcgattcattgtgagtttgcaggctcacttttcaaacatccctccaataaagatatgatcatgtgtcaagtgaaggaaaaatcctcacaaaaaagaactctagtctcttcaacagactatttccacaatgataaaaaaaccgttttcgagaatattattggttatctatccaccggtgattatatcattgttgctgttccccaagaaaataacgaattgagagcatacgtgactcttgacggtgctgagtttgcggaggccaaattcccatatgacgaagacgtcggaaaacaagaggcgtttactattttggagtccgaaaagggatcgatatttttacatttggcgacgaactcggtagcaggagatgactttggtaatctgttgaagtccaactccaacggcacttcgtttgtgactttggaacatgctgtcaatagaaacgcgttcggttttgtagattttgagaaaatccaaggtttggaaggtattattctgatcaacgtcgtttccaacagcgaaaaggtttccgagaatagggacaagaagcaactgaaaacgaagatcacgttcaatgaaggttcggactggtcctttttgaaacctcctaagaaggactcggaaggcaagaagttttcatgtaactccaaatcactagacaaatgttccctgcacttacacggttacaccgaacgtaaagatattagagacacgtactcttccggctccgcgctgggaatgatgttcgggatcggaaacgttggcgatagtcttctaccgtataacgaatgctccacatttttcaccaccgatggaggcgagacctggaccgaagttaagaaaggtccataccaatgggaatacggtgaccatggtgggatcttagttcttgttcccgaaaggaccgaaacagattctatttcttattccacagattttggtaagacatggaaagaccacaaattctgcgatgacaaggtggtaataaaggatataacgactgttcctagagattctgccttgagatttttactatttggagaggcgacaaatatcggaggcggttcaattagaacctacacaatagatttcagaaacattttcgaaagacaatgtgacttcgacattaccggtaaggaaagtcctgactacaaatattcgtctttgggttctcaaagcggatgtctatttggccaccaaacagaatttttacgcaaaactgacgagaagtgtttcattgggaatatcccactttccgaattttcaagaaacgttaaaaactgttcatgtacgagacaggactttgagtgtgattataactaccacaaagacaatgatggtacttgtaagttggtcaagggcttaagtccggccaatgctgccgatatatgcaaaaaagagcccaatctggttgaatacttcaagtcttctggttataggaagatcccgttgtcaacgtgtgagggtggtttgaaactggatattccgtcatcaccccacccttgtccagggaaagagaaggaattcaaagaaaaatactctgtaaggaccggcactttcgcatttgttttcattgctattcttctcgtcattttctttgccacatggtttatatatgatagaggtatcagaagaaacggagggttcgcaagatttggtgaaatcaggctcggtgatgacggattgatagaaaacaacaacaccgacagagttgtcaacaacattgtgaaatcagggttttacatcttctcgaacattgggtctgttgtccaacacgcaaagacaaatgtaggacatttattttccaaaatcaggggaaggttcagcagcagagtgggtccaagctattcgtcgctgactcacgaccagttcttggatgaagcagacgacttgcttgccgggcatgatgaagacgctagcgacttgtctattttcatggaccaagacagcaattttgacatcgaggatgaagatgctgcgacgcccgaacaagaacatacgtcatatacggatcagcctaccgcgagcgatattcctgatgcactgccatcacgcagtgaagaagacgcacacaagtctgacccagcagctccactcaacgaggacaattag

SEQ ID NO: 2763 - DNA, 2526 bp, Saccharomyces pastorianus
atgaaagtgataaagtttccatggctggctcatcgagaagaatcgcgaaaatatgaaatatatacagttgatgtcagccctgatggtaagagactggccactggaggtttggatggtaaaataagaatatggtctgtagatgccattttacaatgcatggacttagaagcagcggcacctgaaacgccgcttccgcaagatttacagatgccattatgtagtatgagtaggcatactggctcaataacatgtgttaaattctcaccagatggaaaatacttggctagcgggtcggatgatcgaattctattgatatgggctcttgacgaagagcaaggctcacaacctgccttcggttccgagcatgagaaagagcactggacagttcgaaaaagattggtggcgcatgataacgatatacaggacatttgttgggcaccagactcaagtatattagtgacggttggcttggacaggtccgtcatagtctggaacggttctactttcgagaaattaaagagatttgatgtgcatcagtcactagttaaaggtgttgtttttgatcctgctaataagtatttcgctactacatcagatgatagaactatgaagatatataggtaccacaagactggggatgtttctttcaccatagaacatatcattactgagccattcaaggaatcccccctaacaacatatttcagacgaccatcatggtctcccgatggacaacatattgcggttcccaatgccaccaacggaccagtaagttcggtagcgatcgtaaatagaggaacttgggatacaagtgtcagtttaattgggcatgatgcgcctacggaagttgcgagatttaatcctagattatttgagaggggtgatagcaacaagaaaagaaaacatgttaacgcagaaaatgaattggtagagcaaaatgaagaggatcttcatcagtttgacaagaatattgactcagttgtagcaaccgctggacaagataaatccttggctgtttggagtaccagcagacctagacccatatttgttgcatttgatatcgcaagcaaatcaataactgatatgtcttggaatcccgatggtagtttactatttgtggtatctttggattcttcgatcaccttgttcaaatttagcaacaatgaattgggcaaaccgattcctctggagaaaaacatggagcagttatacaggtacggtgtcgataaggattcattggatttcccggaaagtgtcaatcaactcctactcgaagaccaaaccaaatcgtctaaaagagcaaaacttaggacatcaaaagcagaagaaaagactcctgaacttgcaacaaatcttatttcaaaccaaaagaatggcatacatgctccagtgttcaaaaatgaacacataaatattctaataccaaagagaaaaaaggacgctaaactgaataaagccgtaactctcaaaagtggtaaaaagcgtgtgacaccgacactaatatctacttcatcatccgctccctttcccaatgctatcaaaagacctgtattggataacaagaggattgaaaataacttgaaagcggccaccaaacacgtcaacagtaaagagctattgccccatgtgccagatggaattgaaaataaaattagtgtctcatctcttccgttaccaagattaggtatacactctttgataatgggtacgaaagaaagggttagaaggaaaaccttagattcagaagttgataacgatggtccagaaaatgaaactgataagggcacagatgggacaaacaacgctattgacgaaattaagattttttcagatgaagaaaacgactttcatagaatgacactgaatgctaaattgacacaagagaagatatggagcgaagagcctacagcgcgatacctttcacaatccgatgttgtaccagacactgatgttgtcgttcttgaagagggtgatttagatcatatatctgtcttggaaatcagaaatggtgtagaaagatccattcaattcgattctgaagcacttctagacaatccaaccaggatactgggatacgaaggggggaaacgaaccattgaatcatttatcccagaagtaatcatttgtgctatgggatcaaaggcttgtaagtgttggtgtttagcttcggccaatggctctatttatatactctcgtacaatggccagcagaaacttccaaaaattagcctaggtcacaaggtcattaagatggtaacatccagcaattttttggttgttctgactgagagaggattattctttgcatgggatttatcagatctaaaatcagtgttgaggaatgtacccattttgccaattcttaatggtcaacctattcaaggaaacaaagtgagaattaacaaagttataaggagctttcatttagatgattctaactgtgatttatatgtagaagttggcgatcctaaaaatatatatagatggactaaaaacctcggttgctggtcactttataaacaatag

SEQ ID NO: 2764 - DNA, 645 bp, Saccharomyces pastorianus
atgggactaattctatatgaatataaagtagtagaactgacgagaagggccgatgccaatgacaccagtaaatacgtggatagcgggggctactatggctattcctttggatcttcatcatggcagtggggacggtggattttgtttgttttattcattgctgctatactgataatcataatgtatacggctttgcttaataagagaagacggaggatagggcgtgctcctataaggggtactgcgtggctaacgcctccttcatacaggcagtctcagcagcaacaaaccgggactaggcagcaacccgctgatgattatgttcctgaatatacagagactgccaatgaacatgaccttgggtactacgacgagcgaggcgagtttcaccctaatgacaaggttgcacccgcgcctcctgtgcaagagctttcgtcagagtctgttaactctttggaacggcctcccgctgctgtggtccatcaaactaactcttcagacatggaagacgatttaacaagaccgaataataggcaagtcccggttgcaagtgacatgggaggtcaaactcaggaatctttaggggtaagcggaactcaggagatcacaccgcccgggagggcaaagctgaacgcaaatcagtaa

SEQ ID NO: 2765 - DNA, 1641 bp, Saccharomyces pastorianus
atggtatatactgcaagctatagacacactgttttcgttgatctcttagagcacttaggtgtagtttccaatacggaaactctacaaagtgcccgtgagggtgaagtcgatcaatcagaatctactgacacaaaggtcactaaacctgggtacgatatagaatcagaccccggctcatccagttccgagtgccgcaccagtttaagtgctagctcacaaatggagaaaaatgacgccttcctagtcgattggaatggtgcatctgaccctgaaaacccgcaaaattggccccttctcaagaaatcaatggtggtgtcgcagatcatgatacttacttgcgtaacgtacatggggtcatccattcacacccctggtcaagagtatattcaaagtgaattcaaagtcggtcacgtggtggcgactctaaatctttccatgtacgtccttggttatgggttaggccccatcatattctcaccgctatcagagattgcccggtttggccgtctttatatctatatgataactttgttcttcttcatgatctttcaaatcggttgtgccactgtgcataacattggcggcttgatcgttatgcgtttcatcagtggtgtattgtgcagtccatctttggccactggtggcggtacagtggcagatatcatctcgccagaatttgttccattggtcttgggtatgtggtcagccggtgccgtcgctgcgccggtcttggctcccctattaggtgctgctatggttgaagctgagaattggagatacatattttggttgttgatgtggttaagcgctgctaccttagtcgtgttagtgtttttcttccctgaaacgcagcattataatattttgtatcgtcgtgctctgaaattgagaaaggaaacgggcgatgatagatactacactgaacaggataagttagatagacaaattgatggaaaaacctttttggcgaatacattatacagaccttttaagatgattatcaaggaaccggcattgctggcatttgatctctatatcgcagttgcttacggttgtttctatctattttttgaagctttccctattgtatttgtcggaatctatcatttcactttagtcgaggtaggcgtggcttatatgggcttttgcgttggctgtgtgttggcttacattttattcgctattttgaatatgagaatcattataccccgtttcaaaaatggtaccttcaccccggaagtttttttgattgtagcaatgtctgtgtgttggtgtctaccgttagctttatttttatttggttggactgccaaagtacattggatcctaccaatcatttcagaggtttttttcgttatagctgtcttcaatatattccaagctacttttgcatatttggcaacttgctatccaaaatacgtcgcatctgtatttgctggcaatagtttctgtcggagtttgtttgcttgtgctttcccattgtttggtaaagcaatgtatgacaatttagctaccaaaaactatccagttgcgtggggctccagcttggtggggttcttcactttggctctagctgctatcccattcgtactttataagtacggccccgcgttacgcgcgaagtctgcttatacagactaa

SEQ ID NO: 2766 - DNA, 615 bp, Saccharomyces pastorianus
atggctattgttataaataaaagaaacgtgagagtcctggtgataactaatctattattggttctagtgtttttggtcgtaagaaattcaaatgctagcactggtgaaagtggtgtaaagtaccatcctggttcactggtaacatttaacgagtcggggaatgctccaggtactcccgaatctgtccataattcagtagcaagtaaacaagacaaggaagttgatgaagcgaatgaaaagagtaaggaagaagagtttgatgccgctgcagaatatgacaccatactaaaaaaatcacacatggtcgttttcagtaaaagttactgtccttttagtaaaaaattgaaagctttactagctgaatcatacaacttttctccaacttattacgtcgtggagttagatcagcatgaacacacagatgaactgcaagaccatattgagaaggtcactggtaggagaacagttccaaacgttatcatcaatggtatctctaaaggtggttgtgacgatatggtcgcattacataaagacgataagctgttagaatcttttaaagagtggagtgatggcgcctttaccgtagaagctgttccaccatctgagagtatttag

SEQ ID NO: 2767 - DNA, 1803 bp, Saccharomyces pastorianus
atgctgctcaccaaaaggttctcaaagctgttcaagctggcgttcatagctctgttactgtgcggcctgttcgtcgtcaccaacaaatacatggacgagaatacgtccgtcaaggattacaagtcgcacttacagaattatatcgactcctacgctaataaggactcttcttcccctgaggatgccgccgccgctgatgatgcgacctcgttgaagggcaacgataaggtaagcactgaaaagctgaaaagcttctataacaatgtcttcaactttttgatgctggactcgccttctggaaaatctgcaagaacctataacgagaagtgtcccttgaagggtgacatcggagaccgtcctgaccaatacaaggatctttacaagttgtctgccaaagagttggccaaatgcttggaattgtcacccgatgaagtatcaaaactgcaaaaaagccataaggactacgtggaacacatagcctcgctaattctaccaaagggcacttacaagggctccggtatagccacagtgggtggtggtaagttctcgctcatggcctttctgatcatcaagacgctgagaaatatggggaccactctacccgtagaagtgctcatccctccaggcgatgaagatgaaaccgagttctgtagcaaaatcttgcccaagtacaatgccaaatgtatctacgtctcagatatcttgccattggagacgattgaaaaattcgcctttaaaggttaccagttcaagtccctggcgcttatcgcttctagttttgaaaatttgctacttttggatgctgataatttccccataaaacgtctagacaacatctttcaagaagaaccatatgtatcaacaggtttggtcatgtggcccgatttctggagacgcactacccacccgttatactacgacattgccggtatccctgtcaacaaggaaaaaagagtgcgtaactcccaagacgatatcaccccacccgctgtttacacaaagaacttgaacgatctggatgctgtcccgctgagtgatatggaaggtacaatgcccgatgtttccacggagtccggccagttgatgataaacaagtccaagcatctggccacagccctgttatctttgttctacaacgtcaatggtccaaactggtactacccaattttctcccaaaaggctgctggtgaaggtgataaagaaacgttcattgccgcagctaacttctatggcctaccattctaccaggtcaaaactaagacaggtgtcgaaggctatcacgatgctgaaggatttcatggtgtagcaatgttacagcatgattttgtacaggactacagccattacctggccgcttctaagagcatcaataacaagtacaaagatgcgatcatcaaatcatccgcgccaataaagtttgacaaggactactccttagaaaaatatatcaaagaatttttcgataacgaagacttgcatgccaagaatcatgtggacgtcatgtttattcactcgaacttgccaaagttcgatcctaagactctatccgaaaccaatttcttaaccatggataacaaacctgcccgttcgttcacttccttagagaaaatacataaatacgacattgaactgtttaatttcagagctctgcatgaatacgtttgtgtcaacaaaaatcctttcaagtacctggatgattctttgggtaaaaataaaaaagaatggaaaagaatgtgtgattacatcgccgagagactggagtttttagaatctacccacgaaaaggcgatcgccggtaactaa

SEQ ID NO: 2768 - DNA, 906 bp, Saccharomyces pastorianus
atgtttaatggttcaataaagtatatgaatcgttgcttatgtagacaggcgaatgtttcaatgcgaagaactttctatcataaaagcgtataccaaaggtttttctcaacaagaaacagtttgaaaaatgttaatggcgaaaaacctggtacgaaaaaaccattgaataggttacaactaggtgatgaaattgatgaaacggaacctgtcagaacaaaatttttccaattttccggatggaagtccacccttatctgttgtggtttaggtgctgcgatatatacttacatatcaaaaaagagacgtttgctggaaacagaaaaggaagcaaacgctaacagagcttacggctcagtagcgctcggagggcctttcagtttaatagattttaatggtcaacccttcactgagaagaatttaaagggtaagttttccattctatattttggttttagtaattgccccgacgtttgtccagaagagctggatagattaacctattggatttctgaattaaatgacaaagataacgtaaaaatacagccattgttcatctcgtgcgatccggcaagagatactcccgaagtcttaaaagagtacttgagtgatttccatcctgctattattggtttgactggaacatatgatgaagtgaaaagcgtatgtaaaaaatacaaggtatatttttctactcctcgtgatgccaagcctgaccaagactacttagtagaccattcaatttttttttatttaattgatcccgagggtcagttcattgatgcattgggcaggaactacgatgaccaatccggtctagaaaagattcgtgaacaaattgaagcttatgtgccaaaaaaagaacgagagcgtaggttgactaaatggtactctttcatctttaaatga

SEQ ID NO: 2769 - DNA, 2454 bp, Saccharomyces pastorianus
  modified_base (368)..(422): a, c, g, t, unknown, or other
atgcccgctgatcataacgataaaaataacaatcaagagtccgtggaagaggctgttttgaaatatgttggcgtaggcctagatcaccaaaaccacgattctcaattgcatcctaaacacctggacgacaagcactctcaaaagcaaaatagtgtcgatggcagtagtgatgtcgaggctagtaacaatgatgacggtaatagaaatgacgataataacgatgattcagaaaatatcaacgcattaaacgcgaatgaatcatcgtcgaatgcggacaacgtcagctctaatgagcagcacaatgctgtcatggactggtatttgagacaaactgctcaccaccagcaagatgaagacgaggacgaggnnnnnnnnnnnnnnnnnnnnnnnnnnnnnnnnnnnnnnnnnnnnnnnnnnnnnnncggcaacgacagtaatagtcacttttctcaggctgacatggtcgtggatgacgacgaagacgacgacggtgacaagaataagaagggcacgacggttaacgtggacgatcatcatcaatcgatggccatggcagctgtcgcagccgcttatacactatcaaaaaacaacaacaacaattccaacaaaaggcaacatgacaatgtaaatagccatgaaaactctaagaaaaagcaaaaaaacgatgacgatgatgacgataagcaaattggcaatgttgatccggaattgaccactttgggcgatgcggatgacaatgacgctaacaacgatgtcattgaccgtgatcaactggttcataaggccattatcgatgccgactcgattacgcaacatcctgatttccagcagtacttaaacactgctgctgatactgacgataacgaaaaattaaagcatataaaagatcatctgatgcgtactcacaatatgaatcaccgtaacaaaaacgacaacgatgatgcagacgatttgtcaaacaatacaaagcaatactcggagctacaaaaggattccatgttggataactctatcaataaatctagaaattacatggaagtcctaccaaaagttatctcccaggatactcaacagcaccaacaaaaattaccttctcatgacagtgaatctggcaacgtagacaattcagaaatatctcaactgcttcaatccgcagccacaaaggcttcgtctttggtttctttatcttcatcttctgctacaccatcaacttcaagatcaaacaatagtaaagctttcgataaagccgaagacgctgccttagaaaggtttataaacgaatacgaagccatcgaacgtttaactagacaacaagtttgcgaaagaatatggagctctgacaggccaaaggacaatttttggaacaatatctataaagttttaccttatagatcaagctcctccatctataaacacatgagaagaaaataccacatttttgaacaacgtggtaaatggacttcggaagaggaacaagaattggctaaattatgtgctgagaaggagggacaatgggctgaaataggtaaaactttgggtagaatgccagaagattgtagggatcgctggagaaattatgttaagtgcggtaccaacagagcatcgaacaggtggtccgttgaagaagaagaactactgaaaaaagttatcagtgacatgctggaagaagcccaacaacaacaatcacacttacatcccaatctgttagaggaagaagaacagctgctacaggacgaccagaatgatcatcgtgacgaagatgacgatgatgatgatacctcttctgcggctgctgccgccgccgccgccgccgctattcaagaacaacaacagctacttcaacaaaaacaacaagatgacgatgacgctattgctgccgctgccgctgctgcttcctcgtctttggaagaaaacggtaaagacgaagataagccacatgattcactgggcattcaactggatgagaacactcaaaactcgataatatgtgctccatccggaacaagctcacattctaagagtttaacgaatacaatcagacgtcataacaacaaactaagaaaatctctaatgggtaacggcaaactagattttaaagatatcatcaattggaccattgtcagtgagcgcatgggcggtacaaggtcgcgtatccaatgccgttataaatggaataaactggttaaaagagaagccatcgccaaaattcaaactgtcaaggatgacgatatgttatggatttttgagaagttaagagacttgggtataacagaggattctcaggtggactgggacgaattagcagctttgaaacctggcatgaaactaaatggtttggaattgaagctgtgctatgagagaatgaagaaaaaggttaaaggttataaacaaaaatcaattaatgaaatcagtaaagagctagtggattattttagctcaaatatctcgatgaag

SEQ ID NO: 2770 - DNA, 210 bp, Saccharomyces pastorianus
atgccaatgagacgtcagtactaccaagcgcaaccaatgtattatcaaccgcaaccacaacccatatacatacaacagggcccacctccacctagaaacgattgctgctgttgctgttgtaattgcggtgactgttgttcggccattgccaacgtgttatgctgtctctgtttagtcgatctctgttgtacctgcaccggcggcatgtga

SEQ ID NO: 2771 - DNA, 1200 bp, Saccharomyces pastorianus
atggaaaaatttggtttagaaaatagtttcccatatgaacatggtttagatttcaggatgacgaggcgggaaattataaattccaccaaaaatgaaacggcttatttattttttaatatgaaaagaatcatgctctgtgttctgaaatactcttataatctcataagttctcttttggactccgcaaagcttattatggatgacgttgttaccattggttcccgaaattttcctacgaggttacaaatcgatgctggcgaaaacgacgatcaagaggatatctgggcatcaacaataattctgggaataattatcggatattcaatatcttgttttggaaaaagggctaaaaacccaatcaaattgactaaagtttattctaaacatagcgaaccgatatctataataataaatttcatgaaaaacgattccagtggtggtagtgatcctattggaggaaacgataccgaagaagttatgggttcacaacttgatgagtctgtccttaacagccatataccaaacatagagattatggatgaaacagatcaaatacttaagcaagacttctatgagatttatgatccattgaatggtgaaactgcaacaatagatggcgtaaaatggttaaaccaattaagtcaggtctttgaagcagagcccaatagtataacaactgataacttgagagaagtacgtcttgaaagaactatcaggcgttacaatgaaaggcatggaccggttgggcatttaataggagatgatagtgtcaggcttcgtcacctcaaagaggacatttataggactaacgcaagtgcgggtaggtttcccgttcagaatacttttttcactatgaatgggcaagcatatttgctttgtttgcgtgggcatgaattggtaatgaaagcggagttatgtgccgagattgataaagaattaatttccttcttcattgaaagcgtctcattcagggaaagtggaatacttgagcagaaacaagaccagttggaagaggtgactcataaagagattatttgctatgatcaaaaccgaagtctggctataatttaccatttgcctaagattgagaagcaaagaaatcccctcacaaaaccaagtatgccaaccttttcaaaaaaatcgttaagtgacaataaaaatgcagcattgattttattatggtattccggccatctatag

SEQ ID NO: 2772 - DNA, 330 bp, Saccharomyces pastorianus
atgtcgttatttctaaacagcctgaagggcaaccaggaaatgtcacaggagaaggtagacgtggcgggagtacaattcgacgcgatgtgctccactttcaacaatatcatgaggacgtgtctcgagaagtgcattccgcacgaggggtacagcgaatcggagctcacgaaaggggagatgtgctgtatcgaccggtgtgtggcgaaaatgcactacagcaaccgcctcatcggagggtttgtacagacacgagggttcggaccagggaaccagctacgacactactcccggttcctgccaaagcaagaggacggcgagcccaataactag

SEQ ID NO: 2773 - DNA, 876 bp, Saccharomyces pastorianus
atggaaaaattactacagtggtctattgcgaactcccaaggtgacaaagaagctatggccagagttggtcaaccagaccccaaattattacagcagttgtttggcggtggtggccctgatgatccaaccttaatgaaggaatcgatggctgttattgtgaatccagaagttgacgtcgaaaccaaattggttgcatttgacaactttgaaatgttaatcgaaaatttggataatgctaacaatatcgaaaacttgaagttatgggggccattgttggaatttctcgatcaaactgacgaagaggagcttcgcgctgctgctttatcaatcataggcacagccgtgcagaacaatttgaactcacaaaacaactttatgaaatatgacacaggtctgcgaagccttattgcgttggcgagcgacaagacaaagccatttgacgtaaggacaaaggcgttttatgccttgtcaaatctaataagaaatcacgaggacatttcagaaaagtttttcaagttaaatgggttagattgtatagcgcctgtgttaagtgacgccaccgtcaaaccaaaactaaaaatgagagccattgcactgttaactgcttatctaacatccgttaaaattagtgagagtttgatcaacgtgttaagagaggatggcgtagttgaaagtacaattgattgtttgtccagcgagactgacttgaacattatagatagagttttatctttcctttctcagttgatttcttctggaataaagttcaatgaacaagaaatgcgcttactgaatgaaggttataaacatatcgaacctttaaaagagagacttaacgaagatgattatttagcagtaaagtatgtattagaatga

SEQ ID NO: 2774 - DNA, 1278 bp, Saccharomyces pastorianus
atgtcggaccaagatagcgcaccggcctccccaagtaaattggctccccaccacaatatatttatggccagcttggaaagctcccccacaaaagacaggaacggttccagccaaaatgccccatcttccaaagtcattgaatcattgcacgaccagatcgatatgttaacaaaggcaaatttacaattgaccacgcaatctcagaacttattgagcaaattggagttagcacaatctaaagaatcaaaactattggagaacttaaaccttctaaagaatgaaaacgaaaacttgagtttgatattcgaaagaaaaaataagaagttaaaggaagtagagaaaaactttagtgatttgagtaacgactacaatgtacaaaaggaaaaattgaccgaattgaacaaagtgatggaaaattccagtgtcatggaaaagacaagttccgagaaattacaaaatttggaggtccattatgattctttattggaatcacagaatttctataaagatcactattctaatgaaatttccaaactaaatgagaaaatcagtttcttggaactagaattgagtaaccaaaatctaaatttcggttcggatgctagttctaattcagatatagagttaaacctggctaaattcaacggctctgttaatgatttgaaagccatggaaacagaaaaggattcaaaattaagcaagataatcgggcaaactttaaatgagctgaatttagaaaactggttaagcttgtatgagacaaatgagagtctgatatcatcttttgctgaaaagatggatttgaacgatgttttggagaaaaatgatgacaagaggaacaataaagatacggtcctccaaaatctgaagaagaatgtgcaaacgcaaatcgaaagtagtaacgctaacaatatggacaatggcaatgaatcagacatacttcctatcaagatggttaaattgagaaagacgccaaacccaaacgatccgtcttcgaatagcagtaatagtagcaacaaaagaagaagcttttatactgcatcgccattactgtcgtcaggttctgcgccaaaatcgtcatcccccgttttgcctggtgtcaaaaggacagcatcagtgagaaagccgagcacaggtaacagcaaggcaaatataatgcataatattgatacaagtacaacccctacaatatcagcaccacctggggctacaagacaaacttcatccgctcataaaaagaagagaaacagtacggttatacacgggaatcaaccctga

SEQ ID NO: 2775 - DNA, 2151 bp, Saccharomyces pastorianus
atgacaaatatgcgactgcgatatatcaccgtttttgatccgtcgaggtccaccaacgaagatgacacttttaagcagctattactattccattcttttggcgataatgatccggtcccgtctttgaacgagaaactgtcaactatagggataattcagggcatttggtcactcaccaattcgggctcaagcagtgatgaccagaatgaggacttagaaaaaatcatagagctagataatgatgtactgctgtgtatcaaagttgaatcaaggtttttaattagtttagcaatatcaaatggtagtggtgatgagaatacgataccgtttcaatattttagttcttacttgtggctcagttacaaattctttaagctactgaatggcccttttgccagattcaataaagatttcaataaactaacggatttattgaacgaattcgtcctcccgttctggaacgatatctatctaaacttggaaacaataacaaataggtcttttactgttatttggcccgatttctacaaaagggcgaacttccagcatggatctttcaacccagtaattaacaacactgataaagaatcatgggatgctatagttttacaaaaaattctgctagataaaaaaagctacctaggcattaaggacattttggtttaccatttaccaaaatacaatgatacaagtacgaaagtgcccattggaacaaaaacttatggactagtaagaaacttcaccaatgatttgaagactttaccagatatatccaattggttgtaccatttacattacacctatggcgaaatatcaagtcatatattaacagggaacgcccatttcaaggaagagctaccggtagaagaagaacaagaacaaaatcaacccacacgcgaagggggtgaaggaggaagagaagaagaggaagaagaggaagaagaggtagaacaacaacagcacaataccctaccaaaccatacgaacaacctttctttatcagaaaggatgatgcataacgtaacgcttcccatttcatttgcatacgacgccatacatgaagtgagtacaacaaccggtgtttccagtagtttatctatgataatagattatgtaccaaaacctcactggccatttctgtcatcatcttccaacaaaaatgacagtaaaaacaaaagcacaggtatcaacgatcgcacaaaaacgaatactacattaataacagagtcagaaacaattggaggaaccataggaagttcaaggtttggatttttaatatctccattgagctgcaacctgttaccgccatcataccaagctttgaaattaaatttggatttcaaaaattcaaaaggtgacgaaaatttttataattgtttattttggtatttcgatgatttcttagtcatggttgtatgtgatccggattttgacaaaatctgggaaaaagactacttaaaggatttaaatttccagctgtgccaaagcatgatatgcttaaaagatgatattttcaattctcagaagtgcgacaccatggaatctttcggttacgtagtcaaagacaacgccactaaccaaattgactcatctgttccattcggatcacccagaatgactttaaacgaaaatatttcatctttacagttagccatcaatggtattgatcagttcattaacgacaactctaattcgctatcactaattaattggaatccaatagctatcatggggggtttcaacaacagcagtaaaggtaacaatactcaaggtagtcaaagtgagctggttggtaataagcaagcatccaaaaggaaatatttgaacttcctgagtcttatgaacacagaaaaattatgggatttacagattgacgtcctacaatttctaattagcttacaaaactcgaaaaaggatccggaatactttcaagaagaaagactgctgaaattaaacaatggaattttatgctacatcagagaaacaaattcgaaattggttatcatcatcaaaaattggttccaaaatgatgatactacaaaggctttgaagcagagaaaccatgttggttcaaatggtttcatggaaagttccttgtttcaaagcttaggtccagatgtgatcgattggtgggaatctagagaaatataa

SEQ ID NO: 2776 - DNA, 1557 bp, Saccharomyces pastorianus
atggagaaagatcagacgcatctcagggcgttagaatccatagacacaaactcattgtctttgctctcttcaaataccagttctaatacgaacagtaacaccaacaataaactgagtcttactactagtgacttatctacagggtctatactaaatagaccagtgactcctcctgtaatccaagacaccgaaaataactccatgtttcaatggcaattcgagaaaagggaatttatctttgacagtaatagtacgccttctaaacagacaaaaccgctacaaaaaacttccccatatcaaggccaaaatcaacagttactgaatgtaagaaagcgacgttcccagctaataggtgcaaagcctaaagttccatcaaaattgtaccaatccgtatctaaattagatttaattgacgataagaatttcacgtctttgccaatcgcgcctccatgcaatagtgaggaaatcaacgacgagaatgacgatgatgaatataatagcagtaacaaacgacctagattaaatccaataaaagaactacgagtacacaataacaaacgtaataggtatgtcagttatgggccaatattggatacaagaaactttgagttagcagaaagtatgtcccaagatactcaaccattagtcttagttgaagattatatagcctatacccaaaataagtcaacaaagaaaatggtatctatttcagacttgaaatccaaactggataaaagaagcgataaccatattccgttgagagtaagaaattcacgttctaaaattaatcgtgaggcaaacagaaatagcctcgaaccgaactcgttaacactaataccccatatcttaaaaaacacaggagaaagcactaatgagattgataaccctatggattttattaaagaggaaagtgaagttagtaatacgtccataccagattcaatagagaatatggtagtcaatttgattaatattccctctacaaataaaagttatgatgatctctatttatcagaattagatgtccattcccagctcagaaaatgtgtgatttgtgaaaaagctttgtatgaaataagttcaaagcttttaaactcagggcactacaaagaaattgtatgtgaacaatgcacagttaaatatgaagaagctgccaaaatttttgaaaactgcgagtttgaatcttctactgatgaatcaaatttaagtaacggtacgtttagtgatctcgataattcagcagaatctttccatttatcaatagatgctccaataggaataagtaatcaaagggaagataataaaatgaactataaaaaggaaatatcaaagaaaaaagatagcttctctagagagcttatagaacggttacaattgcagttgctcgagaatgataagccgaataaaaatcgtctgaataaagatataatgggctcaaaatcaatgaattggtttttagaagcgaggaggaaattgaagtggaagtggagaataaacggcttgctaccacatttcttgggtaaccaaaataacgaccgtttgaattttcaatcctaa

SEQ ID NO: 2777 - DNA, 1158 bp, Saccharomyces pastorianus
atgggctcaaccaaaccaaatgatgaatacaaaaaaccccaaaagtatgtgccaggacccggtgatcctgtactgccaccacaactgtctgaattcaaagataaaacatccgatgaaatccttacagaaatgaacaggatgcctttctttatgaccgaattggatgatactgacggtgctggtggtgaaaatgtagaattagaagccttaaaggcattggcgtatgagggcgaaccacatgaaattgctgaaaactttaaaaagcaagggaatgaactatataaagcgaaaagatttaaagacgcaagagagctttacaccaagggtatagccgtggaatgtgaggatagatctttaaatgaatcactttttgctaacagggctgcatgtgagttggaattgaaaaattacagaaagtgcgttgaagattgtggtaaagcactgactataaacccaaaaaacattaagtgctattatcgtataagtaagtccttttttcaattgagtaaactcgaggaagccaagtcagctgcattatttgctaaggaaaaaattgacccagaaaacaaatctattttgagtattctatcagtgattgaagaaaaagagcaagagctcaaactgaaagaggagaaaaagaaaaaagaagctcaagatcgtgaaaatgagaaaattatgcttgaaagtgccataacattaaggaatataaccaacataaaaacacagtctccagtagaactattgaatgaaggcaagataaaattagaagactcaatggattttgaatctcaattgatttatccagcattaatcatgtatcccacgctggatgagtttgatttcgtaggtgaagtaagtgagctgaccaccgtacaagaacttattgatctggttatggatagaccacaagaaaggtttgaaaaagaaggtaaacaaaactttactccaaagaaagttttggcatttatggaaacaaaggctggtggcttaattaaagctggtaagaaaatagcattccatgatatcttaaaaaaagttacaccggatgtgccattattcgataacgctttgaaaatatatattgtaccaaaagctgaaagtgaagaatggatatcgaaatgggataaacaaaaagccttagaaaggagattcttgtaa

SEQ ID NO: 2778 - DNA, 2103 bp, Saccharomyces pastorianus
atggattgggcaatcaaggcggctaagaagaaaactcaaaggaagccagggtccactcgttcaatcatagaaaccctcgatgatctaaacaacataacaacagatgcacatatagaaatcaaccatcgattacatgaaagtaacgaatggtttagaaacactttatacatgaataaagctaagcaagaggacaaaaacatagaagagtgtttaataagtccagaaaatacccataataaaatgaatatagaatttagtgaagcgaaagaggaatatggtctttctgttccacaaagtgacacttcaaaagatcttactaaaacccccagaagcattttacataacgataaaagcataacaccaaaatcgctccgtagtaaggacgttacagaaaaaataaataagttcagtattcatgaaactcataaaagtccaatcgaaccttcgaataccgttaaaagcaatgaagataacgaaaaatcctccccatggtccccctacaaagtggagaaaattctcagggaaccatcgaaaacttcggaatctccactcactacaagaacatctgataaccaagcctgggcggctaatgaagaagtagaaactgagtccataatttatacttctaaaaaaatcgatccgccaaaagcgaaaccaccaccgaattctgaggcgatcaggtcacaaaggagatcaaatatgttcatcccactgccgaacaaagatcctcttattgttcagcacaatccatcaataaaatcttcaggatcaataacaaaactgagattagtaaaggaatctccaattgcactgaggaggaagccgatagcgaatagcccagttataaaaggtatggaaaacaatgataccgctgggtctaccaaggcatctagtgtttttgacaggctgtcatctataccgacaaaatcatttgaaaataagatgattcgtgggaataataatcataagtactcttcttcgtcaatagacttaacaggatctcccatgagaaaggtttctcaaattttcaagccagtcaactcttcagatactgatatgcaagaaacgctaagggatattttttcagtgaaggacaagattactaaacatgactcacctaagggaaaaagttctagaaagtccttcattccgagatttgataagcattctttaaaagccacaacaaataaaaagctgggtataattgtggaacagcaaaagcgattctcaataagaaaacccaccactgctcaccaaactggctcaagaccgcctagtaggtcgccagtgaaaataaataatagcttgaaatcaccatcggaagatataaagaaccactataaaagcccagcaagaggtcacttgagggcaacaaaaacgtctatttcaccaaacaagaataaaaatacggcgagctctcaaacaccacgtcgtttaagagccaatgaaaaacctttgttaaaaaaactgtctcctaatatatcagatgtttccaaacctgagtcacgtaagtccaagaattacagacttacaaatctgcaattgcttcctcctatagaggcagagaggggtgatttgaagaagaaattcgataaaaggttatcgggaattatgagatctcaacaggaacatcaccgacgtaaacaagaaaagcaaaaaaggatgtcgcatttggaacaagacttgaaaaagcaaacaagctttaacaatgattgcaaagaagtgcctttaaaggaaccattagcatcgtccagtaatcatgtgcggaataataataataaaaatactggctttaacaccgataatatattggccacaatcaatacagtcgaccatcgcgaaataattggaaacaccacccccaaactggcctccggcaatgattctttgcccgatataaatacagattcggagggcgagaccagcgtaactttggcagcatgggctaaatcaccatatttacaagagcaactaataagacaacaagacataaacccacaagctattttcggaccgataccgcctttacacacggatgagatttttccaaatcctagactgaacagattaaagccacgtcaaatactatcaaaaaggccttga

SEQ ID NO: 2779 - DNA, 561 bp, Saccharomyces pastorianus
atggggaatgctttcagtgggatattcgataagttgtggggggtgccgatgcagctgaggatcttgatactcggattggacggtgctggaaagactacgatattgtatcgtttacaattgggggaagttgtttctacaaagcccacgattggattcaacgtagaaactttgaactataagaatttaaaattgaatgtttgggatcttggcggccagacaagtataaggccgtactggcgttgctattacaatgaggctgcttccgtgatatttgtcgtcgactctacagacaaggaacgcatatcattggcagccaaggaattgcatgtcatgctccaggaggaagaattgaaagacgcagcgttactggtctttgctaacaaacaagaccaaccgggtgccttgagcgtttcgtacatatcaaaggagctaaacctagtcagcttaaaggaaagaagctggtcaattgtggcgtcgagtgccatcaaaggagaaggcattactgaagggttggattggttaaccgatgttattaatgaagagcaagttcaaacaagatag

SEQ ID NO: 2780 - DNA, 621 bp, Saccharomyces pastorianus
atgtccgaattcaatgaaacgaaattctctagcaatgggacttttactgaaaacgaagaaccaattgtagagacgaaagtaatctccgtttataccccactcatatatgtcttcattctggtagtgtaccttgttatgttcgcttcaaactacagaaagaagcaggctaaaaaaatcagcgaacagccatccatatttgatgaaaacgatgctcacgacctgtttttccaaataaaggaaatgagcgaaaatgagaaagttcacgagaaggtcttgaaagccgccttgttaaacagaggcgcagaatctgtcagacgatcattaaagttaaaagagctggcccctcagattaatctcttatacaagaatggctccattggagaagattattggaagagatttgaaactgaagttaaactaatagaattggaatttaaagataccttacaagaagctgagagactacaaccgggttgggctcaattgtttgtcatggtctgtaaagaaatttgctttaaccaggccctatctaggcgttaccgatcaattttgaaacgtaaagaagtatgtattgaagaatgggaattgaaaattaacgatgatggaagattagtcgaatag

SEQ ID NO: 2781 - DNA, 948 bp, Saccharomyces pastorianus
atgttccaattcattgcagctgtggcgacggaggatggcttgatggctacttctgcgaaaatatcacccgatggccggtttctggccataacgcagggacctagtattctaatatacaatgtctccaaaaatgccatatcacagacgctggtcacgtcgcatgcaaggccattctcagaactgtgctggtcccctgacggacagtgcatcgcgactgcttcggatgatttctccgtggagatagtgcacttgtcgtacgggctgttgcatacgtttgtcggtcatacggcgcctgtgatatccctggcgttcaacagaaagggcaacttgctgttcacgtcctcgatggacgaaagcatcaagatctgggatacgctaaatggctcgctgatgaaaacgatatctgcgcattcagaggcagtggtgtcggtagatgtgcccgcaaatgactcgtccattctgagttcaggttcgtatgacgggctcatacggatcttcgatgcagagacaggccactgtttgaaaacgctgacttatgacaaggattggaaaagggaaaacggtgtggtgcccatctcccaggtcaagttctctgaaaatgcaagatatcttttggtgaaatcgctggacggcgtggtgaagatatgggactgtattgggggctgtgtggtacgcactttccaggtccaacctccggagaagggtgtgctgcatcattcgtgcggtatggattttttgaaccctgaagacggctccactcctttggtgatcagcggttacgaaaacggtgatatatattgttggaactcagatgataaagagcttgttcaattgctcgatggttcctcccatcatcggaatagtcctgtgatgagtatacattgcttcggcaatataatgtgctcgctcgcgttgaacggagtttgctgtctatggagatgggagtga

SEQ ID NO: 2782 - DNA, 1362 bp, Saccharomyces pastorianus
atgggtagaagaaagattgagattgagcctatcaaggacgataggaatcgtacggtaactttcataaaacgaaaagcaggacttttcaagaaagctcatgaactgtccgtactatgccaagtggatattgctgtcattatattgggatctaataataccttttatgaatactcttctgtcgatatgggaaagttaatcaatgtccaccaaaacaatgccgatcttcctcataacgtcatagagccttccgattatggtgactatgtcaagaaaccgcatgttgtcctaaatgaaaaaaaacgtaggcgaagaagaacggccgtgttagaacctgattccaactttggaaacagcgcactttccggtcagaattcatctggaaatcaaagtagtgggaacttgaacgttctgccggtatcaaatgaaatcgaacacgctgctataggaacatcgttggtaaacgcccaaggaaacgtatcccgtaatggatccaatatttccgaccattcaaaaaatggtataaattacgctatgccacgagatcagttgcaccttggaggggggttttatactaacatatacaaagatattaatggtcaacaatttcaagtagatagagtaccttatggagatcgcatggataagaggatgaaattggatagtcagcaattctttcctggacccaatcagcctggctatggtagttattatccgtcaccttatgataatttaccaaaacccgcgttaccttcaaatctaatgaacaatattccgcccgtccaatcgcaatttgttcaaattattccggcgaattcaaacacaattggaaggtcatttgatgtcacgaatgataacgtgacatttcggacaagacaaactatgtccccgccggttgatgatgttccgagtacatcagatggacctgctccagtgcagacaatggtacatcatttaaatcagctaaatagaaatagagggaagctctcagaaaagcccgctttgaagttaagcatcccgaaggctacagctgatacaagtcgagagtctccaacaatatgtccaactaccacatcgccgaaaatggccgtccaaactaatttcaagcaccctccttgtggtagcactttttcgccattctcccattccaaaattttggaaattaggagcaatgatatcaagagttcgaatcatagtggccaatccacttgcgcacaagtaaatagtaaaacattttttctcaagccaccgattggtagacctccaaagtttccgaaaagcccgtctacttctattgtaatatatcctacccctgtacccaatccaagctcaagctcggtaaattcgattggatctcctaaataa

SEQ ID NO: 2783 - DNA, 1698 bp, Saccharomyces pastorianus
atgatccgaaataatgtactaaatgatatcgcgggttctgctagaatgaacgtcaaatgcaagcagcaagtaaaaagaaaattgggaagagttgaagcgcaaggaataggtctaggtgccaatgaaaagcccacatcagaggaagatttcaagcacacaagttacgaggaaaaagtagatagggaaaaaattaaaatgcactacctctataagaaagggggcactatgaccgacatccctaaactggtgataaatcaacatgctgatataagagagcgtgaaagcagaaaatgcacacctgaacacaacataggaacaacaacctctgaacgcgagctaccattactagaggatgtccctcaatcaatcaaacaagcgaaccgacattttgaggatacacgtgattggtcccagcttagtacaagtaaaatctgtgaaattctggaagatatttcgtctaaaaaacgtagaagtagggtacacttctcttcattacagaagaaagaaaacccacacaaaagatatctgaagaaagatgacgaaggaaatcaggactggtcacaaattgcaaatgaagacatatgcgaactgatagagaagatcgctagtagacgcaacaacagtcttaaagaaatcgatcgtttatgttcgcagaaccaagagaattcagaaacaattcatttatctgaaaatggtacacttataggagaaccaacgaacactcggcaacgtaatgcgaaagggagcagcgagaacacgacagaaaagcattctgatctcgaaagtaaaatttcaagaacagtttgtcttccataccaggaaaaagaactacgattgataccctttttacaaaggcaaagaatggaaccagccataatctctataagtggtgttagagaatttaggatgagaaagtttactaaaaaactcaaaccgtgtccaagaagccctgtgaaggagttttttggcgtaggaattattatttccagtcaatcactgtcttccaaacacgtaatctttttgcatcaaaactccgatttaagattccttcgaggtattttgggccgcagtagacgctctttcttgctctccaagctcgagcagacacgtgctgagatcggtctatcccttatcaaaccaccacagactacttcgcctttttttgcgacaatagttttaaatattcgactcggttccaaagcgtttgccgcgatatgccattacgaaccgcaagccatactgttcgattcaagaggactgaaaacaaggaactgtagcacgcactcgaggttttcacgtcccctccacattccttatgaagcaacggcgatagaagagatcgatcatctagatttgaacagtgaagacaaaacatcacaggggaatacggttgttaaaaatgaaaggcttttcaatgattgcctggaaaaaaaaagtagtgctgatcctttgaatagtatgaaacgtcttggcaaaactcagcctttagaagctaagaataggcttcatcaaaatgtcacgattaatgttcaaggaagcgtaactgttaacaacagtctttttgcctctctgtgtgggcttttccacagcctatgctctaaaggctattggaataaagttgatttatcagaaacattattctatgacgatttgactaacagatgggtgaagatgggagatctagtacagtatcactaa

SEQ ID NO: 2784 - DNA, 429 bp, Saccharomyces pastorianus
atggcaggaactgggctctcgttatttgtgacgggacttgtattgaattgtttaaactccatatgtcaaatatacttcactatattatacggtgatttagaagctgattatattaattcattcgaactgtgtaaacgggtaaacagatggagcacaccagaggcaattttgcaggcgtttgtttctatattatttcttttgaatggatattggtttgtttttctcttaaatgtccctgttttggcatataatgcgatcactgtctttaaaagaacatacctactggacgccactgatattttcaggacgctgggtcaacgcaaaattgaatgctttttaaaattagggttctacctcttcatcttcctcttttatttctacaggatggtcacatcattacttgaaaacgaagctaacttgatagggtag

SEQ ID NO: 2785 - DNA, 1974 bp, Saccharomyces pastorianus
atggccgatgctaataacgcctctctgagacaggacaatccatacatcattccgctacccccttcatcaacagtagagacgtcttctgagcctccaagaacactgtggatgggtgatttggatccctcctttgacgaagctaccattgaacagatatggtcccgtttgaataaaaaagttattgttaaattaataagggcaaagaaaaacttattgattccttgtagttccacctcaagtggtaacaccaataccaacgaggagagtggagaaaaccaacaactcgcatccagtagcaccgatcatttagataactcccagatgattaatattaatggagtctcatttattgacccttccaccactcaattacaccatgcaggatattgttttgtagaattcgaatcacagaaggacgctcagtttgccctatcgttaaatgctacgcccttgcccaacttttactctccaacaaccaattctcaaacaaattcaacattcaaaagaacctttagattgaattgggcttcaggcgcaactttacaaagttctataccatctactccagaattctccctgttcgtaggagatctttcccccacggctactgaagccgatttattgtctctgttccaaacaagattcaaatcagtgaaaacggttcgtgtaatgactgatcctttaacaggatcatctcgttgcttcgggtttgtcaggtttggcaacgaggacgaacgtcgtagagctttgattgaaatgagtggtaaatggtttcaaggaagagctttaagggttgcatatgccacaccaagaaacaatatgatgttgcaattacaagaacagcagcaacaatcgcaacaacaacagcgccagcaacaagaaccagaggacaatcaggcccctcttttggtcaagactgcaaataatcttattcaaaataatagcaatatgctacccctcaatgcccttcaaaatactcctccaataccattaaacgagggtgggaatcacatgcgtgtaaaggaatttttaccctctcacaattataatactgacccgaccaatactactgtatttgtgggtgggctagtaccaaaaaccactgagtttcagctacgttcgctatttaaaccatttggccctatcttaaacgttaggatccctaatggtaaaaactgtgggttcgttaaatttgaaaaaagaattgacgcagaagcttcgatacaaggcctgcaaggtttcattgtaggtggaagtccgataagattatcatgggggcgtccttcaagttcaaatgctaaagcgacgccaaccgttatgggggcgggtcagtatttatcatcgaatagtggaagagctccttcatcagcctcttctattgacaattctaaacaaatcttggaacagtatgcggaagataaaaggcgactctttttgcaacaacaacaacaacaacaacaacaacaacaacagcacgctaactatcccatggagcagttgactcaccataattactacaattacaataatttcgattatcgcaataacaataatggtggtcaaggcgacctggacaattctcaaagaccaaacatcccgtacgtacaagaagaaagtacaatgtacccacaccaatatgcaaactcttcatacccgctccaaccaatggctaatcaactctctaatgctgatgacaacatgccacaattcgggaatgcgttgacaatgtctctacccctgcccagtggtaacaaccataagatgggcatgaacatgggcatgaacatgaacacccccaacatgaaccagatggcatacggaatgggcagtagacccaatatgtacgacgtgtctgggatgatgaaccctccttcaagcacagtttcgagtagcaacaactcgaaactgaatagtatgaacaagcatcctaataggaacaacattccgccaattcatccatctcttttacattga

SEQ ID NO: 2786 - DNA, 1551 bp, Saccharomyces pastorianus
atgttgagatttacaggccaaaacttggctaaatcctattatagtagaattgggagatatgctgctactgcttctggaaagctggcacagtcacgcttgtcgaatatacaaactccaaaaacgctaaagaaatttctcgacgaatatattattggtcaagatattggtaagaaagttttgagtgttgcagtttataatcattatctgaggatcaatgacaaacaaaagaaaagggaactacaaaggcagagggaattgatagaacaggaaagacttacggatgacaaagatgaacctatcttcaatgggaatagtgaggccaaagcaggctggaagaatcttcagagacagtttaattcagtaggtcaagaagcggaagaaaatttagaattaagcaagagtaatgttctagttgttggtccttcaggctctggtaagactttattggcaacaacgctagcgaaaatactaaacgtccctattgcaataactgattgtacgcagttgacgcaagccggttacataggtgaagatgtcgaagtgtgcattgaaagactgctggtcaatgccgagtttgatgttgcaaaggcagagaagggtattatcgtccttgatgagattgacaagttggcgaagcctgccgcaagtattggtaccaaggatgtgtctggagaaggtgttcaacagtcgctgctaaaaattattgagggccataaagtagaaattgccgttaaaaggcctgtcaaacatgatattgacgggcaaaagaatcaaaccacaaccaaaaaggatgaaatatttgtcgtcgacacatcgaatatcctctttatgattatgggcgcatttgttggtttagataagcatatcgtcagaaggatagaaaatataaggaaaagtcaaaataccaaagaggcagatcaaccatcaaaaatcaatgaccaagaaagaatgaagaagctcaggttcagtaatacacttgagcaagtagaattggacaacgggaaaaaagtatgtgctttagatttgactacaccatcagatttagtaagttttggtttaattcctgaactgattgggagagttcctatcataactgcattgcaaccccttcaaagggatgatttatttcatatcttgaaagaaccaaaaaatgccctgctagaccaatatgagtatatttttaaacaatttggtgtcaagctgtgcatcacacaaaaggctctgaaaaaagttgcccaattcgccctcaaagaaggaactggtgctagaggtttgagaggaataatggagagactactgttgaacgtcaattatgattgtccggggtccgatattgcttatgttttagtgaacgaagctacagttgactcattacaagaaactgaacattccttggcttcccacgtggatgtgaagtattattctgatgatcaaaaagacgatttggttcacgatgtttatgaagaagataagaaattaggagcaatgttagaaaaggagttcggaaattcagccagaatccatacgcacacaatccaaggcaagttttga

SEQ ID NO: 2787 - DNA, 1311 bp, Saccharomyces pastorianus
atgtcaaataaaccagagaaaccggtatggatgtcacaggaggattatgaccgtcagtatggcgcagccagcaacgatgaagcatctactatattaggcaacaactccaaaaccttcatgagcgcaccaatcaatggcaatggatcatcaacagcttcgcaaactccacctgctctaaacccagcatcttcagtttcacctactgagccagaaacggcgttcaaagtgcaaaaaagaagacacgaaaggtacgatcaagaagaaagagaacgtaaaaaacgtgctcagaagctgagagaagaacaattgaaaagacacgagatcgaaatgaccgcaaatagatctatgaatgtagatcaaatcgtccgagaacattataacgaacgtacaatcattgccaaccgagcaaaaagaaatttatcacctatcattaagcttcgtaatttcaataatgcaataaaatacatgctaattgacaagttaacaaaaccaagtgacgtggttttggaactcggatgtggtaaaggtggagatttaaggaaatatggtgcggccgggatctcacagtttattggtattgatatttcaaatgcgtctatccaagaagctcataaaaggtaccgttctatgaggaatctagactaccaagttgtcttaattacgggggattgttttggtgaatcactaggtgttgccctagaacctttcccggattgcagattcccatgtgatatcgtttcaactcaattttgcttacattacgctttcgagaccgaagaaaaggcaagaagggctttactgaatgttgctaagtccttaaaaattggtggtcacttttttggtactataccagattcagaatttattcggtataaactaaacaaatttcctaaagatgtggaaaaaccgtcttggggaaattctatatataaggtaacttttgaaaataattcgtaccaaaaaaatggttatgagttcacgtctccttatggccaaatgtacacttattggttagaagacgctatagataatgttcccgagtacgttgtgccttttgaaacccttagaagtctagcagatgaatatggtttggaattagtatcgcaaatgccgtttaataagttttttgtccaggaaattccaaaatggattgaaaggttttctcctaaaatgagagaaggtttgcaaagatctgacggtaggtatggtgttgaaggagatgagaaggaggctgcttcatatttttacaccatgtttgcattccgcaaaataaaagaatatatcgaacccgaaagccagaaagatctttaa

SEQ ID NO: 2788 - DNA, 843 bp, Saccharomyces pastorianus
atgaacaaagctcagactttcataaaggagtgcttgttcaccaaaaatctggaagatcctgaaaaaccaattaatgaaaataggttgcaagatacattgttattattgccaaccgatggaggtttaacttccagactccagaagcaacgtaaaaaatcaaagctgaatctcaacagcttacagaacatttcccaattagaaaatgaaaacgaacagttaaagaaggagaactaccaacgtgtcaacaaaaattctaaaatcgcattgagagagtttattaattcttgtaaaaaaagcacacagaaatgcttgaaattagcacatgaaaataaaattaccgatagaaaaaatctctcaagctacctggaaaaggatcacccagcgatatatgaagcacttccgcagtacgatggatttgtaccgatgtacaaagaattatggcttaactacattaaagaacttttgagcatatcaaatagtataaaaacgcttaacggatcatcagcgctactaaaattatctatggcagattacaacggtgcactattacgtgtcacaaagagcaaaaacaaatctctaagaggtattcagggcattgtgatttgggactctcaaaaatttttcatcctgatcgttaagggccatctaatagatgagataaagtgcataccgaagaagagcacagtgttccaatttgaaattccactctcggataccgatgactccgcattgagatatagtattctaggtgataggttcaagtacagaagtgtcgatcgtgctggaaggaagtttaaaagtcgtcgctgcgatgatatgttatattacatacaaaatcagtaa

SEQ ID NO: 2789 - DNA, 699 bp, Saccharomyces pastorianus
atggacgtgcctgcagatgcccacattatctatgaagacgccatcgattattggaccgatgtagatgccaccgtggacggtgtcctcggaggatatggggaagacactgtagtacctacaatggatgtgctaggatcgaaccatttccttcgtaaattgaagtctcgaatgctccctcaacaagacagcgtaaaatacgccgtggacatcggtgcagggatcggccgtgtgactaagaacatgcttcacaagcatgccgccaagattgatcttgtagaaccagtaaagccatttgtcgagcaaatgcacactgaactaagcgatttaaagagcaagggccaaatcggagagatatacgacgtgggaatgcaagactggacccctgaagccggtaaatactggctagtttggtgccaatggtgtgtgggacacttaccagatgcagaactggtggcattcctgaaaagatgcattgttggtctacaacccaacgggacgatcgtggtcaaggaaaacaacacccctacagataccgatgactttgatgaaacagactcttcagtgactagatcagacgccaagttcaaacaaatcttcgaagaagccggcctgaagcttattgcctgcgaaagacaacggggcttgccaagagagctgtacccagtgagaatgtacgcactcaagcctgcttctgactag

SEQ ID NO: 2790 - DNA, 321 bp, Saccharomyces pastorianus
atgtcaaaattgggttcattagccaggtctgtcaagtggactctttccgcgggggtcataggctctgttttctatctctaccggttcagcaacaagggttatttctacgaccacgatgctacgtggttgaagcaagaccatcaggcacaagacctgatggatagaagggaagtggtacctggaggggtcaaaaatcgtaaacaaatcgtaatggatgacggtgtcgcatggactaggaccatgggggagagcatgaaagacatatggaacgaacaagtaagaaattccgtcaactggatctattcatggggaaagacctag

SEQ ID NO: 2791 - DNA, 963 bp, Saccharomyces pastorianus
atgaagtacacattagaagaccaagtcgtattaattactggtggatcgcaaggtctggggaaagaattcgccaaaaaatactacaatgaaactgaaaacacgaaaatcattgtggtcagtaggtcagaggccaaactgctggatacatgcaacgagattcgtctagctgctcatttgaggaaggaaacttcagacgagggccaggtgcagcacaagttggccacgcctctggaccctgtgcaacgattgttctacttcccatgcgacttgtcctgctatgaatccgtagaaaatttgtttaatgttttgagagacttcgaattgctccccacccaaactttatgttgtgcgggagggtctgttcccaagttatttcgtgggttaagtggacaggaattgaaccagggtatggacatcaactataaaacaactttgaacgtggctcatcagctcgctcttgcagagcaaactagggaacaccatcttatcatcttttccagtgtcacagccctttaccccttcgttggttattcgcaatatgcccctgccaaggctgcgattaaatcactagtagcaatactaagacaagagctgacaaacttccgcgtcagctgtgtttaccccggaaacttcgagagtgaaggtttcactctagaacaggtaactaagcccaagatcacaaagttgatcgaggggccctcggacgccattccatgcaaagaagcgtgtgatattgttgctacttcattggccagaggccaagacgatgtctttacagatttcgtgggctggatgatcatgggcatggatctggggctcacgagcaagagaagtcgctttgtcgcgttgcaatggatcttcggtatcctactgaatattgttgttgtgcccttctacctggtaggctgctcctggtatattagaaaatggttccgtgaaagcgatagcaagaaggccacttaa

SEQ ID NO: 2792 - DNA, 1641 bp, Saccharomyces pastorianus
atgatggcaaccgggctgaatcgtaaaagaagtgccacttcaggcgcactggaggtcacagacccaaacataaaaccgattaattgcaaaccagctagggtctacagtgtttcctccgatatagtgccgcaagtcctgacacatcctgatgaagaagaacatgcgaaattgtccaagtctccgccagatatggctcccaggtggtcgcaggtgggttttcaatccatctttcaagacggttccaattcaagacgttccgcggattcgattgaagaagaatccactcaagataccgaaaaccacgacgaccattcagaaataggttcatcgagtggatatagactacaagtaaacaccgcgtccaatgacagtctgctctcttccacttcaagggggaacaagaggcgactgtccttgtttaccaattctagggaaaatataagaaatcgaagcacgagcgggtctatgaaccccagcattgttgtgaatggtgcgactggtaatgttataagtaaaagtggctctaaactgttcaagactaaatccaacaagagtgccaacagtttacaatcttcattgtcgacaagccattcacattctagcaaaggcaacaatgtttttagtaagatggcaaaaaagcttttaccttataaaccgcatagttccataggtaaggacgatatcgaacctgtggttcccagctcttttagtaaatttctgcactcttcttatggaaaacatagatcgcccgttcagttcctccataattctacagggggcctaatagactctgagaagtctgtgtattcttttaatcctagcattaacaattacccaaatgacacggctttgaatcctattcaagaagatacgtttgatgcgactaatgtttctatattacatgacctactaaggaacttgccctctttggtagcgaattacaaaagcttcaccacacaggaactacacgtcttagaggggaatatatggggcatatactgtagtatagtggtcgagctgtttaagaacaagcgaatatggcaactaccagccaagattgaagatattgatcgtctactggacttttacatcacattgaaaacgcaaaccaaggccgccgttacacatttcaagtttatatcggaaatcgaagaattcatcactacgtcactgtatattttagaaaaccaaattgtattcaattatgctaacgaagagactgtgaataccgctctgaaaagagtgggcataatctggaaaatcttttatcagcaggtttactttgatatcacggcagtgctgttgccctttgagaaaagcttccaaaaggatagtaactactggcttgatgggtatttaccagagccttcaaggtatactccctcggtcgactttttgttgttgaaatgtttcagggactctatcatcctcccgtattacgagagctttctccatacaaatgatggtgccaggaagagtttccaaaaatacatcttcaatgaagaagagcagaacggcgttaccgaggaagataaattgacgatgctgcaatgctttggaatcctgagtactattaagggaaacagcaaaaaccaaagaatcatcgacgaactgctggaagggatacgcatgagtatataa

SEQ ID NO: 2793 - DNA, 1314 bp, Saccharomyces pastorianus
atgttagaagcactgttcagagattctgtggaagaagcggttaatgactccattaagcagggtgtcgccatggcagtttacagcacgaaaggggatgatcattggttggagagttggtttaaggaggatgatgtagcattagatgttttagcagaacacagtatctggctaaagctggtgaaaggtagcgagcagtttaaactttttgagcaggtgtttcccaatgtggtgttgcccagcgtttatttgatacgcgcaggaaagatagaactgatcattcaaggtgaagatgatcgacatttggaaaggttgttggcatgtttgggcatcaaagacagaaatgctagcgaggctttgcccaacgaaattaattcaggtctagtaaagaaggcaagttcatccagaaaagcctctaagaaaaacgcaagggaaagaattgcagagactaccttagaaatccaacgtcgggagcaactgaaacagaagaagctagctgaagaagaaagagaaagaatcataaagcttgttagagcagatcgtgcagaaagaagggctctcgatgaaacacatcaccggactctcgatgatgctaagccgctggatgttcatgataatataaaagatatacaaaaattacatagcagtacatgcgtgctgcaaatcaggatgaccgatggtaagactttgaaaaatgagtttggttcatcagaaacgctgaacgaggttagaaaatgggtggatcttaacaggactgatggaaacggtccgtattcattccataggagcattcctagagtgacattcaaggattccgatgagctcaagacactagaaacattggaattgactcccagatcagccttgttgctcaaaccattggacaccccacattctaagctaaaggtaaccgagatggagggaccaggtattctgggccgcctttataaaggattttccacgtggtggggtggacatgaatactccgtaagtacatcgcagcatgagggatcatctggtctcaaacattctgaaacgacaacatcaacgtcttcattcaggactactccccaagatcgtcttcaacatgaaaacttccgggagcctgtccaatcctcgatctatgcatctcctctgttaacgcccagtggaacgaggttcccttccgaaacgaacctaactacatctcgatctgtttccccaaacgtttttcaatttgttaacaatgatcgtcaagatgatcctgaagacccaacgaccttcaatggtaataatgttaatttagaaaaaaaaaaggacgaagataaagacaaatga

SEQ ID NO: 2794 - DNA, 633 bp, Saccharomyces pastorianus
atgtccgatctagttagagaaaaggcgcctgccttcccgatatccaaagtcaagaagattgccaaatgcgatccggagtatgttattacatctaatgcagcagtatcggcgaccgcgtttgctgcagagttatttgtgcagaacctggtggaggaatcactggtattagcgcagctgaactcgaggggcaaatcaagtctacgactaagtttggcttctattgaagaatgtgtggaaaagagagaaaatttcagattcttagaagacgttatcaaacaattaaagaaaaatagcatacatgacaagaaggggcaactgggaaggcaacctgacttggatgaccaacaagttgccaaagaagagctacaaccgcaccaagatgatgatgagggcgcagaaatcgaaaaagacgaagaagacgaagaagacgaagaagaacaagagcccgaagaagacgattctgtacaggaggaagaactcatggatgatcatgaaggcaacaaagacgacaagcctacgcgtagtgtggccggtctgctgtccaggttccagtaccaatccgcaccggatactggcgagcattcgggttcctctgatgtggaaacatacgatgggaagagcatagacgattag

SEQ ID NO: 2795 - DNA, 1305 bp, Saccharomyces pastorianus
atgtccaaaaaacaagaatacattgcgccaataaaatatcaaaatagtttgcccgtaccacagttacctcccaaacttctcgcctatccagaagctccggaaacaaacccagattcgtcccagttgatcaattcgctatatgtcaagacgaacatctctaatctcattcaacaagatgaagatttaggtatgcctgttgatttgatgaaatttccgggcctattgaacaaattagattctaaattgctttatggattcgataatgttatattggacagagacgatcgaattttactaagggaccctagaatagacagactaactaagaccgacatgtccaaggtcactttcttaagacgtactgaatatgtctccaacacaattgctgcccaagattccacgtctttgaaaaggaagaggcgtttggacaatgaaggctcggatgatgaaaatcttgacgtcaatcatatagttagcagagtagagggaacctttaacaacacagatacatggaaacatccagtaaagaaaggcgttaagatggttaagaaatgggacttattgcctgatacggcgtcaatggaccaaaactatttcatcatgaaattcatgggtagcgcttcattagatactaaagaaaagaaagctttgaatacaggcatatttaggcctttggaattggaggaagatgaatggatttccatgtatgccactgatcataaagattccgctattctagaaactgaactggaaaagggtatggatgaaatggacgatgacactcatgaaggcaagatctacaaattcaaaagaataagggactatgatatgaaacaagtggccgaaaagccaatgactgagctagccatacgtctgaacgacaaagatggcgtagcttattacaaacctttacgttcaaagattgaattaaggcgtagaagagttaatgacattattaagccattagtaaaggagcacgatatagaccaattgaatatcactctaagaaaccctagcactaaagaagctaatgtaagggacaagctaagaatgaaatttgatcctataaatttcgctaccgtggacgaagaaggcgatgaagaggaggaacaacaggaagaagatactaagggtgaatcagctgaagacctcaaagaggagcccaaagaagaaacggagggtaagcaaaacgaagaaagcaaacaaagcgaagagccagtggttgatgaacctgaaattctaaataatgccggtacaaaacaaacgccagaagtacaaaacgaaggcattccacaagaagagtaa

SEQ ID NO: 2796 - DNA, 897 bp, Saccharomyces pastorianus
atgtctaaagtaaccaaaagtgacgtagatccgtttaactcgtttttggcagggtccatagcgggtgctgttgaagcatctataacatacccttttgagtttgccaagacaaggctacaattgatcgataaggcctctaaggcatcaagaaatcctttagtgctaatttataaaactgtcaaaactcaaggtatcggttccatttacgttggatgtcctgcattcattgttggtaatacagccaaagcaggtattaggtttctcggatttgatactattaaagacctgctgagagatcgtgaaactggggagctaagtggtacaaaaggtgtgatagctgggttaggagcagggctattagaaagtgtgcttgcagtgacacccttcgaagcaattaaaactgccttgatcgatgacaaacaatctcctaaatcaagatatcacaataacggacgtagcgtgctacgaaattattcagcactggttcgtgacgaaggcttttcaggtctttaccgcggtgttttacctgtttccatgagacaggctgccaatcaagccgttaggttgggttgttacaataagattaagactttgatccaagattatacaaattcgccgaaagataaaccattatcgtctggtttaaccttcctagtgggtgcatttagtggtgtagtgactgtctactctactatgcctattgatactgtgaagacaagaatgcaaagtttggattccacgaaatattcttctacaatgaactgttttgccaccattttcaaagaagaagggctgaaaacgttttggaaaggtgccacaccgagattgggaaggctaatattgagtggtggtattgttttcacaatctatgaaaacgtcttagttatgctagcttaa

SEQ ID NO: 2797 - DNA, 1272 bp, Saccharomyces pastorianus
atggcgacacaagccctggaagatattacggagagacttctcacgaggtcggaagaggctatcctgcaattagatctctggatacagcgccagcagagatcatcggtatgcgagccatcagatcgggactcactggataagttatcccaccagtacaaccaatacatgtctcaactgaactccttgtatgtgagatctgagtcagttcgggataagttaagtaaggaacaacggcgcagattgaacactgaggacaatgagcacaaacgcatagaggatttggttcatgaattccaggacattactgtgaggttgaacgagctggcgactgtcccaaataaagcatccaacagttccccccagtcacagtccactaggagcagtctggattcgtttcagcctcgaccattgaagatcattgagaggcagcgtctgtgtgtggtgactccatcgaaacctccaaaaaagtcagtaatctttaaccccattaacgaagttgactgcccttccaagacaagctctttaccatgttcacctaaaaagcaacctgggaaagctcgcactctgcgtgctgccaaatcgcatgacactggtttgaataagagtaaaaaaccctcttctaccgatgcatatgaatctttcttcaaaaataagcagagactctccttgacttttttcgatgaaatggatgacgaggatttagattcagatcaagacacaatcattctacccaacataagtactccttctcatatggatatggctaccaaaggtgctgaatttgagcctttgagaaggtacaattcgcacgaaagtatactgtctaataaaccagctcccactatgtctctctcactaggaagtttcccattctttaaaccatcgaatccaacatttggaacttcggtatccaatgtgcaagtcaactactgtccaagggtgactgcgtcaatgattcccaaacgcaacgggactcgtgctccaacctcaaaggcgttgttgtcatcattcattgcacagccagatagaattgtggtaaagcagaaatccaccaatctcaaacatacttccttcatggataagttcaattcatcattatcgacaatatccgagtcgtttcaaaataaaaagggcaaaaagaatactgatttggataatgaccgaataccaaatatgaaccacacagcgccggaacaaaataatagcctcatggatatgggtgtctccatagaggaattacaagatgctttgaatacggaattgctgttgtaa

SEQ ID NO: 2798 - DNA, 2529 bp, Saccharomyces pastorianus
atgggtaagacacagaagaagaatagtaagggtcgtttagatagatactattatctagccaaggagaaaggttaccgtgctcgttcgtcctttaagattatccaaattaatgaaaaatatggtcatttcttagaaaaatcaaaggtcgttatcgatctgtgtgctgctcctggttcgtggtgtcaagttgcatccaagctatgtcctattaactcattgattattggtgtggatattgttccaatgaagtcgatgcccaacgttattactttccaaagtgacattaccaccgaagattgtagatcgaaattgagaggttatatgaagacctggaaggccgacacagtattacatgatggtgctcccaatgtcggtttgggttgggttcaagatgctttcactcagtctcaactaacattgcaagctttgaagttggctgtggaaaatttggtcgtgaatggtacgttcatcacaaagatctttagatccaaggattataataaattaatttgggtttttcaacagctgtttgaaaaagtggaagctacaaaaccaccagcatcaagaaatgtttctgcagaaattttcgttgtttgtaaaggtttcaaagccccaaagagactagatccaaggttgttagatccaaaggaagtcttcgaagaattgccagatgggcaacagaacatggaatctaagatttataatcctgaaaagaaggttagaaaaagacaaggttatgaggaaggtgatcatttattgtatcatgaaagctcaattttggactttgtcaaaactgaggaccctataactatgcttggggaaatgaacaagcttacaattgacaaggatgatcacgaatggaagatcttgaaaaaactgaaacaaaccacggacgaatttcattcatgtattgaggatttgaaagttctaggtaagaaagatttcaaaatgattttgagatggagaaaaattgctagagaaatcttgggtgttgaattgaaggatgaagataagacggatattgaagtagtaccgttaaccgaagaagagcaaattgaaaaggatttgcaaggtttacaagaaaaacaccgtctaaacgttaagcgtgaaagaagaagaaagaatgaaatgaagcaaaaggaactacaaagaatgcaaatgaacatgataacccccacagatattggtattgaagctgcgagtctgggtaaagagtctttgtttaatttgaaaactgcagaaaaaactggtatactaaacgacttggtgaagggtaagaaaagaatgattttcacagacgatgaattagctaaagataacgatatttacattgatgaaaatattgtgatcaaggataagaattccgcgggtgatgcagacgatttagaaactgaattgaatgccatgtacagtgattacaaatccagaagatcagagagagacgctaaatttaaagccaaacaagctcgaggtggcgacaacgaagaggaatggaccggtttcaacgagaaaaatgcaggaaaggaagaagaagaacctaaagactatatcgaagataatgacgacgaagatatcgaaggagattctgatggcgatgaagccatcagcaacttgattagtaaaataaaaggagaagatggtgatcataaattgagtagtaaagcccgtatgatttttaatgatccaattttcaataacgtcgaagctgatctaccagtaaatatcatcaacgatggtatgatgagttcggagtccgtcggtgatatttctaaattaagtaagaagaggaagcatcaagaaatacagcagcaagaaccagaagaagaagcagactcctcggacgagagttcaagtgatgattccgatttcgagattgtggctaatgataatgtatcagaagactttgattccgactatgattctgaagaagaaaggaatcaaacgaagaaagaaaagcattctaaagatattgatattgccactgttgaagccatgactttggcacaccagttggcattgggccaaaagaacaggcatgatcttgttgatgaaggtttcaatagatatactttccgtgataccgaacacttaccagaatggttcttagaagatgaaaaggaacattccaagataaataaaccaattactaaagaagctgctatggcaatcaaagaaaagataaaagcaatgaatgcacgtcctatcaagaaagtcgctgaagctaaggcaagaaaacggatgcgttctgtggctcgtttagaaaagattaaaaagaaggcaggtttaatcaatgatgactctgacaaaacagaaaaggataaggcagatgaaatttctagattaatgcgtaaggttaccaagaaaccacaggctaagccaaaggttactttggttgttgcctcaggtaagaacaaaggtttggcaggtagaccaaagggtattaaaggtaagtataagatggttgatggtgtcatgaagaatgaacaaagagctttaagacgtattgcaaagaagcatcataagaaataa

SEQ ID NO: 2799 - DNA, 1392 bp, Saccharomyces pastorianus
atgaactgtattttcagaaaaggccagttgttagcgttcgcattagtgtcattactggcaacacagactatgggtgctgctatcgatttacccaggagcccacataatgtcaaacccttccgtagtgatcagccggatttgcaaagacgagcaaatgagccctttttcgaaatagatgtaaaaactctgaatgcgaactcacccatatcagagttgtgtaagaaaaatttacacgtaatcgaatctgcccaggaacttttccagctccaaaaccaatgtgaatacatattgggatctttacacatcactaattatgactctaacgtcttggatttgagcagtttgagagccattggtggtgatctgattgttcaagattcgcccgaactaattagaatgcaagcttccaacttgaataaaatcgaaggtcttttccaactacaaggcctgacttcgttggtttccgttgagatccccaccctgaaattctgccggtcgttggaatggaaagtggtccccatcttaaactatgtgtctatggacgctcagaatatcgagattgttgaagatattatcatatcggacacttcattggccaacatcgagaacttcaataagattcaagagattgacacgttcaacatcaataataaccgatttttggaaaccattcactcaaacattaagactatcaggggccagtttagtgttcatgctaatgctaaagaattggaactcgaaatgccatacttaagagaggtggagaacattaccattagagacacatctttggtctatttgccccaactgactaatgtgaaaagttctttagaatttatcgaaaactatttctatgagttgaacttgaacaatttgcaaaaaattggtgggactttaggaatcattaacaatgtaaatctaatgaagatagatttggaaaatgtcacggatattcaaggtggtttgatgattactgataatgaatcccttgaggaaatcaatttcttgcccaatttgaaacaaatcggcggtgcaattttctttgaaggttccttcaaagatgtcatgtttgatagtctgaaattggtgaaaggtagcgcatttatcaagagttcgtcaaacgtgttggattgcaataaatggacaaatccgttgaatggcaggtcaattataagaggcgggaagtttacttgtatttctggaaagaaggaaaacacgttgaatgtaaagcaagatggaacagtcctcgaaaagggtttcaaagacttaacgcaagagagtgaagactccaaaagaaggctcatctcaaaactcacgaactcaacggctccaaccatgcaattaaacttcgttcttattggtatgtgtcttctttccatgttattgctttag

SEQ ID NO: 2800 - DNA, 1752 bp, Saccharomyces pastorianus
atgttgctaaacggaaaaagctttattttcttacccaatcctgacacatcttctagtacatttataaagaatgtcttgaaggataaaggtgccactatcatattaaatgttgaagattgctgtcaatcaaacgcaaataatgtgactgttttggttgatgattcctttgttgattccaatatgaacctgatacaaagggacatttttcaaagagaggcaaactcaaatgatattaataacctatttaataagatcgaagaattaaaaatccaatgtgttaaggttagttgtgttacgaaatgggttcagaatgaaaattttacaattgaaaacagtgagttggttaatttgactcctcctatcataaccatttcagatgatactaataacgggcaaagttctagtgaggcagatactgagattccaactgacgtggaggacaatggggatgatggagacgaaaaaaatgtcgtgggagagttttcacagcagcctattggaaacgccttgcaattggatagtggcacaaaattactcgtaaatgacaaacccaaatataaaaataatgagttggtcattgaagctttgaaaagactgactaaaaaatatgagatcaaaggtgaaagatttcgtgcaagaggttacagactcgctaaacaatcagtcgaaaattgcgattttgacattagttccggtgcagaagcacataccaaattaaggaatattgggcctagcattgcaaggaaaatacaagtcatattggatacaggtgccttaccaggtttgaatgattcaatggggttggaagataaactaaattacttcaagaattgttacggtgttggtccagagattgccaaacgttggaatctgttaagttatgaaagtttttgtattgcaagtaagaaggacccagatgattttatatcagattggtcagtcttatttggttggtcatattatgacgactggttacataagatgtcacggaatgaatgtttagcgcatttggacgtggttcaaaacgcattgaacgaaattgaccctgactgcctggtcgaattacaaggaagctataatagaggttactctaaatgcggtgatatcgatcttttatttttcaaaccattttgtgatgacaccgccgaattggcaggtatcatggaatcactttgtatcaagctttacaaagacggttatattcactgtttcttacaattaacaccaagcctagaaagtttatttgctgagaagatcatagagagatttcaaacagctaagataaacggatataaaaaaagaaaaaagtggtattcttcagagataattaagaaattttttatgggagtcaaattatcctcaaaaaaattgggagagctgaaagaagtagacactgacgaaggtacgtttcttatagaagaggaagaagaaactaaattgaaaccgattgaccaatatatgtccttaaattctaaggatgagaattactgtagaagactagatttcttttgttgtaagtgggacgaacttggagcagggaggatacactatacaggatccaaagaatataatagatggataagaatactagcagcacagaagggcttcaagttaacacaacacgggttatttcgggatagcgtcttgcttgaaagttttaacgaatacaaaatttttgaactattagatttgaaatatgtcgaacctaaggataggaacgacatagaatgggagaaaaaagtggtaaaataa

SEQ ID NO: 2801 - DNA, 2868 bp, Saccharomyces pastorianus
atggtgaccgtcaatgggaagattattcccttaactcataccattttcgcattttcggcattttttgctgctttggtcactggttattcacttcattttcataagattgttaccaatgcacattatacgtatccagatgagtggtttccaagtgtatcagccactatcggtgaccgttatccggagcgttctattttccagattttaatagccctgacttcttttccaagatttttattgttgctgggtcactactacctaaacaaatccaagatatgcttacttgtcggagtactccggactgtttcttgcggtggttgggtatacattacaagcacagacgaccatgacatccatgatatatttatgattgcatacattcttttaactttgccatgggatatcatgattactcgttattcaggtcccttaacttcaaaaaacaaagggctaacagccacgatcttctttggaacattattcccaatggtttactggtatatccagcattcagttcagcagagggctggtgcttattccatttatgcgtattttgaatggtccttgattattttggatatagcctttgacgcgtttgcttatgcagatttcaagaagatagatatagttctcggctttaatgaaaagcccggtaatacgagcttttttcagatcaaggattccgacgctattgtttgtgacgaaaagaaaactacaaatttgaggaaaaaccaaactgaaaagaaagctgcaaagaaagaagctgttagctttaatgccactgattcgtatttcaaatttgattccttcttttatctgttgacaaatttttttaatgggtttcttttctggtcgaatactacctcgttattttgtagtatttggcatttcccgctttggtatatgggaatttctggttatgaaacttcaatgttctgtcttctggggcctattgtactttatctaccattagtctctgaagtctttacccaatatggtgtgcttttaggaggtattattgccattggcgcctatattgttgaaatgccagaattaaggctgattactctagctatcggaacttctatcaccgtttctacgtttgtgcaaaacttaagatatattatgagtgctgaaattagcgcttcttttgctgtcacttggtcactaggtcttgttgcatcgatgatctttaaaatggggttctataccaataatccaacatgggttatcttaaatgagcataatggtggctataacaaaacagctcttgtttttactgtgttgtttggcatgttatcaccttatgttaattcaatcaatttccgaggaaaaataattgctcaagcaaaatcagtttcgtgcataggcaaactatttttagcgattggttttggatcattgttgtttggtattcatcaattgttaacagattcttctaccactatatattgggcttgggaaggttatcatgaaaagtcacatggtccattgccatggccatggagtgcgttgacgtgtacagtcatgttgtttgctgcggtaacttcggggaaatttatgggcaagccattagttccatgtttactgctagttatttccactgctgtgctgtctattaagagtattacagaatggcccaagtatgttgctggggggttattgtacgccattgctatgctttggttagtcccttcatacttttctgtactaggccaagtacaaagtatatgggtttacgttttctcgttcgctgtttatgttctttttgtcttagctcatgtttgggtcgtcgcgtacgcatttgttccattaggttggttactgagggagaaaattgaagctatccttgtggtttcctctacattcattatcgttggtgtcctgatcaacaaaagtttcaacctccaactaataaacgtgaccaagaaatttcatacttatatttctttctttgcagtagttttactagcattgactgctaggttcacctacgatattagaccaaccggaattcctcaaccttatcatcctgattctcatttgatctctgctggtatttggaccatccattttggtctcgataatgatatgtgggcatctgaagatagaatgatcaacttgatagaagaaatggagttggatgttgtaggattattagaaacagatacacaaagaatcatcatgggtaacagggatctcaccagtaaactagcccatgatctgaatatgtatgctgattttggaccgggtccaaacaaacacacatggggctgtgttcttctttccaaatttcctgtcattaatgctacgcatcatctattgccttcccctgtgggagagctagccccagccattcatgccactcttcaaacatataatgacacattggttgatgtctttgtttttcatagtggacaagaagaagatgaagaagatagaagattacaaagtaattacatggctgaactgatgggcaactcgacccgaccagctatcttattaagttatttggtggttgacccgggagaaggtaactacaataaacatgttagtgaaacctctggcatgcatgacattgaccctactgacgatgatagatggtgtgaatatatcttgtataaagatttgagaaggacgggctatgcaagagttgcaagaggcacgatcacggatactgaactgcaggtcggtaaattccaagttctgaatgagcaggaattagccgaacgctcagattccatttatgaatatgatcatgttgatgaaccggaaaatgacgatatgaaatttcccgataggtttttgggcgaaggtgagagaggtcacttttaccatgtgttcgacaagccacgttattatccctaa

SEQ ID NO: 2802 - DNA, 1092 bp, Saccharomyces pastorianus
atgaatgaagaaaattctatggatgcgcaaagcctgattattaccaatggaatgttcatcatcgatgatatcgaaaatagtaagtgcaatatccattataaaaatgttcctgggggtggcggcacttttgccatcttaggagcatgtataatatcaccaaataataagacctccaaaggtttgaagtggatagtggacagaggctctgactttcccgacgaaattacaaaagaaatagagtcctggggaacagatgcaagatttcgggatagttttgacaggccaactaccaagggattgaattattatgagggggataatgatttaagaaagtttaagtttttaacagcgaagaaacagattgatgttcaggactgggtcgctacatttggacgggaaactatcaacgaaatccaatctttccacctactatgttccgggtcaaggtgtacgaaaatgattgacgctctaatgaaggttcgaagcagagagagtgggaaaccagtaattatttgggaacctttcccagacctttgtgactttgagcatcagcatgaaattagatgcgttatgcaaagagaagacgttacagtgatattgtcgccaaatgcggaggagtcaagccgtttatttggtttgcatggaaaagaaccgagtagtttggaagaatgcttcgagctggcacatcgtttcaatgaattcatgaatgataataatatgtgcattttaagatgcggctcccttggaagcatatcgataactgataggcttgggagcgcagaacgagcctatgatcactacccagcgtatcacttcaaaaccaaatctagagtattagatccaactggtggcggaaattcattccttggtgggtttgcaattgcgtatgctttaacaagaaatttagctactgcaagcatatgtggaaacattgcagcaagcgcaatcatcgaacaaatcgggataccaagatatgatcctgcttatatgacttggaatggtctcactctcctagataggctgaagttttacctttcacagtcaggtttgcaatacaatgcaagcgacgtttacaaaagtttatcacaataa

SEQ ID NO: 2803 - DNA, 237 bp, Saccharomyces pastorianus
atgtcacaaaacaattcaactggctttgtaaatgctgaaaggtcttacaacaacataacgttgaaaaatttaacagcatttcaattgttatctcaaagagaaaatatatgcgaactattcgacctagtagagggcacaaaaagacatagcatcatcgttgatcctgaaagacaaaggaggaatttggaagaaatgaggacaatgctcgataatttgaaaaatgaagaaagaacatag

SEQ ID NO: 2804 - DNA, 1842 bp, Saccharomyces pastorianus
atggttcataaaaagctcactttcaaacaacaaatggatggatttccctggacacaactaatggttgtctctttagttaggttcagcgaaccaattgccttttcatcattatttccttatgtttacttcatggttaaagatttcaaaattgctccaaacgacgctcaggtatctaaatattcaggttacttatcttcatcatttgcgttatgccaagtcatatccgcatatcattggggccgattctctgagacacatggtagaaagataactttaacctgcggccttataggaacatctatatcgttgctgatattggggttttcgcacaacttttatcaggctttggtggcaagaagtttaatggggttactaaatggtaatgttggcgttattagaactatcattggtgaaattgccactgagagaaaacaccaggctctagccttcagtactatgccgttactatttcaatttggtgcagttattgggcctatgattggcgggtttcttgttttcagagatggcacgatgaatgaagtgccatcatggttcccgcgctacgccaaaaaaataatcaagtcatacccatacgctttgcctaatgtggttgtatgcgtatttttgatgtttggtttaataaatgcaatcttatttttggaggaaacacatcctatctttaaaaataagagggattacgggttggaccttggggactctattaaaaaaaacatatttggtataagacccaaaaggagaccatggcagaaatatattcataacaattctgaagacagtcgtcgtcgagatgaagagacaaacgctaatgaagcacaaattcgtggcgaggatgagcgcagtccgttactggattccggtaatgagagtgatgctgaaagcgtacaagccattgaccctattttgacaagaagacagtctgtaagtctgattcggacctattctctgcacgaaccaacagatgctgtacacaccgatatagacacagcttccgatggctgtaaagaaagtagtattttccaccatgttttccatacgaaagtattttacccgatatccgtgaacttcatcatggctttgcatttgattgtctataatgaatttctcccagtctttttagcttatgatttggccgtagatcctgagaacccaaagaaactagcttcaaaatttccgtggaaaatttctggtgggattggttatgagccagaacagacgggtactcttttgtccacaaccggtatatttggttgctttgtcgtcatatttatttttcccgtcgtagatcgtaatttcgactgtttgacaattttcagaacgctggttaagttatatcctatcatgtatataatggtaccttatgttatctttctacaaggcgaacgagttcctagctggtgtactgtcgcttatttgtacataatcacagggataaagacattttgtggcgccttgacatctccacaaattatgctattaatccataactcaagccctttgagttgtaggtcagtcattaatggtgccactatcagtatttctgcatccgctagattcataggtcctttagtgtggggttacattatgtcttggtcccaagagaatgatgttgcctgggtcagttggtggtcgctaagtcttttctgtatggtggccctttatcaaagttataagatagccccgatcgatgataatgataatgaagaggaagatagtcaacaggatggtgaaaatactgatggttcgcgggcagaggcttctggtgtaagaatgagtcatcgttcaagcttaagtagcttgagtaatcaatgtcgtgccaaatga

SEQ ID NO: 2805 - DNA, 1539 bp, Saccharomyces pastorianus
atgataaaggaagcaaactccatcactcaaaatgaagtggaaggtgaacccactacctccaaacgtccagttaatcggagatttcttttattcaagatagatctgttcgtattatcgtttgtctgcttgcaatactggattaactatgtggatcgtgttggttttactaatgcgtatatatctggtatgaaagaagatctaaacatggtgggaaatgatttgactttgtctaacacagtctttatgatcggttacatcgtcggcatggttcctaataacttgatcttattgtgtattccgcctagaatatggctaagtttttgtacctttgcttgggggttgctaaccttgggtatgtatcgcgttacatccttcaaacagatttgcgctattagattctttcaggccctatttgaaagttgtacattctcaggaacacattttattctgggttcgtggtacaaagaagatgagctgcctattagaagtgctatttttactggcagtggtttagttgggtccatgttcagtggatttatgcaaacaagtatttttactcatctgaatggtcagaacggtttagccggttggagatggctatttatcattgatttttgcatcacactaccaatttcaatatacgggtttatctttttcccaggtttgcccgatcaaacaagtgctgttaacaggctttcaatgacaaaatttattttcactgaacaagaactacactatgcgagaagaagacttcctgctagggacgaaagtacaaaattaggctggtcaaccgtccccagaattctgaagagatggcattggtggatgttttctctagtgtgggttctaggaggtgagaatttaggttttgcgtctaattctacgtttgcattatggttgcaaaaccaaaaatatacattatcacaaagaaataactatccctcaggcatatttgctgtgggtatagtttctacactttgttctgcagtatatataagcaagtttccaaaagctcggcattggcatgtttccgcttttatatccttaattatgatcatcgtcgcaattttgatacgtacgcgtccattggatccaaaaattatcttttctgcccagtatcttggaggtattgcatatgctggacaagcggtttttttctcatgggccaatattgtttgccatgcagatcttcaagaacgtgccattgttcttgcctcaatgaatatgttttcaggtgcggttaatgcttggtggtcaatattgttcttctctgcagatatggtacctaaatttgaaaaaggttgttgtgctcttttggcaacagcaatttcaagcggggtggtatcggttgttatccgctcgctacaaataaaagagaacctagctaagaaatctgttccttacatagatgctaatgatatttttggagaagaagatgatgatgatgatgatgagaatcaggatgaagatgaaggtgaaaatacgtctgtcgaatttggcgatgaggaaatgactgaagttcccaatccttttcattaa

SEQ ID NO: 2806 - DNA, 1182 bp, Saccharomyces pastorianus
atggctgaaaatactgctttggatactattgaagtccacccaattacttttccaccggacgttcttgcaagaatatccccggaattatctttacaaagacatttatctctaggtatcagaccatgtctaagaaaatatgaagagtttagagaagttacaatagaaaacaacactttgtcccgttacgtggatacagagaatgtgaatgcaaaaaacaatatcttagggtcgaatgttttgaaaagtggaaaaactatagtaatcacttctatcactggtgggataatagaagaaaacagcgcctcaatcaaagacttagatgatttcggtgaggaagagttgtacgaaataaccaaggaagaaaatgtagttgcgaattatgcctccatttacccagtggtggaagttgaaagaggtagagtgggtgcttgcactgatgaagaaatgaccatatcacaaaaactatacgattctgtattgcattctaggatactgcccaaacaggctttgaaagtgaaggcaggtgttcgtagtgtgaacgaggatggtacattatctgttttatatccggatgagttagaaaacgatccatcaaatgaaacaaacctgaaaatgaaaagaaaatggtcatacgttttgtatgcgaagattatagttttgagtcgtactggtccagtatttgatttgtgctggaattccttaatgtacgctttacaaaatgtgaaactgcctagagcatttatagatgaacgtgcgtccgacttgaggatgactataagaacaagaggaagaagtgccactataagagaaacatacgaaattttatgtgaccaaacgaaatcactaccgttaatgataaactcacaaaatattgcatttgcttcaaattatggagtaatagacttagaccctgaatcacaattacaagatcctgataacgctgaagaagaagttgatattgatatggacgaagccagatctgtactaatagccgatttggatactgaagctgaagaaacaagtattcattctacaatctctgtgattgctaatgctaaaggcaactatacccaattgacattagtgggagcaggtgctaaaataacaccaaacatgataaaaaggtcattattattgtcgaaggtgagggcgaatgatttatcgacaagattaaacacataa

SEQ ID NO: 2807 - DNA, 1002 bp, Saccharomyces pastorianus
atgggcattacggtgattggttctttgaactacgatttggacacatttacagatagattacctgatgcaggggagactttcagggccaaccgcttcgaaactcatgcaggtggtaaaggattgaaccaggctgcggctattggtaaactaagagaacctagcagtgactacagtgttagaatgattgggaatgttggcgatgacgcatttggtaaccaattgaaagacgttttgaaagattacaaggtagacactacatatgtcggtacttgtgctgaaactagtacaggtacggctaccatattgatagaagagaaagtaggtggtcagaatagaatattgattgttgaaggtgctaacggaaaaactgtgtatgatagcaagcaattgagtgaatttttccctaaagacaataatgatgaagaatatgtagtattccaacatgaaattccagaccctatatcgataattaaatggatacacgagaacaggccaagtttccaaatcgtatacaatccttcaccattcaaggccatggacaggggagattgggtgttgatagatattctagttgtgaatgaaatcgaaggacttcaaatcctagaaactatatttgatgatcatttcgtcgagcaagtaaaagtgcaaataaataacgatttcattggtgaatatcgtaaaatttgtgaaatattacataaagcacttattgaccaaaatggaaaaggcactgtggttatgactttgggctctaaaggtgtgttgttttgttcacatgaaaaacctcaagtggaattccttccagccgttaaagatgtttctgtaattgacaccactggagctggagacacctttttaggtgctttggtcacccaattgtaccaaggagagaaattgtctacggctataaatttttctactttggcaagttcgttgactattcagaaaaaaggtgccgctgaaagcatgccaatgtataaggacgttgaaaacgttatgtaa

SEQ ID NO: 2808 - DNA, 2769 bp, Saccharomyces pastorianus
atgagattctcacattttctcaaatacaatgcagttcctgaatggcagaatcattatctggactacaacgaactgaagaatcttatctacacattacaaacagatgaattgaaacaggatacaacaaacgatgaagtcaggtctcaaaccccaggtccaattgcggatatagaaagtaatgtcccagcaggagaaccatcttcttctaagaaaaagtttactcacaagcttaagcataaattgttcggttctaaacaatcgtcttcatccagtaaacaaaatgcagaagcagatgaaaaagcaatcgatggaaacaacataaatgaggaaaccattgagctagacgaactgtcacctcaagggaaagctacggctttcaatcggaaatttttaggtaagaaattctttgattcacgtagttcatcagtgagtagtgagggaaagaccctgttcagttcatatgatacttttgttaccaacctaagcgacgaaaaattgaaggtagatgacttttacaaaagaatggaagccaaattctatgaaaggtttgtccacttgattaatgacctggaaaaagaaagcatcgtcacaagagtgagcgaggcctttgatcctgaaatccaagatttgcctcctttaagacaaattgtttctgataaatcccaggtgcatgtatctacaaacccatttgagtttcactcttctaacaatgatagtgaactaagaaacaggtttgattatagtgaagaagaaatggatgatgatgacgaagtggatgtttacacagacaccacagataatacagcccttttgaattattctcaattcaatatcaaatctcagaaaaagtctctactcaagcaaactataatcaatctttacatagacctttgtcaattgaaatcattcatcgagctaaacagaatgggctttggaaaaatcaccaagaagtccgataaagtgctacatatgaatactagacaagaactgattgaaagtgaagagttcttcaaagatacctacatcttccagcacgaaacattggccactttgaacaacaaaatcgcacaacttatcgaattttacgccgttttgatgggccaccctggtaatgtagattcatgcaagcaagagctaaaatcttacctgcacgaccacattgtctgggagagaagcaacacctggaaagacatgttaggtctttcatcacaaaacagagatataatagcgattgaagacgaaactgaaaaattaatgcgcgaaaagcttcaaattgaatacttgaagtatcctctgccaaagccaataaatttaaagtttaccactatagagaatttggcagtcccaaaactgctctttggtaaaagggccatgaaaatagggttcatcataattgtcacaggtgttctgttaggtgtgaagacttttaatgatcctgtggaacacagatgtatggctttggtggaatgctgtgctttcttatgggccagtgaagccattccattacacattacaggtctactcgtcccccttctaactgtccttttccgtgtccttaagaacgacgatggtagtgtgatgaaagcctcggctgcctcttcagaaattttaggtacaatgtggtcatctactattatgatcttgttggcaggtttcacattgggtgaagctttgtctcaatacaatattgccaaagtcctagcttcttggttattggcccttgcaggtacaaagccgagaaatgttcttttgatggcaatgggtgtagtgttcttcctttccatgtggatttccaatgtggcttcccccgttttaacttattccttactgacgccgttattagacccattagactacacttcaccatttgccaaggccttggtgatgggagtggcactttctgcagatattggtggtatggcttcaccaatttcttcaccccaaaatattatttcaatgcagtacttgaagccttatggtattggctggggccaattctttgccgtggcattacctacaggtattttatcgatgttgtgtgcatgggctgtgatgattttctcttttaaaataaacaaaacgaagcttgaaaaattcaagccgataaaaaccaggtttactataaaacaatattacatcatcgctgtgacaattgctaccattcttttatggtgtgtagaatcacaaatcgaaagtgcctttggatcgtctggtttgatcgctgttttaccaatcgtcttgtttttcggtacagggttattgtcgacaaaggattttaacacctttccctggtcgattgttgttttggcaatgggtggtattgcccttggtaaagcagtttcttcatcgggtttattagttaccatcgcaagagctttacaaaagaaaattgagaatgacggtgtctttgctatcttatgtatcttcgggattttaatgttggtcgttggtacttttgtctcgcacacagtgtcagctattatcattattcctttggtacaagaagttggtgacaaattgtccgaccctaaggcagctccaattcttgttttcggttgcgctttgttggcctcgtgtggtatggggctggcctcctctgggttccctaacgttactgctatttccatgaccgataaaaagggaaacaggtggttaactgtgggcgcttttatttcaagaggtgttcctgcctcattattagcgtttatttgcgtcatcaccataggttatggtattagttcatccgtgttgaaaggtagtagtacctaa

SEQ ID NO: 2809 - DNA, 1557 bp, Saccharomyces pastorianus
atggaagataaagatgtcacttcgatacacgagaaagaagtggacgagaacaataatcctagattcatagaatatgatgccgaaggtcgtgctactcgtagtgaaactactaagaaagaaaaatggaaaaatatagttacgattattgcatctggtttcgctttaattagtgatggttatgtgaatggttcaatgagtatgttaaataaactctttgttatggaatacggaaagaaaaactatagttcaagagtttcgacaagagtttccaacgcatctctagtcggtattatttttggtcaattttttatgggtatttctgcagattattatagtaggaaatcatgtatccttgttgctacgactatattagttcttggtagtgctctgtgtgccgcttcacatggtactactgtacctggtatgttttgggtgttaacagttatgagaggtttggtaggtatcggtgttggtgcagaatatccgacaagtacattaagtgccaatgagtctgctaatgaatatactacaaccaatagaggtggtatcctggttatggtaacaaatctgccactagcctttggtggcccatttgcttcgattatttttttaattgtctacaaaatctgttcaggaacgaaacatttagaggcgatttggagaactgtttttgctctcggttgcttctggcctttaacagtgttttattttagatggaagactgctactacagaagtttatgaaaaaggtagaatcaaaaggaatataccgtatgttttagctttgaaattttattggaaaaggttacttggtacatgtggcacctggtttatgtacgattttgtcacctttccaaatggtattttcagttcaacaattatcagttctgttattaaagatcaaaatgatttggtaaaagttgctgagtggaacttgctactaggggttctagctgtattaggtgttccaattggtgcttatttttcagatcgtatcggtcgtaaatatacattaattattggtttctctggatacatcatctttggcctaatcataggttgtgcgtacgaccaattatcaaaaatcaccccactattcatcatcttctatgcgctcatgaatatgttaggtaatgccggaccaggcgatatgcttggtgttattagcagcgaatcatcagcaaccgctgttagaggtgttttctatggtatatctgcggtaactggtaaaatcggttctgtagtgggtgttgaatgtttccaaccaatcagagacaatttgggtgcaagatggacatttattattgccgcaatttgtggtcttgttggtgttcttattacaattttctttgttccacattcgctcgaaaatgatttaatgaaacaagacgttgaatttcataattacctagtatccaatggctggactggtaagatgggatttgatgagatagacgaggagtctgttgttaagagttttgaagatggaggtaatagtactgattgtaatgagaaagctaccgagataatctcagtcaaacaggttaatcaaggttaa

SEQ ID NO: 2810 - DNA, 1446 bp, Saccharomyces pastorianus
atgacaaaaagtaactttattctgaacaaagttagtgatgaacaaacaaattttttagttttctttggtacatttgtagatacccctaaattgggagagctaaggatcagagaaagaacatccatcggagttcttgatggaatcatcaaatttgtgaagagagactcttccgatccagtcatggactgtttagattatgatgctagtctatcacctgatgacattttagtggtggatataacgggagaagacgaatcctgcttgaccagtttttacttcccagggtttatagatacgcataatcatatctcacagtatccgaatgtaggaatatttgggaattctactctattagactggctggagaaatacacatttcctatggaagcagcgctagcaaatcaggatattgcaagcgaagtttataataaagtaatcggcaggacgctatctcatggcaccacgacagtggcttactataacaccattgatgcgaagtctgccaagcttttagctcagataagctctgtgttgggacagcgagtgcttgttggaaaagtttgcatggacgccaatgcaccagaatattatattgaggacaccaaaacctcttatgaaagtacagtgaaaatcatcaaatatataaaagaaactcttggtaatcctctggtaaatcctatagtgacaccaaggtttgcgccctcctgctcaagagaattgatgcaaaaattatccaaactggtgaaggatgaagacctacatgtgcaaacgcacttgtcagaaaacaaaaaggagattcaatgggtccaaaaactgtttcctgaatgtacgaactataccgatgtatacgacaaatacgggctgctcacagaaaaaaccgtattagcgcactgtgttcacttgacagacgctgaagcgaatgtggtgagacaacgacgctgcggcatctcccattgtcctatctctaactcttctttgacttcaggagagtgtagagtacgctggttgttggaccagggcataaaagtcgggcttggtaccgacgtttcagcaggtcattcttgcagcatactagctaccggcagacaggcctttgccgtttcaaggcatctggcaatgaagaaaagcgacaatgtcaaattatcagtttcagagtgcctgtatctagcaactatgggaggagctcaagtcttaaacatggaggataccttgggtacattcgaggtgggtaaacagtttgacgttcaagcgatcgatacttgtactccagggtccaacgtcgacacattccattggcagctacaaaaccaagagcaaaaccaagatttttacaaaaatcctccactaattactaaagaagacatcatcgcgaaatggtttttcaatggtgatgatcgtaacactaccaaagtttgggtagcaggccgggtggtccaccagacttga

SEQ ID NO: 2811 - DNA, 924 bp, Saccharomyces pastorianus
atgattttcaaaaggttcgttaatattctggtgtttttattcctactaggtgccggcttgttgacgttttttcttattttgtctggaggcagacaatcggggacgctgaagaacttctattggctacaggccgatactaacgggttcaacagcgctcccgctaccacaagatggtacaactacgaatggtgtggctacgacaacggccagctggccaattgctcaagcaaggctcccgccaagcccttttcccccagagacaacttcggcgactcgcccaacttgccctcgtcgttcagggaccaccgcaagacttactactacctgtccagggtcggttgggccatgctgctgatcgggctcttcttcatcgccatggcactggtgcccgcgttcctggccacttttcttccattcaaggctgtgcccgtgctttactgtgtgctgtcttggctggctcttttcttcattgtcctggccgcgtgtctgtacaccggatgctacgtgaaggcaagaaaggccttccacaaaggtggacggcctgcgaagttgggtgttaagaacttcgcgttcatctggacatccgtcttcttgatgcttgctaacgctatctggtctaccattttcagcgctacccacaagggccgctcgtcttgctccgaccacgacatgtacgcccagtacgagagcccatccattgacactggtaatcagctagaaaagtctacctacaccagcggtaccacagacggtgccggcccggtcgcggtagctcccgtaattggccagcctcaacccgctaccgccgctaagggtggcgacggcaagtttttccagaaactgagaacaagaaagcactcgccctctgctgatctagaaccagccgaagacggcggtcttgctgggcctgtcactgcacgctag

SEQ ID NO: 2812 - DNA, 2295 bp, Saccharomyces pastorianus
atgcgtaaatcattgagatggcttataacgatagccttctactcttccaactctattttaattagcaactgtctttggaacagtggttctatttccgagttttacctgcactccattgtgctcattgaatgcttttcgctattaggattggtcacctctgactatttgaccccatctttgtcatttatttctagtaatattttccatatctccgatagagtatcaggaatgacattattagcattaggaaatgccctacctgatatcaccagtacctaccagtcgatgaagtccggggttacttccttggctattggcgagctgtttggtggtatttttttcttgttgactgtggttattggactaatgggctgcgtagctactattcagtttcaacctgataagtccattgaaacttacacggaagaaagttttgatcaaaatttatcttacgacagaagccattatgtactggacgtggggatattcacttttatgctcttagtctcaggcacctttctagcagatgggagactatacttctgggaatgtatcgttatggttttgacctattgttgttgcgtcgtttatctgatacgaagtcataaatatccttgtgatactgatggcactttagaaagagaagaagaagagacaaaaaaccatacttttattaatagccgtatgactgttccaaaccatttcaccctatcaaccgccagcgacactcctcaaatggatgaagtagcgcaacatataatacctttcgaagatacacagaataacgagggcggcactactggatcagaagtaacatcttccccaaacaattcagcggataatattttgaggtttaatgaaggtataagtgaaagaagggattatataaggcacaggatacgaggatatttacgttctaattatcatggctgggtcagaatgactttgcaagattgcttagatatctgggagaaacaaaacctctttaacaatgctgtaaaaaccttgtctttgcccaccgacgatacccgtttagttcctaaggcctcgtctgatgatgacgaaggtagaccgttgataaggatgagaaaaaactctttacagcccagcgactattacaaatacttgtcgccaacaaatgctggaaactctaatcaattagggaccgcaaactcagcaccgcacaatgagcgcctaggcgaagattgtaatgaatctacgagtttgtttttaacagtaccacaggaaccaacttccagaaagatgttgagttgtgatcgcatcccgggtttgattcaaaccaactctaatacatttgatggtgataacaaatgttggtcacatatacaaaatcctgtcatgagcaacatatctagtgttgtagatgaatccttgttggagtacgagggagataatatattactcgacggaacattatctctttgctcggcaagaagcaaaaccgtttgccagtgttttcaactgtacaattatttgacagataaatctttggatatcagtccctccgaattcttatcattattggtcaccacaccggtatcaataattctttatctgaccataccatcagaagggagtcaaaaacatcacgactcgcctctctcatgtttacaaatttttcagttgatcgcctcgccaataataataaatcaattaattatagaagatttttcctattggttgcttatattaccggcgctaatagctatatcactctatttcaaactaaaaacgacaccgaggaaatacaattcagatttaattttcactattgcattcttattatcattagcgtgtatttcgaagactgttcatttagttgttgccactcttacccattggatagaaatctttgacatatctgaaactatattgggtttgaccattttcacgtggggtaattccgttggtgatttagtgtcgaatatcacgttcgttagaatgggtgttttagaaatcgcaatcggtgcatgctttgggagtccactattgtatttcctattcggggttggatttgatggaattatgatcatgttgggtgacaatgcagggaaaattgtcaacggtagagataatactattttaatgcaccatattgatttccaggtagacaaacatttacttaatactggggtcggaatctcgattgcatttttgatatttacagttttgataccattgaacggctggaaaatagatagaaagatcagtcttttgcttctgacgttgtatgtcgttactacatgtatcagcgtgtttctggaaatttactga

SEQ ID NO: 2813 - DNA, 1866 bp, Saccharomyces pastorianus
atggttaatcaaggccagccgcaatcaaatccgtatgataagcatataaatatgtttccaccactaagaggacgagattcctcgcataaactgggcaatatcaacaccgacaggcacgattcgaccacccataatatggtgcctgcgccgtatccactagatgattctttggctgaactaacgccagctattccattcacgtctccttcatcttcgtcctcgctctcattgcctttaagtgcgctgaatttcacagatagcaatgttgacggtggtcaattaggcactccagtaaccataaacagtaataacggcattgatatatttaatgccaaaccagcaggtgatactagcagcactaatagtgctagcaatagatatgagctcccattcaattttaactcggcaaaaaatagcttaaattcgtcctctgcacataatatatcaatgaccgatggaagccgaatatcagagcctatcagtaatagtttagctcctccaccttacgaggaatctgagtccagggtgctgcaagaaaagttatacagaacagaggaaaaaactcccatacgacctttggagaagagacccgtcccgcaacagaaaaccagccaaacgacgactaataccatcactaagacaaagactaatggatcttctagcagtaaggataaactctccgcctactcgccggatgcgttagccttctatcaaatctataagaagactattaatgactcttcgaaatttactccagagatacaaatgaagtggtgtgaaacattacttacgtatgcatttaaggaagattttatatcgcagtataacataaatgcagaaaaactgaaaagaagtttaaaacctgaggaaatgctgaaaaatcaaaaagtcatattggaacactcattcaaagtgctcacaaaactaatcaccgtaaaatggcctcgtgccatgtatttgatggggaccttatactcacatcagccgtatttgcccatcaaaaataaaaacattgtcatcaagaatgatgaaaaggccctcgaatattattgcaaagccgccaaattgaatgattcagatgcttgttatcgtgcgggtatatgctatgaatatcaacgaggtacttcgtcttgcgatccatcgctcactaaggaacaatgcataaggaaggcttttcagtattaccagcaaggagccgaagtttgctccaattccgcgtgcatgtataaattggggatgagccacttatacggacttaacatgcagaagaatgatgtcttattagctgttaaatggtttgataaggcaacccaaaatggcgattctccgcaaacgttgtatgagctgggcaaaatctatgaatttagtgttatgccaccagagattcaaaatttattatttgctaacggcatacgaagagaccctcaactggccgtaaagtactactatcagtgtgccaaagactgcgagtaccctctagcgcaatggaagttgggcaattgctatgaattcggtgacttggggttaccagttttagccaagaaatctatatgctggtatttcaaggctgctgcttctcaaccaagagggaacccaatggcaatgttatcgttgagtggctggtatctaacaggagcggcaaacgtcttgaaaccaaacaataaagaggccttggattgggctttgaagagtagcaagtgttcggacggcaagttggcacgtaccgagtttgccctgggcttttactatgaaaagggtatcggttgtaacattgatttggatttggctagacaatattatcacagagctgcaaggttggggtttaagaaggcagttggtgcgctccaaaatttgacgaacttatga

SEQ ID NO: 2814 - DNA, 2886 bp, Saccharomyces pastorianus
atgactgctatcgaagatatcttgcaaatcaccacagatcctgtcgattcccgtggctatttcttattgaaatctgaggaagttcccaagggctcaaccctcggggttgactttatcgatacgttattgttgtaccaactaaccgaaaatgagatgctgactaaaccttttgactatttgaatgactgttttcgccgtaatcagcaacaaaagagaattaccaaaaacaaacccaacgccgagtcattgcataccactttccaggagattgatcgtcttgtcatcggctatggcgttgttgcactacaaatagaaaatttttgcatgaatggcgctttcatcaattacattactgaaatcgtcttcaatgtaaatgcatatactgattttctttctcagatcatacaaagagccatcttagaaggcactgctttagatttgcttaatgccgttttcccaacactattagagtactgcaacaagcacgttacccattttgatttaaacgattcggtgacctacaataacgttcttacactatttgaattatttgtcacatttaaacctatcgcggaaatatttactaagatagaaggattttttgtaagttacgactgtaagccacagttctttgaaaagcaaaccatactaggacctattctgtctctttcccctatagatgctgcggttgcaattcgtaattatggtgacaatctcttgcgctccaaacaacaaacagctatgatccacgaatctttgcaagccgaacacaaggttgttatggatagactgtttttcattgttgataagcttgtgcgtggttctctagattcaagaactgatatgataagctattttgctcatattgctaataagaatcatttacgtaaagctgatcgccccccattcaaggagttatcttctaatggattcatggccaatatcactttattattagttaaattttctcaaccgttcctagatgtctcatacaagaaaattgataagatcgatgaaaactactttaataacccaagcctgttcattgatctgtcagaggagacacgcctaaattcagattataaagaggccgatgcattttatgacaagaatagaaaaactgcggatgccaagcccaacttcatatcagattgcttcttcctaacgctaacttatctgcattatggtctcggaggtacactttcattcgaagagaaaatggggtctgaaataaaatcgctaaaagaagagatcgagaaagtaaaaaagattgcagcaagtcatgatgtctttgcaaaatttgtaacagcacagttatccaagatggagaaagtattgaaaacaacagaatcgttgcgatttgctctgcagggattcttttctcatagatctctgcaactagaggtatttgatttcatttgcggtgcatctacatttttgattcgtgttgtggaccccaagcacgcatttcctttccaacaaatcaaattaccattgattcccgatcaaataggtgtcgaaaacgtggataatgccgattttttgagagcacatgccccagtgcctttcaaatactacccagaatttgttgttgaaggaccaatcaattattctctttacatctctaaatatcaaacctccccaatttttagaaatccacggctgggatcatttgttgagttcacaacaatgatccttcgttgcccagaattggtttccaatccacatttgaagggtaaactagtacaattattgagcgttggtgctatgccattaacagataattctccagggtttatgatggatatctttgagaacgatgaactagtaagcaaaaatctactctatgccctgttagatttttacgttattgtcgaaaagacgggttcttcttcacaattttatgataaattcaacagcagatatagcatttcaatcattttagaggaactctactacaagataccatcgtacaaaaaacagttaatatggcaatccctaaataatgcagattttttcgtgcggtttgtggctcgtatgttaaacgatttgactttcttattagatgaaggtttaagcaacttggccgaggtgcataacatccaaaatgagctggataatcgtgcaagaggagcaccaccaacaagagaggaggaggacaaagaattgcaaacgagactagcgtccgcttcaaggcaagccaagtcatcatgtgggctagctgataaatccatgaagttgtttgaaatttactcgaaagatatcccagcagcatttgtcacaccggaaattgtatacagattggccagtatgctgaactataatttagaatcattggttgggcctaaatgtggggaattgaaagtaagagacccacaaagttattcattcaatccaaaggatttgttaaaggctttaacaactgtttacatcaatctttcggagcaaacagagttcattggcgctgttgctaaagatgaaaggtctttcaatagaaatctcttcgtccgtgccgttgacattcttggtagaaagacaggtttagtgtctcaagagtttgttgagaaactattaaattttgctaacaaagccgaagaacagaggaagactgatgaagaagaagacctcgagtacggtgatgttcctgacgagtttttggatcctttaatgtacacaataatgaaggaccctgtcactttgccaacatctaagatgaacattgatagaagtacaatcaaagcgcatctcctaagcgactctactgacccatttaatagaatgcctttgaagttggatgatgtgaaacctaatgaagaactaagacaaagaatcattgatttcaaaaagcagaagaaggaggaagctaaaactaagtcaaaaaattaa

SEQ ID NO: 2815 - DNA, 963 bp, Saccharomyces pastorianus
atgatgccatcgatatttatagcccccgcaggtataagagcaacatctcgagtctgctatagaacgagagcgtattcaacgaaacctgaaaaggtgacccttcaaaaatatttgaatgacccggttaaggtgactgtgataccgatatccaacaaggattcatttgtttactacaagcatactgaaagtctatttaatagccaatctaggatactaaaaacagaaaaatggatcgtagaaaaatctgccaagctttgggggaaactgaagaagtctcccaaatcatataacaagaagatagtatccatggtccagtctttactgaatagcacaccttggtcggagaatagtctgcttactatcccaagtgaaagctatatcctgaaaagaatcaagggcgaaacggacaaggctcaagagatacgactcacattgaaggactatactgtaaaagcgcaccaggtggacactcagcccttacatatttattaccccgcagaaatctctaatccaggcgagtgcttgaagcaaatgaaaaaactctaccaagacgggttagcataccataagaaatggacattatattgtattctaggtttgcccctgaccattcctttaatcttaataccattgataccaaatgtgcccggattttatctatcttacagagcctatattaatattaaggcctatctaggcgccaaacacttgaaaagtctactggagaactcaaaccaacaattagaattcaaggaactgcaaggatattcagacgtatacaaacgaggtaacagtagccatccgcaggggacacaagaaggtccaaaagattcaccaaagctactgctcaacaagcaaaccctccccttaatcctagatttcttaaaagtccacaaattagaaagcgacttgaacaaagtcatccttcaaaaatcaaaacgacaggaagagatcaaaaattga

SEQ ID NO: 2816 - DNA, 918 bp, Saccharomyces pastorianus
atgtccgactacgatgctcttttgcaattcaacaagagacctgtctcgcaagaaatgatccaatttttagctacatctactgcctccataatccaaatcagacaaaacagtaatccggtgcatggatgcccaccaccggaactatctctctttatcaaaaaagtagtagttcagtccaacgtacaaacaccaacattaatggccactacagcctatctaaacaaattgaagagtataatacccaagaacgtgtacggcatcgagaccacaagacaccggatattcttggggtgcctgatattagcagccaagactttgaacgattcctctccctggaacaaacactgggccacatacacagagggcttgctcaaagtgcgcgaggtaaacactattgaacgtgaactcttggaatacttcaactgggatgtaagaataaccacgtctgatctgattaattctctagcgttcttcttggtcccgattcaggagcaattatttaggcaacaaagacaagaactactattgttcaatgccccaagtcttggtcaattgaaagaatacattaatcatagaaggccggtttcgcattctagatcttcttctaccatgtcagttccatcgctggcatctataatgacagtatcaacaacagactcgaggatctccgcatttgcacagttgcaaccgtctttaccattgatggaactcgataaccttaataaggaaaaccatggacctttcagcggtcaaggcaatatgcataagaatatcgctgtcttgtctcaacaaaagacatgtccaacgcattatatcaatacagcattgccgaatggacaaccgacaccacataaacctgaggtccaccaaaggcttcatttcacaaggaagggctggtcatcatttttcaagcagtag

SEQ ID NO: 2817 - DNA, 897 bp, Saccharomyces pastorianus
atggctacgttcgaccccaacaacgagatggaaaaccagacacgcatgcaggagtacaaggtcaccacgggcaggggcggcgccggcaacattcataaatccatttccaaaccgtctcctctactgctcccactgaaatccaactcgaagccatctgcaaacaccaacacgcagcagaaggtcccacgctttgccatcggtaggggtggtgctggcaacatctttcacgacccacatctgaccagatccgctcagcagttggatgacaatgacaatatcaactatagcgacgtgattaatgacatcgacgactatatatctccaatcacttcagacatggtcgacgacggcgggctgaataacaccaagtctcatctcagcgggacgaggagtcatcagtccatgcattctgccatgtcgactccgaacaacggtagcagcaaggcagcgcccattgttgttggtagaggcggagcaggaaacattttctttcacaagaagaagttggtggcggctaatgacggcggcaacgctcaggatgcgataagagacggtagcggtgatggcgtgggcgaagacgaggacacgatcaacgcgaacgataataacctgttcgtggtgacttcgaatggcaatgctgtgtctgctatcaagtcctcgtccaagaaactcaaaagcaagcataagatcaaaagcacgccggaaaaattcgccatcggcaggggcggcgcagggaatataatctcacccaagtcgagcaggaataccatacaccacaactccgacgacgacgacgaggatgatggtgatacgaagaataacaagagcaaagacgagaaaaagaagaagaagaagaaatccggattcttcaactctttgaaatccatgtttacttga

SEQ ID NO: 2818 - DNA, 660 bp, Saccharomyces pastorianus
atgaagaataaggaaaagctgattgtttattcaaatgccagttcggcgtttgcgtatagtgcagaaataaggccaaatttcaagatatcggtgtctcaaggccaaggttttgcttggaaccaagatctgtttgctacgcagtatcagcaagcgtacaaagtcgtttatgatgcacacgaggatgaccttaatgaactgatttcaaagatcaggggcaagttacaagctaaagccaggaaaagaagtagaattaatgctaaggctaaaggaggcaggagtgcaaagacaagaagggaagccgccgtacttgaagatagcgatgagggtgatgataggcagtatcaaagaatacaagttcttgtaggccacgagtttcccaggggaagtctctataaacctgtgtggagtcaggaccctcactcgggcgacaacgatagtgcaagtgaaagcgaaagtagccatgatgtagatgtttttggcggcatgtcgtattcaaagatggctgagatggatagaccacgcaggaagtccgagaggagcataagtttcgtagaagattccaagacgggggactataggtaccacataggccaagtggatgtggtggaggtggactcagacacacctgaaaataaccatctcaaatggctgacatcatga

SEQ ID NO: 2819 - DNA, 1158 bp, Saccharomyces pastorianus
atgcctgcttctactgttggtaaacctattcaatgtattgctgctgtcgcttacgatgcgaagaagccattgagtgtggaagaaattactgtggaccctccaaaagcacatgaggtacgtattaaggttgaatatacagccgtgtgccacactgatgcgtacactttatcaggctcggatccggaaggccttttcccctgcattttaggtcatgaaggtgccggaatcgtggaatctgtaggcgatgacgttaccacggtcaaacctggtgaccatgttattgctctatataccgctgaatgtggcaagtgtaagttctgcacctccggtaagaccaacctgtgcagtgctgttagggccacccaaggtagaggtatcatgcccgatgaaaccacaagatttcataatgataagggcgaggatatattccatttcatgggttgctccactttctccgagtacaccgtggtggctgatgtgtctgtggtggctatagatcctaaggctccactggatgctgccagtttactgggttgtggtgtgactactggttatggggctgctgtcaagactgctaatgtgcaaaagaacgataccgtcgctgtgtttggttgtggcactgtgggcctttccgtcattcaaggcgctaaggcaagaggtgcttctaagatcatcggtgtcgatattaacaacaaaaaaaaacaatactgttttgattttggtgctaccgatttcatcaaccccaaggaagatttggctaaaggtcaaactattgttgaaaaactaattgaaatgactgatggcggtttagatttcacattcgattgtactggtaacaccaagatcatgagagacgctttggaagcttgtcataaaggctggggccaatctattatcattggtgtcgccgctgctggcgaagagatctcaaccagaccattccaattggtcaccggtagagtgtggaagggctctgcgtttggtggcatcaaaggtagatctgaaatgggtggtttaatcaaagactatcaaaacggagctttgaaagtagaagaatttatcacccatagaagaccattcaaagaaatcaatcaagcttttgaagatttgcatcacggtgactgcttaagaactgttttgaagttcgataaacaataa

SEQ ID NO: 2820 - DNA, 351 bp, Saccharomyces pastorianus
atgagtaacatattggcagtttttaatcctccaccacaaagggagctagaaaaggaagagaccatggactgtgttccctgtcaggtcatgagcaccatgttttctgttggatttggttcctacttggcatctgggaagccattcaaatatggcaagaaagatgccaagaagggcatttcgttggcggagtttgagaagagaaacccacaatggtggaagctaactttacgtagctttggtgggttattgatagcctttgggctcgtccgaggtaccgaaggttggttgtggcataaaaataaagaatataagaattacaagaaactagctaacggtgaaagcacggactag

SEQ ID NO: 2821 - DNA, 2718 bp, Saccharomyces pastorianus
atgtctaataaatggtttactggaatttcgaggacaacaggggagactattcccgaggtggtgccaccaaatgagaataaaaatgtaaccagcggttacaatgtcatcgccgaaggtagtgccaataacgaagacggcgcttcttgtcagctttcctttgattatgatggtgagattgtaatgtgcattgaactatctggaggcaaaatggggtgttctgttttggactaccatactaagatattaagagtgtttaaccaggactatgttgtaaacaagtctacaattacgtcccatgatctcatcgatgaggttaataagtccgcaaacgatatcagcctgatctcaggactcttgataatggaaacgaacccaactatatgtttggtctcggtaaggttggaggactggatttttgattacattaagacgaaatgtgacgaggtgaactgtaggttagatctgcaaccaattaaacgtttcaaggaattgaatcttttgcagtcattgcaattgaaggggcatgataatttggttatactaaacgacttactgtcgaatagtaggttcaccactacagtcactgtaagcacggtggcatgtatcctttccaatcatgagcaacaacatacggaactggatgaatgtaatgcgagcaccgtctctaccaacatgattgccggacgatcgataagaagcggatttgaagatgtaatatgcgacctaaagtatatcgatataaaagatcgaatggtattggatgagaatagtttatcggctttgaatgtgtttcctacagcacataaattaggacatgatagcatgatggaaaatggtgcccttagcctattcgaactgtttaataaagtatcttcggattatgctaagaaaatgttaaagtcttggcttttcaacccgttaactagcaagaagcaaatagagaaaaggtacagcattattaggatattattggatacacaaaacaccatgatttttaatgatctcatccaatcaataaagagatgtcccgatgctttcggttttatgaatcagctgagaagtggtaaatcaacattaggaacttggtctaaaactaaaaattttttagagaaaggaattgccatatttaagctgatatcttctttaaaattaaattccgacggcagaaatatctttcatgacatcaagaataacatcgacgttttagaactaaaaaaatgcctaaggaaaatagaaactgtaatagattttgatacttcaaaggatactaaaacaatcacaataaacacaggggttgacaaaagattggatgaatgtagaaacatttataatcatctggaaacccttctgctagatgttgcaagagaggcacaaacatttttactcaattctttgccccaaacagattccaagataacaaaaaatttagataaattgatcaatgctgtatacatccctcaactaggatatttagtcacggtaagtgcctttatggaatacaccctcaaaaatataccagatcttggatgggaagagattttcagaagcccagaatgtgtttactttaagaatggtagagttctagaactcgacgaaacatacggtgatatatatggagcaatttctgactttgaaattgaaattgtattctctttgcaagagcaaatcttagaaaaaaggacgcaattttctgcatatagtgtactccttagtgagctggaaattctaatatcattttcccaagtgtgtatggaaaggaattatgtagagcctcagttagtggaagatacttgcgtcttagaaattattaatggaagacatgcgttatacgaaacatttctcaataattatattcccaatagcacaatagttgacggtggcttgttttcggatctcagctggtgtaaaaacgataaagaaagaatcatcatcataactggagccaatgcgtctgggaagtcagtatatcttactcaaactggtttaattgtctatctggcacagatcggttgtttcgttccagcggaaagagcaaagattggaattgtagataagatattaaccagaattagaacccaagagacaatatacaagacccaaagctcttttgcattagattcccagcaaatggcaaaatcattgagtttagccactgagaaaagcttacttttaattgatgaatacggtaaaggcactgatattttagacggtccttcactattcggctcaatcatggtaaacatgtctaagaatgaaaaatgtccacgcattcttgcatgtacacactttcatgaactttttaacgagaatattctctcagaacacatacctggtatcaaacattattgtacggatatacttataaaccataattacaacctctcgagtacgaagccagttaaagaaacccatgaaaatgagggaattacatttttgtttagaataaaggagggaatttcaaagcagtcatttggtatatactgtgccaaaatatgcggagtaaatggaaatatagtaaagagagctgaagagttttctgacatgatcaatagaggcgatgatatagttcaaaattttggaaaactgacggaaaaagagatattggagtttcaaaagaatcaggaaatagtgaagaattttttatcttgggacttggatctcgaaacttcaacaacttccgaaaatcttagactcaaattaaaaaacatctttcattaa

SEQ ID NO: 2822 - DNA, 1071 bp, Saccharomyces pastorianus
atgtctagagtattagtaattggtgcaggtggggtcggagtgatcactgcagtctcgttgtggtttaaaggggagagcgacgtatctttggtcgtaagatccgattacgataaggtgtcagagcagggctacacgatcgaatcgtgcgattacggccaattggaagggtggaggccacaccacatctacaggactgtggaggacgctgctgcggatgcgagtgacaaggggtacgactacgtcgtggtgactaccaagaatatcatcgacggccccgctgactccagagtccccaacatcatcaggcctgtgcttgagaggaacaaaagcttgcacggggcgcaattgaccacgcacattttgctggtgcagaacggtatcgatattgagaaggacatcttggcggagttccctcgggatgagttccagtacacggtgctttccggcatccagttgatcgggtccactaagatcgggaccggtcatatcagccaggtcagccaggactacctttcctgcggggccttcgacccacaggacgctgttgctgtccaagctgccaacgacttcgtccgaatgtacagcaacaagggccacaacttcgtggaattcgagcccagggtccgctactcccggtggaagaagctcgtctacaacgctgccatcaacacatccacggccctcgtcgagctggacgttccccgttgtttggagttcggcgtcggtaagaagagcactgcgactgaggtgttccagcctgccatgagagagatcatcgccattgctgcgagtgagggcatcgtcatcgaggagaagttcgtgacgatgttcactgagatcaccagaaacaaggtgttcaagccctccatgtgcgtggaccgcgacaagggccaattgatggagctggaggtgatcctgggcaaccccatcagaatcgccaagagaaacggtgtcccaacgcccactctttccgtgctttacaacctgctcgtgctagtgcaagccagactaaaggagttgaaagggctcttgaagttcgatgaaaagaccgccagtcttgtggaagagtag

SEQ ID NO: 2823 - DNA, 840 bp, Saccharomyces pastorianus
atgttacctatttgttcacgctctgcactgctttggagaactataccgagcagggcatcctgtaacgtattgtcagggctaactagacgtattcaagtcaaatctcaattgcaataccgtattttcagcgcacacgccaagagagatttggctacagtcccaactaaacctcccaataaaaatgccttactcaatattcccaatattttgactttatctcgaatagcttgtacaccctttattggacttttcattataacgaacaatttaaccccagcactgggcctttttgcattttccagcatcactgatttcatggatgggtatatcgcgaggagatacggcctcaaaactgttgcagggacaatattggacccgatcgcggataaactactcatgattaccacaaccttggcattatctgtaccatcgggccctcagatcataccagtatccattgcaggaatcatcctggggagggattttttattggcgataagcgccttatttgtacgatatagtactttgaagttgaaataccctggtcgtgtgaaatggaattcgtattgggattttatccattttcccagtgctgaggtagagccttcccaactatcgaaatggaacacttttttccaaatgatatatcttggaactggtgtattgttacttctatatgaaaagcaagcaagcgacgaggaaacggatgagacttttgagaagagaagagaactttttcagaatgtttttacttatctaggatatataaccgcaatgactacagtcatgagcggagcatcctatgcattgaaaagaaatgccgtcaagcttctaaaatag

SEQ ID NO: 2824 - DNA, 2310 bp, Saccharomyces pastorianus
atgaacgataatcaagattgcctgcgacagagaaaggaaaacgctctttcggagcttgcagacgacttcaacaaccgccaggacaccgacagtaccatcgattataacgtcggacaccacagcgcttatacagagtctcctgaagacacagaagtgaaatccataatgatgtgtgatgatattaacgcataccgaatatcatacgcgaataatgagcccctgggcgatggagcggtggagactacgtccatactattgtcgcaaccgctaccactgcgatcgaacgtgatgtctatcctggtcggtgtattcgttgccgtgggagggttcttgtttgggtatgatacagggcttataaacagtatcacggatatgccctacgtcaagacatacattgctcctaaccattcatttttcaccaccaatcaaatagccattcttgtatcatttctttccctaggaacatttttcggtgcgttgatcgccccctacatttccgattcatacggcaggaagcccacaatcatgttcagtactgctgttattttctccataggaaattctttacaagtggcatccggtggactggtactattgatcgtcggaagagtcatttcaggcttcggcatcgggataatctcggcagttgtgcccctgtatcaagctgaagctgctcaaaaaaaccttagaggtgctatcatttccagttatcaatgggccatcactattgggttactagtgtccagtgcagtgtcgcaaggcactcattccatgagtggtccctcttcatatagaatacccattggtttgcaatacgtttggtccagtattttagccgtaggtatgatttttcttccagaaagcccgcggtactatgtcttgaaagacgagcttaacgaagctgccaaatcactatcatttttaagaggtctcccgattgaagatcctaggcttttagaggagctggtggagatcaaagctacgtacgattatgaagcatcttttggtccctccacgcttttggactgtttcaaaacaagtgaaaataggcctaaacaggttctgcgaatattcactggtattgctatacaaactttccaacaagcatctggcataaatttcatattctattacggagttaatttcttcaataacacaggtgtagacaactcctacctagtttcctttatcagctatgccgtcaatgtcgctttcagtctgcccggtatgtatttagtagatcggatcggaagaagacccgtgcttcttaccggaggtgctgtaatggctgtagcaaatttgatcatcgccgtcattggtgtttctgtgggcaaaagcgtagtggctagtaaggtcatgattgcttttatttgccttttcattgctgcattttcagctacatggggcggtgtcgtatgggtagtatctgccgaactatacccactgggcgtcaggtcaaaatgtactgccatttgtgccgctgcaaattggctggttaacttcatttgtgcgttgattacaccgtatatcgtcaatgttggatcccatacatcttcaattggtcccaagatcttttttatttggggtggtttaaatgttgtggccgttattgtggtttatttcgctgtgtatgaaacaagaggcttaactttggaagaaatcgatgaattgtacaggaaagcgccgaatagcgtcatgtctaataaatggaatgaagaaataaggaaaaggtgcatgacatttcctatctcacaacaaatagagatgaagactagtatcaagaatgctgacaaatcagaagtcgtcaataatccagttcctgaggatactacaatcaacaacaacaacgacatttccaatgtagacaaattcttacaagatctgctactgtcaaacgaccgaacggtcgtggagactaaagaagatagtgtcttagcggacgctatcaatgcggcacccttgacatccatggagcttaaaccaatggaatgcccgtcggtgaattacgtagacttaggaaacggtctaggtctgaacacatacaacagaggaccaccgtcgatcatttctgactctacagatgagttctaccaagaaaatagctcatctagtttcaaaaacaacaccggggaaaacggggacaatagcatcagcacatacatggctcaactgattaacagtccatctaccacaagcaatgacacatcgttttctccctcccacaacagcaacgctagaacgtcttccaactgggcaaatgatcttgctagcaagcacagccaatgcacacctcccaaaaacaatacatag

SEQ ID NO: 2825 - DNA, 2181 bp, Saccharomyces pastorianus
atggatttgtccctcactcatcaaaaagaacagttcacaaagttctcggatactttagaggaattcaaaattgaacaaaataatgaacaaaataccattgacccatttgacattataagagagtttcgttcaactgctggaaaatttgcattagattcagctaactccacagaccaagggaattcaatatcttctaaagattgggagttggaagccaggttctggcatctagtagagttgttattggtatttaggaatgctgatcttgatctcaatgcgactaaccttcatccatacaattctagggcattatttgagaaaaaactgatgcaagacaatctacaactttaccaaatatggatagtgatggtttggttaaaagaaaatgcacatatggaggaaagacctcaagatataccaacatccaagtggtccaatagtatcatctctggaggtttaaagagctgtgatttagattatcccttgcgggaaagtagtaatgtccttgatgttaaagacaaagaagaagaccatatttttttcaaatatatatacgaactcattttagctggtgcaactgatgaagcattagaggaggctaaacttgccgacaacataaccatctgtatgattttatgtggtattcaagaatatttgaatccagtcatcgatacggagattgcaggcgagtttgataggcaacaaggcattaagaggcattctttatggagaagaaccgtttacagtctttcacaacaacctaatttggatccatatgaaagggcaatatacagctatttaagcggtgatattccaaacgaagaagttatgcaatattcagattgggaatctgaccttcacttatatttaaatcaaattttacaaattgaaattgaaaactatctcctagagagcggccaaatcagttctgatgagttaatcataccgttaccttcgcatgcgttgactgtacaagaagtactcaacaaagtagcttcaagacatccgtcggaaagtgaacacccaatcagagttttaatggcatctgttatattggattcactaccatctgttatccattcatctgtagaaatgctacttgatgtcgtgaagggaacagaaactagcaacgatataatagacgagccttatcttctaagaatagtaacacatttagctatttttctggatataatcaatcctggctcagttgaagttgttgacaaatccaaactcattaccacatataccagtcttctaaaactacaaggactttatgaaattattccaatatatgccacttttctaactgaatctgactgtttggaagcgtactctttcatattgtcttctctagaggattcacaagtaaggcaaaagcaaatcgaaataatgaacttcctaaaacttcctgcgtcaaacatcttgagaagaactacacaacgtgtttttgacgaaactgaacaagaatactcaccatccaatgaaatttctatatcgttcgatataaacgacattgatatgcacttaatatatggtgtggagtggcttattgaggggaaactgtatgtagattctgtccactcaataatcgctctatcgagaaggttcttattaaatggtcgtgtaaaggcgctcgaacaattcatggatagaaacaatcttggggagatatacaaaaattatgaactagaaaaaatggccgaggatatatccaaaaacgaaaatcaagatcaattgatgaaggaaattttacaatacgaacatttaatccgaggcataaaagaatatgaagaatggcaaaaatccgtgaatttattaaattcagaatcaaacattcctagtttaatagagaaattgcaaggattttcaaacgatacattcgagttgattaaggtatttttagtggatttgacttcatcggacctgaccaattcgacagatcatgagattttgtatgaaattagagctctgtatacaccatttttaataatggaattgcataaaaaactcgtggaggcagcagagctgttgaagatcccaaagtttatatcagaagctttggcatttacctcgttggtcgccaatgaaaacgacaagatctacttattgttccaatctagtgggaaattgaaagactacttagaccttgtcgctcgtacggcaactcttttggattaa

SEQ ID NO: 2826 - DNA, 723 bp, Saccharomyces pastorianus
atggtaaatgactatttaaagtttaataaaaatgtagaggagactaaaaggaaaaaaccgagccggagatatttcagtgggaacgccgcagaattagcgtcactttccagtctagattatgtttttgacatctaccatttagagaaaatccgtgaagaagaagttgcaaagtacaataatgaaaaaaatataggattcgtgaaaattattgagcagatagatttagctctcgatgaagaaagcgaccctaatgaggcccgatcagatgatgaggattccaatgatgaaaactattatcaaaatgattatccagaagatgaggatgatgatagatctattcttcttggtagcgagggggaagccgcagctatatctgaagaagaagttgttttaggtgttaataaaagccggttctcgtcatggaatgatgatcaaattttaggtcctaatggatataaagatgtagaagaagaatacggagatctcttcaatagacttggggggaacagtgaccttttgaaaaccataaattcctcaaattttgttgacttggatgatccagaaaatgaattaaaagcaagtgacgatgatgatgatttaaatgaaggagatgatattgaataccctagaaatgaattcttcccaacggatgtcgataatccattggcacagcacagggatagaatttttcaccagttacagaacaaaatcgaaagaagatga

SEQ ID NO: 2827 - DNA, 1050 bp, Saccharomyces pastorianus
atgcaaaggtttgccagcaggcttgtgtctgcaccacgaatacccaacaaatttctagattgtttccccaggaaacgtaccgttaataagatattatttcagttagatacgaggctcacatacaatgaaatgtaccctatatttgtacaagtatcacaattaaccgataaagatagtatttcatggaagaagaagtatccatacttaaggagttcagatatcatgcagatgcgaaatgtcttaattactctaaggatgcaaaataagtttgtacataaagatgtattggctatggagaataaactattaaacgttgctgctgaactaggtaacaacgacgctatatcaatattgagcttcaatgtggtacaagcacaagaaaataacaccaccaaagacaatgatcagaatgacgttgagaccgccaatagattcataaaggagttatatgcacgcaatcatcatttaacaatcaaattaataggagatacgtttcttaaaaataaggcttataaaaaagctgaaaaatactacaaagaatttttgaaattggaaaataacaccaaactagctggcgaagtttatgggaatcttggagaaattcaaataaaacaggtgaacggttttttgaaggctgaaaaatcatggctgaaatgtatagaactgttagaacttgaaagaagttcacgttggtacttccttctggcaaagctatactcaagttcagagccgttaagggctaaaccactgttggaaagttgtgcctcaattggatttaaagaatgttttaaaacattagggtttcttgagctaaactattttcagaactacgaaagagcaaaagaatggttcaaactaggcatggaaataacggatttggaatgcttccttggatttttcgattgttctttgaaacttaaagatattgggagtgctaaaaactgtctgaaaagtctaaaaacttttgagaatgatgataacaagaaagtaataatcgacgctttcttggaaagtagaaaagattctatggaactactccagagaaaatga

SEQ ID NO: 2828 - DNA, 588 bp, Saccharomyces pastorianus
atgtcaaacttcgggagaagaacctgggacagagaggagtatgctgaacaagccagaagcgggtatgatgaccaatccttgaagaatacgctaacacccgttgaattacaagcattgaaaacaaaatatacgagctacgaccgactaatcaaagcttcactgaaagatctaaataaacgaaagctaactgcaaataacgaaagtctgtcgtcttctaagaaaggcaaaaagttcgggttttattgcgatatctgtaatttgacgttcaaggacacactacaatacgttgaccacttgaaccataagctacatgcgataaaatttgagaacctatttgacgagccgttagtattggagataagagacaatgatgatataccgcaggaggagttcgaaaagcgttataacgacttggtgaaggaattcatagaaatacattcgactactagtcaatccaagaaaaggatgtcttcaaacgtagacgtaaacaaatccaagaaagtggacaaggcgcctttgctctctacggggaatgaatcaaaagtcagtcaaatgatgggtttttccagttttggcagttccaagtaa

SEQ ID NO: 2829 - DNA, 774 bp, Saccharomyces pastorianus
atgtcgacgccagctgcagaacaacggaaactcgtcgaacagttgatgggcagagactccggtttccgccacaacaggtactcgcaccacaagaaagatctcgggctgcacgatcccaagatctgcaagtcataccttgtgggggagtgcccgtacgacctgttccagggcaccaagcagagcctggggaagtgcccgcagatccacctggccaagcacaagattcagtacgagagagaggtcaagcagggcaagactttccccgagttcgagagggagtatctcaccattctggcccggttcgtgaacgagtgcaatggtcagatctcacttgcgttacagaacttggagcacactgccgaggaacgaatcaagatccgacaggtcaccgaagaattggacgtcctggatgcccggataggtcttatgggccaagagatcgattctttaatccgtgcagacgaggtcactatgggcgtgctgcaatcggtcaagctgcaagaactgatggacaggaggaaggaggttgcaaaacgagtgcgaaacatcacggaaaatgtcggtcaaagtgcccaacaaaagctgcaggtctgcgaggtttgtggggcctacctgtcacgtctagacacagacagaaggcttgctgaccactttctggggaagatccacttggggtacgtaaagatgagagaggactaccaccggctcttgaagagtaaccaggctgctaacgcctatagggcggctgcactacccggaaaacgctttgtgtag

SEQ ID NO: 2830 - DNA, 555 bp, Saccharomyces pastorianus
atgaaaatgacaacaacttcgaccactaatgtaaatggtaaagctaccccagctttaaagactactttgtccacttcaaattcaaattcaaatagcccacctactgctcttccccaaaaacctaaattgacaggctgggcgcaagctgctgccaaagcccttccaaagcagcagcagcagcagcagccacgaagaaatgattcctcgtcaccacagccaggtaacggaaagactaaagtcactgtatccaccacgccgtcgactaacactaagggaagttccagcgttaatggatcgtccacgaataagaaattcaaaagaaccaataaacaaccctataacagagatgaagtcaggtcttacatgcacaaactgtttcaagactacaccacaggcgaaatgagtcattcagtcaagacttataaacaagtactgtctgaaactgcaagcgggagggtttctacggccaccgactggggcactgtatcaaacagcaaaaacaaaaacaaaaagtacggctgtttgactgacgttgctaaaattttgaagaattaa

SEQ ID NO: 2831 - DNA, 834 bp, Saccharomyces pastorianus
atgtctgaacaaccacaacaagaacaaccggagggaccacaatcgagacgcaattcattcgccgtaatcgaatttacaccagaagtcttggaccaatgtttgaagcaagtggaattctacttctcagagtttaacttcccttacgacaggttcttacgtactactgcggagaaaaacgatggctgggttcccatcagtaccattgccacattcaaccgtatgaagaaatatagaccagtggataaagtgatcgaagtactacgcagttccgagatcttggaggtttctgctgacggagaaaacgtaaagaggcgtgttccattggatttgactgctgctaggaatgcaagaatcgagcaaaaccaaagaactttggctgtgatgaatttgccacatgaagacgttgaagcttcacagattcctgagttacaagaaaacctggaaacgtttttccagaaactgggcgaaatcaaccaagtgcgtttgagaagagatcacaagaacaaaaaattcaacggtacggttttggtggagttcaaaacaatcccagaatgtgaaacttttttgaaatcatactccaacgacgatgagtcaaacgaaatcttgtcatatgaaggtaagaaactaagcgttttgaccaagaaacagtttgacctgcaaagagaagcttccaaatccaaaaacttcagcggtagatcaagatcgttcaacagtcatagaaaggaaaacttgcccaaattctccaagaacaagaagaaagatgacgacaaggacgacaaggacgactcttccgccatcgccgatgaagaggaagatcataacgagaaatcctaa

SEQ ID NO: 2832 - DNA, 810 bp, Saccharomyces pastorianus
atgttgatagtatcattcttggctctgttttgttcattagtgtcgcaaacggtttactgcgatgtggccattgtggcaccgggacctaattctgtgtacgatttatccggctcaggccaggccaccgttaacgtaaaatggatgcatacagatactactccacaggagaaggattttatcaagtatacgttcactctatgttcaggcaccaatgcgttgatcgaagcaatggctacgttgcaaacgctcacggcagccgagttggcaagcgatgagtacagtgcagtcattgaaaacactgtcgggactgacggtgtctattttattcaggtcttctcacaaacggcaattggttacaccattcattacaccaataggtttagactgaaggggatgaaaggttctaaaatggctaatccgagtatggtaaccatagcaccagtgccgcaaacaagaatcactacgggggacctgggtgccaccatcgactccaaaagttttaccgtcccttacaacttgcaaactggtgtcgtgaaatacgcgcccatgcaactacaaccagctacaaaagtgacggcaaagacatggaaaagaaagtacgcaaccagtgaggtgacgtattactacactctaagaaactctattgatcagcataccaccgtgactccagggtggtcctacgtactgacggccgatagcaactatgccacgccggcccctatgccggctgataatggtggttggtataatccccgtaagcgactttcgttaaccgcaaggaaggttaatggcttacggaaaaggctatga

SEQ ID NO: 2833 - DNA, 801 bp, Saccharomyces pastorianus
atggagcatgcagagggtgttgggtccaagaaagggggtgggggtatagcatctgaatctcagtttaaactacaacgtaaaaaagaagttgaatctttgctcagtaagggtgaagaagtaccatacactttccaagatgaacaagacgatcaggtgagaagcaatccgtacatttacaagaaccattccggtaagttggtctgtaaattatgcaatacaatgcatatgtcgtggtccagtgtcgaaagacatctgggtggtaagaaacatgggctaaatgtgctaaggcgtggtattagcatagagaaaacttcccaaggaagaaatggacaagcagcccaagattttcagcaccaacaaaaaataattgaagcaaagcaatcattaaaaaataacggcgtagtccctgcgtctaaaattgcagctgtgaaggacccaaagaccggattagtgggtttggctattcaagtaaactacaacatcaacgacaaggaatatgacgctagcggaagcgataaactcggaataccacctctcatcaggatagtatctgggttagaattatcggatccaaagcaaaagggcaagaagttcttaatcattgcatatgaaccctttgaaaacatcgccatcgaactaccgccaaatgagattacatttggaaaagatcaggaaatagaggccaatatggagggagtagatgagctgaatagaaaatgtactgtttgggattcaatttcaagactttactacattcaatttttcttcaaacaggccgaggaagatcaagttgctgcttga

SEQ ID NO: 2834 - DNA, 1389 bp, Saccharomyces pastorianus
atgctaagaaacaaaagtctaaacaaattttttagagtgccaaccattatgtctcagaatctcaaacggagcgcgttaacagcaaatcttacttcggaatcaagagcaacttcggatgaattcaataagcatttgcaaaatgaagtcgaacgagagagggaaattcaacaaaagaagaaaataaagagaaccaagttaaacaaacggtcaattttaactgataagtccacattccaatcgcgagaaatagggaacaagaagcctaagcacagacaggttgatccagaatatgaagttgatatcgagggacccctgaggaaaatcaagccatattattttacatacaagacattttgtaaagaacgctggagaaataaaaaactgattgacgttttcacgtcggaattccgagatcgcgaacctgaatactatatgaaaacaattgccagcggcagtgtttatttgaatgataaggccgcaggcttgtccagcataattaaaaatggagatctaattacacacaaagtacataggcatgagcccccagtcacttcaaggcccataaaaactgtttttgaagacaacgacatcctggttattgacaagccaagcggtatacctgttcaccctactggccgttatcggtttaatacgatcacgaagatgttggaaagaaatttgggttttgcagtgaatccgtgtaatagattggatagactcacaagcgggttaatgtttttggcgaaaacgccaaagggagctgacgagattggtgatcagttgaaagctcgagaagttaccaaggaatacgtggctagagtaattggtgaatttccagagacagaagtagtagttgagaaaccattgagattaattgagccaagacttgctcttaatgcggtatgccaaatggatgatgaaggcgccaagcacgcgaagaccgtttttaacagaataagctacgacggaaagacaagtattgtaaggtgcaaacctctcactggacgatcacaccaaatcagggttcatctgcaatacttaggacatccgattgctaacgatccgatttattcgaatgaagaagcatggagtagcaatctaggcaaaaatggagaaatagactttgatacagttatcgcaagactggatgaagtaggaaaaaccagaccggccaaaagttggtatcataagaattccgctaacggtgaggtattaagacaagaaaagtgcactctttgcgaatctgatttgtacactgatcccggtcctaatgatcttgatctttggttacatgcatacctatacgaatcaaccgagactgacgaagaaagtggacagaaaaaatggcgctacaaaacggagtatccagaatgggcccaaataacatag

SEQ ID NO: 2835 - DNA, 606 bp, Saccharomyces pastorianus
atgtccagcgaagataacaaacctattgttgaaaagaaggaggaaactgctccaaagccaccttccgccgcagtcttctccatgtttggtggtaagaaggccgaaaagccagaggctaagaaggacgaagccgacaccaaggacgaagtcaagaaggaaggcgaggatgccccagaatctccagatgtccatttcgaaccagttgttcacttggaaaaggtcgatgttaagaccatggaagaagatgaagaagttctttacaaagtcagagccaaacttttcagattcgatgctgacgccaaggaatggaaagaaagaggtactggtgactgtaagttcttgaagaacaagaagaccaacaaggtcagaatattgatgagaagggacaagactttgaagatttgtgccaaccacatcattgccccagaatacactttgaaacctaacgttggttccgacagatcctgggtatatgcttgcacagccgatattgcagaaggtgaggctgaagctttcacttttgccatcagatttggcagtaaagaaaacgctgacaaattcaaagaagagtttgaaaaagcccaagaaatcaacaaaaaggattag

SEQ ID NO: 2836 - DNA, 681 bp, Saccharomyces pastorianus
atgtcctttgctgatgtcaggagtattcgtcagccggtggtgaaggtctgtggcttgcagagcacggaggccgccaggcgtgccctgtattcagacgcagacttactgggcatcatatgcgtgcccaataggaagagaacggtcgatccgattgtagccaaagaaatttcggatctagtaagggaatacagaacgagtacgggtactccgagatatctggttggtgttttccgtaatcaatccatggaggacgtcttaaatatagtcaatgagtatggcatagacatcgttcaacttcacggcgatgagccgtggcaagaataccaagatttcctcgggttgcccgttattaaaaggcttgtgttccctagagactgtgacatactactgaatacgcctccagagaaatcccatctgtttactcccctatttgattcggaggccggtgggacaggtgaacttttggattggaactctatttcagattgggctacgaagcatgaaaattcgcaattcctacaattcatattggctggtgggttgacgcctgaaaacgttagtgatgcggtccagctaaacggtgtcattggtgttgatgtaagtggtggcgtggaaacagatggcgcaaaagatatgaacaaaatcacgaactttattcgaaatgcaagaaatatgacttag

SEQ ID NO: 2837 - DNA, 1569 bp, Saccharomyces pastorianus
atgaatacgaaagtaccagaatttagcgctttaaccaaagaattaccaagatctctcgaacgaaaacatcccaatgttgtagacgcatttttccgcacatatggtgctaaacctgattttattgctaggtcccccggtagagtcaaccttattggcgagcatatagattattgtgatttctcggtgttgccattagccattgatgttgacatgctttgtgcagtcaaagtgatggacgaaaagaatccgtcgatcaccttgacgaacgcggacccgaaatttgctcaacggaaatttgatctacccttagatggctcttacatctccattgatccatccgtgtcagactggtcgaactactttaaatgcgggttgcatgtagcacattcgtacttgaaggaaattgctcctgaaaagttcaatggtacgcccttaattggtgcacaagtcttttgccaaagtgatgttcccaccggcggcggtctgtcatcttcagccgcatttatttgtgcggtagcattgggcaccatcagagccaatatgggagtaagattccatgtttctaaaagagatttgactcgtatcacggtagttgctgaacattatcttggtgttaacaatggaggtatggaccaagcgacgtccgtttatggcgaagaggaccatgcattgtatgttgagttcagaccacaactaaaggctacaccattcaagtttcctcaattacaaaatcacgaagtcacgtttgtcatcgccaacacgcttgtagaatccaataaattcgaaactgcacccaccaattataatttaagagtgatagaggtgaccatcgcggccagtgcgttggcgaccaggtacggtgttgctttgccatcccacaaggagaattccaattcagagagaggcaacttgagagactttatggacgcctactatgcccgatacgagaaccaagccaaaccgtggaatggcgatattgaaaccggaattgaccgtttgaacaagatgttagaattggtggaagagtcgctctccgacaaacaagaagggttcaccatggatgatgctgctgaagcgttgaactgttcccgtgaggagttcacaagagactacttgatgattttccccgtccggttccaagtcttgaagttgtaccaaagagccaaacacgtttactctgagtcgctgagagtattaagggcgttgaagctaatgacaagcgccaggtttcaaacggacgaagatttttttacgcagtttggccgattgatgaacgagtcccaagcttcatgtgacaagctctacgaatgctcgtgcacggaaaccaaccaaatttgctctattgcccttaccaacggctcttatggttctcgtctgattggtgctggttggggcggctgcaccgtccacctcgtccctggtggtgctaacggtaatatagaacaggtgcgaaaggcgctaatcgacaaattctacaaagtcagatatcctgatatcaccatgaaagaattggaagacgccatcattttttccaagccagctttgggcagtagcctgtatgaactatga

SEQ ID NO: 2838 - DNA, 1935 bp, Saccharomyces pastorianus
atgagagcatatgggaggaggggtccagtttttagatcctctttaaaatctaatagaggatcgtcatcgtcttctaatgtggaatttagcgatgatgatgtgaattctattattcccgacttaagttctactatgtctagcagtatagcagatcatccagttgaagtatttttggataaacatgacactggtgagcacgcctcaacttcatttgttaatatcaatgaagatgccctttcacagaactcaaaggagagtatacaggatgttaaaactatcactagtgatgatacttctttggtccttatgaagaaggagaagttaagcgcattcgattttcttgatggttcaaagacctctaaaagaaagaaaaggaggacataccaacggcacgacacaagcatagagtcgtcaatcgaattgaatggacaagatgaagacgctgttatgacgcaaaatgaatcagaatcggcaaaacaaatatacaatgatatcaacgagtttatattaaacctaccgaaggcggacgatgatgtatttgataaaatgttcgagaatgaattgaaggaagataacgttgaagaagaagatacgagtactcttaaaaacagaaaatatggaaaatttcgaaccatcttaataaacaaaaataaagatgatgaaatagcggaagaagaggacgatgatcagagagctaacacgataagtaaaaacaacggtgacagcagcaacactgaaaaagaagggctgtcttcaacacatcactacaatgagttaaaaaatatgggagatacaatcaaatatcaagacgatattgagtttttcttatcgaattctaaaaatgacaataacgatgaacagtcaattaacgattacttcaaaatacttctgaatttatctctgatgataattaatgatgacggatttttccaatatgcaaaaagatatttcaaaaaggaagtaatcaagctcgttttttcacgagtaaaattagattttgctgaactgttattattacagggctatttattaaataaggtcagtgaatctcaatgcgatttcccctttaattttgaagttttttctattgaattaagtcgaaataccagcaaagtaagcaaaagaaataaacatatgaataagctatcctccttgaatttcgaagattttcttcgtaaaacccattttaaaacggggctttcctattcattatcactttggagcatatatgggaaattttcgaaagatatagtaaagagaatttctactgtagcttcggacaggtatttgttcaatcaagatatcaataaaattcttcatctgttggaaaaaatagtgtcaagttctacatttggcctcatattcataaagcaacctgatatgttagatggcgtagttggcaatataaaggaagaattcaaaaatatggtcgataatgattccctgattaaggtcttgattttattgactaatatagagggatatggacatagcttgaatgaagatatggatgcgatataccaagactcgatgaatacaatcttgaacggcatttacccattaatcgatacaaaagtcgacatcattctgttacatttagggctatgtttaaacatttgcggtagaaaaagtagttgtttgaaagttgatgaaaaattatggcgtaatatgaaagctacttttgtaaaaatgatccttgatgattctgaggttgaaaatagactgacccaaggtttgttttatctaaattttgcatttgtagttaaccaacaaaaagatggcgatttaaattcgaaagatctcaacaagctgttggtagaattggaagcatttaaattagaaacctcacaatttaatgtaggtatttcaaataaaattgaagccgcattgcattacttaaagtcggcctataaaaggggaagaagtactagttag

SEQ ID NO: 2839 - DNA, 1203 bp, Saccharomyces pastorianus
atgtccacgttcaaaagtctcgtgttcaagagattcaactcaaatctgaagaaaacggccctacatgatcttcatgtgtcgctaggcggtacgatggtgccatatgcaggctatagcatgcccgtactatataagggacagacccatatcgaatcgcataattggacgagaactaatgctggtttattcgatgtgtctcacatgctacagagtaaattatcgggtccacattccattaagtttctacagcatgttacacctactgatttcaatgctttgcctgttggtcacgggactctgagtgttcttttgaacccagagggtggtgtcgtggatgataccattgtcactaaggaaaaccaagacaatgaattttacatcgtgactaatgctggctgtgcaaagagggacaccgagttccttcgtggggagttgcaaaacaaccccgcattggactgtcaatggaaaattattgaaggcagatctctcttggcgttacaaggccccaaggctaaagatgtcttggaaccactattggaaaaaacggctaagggcaaaactttgaaagagttgttctttggacaaagagacgaatttgcattgaaggatggtactttggtccagattgctagaggtgggtacactggggaagacggatttgaaatcagtgtgcccgatgagaaggctgttgagtttgctgaacagcttctagcgaaccccgtaatgaaggctatcgggctagccgctagagacagtttgagaatggaagccggcatgtgcttatacggccatgaattagatgaaactattacacctgtagaagcaggattgaactgggtgatttccaagtcaagaaggaacctaacgaatgaaaaggaccggttcaacggatacgcaaagataatggatcagttaaacaacaagacgtataacaggatacgagttgcgttcaaatacttaaagaagggccctgctgccagaaacggtgtcaagattttcttgcccgatgctcaaaccgaagtcggtcttgtcacatcagggagtgcatcccccagtttaaacaacatcaatgttggtcaagggtatgtggagaagggccaccacaaacggggtacggagttgctggttcaagtgagaaacaagttttacccaatcgaacttgcgaagatgcctcttgtgcctacacactactacaaaaactag

SEQ ID NO: 2840 - DNA, 1776 bp, Saccharomyces pastorianus
atgtctcaacaagataacgttaagtccgccactgaaggtgtcgctaacctacacctcgatgaaaccaccggggaaatggtctccaagtctgaattgaagaagcgtatcaagcaaagacaagttgaagccaaaaaggctgccaaaaaggcaactgcccaaccaaaaccagcttctaagaaaaagacagacttattagccgatctggatccatcgcaatatttcgagactagatcccgtcaaatcaaagaaatgagaaagacccacgaaccaaatccatacccacacaaattccacgtttccatttctaatcctgaatttttggccaaatatgcccatttgaaaaaaggtgaaaccttacctgaagaaaaggtgtctatcgccggtagagtccatgctaagagagaatccggttccaaattgaaattttacgtccttcatggtgacggtgttgaagtccaggtaatgtcgcaattgcaagattactgcgacgcagcctcttacgaaaaggaccatgaccttttgaaaagaggtgatatcgttggtgttgaaggttacgtcggaagaacccaaccaaagaagggaggtgaaggtgaaatctctgtctttgtcagcagagtccaattgttgactccatgtttgcacatgttgcctgccgaccatttcggtttcaaagaccaagaaaccagatacagaaagcgttatttggacttgatcatgaacaaagacgccagaagtcgtttcattactcgttctgaaatcattcgttacattagaaagttcttggaccagaggaagtttattgaagtggaaactccaatgatgaacgtcattgctggtggtgccaccgctaagccattcgtcactcaccacaatgacctggatatggacatgtacatgagaattgctccagaactgtttttgaaacaattagttgttggtggtttggaccgtgtttatgaaatcggtagacagttcagaaatgaaggtattgatatgacccataacccagaattcactacctgtgagttttatcaagcttatgctgacgtttacgatttgatggacatgactgaattgatgatttcggaaatggtgaaggaaattaacggttcttatatcatcaagtaccatccagacccagctgatccagctaaagaactcgaactaaacttttctagaccatggaaaagaatcaacatgattgaagaattggaaaaagtattcgacgtcaaattcccagccggtgatcaattgcataccgctgaaactggtgaatttttgaaaaaggtcctttccgacaataaattggactgcgcacctccactaaccaatgcacgtatgttggacaagcttgttggtgaattagaagacatgtgtatcaacccaactttcatcttcggtcacccacaaatgatgtctccattagccaaatactcaagagatcaaccaggtctatgtgaacgttttgaagtctttgttgctacaaaagagatttgtaacgcttacactgaactgaatgatccatttgaccaaagagcacgtttcgaagaacaagctagacaaaaggaccaaggtgatgacgaagctcaactagtcgacgaaacattctgtgacgctctagaatacggtttaccaccaaccggtggttggggttgtggtatcgatagattggccatgttcttgaccgactccaacacaattagagaagtcttattgttcccaactttgaaacctgatgtattaagagacgaagttaagaaggaagaagaaaaatga

SEQ ID NO: 2841 - DNA, 606 bp, Saccharomyces pastorianus
atggagcaaatattatataaccaaagtttaaaagcccctacgatttctgtgtttcagggaatagcttttctgaaagttttaattttttctattttccagcagctgctttataacccaattttgcaagtatttcacacgaaagtcccagttgcgggactcgattcatctgcgtttttcaaaagcgattggagtgaaccctcgagttatattagtcttaaccaggactccctaaatgctaccaaatacacgttcatagtactctttaccctgttcagaatggcctcgtatattatttataaactatctgatcaagactgccggttgtgcgattctttggattttcgccgtttcaggtggagtgaaaagaggaatacaaatagaaagaggagtctttcgtttggtaaagtttatctaacgaaatcggatatactaccaatttcaactggtaacggcttaggaaatagatttattggcctggcatctaacagatctttaaaatgcttccaaaaaatggagcgtttgaataataacaatactgaaaggtattcggtaccaaaaactaaagcgataaacgcacttttatggcgagagcaacagacttgttag

SEQ ID NO: 2842 - DNA, 3108 bp, Saccharomyces pastorianus
atgatgggtgaaaacaaggataagaagctggatttatcttcattgaggaataagatttcttcgaaattacaagataataacaataagaaggcgaagaaggcccaaaaaaacaagaacgcaaaggaaagcatggtcgaaaagaaaatggacgaagatttgcgccgtgaagcgttggctttgggtgctaatgaagaggatctaaagttgattcaaggattaagtgatgatgacgaggacagtaaaagcgagcaggaattcgatgctgctgcggacgagggtgcaaacgataaagtgtttaaaaatgatctccaagacttcatgaagaatataggttttgacaaacacaagctcgaagacgcgaatgatgacgacgtagaaggaaatacctctagctccaaggaatttgaaaagcctgtacaggaaaagaaaaaagaacagaaacctgttgccgcagccgaacaagaggtaaaagaagaagaggaagaagaagaagaagaagaagaagaagaagaagaagaagaagaagaagaaaaaatagctaaccttagttcagaccaaaagtcagaaccaaaatcagcagaaaaagaaaagaaagaaaagaaagatagcggtttaattacacaaacaactatcatttcatctgataagctaaccatcccttatgacaaaccatggtatgaaattccattggattctaaagtagaacaaagtgaggacgttgcggaattatccaaggatcaaattgaaaagctttttgaaagaggtaaacaaactttggaagccgataatcaaacctactatgaagaattcacaaaagattcatcacaggcaaagtttatgtcccaaattttatcagatggtacacttaacgataaaatatcggctgtgacattacttattcaagattcgccattacacaacatgaaatctttagaaactttggcttcctattgtggtaaaaaatccagaaactcggctcttcaaagtttaaactctttgaaagatttattcttaagtggtcttttaccaaacagaaagctgagatactttaagaaccaacccggtttgtcaatgatgctaaataaaacaactttggccatcttctactttgaagactatttgaaaaaattgttcttccgtattttagaggttttggaagtgctatctcatgatcctatcatccacgtcagattacaagtattaaaccatgtttttgatctattaaccaatcaaccagagcaggaattcaacttgctaagattaggtgtgaataaaattggtgacattgattccaaagtttcttcaaaggcttcatatttattattaaagttggaacaggctcatccaaatatgaaatccattgttattgatgctattgttgatatctcattaagaccaactgctgactatcacaccacctactattctgtcattactttaaatcaaacaatcctgaaaagatcagaggactctgtagctaacaagttggtgaaaacatatttcacgctctttgagaaatttctaatcaacactgataaagatcacaccgatggcactgcaaagagcaaatcaaagacatacgaggaaaagaggaagaagaattttaaaaagggtaaacatggcggtaagtctgtaaaagttgaaaaaacagaaagtgaagtcctcgatgaaaagaactcaaaactgttcagtgctttattgacaggtatcaaccgtgcgttcccttttgctcaaatcccagcatcggtgtatgaagttcatatggaaactcttttcaaaatcacacactcttctaatttcaacacctctatccaagcattggtattaatcaatcaggtcaccgtgaaggctgcattgaatagtgatagatattatagaacattatatgaaagtttgtttgaccctaggttagtgaattcttccaagcaaggtatttatttgaatttacttttcaaatcattaaagcaagacgcatcaaatgtggaacgtgtagaagcatttgtgaagagaatcctgcaggtgtgttttcattggctgaacgttggaactattgccggtttctttttcttattgatccaattagctaaaacagttccacaaattaaaaatcttctgacgaatacaccagttgatcatgaatatgaatccgatgctgaagaggaacaagcaagtaaagatgatagaagaaagcaatacgatggccgtaagcgtgatccaaaatttgccaacgcagacaaatcttctttatgggaaatcaatcaattcaccaaccatttccatccaactgtacaaacatatgctagcgcctatgtcacaggaactgcagagcagataagcaaaccggatttaggtttatttacattatcgcatttcttagacagatttgtctacagaagtgccaaacaaaccaacgccacaaggggtgcatctattatgcaacctttgtttagtggttcacaggtcagcaactctgttttagtcaaggcgtctgatgtgacgcttgaccagaaccctgtaaacactgaaaactggttaactaaaaaggtagaggatataaagcctgaagataaattcttttaccaatatttcacaaccaagaagaccgctgacagaaaggggaaaaaatctgataaagaatctaacttcgatagtgacgatgaaatgaatgaagatgaaatctggagtgctttggtcaaatcgagacctgatgtagaagacgatagtgatgacagtgaagtcgactttggcgaagaagatttcggcgaatcaagtagtgaagaagaaggtgaactaaacgcaatcgaagaggaggatggtgaaggcgagcaggaaagcggcgacaaagacgccttcgatgaagatatattctacagtttcgatggtgaacagaatgctggagacaagaaacgtacctttgctgaaagtgaagaggatgatgaaaaagaagaagaagaagaagaggaagaagaagaagaagaagaagaaaaagataaggaagctgctgcgaaaagagctaagaagaagcaaagaaagagtatgctcaaaagcctaccggtatttgcatctgcggacgactatgctcagtatttagatcaagactcagattag

SEQ ID NO: 2843 - DNA, 1623 bp, Saccharomyces pastorianus
atgagtagcaagaagtttgttgtccgaattgcagatgcgcttttcaagtcatcattggctaagaatactccacctgtttatccacagaggattgagcattttgaaatcttacctagcgaaaaatgggtcatatggggacctggaaaagccaagtttttggatgtactaagtaataaatatatctgcgagcccccactatctttggcattcggttttttaaagaatacttcgtacattttgccgagaattgagcaagttgctttcaaaggcgttttacccactgctcatttgagtgccagatacgaattttttaaggatgactatgaccaaacgtgcaaacaattcatatttgataaggctagtggatcaaatgcagtttcgtataaagtggccacaaacaatcgtaggataaacatggagctgtatgatattctaatcgagaacttaagactaaccactttacaagataggtgggtaatgggattgagtaatggacaaatgaggagagcaagattagcccgtagtattcttaaggaacccgacttattactaattgatgacccatttttagggttagatccaagtgcaacagcgacaatctcacaatttttggcgaattatgaaagtatgccagtaaatagtagttgcccaattgtcattggtttaaggtaccaagattctattcctaagtggtgtacccatgtatgttgtgtcgatgaacagaatggtatattgttccaaggcccaatccaaaagcttcaaaataaaattgatgaaaccaaatcatgggcacagaaagaattacaagagtcccaaataaacagctattccaaaggagatatttctattaacgatttactttctgtacatcccatgtttgggaagggtgaccatgaaattatcaagatgcctcacgttatagaattagacggcttgagtgtttcgtacaaaggtgaggctattttgaaaagcttgcactggaaagtccaacctggctcaaaatggcatataagaggagataatggttcaggtaaatcgaccttgttatctctactcatggcagaacatcctcaatcgtggaactcaaaagtgattgaaaatggtattccacggagaacgggcaaaacaaactatttcgacattaatagcaaaataagtatgtcatcacctgaattacatgctatttttctgaaaaatgccggaaggaggttaaatgttagagaaagtgttgcaactggctatcgggatgcgtcctcaaacaatttcttaccggtatggaaatctttagacaaaaatgctcaaaaaattatcaacatgtatctaaggtatttcaacttagaccaaattgctgataatgttcccttcgaacaattaactgttagtgatcagaaattggtcctttttgttaggagtttgatcaagatgccgcaaatattgattctcgatgaggccttttccggaatggaagttgaacccatgatgcgttgtcacgaacttttaaaacagtggccagggacagttcttgtagtggcacacgttgctgaggagacgccacaatgtgaccattttttgagacttatatctccaggggactatgaagttggcgacatcaaagaaaactag

SEQ ID NO: 2844 - DNA, 2979 bp, Saccharomyces pastorianus
atgactgtaaataacacccagaaagattccaatgcgaatcaacaaacaggcagtagcataattgacgaaaacgattcagtttctgaaaaggacaacgatgataatactgtaaacaccacggaggtaactaaaccaaatgagagcactggttacttaccacaaccaagtagtgaagcaggcctccaaatagataaaagtgtaatagccgtaagcgatatggaagccgaagaagatggtaaagaagaagatgataaagaagaagaggctgaagacgatgatgatgatgacgatgatgaaccaccattgctaaagtacacaagaatcaaccaactcccgaaaaatttctttcagagagactcaatatcttcatgtttatttggtgatcatttttttgcatttggtacgcattcaggtattttacatctgactacatgcacattcgaacccatcaagacaataaaatgccatagatcttcaatactttgtatcaatactgatggtaaacattttgctacaggatctattgatggcaccgttatcattggatcaattgatgatccgcagaatataacacagtttgacttcaaaaggcccataaattcagtagcattgcactcaaattatcaagcatcaaagatgttcgtttccggtggaatggctggcgatgtggtattatcccaaagaaactggctaggtaataggattgatattatcctaaataaaaagaaaaagaaaaagatcaagaaagacaatcaacagccggatatgaagggccctattatgggaatatacactatgggagaccttattttatggatggatgatgacggcgttacgttttgcgatattccaactagatctgagcttttgaacatatcattccctacacagattttcaacattcagaatgtcagaccggatcttttcagacctcacgtccatttcttagagagtgatcggattattattggatggggatccaacatttggcttttcaaagtttcctttgctaaggattcacactcgaacaaatctagtgactctacatcgcaaagtaataatatgagtcatttcaaccctactactaatttcggctctttactgtcaagtgccgcctcaagtttcagaggtacgccagataagaaagtagagttagaacgccattttacggtatcgatgctgattgctgggttagcatcatttaaagatgatcagttattatgtctgggatttgatctagacatccaagattgcactgatgacaatggaaataacaactccaatctaggtaaccagtcaaaaaatttactgttcaagggaaaagccccggaactaaaaattgtcgaccttttcaatggtgatgaaatatacaacgatgaagtcataatgaaaaactacgagaaattatcattaaatgactatcacctgggtaaacatatagacgaaaccacgccagaatactatttaataagttcaaatgatgctatcagagttcaagaactttcattgagagaccactttgattggttcatagagaggaagcaattttacaaagcctggaagattggtaaatacgtaattggatcagacgaaagatttagtataggtttaaaattctttaacactttggtaaccaagaaggattggagtacactgatcgatcatttaaacattatcttcgaagaaactttaagctcattagattcgaactcatatgaaacttccaataaagtgttgctacaatgggcagatataatagaagtcttgatcaaatcaggaaaaatagtagaaattgcacccttaatccctgagaaacctgttttaagaaagtcggtatatgacgatgtattgcatcattttttggtgaatggaatgattaataaatttcatgaatatattatcaaatgggatctgaaactcttctctgttgcacattttgaagaagagctagaaacgaagatagagaccgccaatgaacccacagtcttacacgatgaagtggattccgatattacttatagaacagaattagtccttttatatctaaaagagaacaaatatacgaaggcaataccacatttattgaaagctaaggatttgagggccttagctattataaaatcacaaaatttgttgccgcagtatctagatcagatagtagatatcattctcttgccttataagggcaaggtttctcatatccctaaactatcaatattcgaaattcaaactatcttcaacaaacctattgatttattatttgagaatagacataccatacccattgatagaatatacaaaatatttgaacatgactgtccaaaggactttgacaagattctattctcctatctaataaaatttttagatacagacgactcctttataataaatccttacgaaaatcagcttattgaactttattctgaatacgatccacagagtctcttgccctttttacaaaagcacagtaattataatgtagagactgccatcgaagtttgttcctccaaacctggtctgtacaacgaattgatttacttgtgggggaaaatcggtgaaacaaaaaaagctttatcattaattatcgatgagcttcaaaacccacaattagctattgattttgttaggaactggggtgattcagatctttgggaatttatgattaactatagtctagataaaccaaattttacaagggcaattttaacatgttctgatgaaacaagtgaaatatatttaaaagtaatcagaggaatgtcgaatgatttaaaaattgacaatctgcaggatatcatcaggcatattgtccaagaaaattcgttgagcttaaaagtacgcgataatatattggtgatcattaacgatgaaaccaataagttcgccaatgaattcttgaagattagaagtcaaggcaaactatttcaagttgacgaaagtgacggtgaaatcaatgatgatctatataacgtgttttga

SEQ ID NO: 2845 - DNA, 1482 bp, Saccharomyces pastorianus
atggataggtacggacacatagctcataaagaaggcaatgtttgttattacataccaagactgttcaactacaacgactattataatgggttagaagacgtaagaatgtttattggcgacttgaaagaccagatgagatcttctccatttgtttgccaaaactattatgatgagcggctatcgatattattctggaaaaaccatcctttgcaacaaatacatcttctcgggtgcatcgttgggctccagtataaatggatcggccagcaggaatacattttctttcaactagatgactgtacatcgggctccacatcagagagtttcagtgatgacgcaaagtttttaacttgcaaagttaccaaggatgtcattatgtcatgtgggctgaagataactgatttggcaggtttaactctccacatttatgggagagtaagtttaaactatcaggagttgcaagttgagtatatgaaagtgtgttacactttaacggaagagatagagcactggaaaatgacaatgaatacgcgtgagaagcttaataatacgtggtccctaagcgactctgttgtagcagaactattcacgcaggagcaagagttgacgcctgagaagacccggtccgagatggcggaacagaattttgttaacttgggatacaagactcctgaaagtaaaagaaataaaaccactttcatcgagcaactgcaagaagaacgtataaaggatgaattggaaattacaagcccgtataacagcaccaacacttcaaatagcgttcattctttatcgtttcaatttgtatcatcgctcaaagatttacctgacctggatttcatgaactcttctaaccagatcgaaaatgatggcgaaaactctttgaatgtagtaggatccaaaagcatgaatcctccagtgacggtatcaaataaggcatctgcaaagtcaagcatgatgctaatcttatcagaactacgaatgaaagagatttctagcttcgatctttaccagttacaggaggtaaggagagtggtcgctagtttagccttgtttcaatttcagcagcaaaatttaggcatcatcaaatctttcactactctagagaatgaagcattccagaacttgattgacaaccttgtcaagctgggtttggtcaacttgagcgatatcaaaaataatgtactagacttgctacccttgagaaaacttttcgattacgctcagaaaaggatatcagtactagtgaagctacaatgctataccggtactatcgagctgtatcatgttcaagaaaagctacatctgccggatataacgataagtggtatcatcgatgtcttcaaagaatgcctcaaacagacaacaaaacagtatccacaaatgctgaagagctggtggattgatctaaatggcgagggagaactgaagggtcagaataatggaatatcactgcatttggaatatgtcacgaactcatga

SEQ ID NO: 2846 - DNA, 4845 bp, Saccharomyces pastorianus
atgtcaaatccctccaaacccacatctccctttggggatgatagcgagcatcaattaggatctgcatcaaacgggctaccgcccatgtcacccttcgatgatagttttcaattcgaaaacccaggtaaatctcatggaagtattgagttagcaaagaccaatggttccattctaaaacgacaatccaagccaatgaaagatattggtacacccgatctatcaaaagtgacctttgatggaatcgacgactacagtaacgataatgatattgacgacgatgatgaatttaatagtaaaaaaaacgagattcatgagcatgcaaatgaagtatatgatgatatccattcgttccaggcaacaccaatacctaattcaggaggatttgaggatgttgagctaaataacaacgagaataacaataatgactcacaaacagaacatgaattgaaaagagtacgcttcggtacaagaagaaataagttcggcagaatggatgtgaataggtcgaaaaccttaaaatgggccaagaagaattttcatgatgccatcgatgaattcagtactaaagatgataccctggataattcagcctttcagaacagatcagatgaattaagaactttgtactacaatttgcctttgccagaggatatgttggatgaagacggcttaccaaaagttgtttatccccgtaataaaatcagaactacgaagtacacaccgttaacatttttccccaaaaacattctattccagtttcataatttcgccaacatttattttctatcactgttaatcctaggtgccttccaaatttttggtgtgacaaatccaggatttgcagccgttcccttgattgttattgtcattatcaccgccattaaggatggtattgaagattctagaagaactgtattggatttggaagtcaataatacaaggacgcatattttaaccggtgtgaaaaatgaaaatgtggcctttgataatgtttccctatggagacggtttaagaaggcaaatactaaaggtttaataaaggttgttgagtatttttctgaaaatcttaccgctgctggtaaacagaagaaactgcaaagaaaaagagaggaactacgcaggaagaggaactcaaaaagttttggtcctcgtaattccctggattctatcggtagttatagaatgtctgtggactatgctcgcccctctctagattacgataacttgaaccaaacaatatctcaagcaaataacaacaagtacggtgatgacgaaaatttggtcgatagatcactgcaaccaagtcccgattgtagatttgccaaagatttctggaaaaatgtgaaggttggcgatatcgttcgtattcacaacaacgatgaaattcccgcggatttgatcttactatcgacttctgatgtagacggtgcttgttatgtggaaaccaagaatttggatggtgaaacgaatttaaaagttcgtcaatcactaaaaagtaccaaaagtatcaagagttcgagagatattgccaggacgaaattctgggtagaaagtgaagggcctcatgccaacttgtactcctaccaaggtaatgtcaaatggcaagatattcaaaacggtggtgtcaaaaatgagccggccaatatcaataatgtactgcttagaggttgttctttgagaaataccaagtgggttatgggtatagttatgtttactggtgatgacactaagatcatgataaacgctggtgttactccaactaaaaaatctagaatttcgagagagttgaactattctgttcttttaaatctcggaatgttattcatcttatgttttactactggtatcattaatggtgtttattatacgaagaaatctcaatcgagagtgttttttgaatttggtaccattggaggttctgcatccacaaatggttttatttcgttctgggttgcagttattctttaccaagttccaatctccttgtacatttctgtggaaataatcaagactgtgcaagctatattcatttacactgatgttcttttgtataatgccaaactagactatccgtgtacaccaaaatcgtggaacatctccgatgatttgggccaaatcgaatatattttctcagataagacggggacgttgacacagaatgttatggaattcaaaaaatgtacaatcaatggtgtatcctatggacgtgcttatacagaggccttggctgggttgagaaaaagacaaggtattgatgttgaatcagaaggtcatcatgaaaaggaggcaatagcaaaagaaagggaagtcatgattgatgaattaagatcgatgtgtgataattctcagttctctcctgatgaattaacttttgtctctaaggaaattgtagacgatttgaaaggaaccagtggtgatcatcaacaaaagtgttgtgaacatttcctgttagcgcttgcattatgccattctgttcttgtggaaccgaataaggacgatcccaagaaactggatattagggcgcaatcacctgatgaatcggctttagtgtccaccgccagacaactgggttacagtttcattggtaatgcgaagaagggatcaattgttgaaatccaaggtgttcaaaaggaatttcaagtattaaacattctcgaatttaactcatcaaggaaaagaatgagttgtattatcaaggtttctggtgccacatcgagcgatgaacctaaagcgctcttgatttgcaagggtgcggattcagttatctattcaagattgcaccgtactaaaaatgaccccacgctattagaaagaacggctctccatctagaagaatatgccacggaaggtctaagaactttgtgtttggcacagagagaactttcatggtccgaatatgaggaatgggtcaagacctacgatgttgcggctgcttctgtgactaacagagaagaagaattggataaggtcacggatgttattgaacgtgagcttatccttcttggtggtacggccattgaagatcgtttacaagatggtgttcccgattctattgctctgttggccgaagctggtatcaagttgtgggtcttaacgggtgataaagtagaaactgctattaacattgggttttcgtgtaatgttttgaataatgaaatggaactgctagtggtaaagactacgggagaagatgtggaggagtttggtagtgatcccacacaagtggtgaacagcctagtgacaaaatacttgagagagaaattcaacatgatcggctccgaagaggaattggcagaggccaaaaaggagcacggtttaccaaaaggagatttcgcagtcatcattgatggtgacgcattgaaggtggccttgaacggtgaagatatgagacgcaagtttttgttattatgtaagaattgcaaagccgtcttatgttgtagagtatcaccagcacaaaaggccgcggtggtcaagctggtcaagaatactttggatgtcatgaccttggccatcggtgatggttccaacgatgtggctatgatccagtctgcagatgtcggtgtaggtatcgccggtgaagaaggtagacaggctgtgatgtgttctgattatgccattgggcagttcaggtacgtgacaagattggtgttggtgcacggtaaatggtgttataagagattggcagagatgattccgcagtttttctacaagaatcttatctttttgatggcgttgttctggtatagtgttttcaataacttcgacgggtcgtatttgttcgagtacacgtatctgacattttacaatctggcatttacgtcagtaccggtcatcctactagccgtgtttgaccaagacgtctccgacaccgtgtcgatgctggtgccacaactgtaccgggtgggtattttaaggcaagaatggaaccaatggaagtttattttgtacatgcttgacggtgtgtaccagtccgcgatatgcttctttttcccctacctagtgtaccacaagaacatgatagtaaccaacaatgggctcggactagaccatcgttattacgtaggtgtgccggtcacggcaattgcagtcatatcctgcaacctttacattttcatggagcaacacagatgggactggttctgcggacttttcgtagcgttgtcggcccttgtgttctttggatggacagggatctggaccagtgcatcatcgagtaacgagtttttcaagggcgcggcccgaatcttcggacaacccacgttctgggcggttctctttgtcggcatactgttctgtctattgccaaggttcaccttcgactccttcaaaaagatcttctatccgagagatatagagatcatcagagaaatgtggcagcgcggtgatttcgatcgctacccagagggatacgaccccacggaccccagcaggcccagaatcgacggcgcactcgcatgcatggactttaaaaagtctatctcgctaggcgcccacctcgatgatggcattagccactcccaggaaaccattatcacagaggaaatccccatgagcatcctcgagggccaacagggcacactcaagggataccgcgtgtccacctcgatggaccgtggactgctcacacccaccacagcgcctatggacatgcccagacgatccatggccagcgcccgtggcagcaggcttagaacgtcgctggaccgtaccagagaggacatgctggccaatcgccagttggacacacgctactcagtagaacgtgcacgtgcctcgctagacttgccgggtatcacccacgcagagacattactcagccgccacagtcgcgaccagccgcgctag

SEQ ID NO: 2847 - DNA, 846 bp, Saccharomyces pastorianus
atgcccgatagcactgtgatagcttacttaggagccgggacgattgagattggaaggagcgatcttacacgcccacaagaaattactgcttggaaaagagagactattgataaggagaatgaacaagaactaagaaagatattcgaaagttattttcgaacaaacgactacttgaaaaaggaggaaatacacgttttagtactggaggatatatttatttccgtagcagaaaagagaattttttgtggcattatattagaagagctaggatgcgcttatgtgtctttcatccccagagtcctcatgtattgtctatcatatgatgttacgaatgcattagtcatagacgtaggtacaaattctactacatgtgtgcccatctttgaccttcgacctctgcaaaagtacattaggtattcaaaagggaataaaaggcgacatttactggctgatactccctccggcagcccgtacgcaacagcgttctttacaaaagaatatgacccaaaattttatgaagacgatgaagttcctgttataaatcttgcaaaatgcatcgtaaattcacttcctattgacttaaggaagcctttaagggaaaacatcattgtagtaaacgtcgaagaaaaatacaagacagtggtaaaagatttgttcaagaagcacatggatgaatctagtattcggttatctgatgattactggcgtggcgcttctatatacgcgcaaacaatcttgcatgctaaagaggaaaacgttgtaggagttggaaaagacgagtttcaaaataatcttcgtattgctccggattggtttgacttttactttaggaccggaatgaaatga

SEQ ID NO: 2848 - DNA, 3453 bp, Saccharomyces pastorianus
atgagcagtattaatgaaggtccctataactcgccaacgtttggaaaatcattatcattaaaagtagatggaggattcaacgccgtgtctatcaatccctctggtagggatgttgttctggccagccggcaaggtctttatattatcgatttggacgatccgtttacacctccaaggtggttacaccacattacaccatggcaagttgccgacgtgcaatggtcaccgcatcctgcgaaaccatattggattgtttcaacatcaaaccaaaaagcaatcatatggaatttagcaaaatcctcgtcgaacgcaattgagtttgtgctgcatggccactccagggcaatcacggatataaatttcaatccacagcatcccgatgttttggctacctgttcggttgacacgtatgtccatgcttgggatatgagaagtcctcataggcctttttattcgacaagttcgtggaggtctgctgcttcccaagttaaatggaactataaagatcctaatgtcctcgcatcatcacatggaaacgatatattcgtatgggatttaagaaaaggctccactccactatgctctttaaagggtcatgtaagttcagtgaatagtatagatttcaacaggttcaagtccacagaattaatgtcaagttcgaatgacggaacagtaaaattctgggactattcaaaaagtacaacagaatctaagagaacagtaacaactaattttccaatttggagaggacgctacctaccatttggagaaggttattgtatcatgccaatggttggaggcaataatgcagtgtatttggtaaacctatgcgacgacgatgacaatgaagaaaacaagaaaacaaaacttcagcccatatacgcattcaagggccacaatgatcgggtgattgactttctttggaggtcaaggcacacgtacaatggagattatgatgaccgtgaatttcaactggttacgtggtctaaggattgcgatttgaaactatggccaatgtctgacaatatttatgggaaggttaattttgatagaacaaaaagactcgaagaaaaactaccagactacgattactgttcgtacaataaggaatctgataatagagaaaatgttcaaaaaaatgaattcaagcgaatacgagaaaatttcataacgacttctggtttgaagaaaaataaggccaaccatattacttggctctcagggatcagaatgtataacgccaattcccaagaggatttattcaatgagactaaaattcaaaatctaggggaggaagtaagtgcaattggtcacaaattcccaaaagtggtatttgaaaagatttcagtctccacacgagaattatgtctgaccctcaatggcccttggtcagaggaaaatcctgatgaatatgttttcttgcgtataagcatcgacttttctcctaactatccaagcaaaggaaaccccccaaagtttataatagaggaaaatgcaaacctgacttcgagcaagaggcaagaaatactatccaatctggctactattggtcaaaaatataccgattcaaattattattgcttggaaccgtgcatacgttttgttttaggcgagaaggttagcttggatgatatcggagacggtcaggaacccttactaaattttgatattgctgatcatatagatttcgaagacttatcctccttagatagttcatattctgattcacaaaatttggagaacctttcttctcaatctgacacagaatcttacaaggaagcattggtattccctgacgcatcgaatccgggtttaaattttggaagaaacctagctttagatacaacaccggttccaaatggatgcggttcttgttggactgcaacagggcaacttttatgcttcttcgcaaacgacaaaaaacctgagaaaaagcaaaacaaaatagccaaattgtcccaaaaagacacagtattggaaaggcatccatttaaagtagaacctcaaattttttatgataaagaagccgatggtaatgaaaccactgctattgatgtaaaggctcgtcccaagcgttatgttgacacattgggtctaggaggcagcaataatggcgattcgagaacatattcagaagatgaatcatcttctgatgattcgtttgacagtgttgccgatgattgggatgatatattaagaaacgatataatagtaagaactaaaattccaattctaagaggtaacttcagagctttcagttcagtgcattctgaatctgggaaaacagtagaatctactaagaaaaataagaacgtgatagtttctaaagactttagtagtttactaagtgaccgcaaggaactagcattagaatacctattcatggatgttacgccagaagaattcgctagaaataacgccttagtggcagaaaagtatgagcttgacgaaattagccattgctggcaaattttatctgatatgctgatagatcaaaatgattgcgacccctataatacaatctggaataaccatcctatggggataaaatggtttataaaagaagcaatcatttattttgaaagacaacaaaacttacaaatgctagctatgttatgctgtgtgatcttgagcgcaagaaagagagtgaactcaacatataatgccgacggatattatgggcaagacttagataacacggaaggtatgattgtgtttaatgacaatgaaagccaaaacacatcgttctggaagggatcagacactttttcaaccagatctagaagtagcactgtaacaccaaattcttatgcttctcatttgagaggaaaaaacgtttacgcaggtgacaatgcttccataaggtctgatgattaccatgctcggctaaaatcgcataatacattaagtggtagcaacagattttccgagccagctcagaaacaaaatactcgtgcaaccccgtccggcgcctttcgcaataaaatgcctgatattaaggtcgagctcttacatgacgatatcatagacgcttatgaacaggaggatttcttgcacttggagccatcagacataccaaaatttcaaacttatatttaccagtattcaaaacttctttttagatgggaactacccttagaaagggttaaaatattaaaagtgagcacagactttaaaagttcttatagtactcctggaagtgtctctaccaataatgaaaacagtccttataatagaatacttactcattggatcgaaaacgagaagcttggagaggaaaagtttatcgctcgaaattgtaactattgtaatttgagagtgacaaggagtagttttatatgtggcaattgtcaacatgttttacattccgcgtgtgcgagaacatggtgggagattggcgacgaatgtccatctggatgtggatgtaattgtccagatatgtttgatgcctaa

SEQ ID NO: 2849 - DNA, 1665 bp, Saccharomyces pastorianus
atgtttgataaattaccatacgaaatttttgaacaaattgcctgcaaaatcatccaagaagataaaatctcggtagcatacgtgtctaaaagatcgtacaaaagaattgtaccttttatttaccggaacttattccttaacgaaacgtatcatgtcaagggtgattacaataactcatttggaacttgttattggtctgtcctgacctttccctttattaatgaagatgatacaaatattgaaaaccagacaccaaataaagagttagctaaaagaaaattcggttatttggtaaggtcactagcagaatctccgagtagattgtgtccgctgatcaatcgaatacgttgtacgtggcacctggatgaagatgtcatgtcagatttattgaaattactatcaaggtatggttccaatgtgaaatttgtcgaccaatttgttcgtcaatcagtaaatgacgggctagaacctttgtcaaaccaattaaagactctaactctaacaccaccaactattttaccaactcatggtagtgtatacagttcttatttagatcggattgaccatttgtacctgaaatgtgatctaactcaacttgaaaagctatctattcacgtcaatgcactgaaatattttaaaggcttaaaagctccaatgaaaatcaagtccttagtattgaatctgcgacctgacacacttaaccttccaaaatacgatgacataagtggaaatgttaaagagatacaatacagcgatatttttgatacttctgctctaaaacagctagaaatcttgtcttggtacagtcgtgatgatatccccaccgcgaatgaaggtggtcctgatagcttatacgtcaaatggggcctaagaggattctggaaatttttcaagcttgagaatctatcattagcatcattagtctacaatgaaaactttttaaagggttgtctggcagcttttcatgatttaaagaggttaaaacttgactatatgggccaatttgaatttgacgtatcgttgattagatttttatctaagcaaaaatgtggcaaaaagctacagcgtttggatatacattgtgaactgaatcaccaactctttttcccaacgacagataatccactaatgcgtttgaactttgacaacttctgtccttgttcgaggtgcaaagacaccattcatgaagtgattcttaagaaaatatttccggaaacgcgacagaaactcataaaaagctcaagcaagttccaggctcgtaacttcctatatcatatgtttttccaatacaaaattatgccatacacaaatattattgacgaaactcctgcgatggggtgggattgtgtcccgattgagacatttgtacgaaacttcaacagaaatttacaagaaaccatcaagattgagaaaacatcatcgaataacattactagagaagatgccattcggttgtatcacttatatcttcattatctaaaagatgtattcaacgtcttcgagcaaagtctgcccgacttagaatacttaacaattaacggtatacctaccaaaatcgtacaagtagacgagttacaaagctgcgcggtacctctattctataatgaaggttataagagtaattctgtctacgaattggtagatagtgactcactctttatgtag

SEQ ID NO: 2850 - DNA, 1863 bp, Saccharomyces pastorianus
atgagcgaaagcaaccaaggacaagatagaagcacgaatttatcaccaaataacatcggaaatggtggtgattcaaatggtaacggtttgccgccgaacacaaatgcggcctccactccactaaataatggaaccgaacaaacgagaaatataaccgtctccattcagtattcatattttactccagaaagattagcacaattgagcaatacgtctaacaatgaaaatagtggaagcagtaccacaacttcttcaaacacaatttctaatggtgcggggcccagctttggcattgggaacggtggtcaccaacccgacggtgctcttgttctctcttttcgagacgttcctgcatctactccacaagaccgtttgaacagctttatatctgttgccgctcaacttgcaatggaaagattcaatagacttttaaatagaccaaaaggtataacaaaagaagaatttgataagttgcctgttttgaaggtagctgatctgccggaaacggaaggacctgcgtgtagtatatgttatgaagaatatgaggaagaagacaaaatctccaaaaccaaaagaaaaagggaatctaaagataatgaggaggaatctggaaacattaaaaaacagaaagataaccaaggtggttcttttgtaggtagaaccggtactgctgacgaaagtacagctatttcggataacggttcaaactcaaatgcagcaacaatcaactcctcttcaactccgcttgaacctaaccagcctcacacagccaatgatgaggaaacaaacccaagctataaacattcgccaattaggttaccttgtgggcatgtttttggaagagagtgtctttacaagtggtcgaggttagaaaactcttgtcctctttgtagacataagatcagcgagtctgcaggggttccggtccaacaggacacagatgaagtagcggctaatgaggccgccttcgaaagaattagacgtgttctatacgaccctgctgcagagagtaacaatgatggaaccaataccgaaaccacaaacccaacagtaaatccgtccaatacaactgcacccactattggaaacgcaaattctggtgaacagattttatcaaggacaggttttttcttaatgccacaaaacggccaaactttacataatccagttcatgtgccatctaataatagtgatagaaacatatccaacgggacaaactcggcagctccaaatttaccttctaatgctaccgctcttaataacaaccaaaatccacgttgggttccgattcctctcaccttatttcaattccacagcccaaaccccagtgaccacccaacagactctacaacaaccagttccgcggacgcaaacgatacaggtgctgatgccaccagttctcagcataatagactaagagccgttttggatcacatatttaatgtagcccaaggaggatcatcagactcttcagacacagccgcttccaccactcaaacgagccaaaatcagggaaccaacggcacaacatcttctggtgcgcctcacggaagttctttcttggaaaacatctcacgcttaactgggcatttcagaaatagctcaagcgacaatcatagtagcactaacaacagaagtggccaagaagaacatgccgctacttccagcgacgatagaagtaacctgttttcctctggtgttgcaagttataggaatcagaatggtgatgttactaccgttgaactgaacgatagtagtgcttctacaaacggaaatccatctcaagaccaagaatcaaatagttcaaatacaactacccaaaacaacgcccctaatgataacaatgagcaacgttcaacttaa

SEQ ID NO: 2851 - DNA, 1611 bp, Saccharomyces pastorianus
atgtatagcaattattcacttgcgagcaacgacgcaatgacccgagcttacctggttggcacagcctcacccaaaagatccaagaaaaagcaccagcaagcaaggtatagcaaatcgccaaaaagggcgacccatctcatcaatgctgataatatttcagtactcgagtataagaatgaattgtcgacaatttcctctaatggagatgatgacatggcttcaggctcgtggaattcacaagctcctaacgattttatcaaattagcatacgtaaacgcaaagctagacccatcattatcatcagaatattttaagcaagacattataaacatcctccagagtttagaaatccatgggtggtccattaacgagcctggatcttcgttgaacagagatttattaactttgacgaagatcaaaggtgctctaacaaacgtcatttataagatccattatccaaacttgccccctttattgatgaggatatttggtgacaacgtggattctgttattgatagagagtatgagttgaagattatttcaagattgtcattttataacttaggtcctaagttagaaggatatttccaaaatggtagatttgaaaaatatattgaaggctcaagaacatcaacacaagctgactttatagaccgggatacttcaatgaaaattgctagaaagtttaaagaattacattgtaccattcctctaacacctaccgagagatctgatgaaccatcgtgttggaagacctttgatcaatggatcaagttgatagatacacataaagaatgggtcagtgataaagagagtataattgaaaatctacgttgttcaagttgggaattttttttaaagagttttaaaagttataaacattggttatataatgattccacctttacatcgaaactattaagaggagacgataaagattgtatgataaatactggcttaaagatggtattctgtcataacgacttacagcatggaaacctactatttaccaacaaggacggtgacaaggtctcgatgaatgatctaacaattatagattttgagtacgcaagcgctaaccccgttgtttttgatttatcaaaccatttgaatgagtggatgcaagattataatgatatacattcgttcaaatctcatgttgataagtacccaaagcaagatgatattttagttttcgcccagaattatataaaccacatgaatgatgaacatgtggaaattgattcacaagctgttaagaccctctataacctcatcatagagtggagaccttgtgcacaactattttggtgtctttgggctctcttgcaaagcggtaagctttcccctcaaccaccaataaaagacaagcatttgatccacgaaaaaaaagtaccgtaccgtgaatcttgtattgttacaggtgataatgacgaagttaaagaagacggtagttacgatgattgccaagatgactcgtttaactatttagggttttgtaaagaaaagatgtctgttttttggggcgacttaattacgatggggattatcagcaaagactgtgcagatgtaggaaagactgactacttagatacaaagtttctgctttag

SEQ ID NO: 2852 - DNA, 891 bp, Saccharomyces pastorianus
atgaacacaaatcagtccaatttgaacacagatttatccgatgataccaatatagaacacacgttgcaccgactgcttacccaggcaaacaatcattttgacgatacagtgaagattgatgggcacagtttggacttaggaaaagacttggaacaagttatgatggatactttggactgtaccgatatcttcgattccgatatagtctcagaaaagcatttgacattagattctctgtttcacgatgaacacaacaccgactctagcactgtcttgaatattcaaaagagcgctaatgatagcctggttgcaatagaccttgacgggcacaatcacaataatgattttattgacaagtcatcgttacacgaaaatacacatcaaaactccttacacaaagctgatagagaggccaagaaatataagatagataaaaatgttaccaagaaaaaaaagagtgtattaaacatcacaaatgaacccatgttatcgcctgcatccatatcaccttcaccttctttagcttcatccgataccaatgagtctcacttaaagatagaatctatgataactaatataacatctaaaatagattccgcaagacaagatatcgtatctgcaaccaagcctgccaaacttacaaatgagtttacaatgaaccaaatatcggaaatgaaagcaaggataattaatacgcataaattgttgctaaatttcaatttcattaaggaaggttacgccagatcttgtattcagctgaaaaagaccatggattccttaaaggatagtgaaattcatagggcacatttattagtcgaaaacgatgatttaaagcaacaagtctttgaacttactcaaaaactcaatgaaagacaacccaaagaaatctaa

SEQ ID NO: 2853 - DNA, 1647 bp, Saccharomyces pastorianus
atgtcagcacctgttcctcaattagtaaatatttctcatgccttgcaagcttccactatccagcaaattcgtttggatatggtagattttaataaagattgcaaactatcttcagttcaattggcaagaattgacaaatataccgactccttgcaagcagctttaaatcaattcaccagagacaacttgcacatcgaacggaaagatgaggatgtgactgctgcagatgttcaattatattccggcttaaaatcaatgtatttagactatttgaaccaattaataaaactaaaacaagacaaacaacaccactccgcaccccccattgccaatgatgtctcgctagacttcttcgttaaccaactacccaaatttcctatcgaggaaagaaaaaactatatcgataacttaatcctgaataaaaattgtcataatcaattatctaaaatggatgggttggtggatgctgttattaacctatgtgtcttggataatcccgttagtgaaaacgtacgatcttatatgaaactattggatacactgggttttcaaaagggtccaaacagcactaatgcaaaggcaaagctaaaaaagaaactaaccagttccaaagcaaaagtaaaagattcagaaaaggaaaaggaaaaggaaaaggaaatggacaaggacaaggataaggacaaggataagttgaaagctaaagtaagaacaaaactaaaaccttctcccctatttaataatgacggtaatacttcatattcatcatcgctaccttctgcatctgggtcttcggcaaagaaactgaagtcaggcttattcaataaaagtgaagccaaatcttcgacggacgctgtaaccgcttcttcttctaagaaaaaactatcattttctaaatatctgaataaagatgacacagataccactaaatctgggaccaaacggtcactagagttagatttcaaagttaatcccgaagtgccaacaacatctaccaatattgcatcatcgccgtcatcttcatcgtcattaaccacaacgggaggatatcctgtttcttctgaagaacccttgaagaagaaaataaaacagtcagtacaagaccccaatataaggtcaattctgagaaatggtaaatcaaagaaaacgcgtgtaagtagtattaaatttttggatgaccctcgactaataaaagtttatggtgatgacctaccgaatcacgggctacaagtttcgccagtacaactgaaaaaaatcctaaagccattcaaagaaggcgaaccaaaggaagttatactgtttgaagatatgtcaatcaagctacagcctttagagttgaattttttgaaaagcacagataatgaagactacatggatatatccgaaactaaaggtggaccaattcactgtgaaaccagaactccattaatctatagaaacaacttcaaccaattcagttcagaattaaataagagaccgccaagagagccaatagattttgatttgaatgggaacacaaattcaaacccgatcattgcaaaggcatttggtaaaaatagtctattattaaggaaggacagaggcggtttaccatacaagcatgtccccattgtaaaaagaaataagtaccctccaagacctgtacgctaa

SEQ ID NO: 2854 - DNA, 717 bp, Saccharomyces pastorianus
atgctagtagtggggttaacaggtggaattgcttgtggtaaaagcacagtgtcaaggagactaagagataaatacaaattaccgattgtagatgcggacaagattgctaggcaagtagtcgagccaggccaaaacgcatatgatcagattgtatcattctttaaagaaaaaatacctgatttattattagaggatgggcatttgaatcgcgcagccctggggaagtgggtcttcagccatgaggaggacttgaaagccttgaacggtgtaacacatccagctataaggcatgcaatgtttagggagattggatactactacctgaaaggatatagaatgtgcgtgttagacgtaccgctcctattcgaaggtaacctggattctatgtgtggagttactgtaagcgtagtttgtaaacaagaactgcaattagaaagattactgattaggaatccagaactcagtgaagaagatgcgaaaaacaggcttcgtaatcaaatgagtacggaggagaaaatggctaggtcagattatattctgcaaaatgacaccacattggtcgatttatacgaacaaatagaaagcgtcatcaaaaggattcaaccaagtaaattgagaactattttggagtacttcccacctttcggtattgcaagtgctagtagtatcattatgtccagattgctgatgaaaaagcttcagagtaagaagacctaa

SEQ ID NO: 2855 - DNA, 1437 bp, Saccharomyces pastorianus
atggatgtaaagatttgtgcactattagcgtggctgaaaaaatctgatagtttttatatagcacccaatatcaaaatcaatgattcaccagaatcgggtagaggaattgtcctaagccatcattccataaaaaaaaatgatattattatttcaataccaagctcaaaacaactaaacttccacacaatactgtatcatatttcaaaatttaacaatgatctcaatatttccggcgtcacaattgatagagacctggccgatcaagagaagaacagtgtcggcgtcggaagcagaggcccaattgatccgaggtttgagttatattctcagttgtcaaaagaatatctgctaaatttatcatcatttcaactggtatcgttatatatattggtggaaagatatctgatacccaaatggacgcacaatagaataatttcatattggaaaccgttttttgagatatggcccaccaaagaagagctgcgatccataccagctatatggaactgtgatcccaattctcagaaccgctcactgatagaatatctaccgatggctgcacgaaaccatatgactagaatcagcaaacttgtcagggaagattgggatgccatttccgaggttgttttcgaatggaatgaaatgtacggctctatactgggagttgaaaacgcaccgatctataccaatgatgaattattttccttgtttctacataattactttactataaattcaagatgcctctatgctgaaattccagtgaaaagaaatgaccgcttgagcaattttactatggtaccgtatgttgattttctcaatcacacttgcgaggtagatttgcattgctatcctcagttggatactttattaaagtcggaagcaaacgagaatattggcattgggcaatttagcattagatgcggcgagcgtctgtacaacaatatcaatgaggagctctttttgaattatggtgcacattctaacgactttttattaagtgagtatgggttcgtagtgaatgaaaatgagtggaactacctagacatctcgaacgatgttatcgaattgataaacgatgataaaatggaagtccaaacatttctatcaaaacacgattattggggcgactatacaatcaacaagaatgaaatcagctataggataatagtggcattaagctattacgtaactagagatgaaaggagggttcagaaatttactgaaggctatatatcagaggactactttaaaccaaaaattactccagttttgcaaatgttattaacttctttagttgcgacttatacaaagactctaaatcaactagaaaaaaaagcaaataccgctgaagataagctgtgtttacagaacataatcaccatttacaaaggttatataagaattcttacacatcatttaaataaccatgattaa

SEQ ID NO: 2856 - DNA, 1251 bp, Saccharomyces pastorianus
atgaaggattattcagtgccggaaaaccattctctgaatagagatgaactaagacgtcgtaaagggtacaaaaagggcctacagttatcaattttactgctgggagaaaaagggagcggtaagctaacatttctcaataacctgtgcggccaagatgtatcgctgtcagatgttgacgatagtgatatagctaaagatgcggccataaaaaacggccattcaatagaagatacgaattccgagtacaagacggcccatctaagtcctgggttaaaactcgtaactaaaagagtttacttaaatgatgaactcggagtgccgattaccttagatgttatcttattccccgggtgtggtgacaacgtcgacaattcgcaaagttcgactgtaattaaaaagtacctagaacagcaattcgaaaatgttttaaaagaagaagtcagaataatgagaaacacaaaagatactgatggcagacctcatgtttgtctatattttctcaagagcactccaaggggagtcaaaaaatttgatatcgaactaatgaaaacgatttgtgataaagtcaatttgattcctataattccaaaggcagacggtcttacagaaacggaattagccttacacaaagacatagtacgtcaggaaatcttaagaaatgatatacttgtttttgatttcaagaatgataatttgggagaaacgctgactctttatgatatggatattgatagtgatacaaaaatatcaaattactctcctaccaccaaaattaaggacatttcaccgttttcaattgtttgtagtaataccgtacatacaaacacagaaaatggtgtaaagcatataagagaatatgaatggggtagtttggttgttgaggaccaaaatacctccgattttatatacctgaaggcaatattgttagggtcacaccttcaagaattaaaagatgtgacaaacaacgtcttatatgaacgttacagggccgatgtgttaactgagaagaatatccattatgatattcctagttctagttgcatcgatgagggttctcgaggaagtattagcaatgtttccactagaagaagcaccccaagtaagacactcgggaacttgggtatgagtgatgagaacacttataacatatacaaagagatagacgaaaagaataaaataattgaaaactaccaaaaaaagattgattcactcgagaaaatgctaacaagtcccagcaagaacagagcctaa

SEQ ID NO: 2857 - DNA, 1635 bp, Saccharomyces pastorianus
atggacaagtatacggctctaattaacgatgggaagttttcaactcttacattgaatgtctcgagatatcctaaaagtctggtatattgggaaaagttattgaatcatataataaacacttccacaccaatatgcaaatccatcgaacctcaactgttagagctaataagatatacatattcttccatgctaaatgaatttccctacttggagaactactacattgatttcgcactactagaatacaagttggggaacgtttccagatctcataagatatttcaacatggattacaagcatttaaccagagatctttattattgtggatatcatacctaaagttctgcaacaacgttgtcttgaaccaaaagcaattattcaagaaatacgaaatggctgaagagttcattggtttgcattttttcagtggagaattttgggatttatatctggaacaaatccaattgagatgtgtatcctccaagagatattggagcgtcctaagaaaaatacttgagattccgttacactcctttgccaaattttatgcattatggttatatcaagtagatgatataacggatctgaaacaactatcgcaactgacaagtgaagacgaattatccaagaaactgaagataaacatcaagtatagcggaaggaaaggtccgtatttacaagaggcaaagaagaaactaaaaaagataaccaaagaaatgtatatggtagttcaataccaagtgcttgaaatttactccatttttgaatcgaatatttattccaactattacacatcatcagaaactttggtctcttcggatgaaatagaagcatggataaaatacctcgattacacaatcaatttccaaactgattctttaacacatttgaatttccaaagggctttactccccttggcccattacgatattatatggataaaatactgtcagtggttaattactgcaaaaaatgaccttgtgggggccaaaaacgttttattaacaggattgaaattttcgttgaaaaagacgaagataataaacctgctgtattcagtcctctgtaaattaaacgattacgagcttttgcgaaccctttttgaaaaaatcgaatcctcgtattctgaaaatattgaaaatgttgatgattttgaaatattctgggattatctccaattcagaatattttaccaaaattccgtgtctccaagtcgatattctgattcacaattaagtggacttttgaataaagagctatttgacaaagtttggaagcgtttgagtctcaaagaaaagaaaacgggacaagaaatcctgttgaatagcttgatacagttttattcaaaggacacaatagagtttgtagaaaaaaatgtgtttagaaagatattggcatccaattgggagtactatttacaaaacggtattttttggtcctgctattgccgcttaatttattttgatacttcgagatcgtatttagagaaaagacagtatattgtcaagacaatctggccccagatagataagaaattagcccagaatgtcttaccgtcgttaacggaattctgccagtcctactttccagaagaactggatacactggaggaaatatttaccgaaaaagcttga

SEQ ID NO: 2858 - DNA, 1371 bp, Saccharomyces pastorianus
atgaagttcgaagattgccgaattaacagctatctgataacttcgcaaattggcgaaggcgcgtatggtctggtttaccatgcaatagatattcacacccacaaagaatacgccataaaggccgttgttcaaagttctagtgctagccgtgacgtggatgtcgatggtggcggaacattcgagaagagcgccagattgcaaggaagactcgctagactctttaaagagtcaaataacattgttagactaccttccatagatctggagtcgattgaaaatatgtcggaagaaaacttccggaaactaccccactataaagagatttgtctgcatttaaaggtccatcaccacaagaatattgttactatttacgaggtcctgcaatcttcaatctgtacgttcatcgtcatggactactaccccaccgacctgtttacatccattgtagacaacaaacatttcaccaccaacggtttactagttaaaaaagttttcttgcagatctgttctgctatcaactactgccatgagcacggtgtctaccattgtgatgtcaagcctgaaaacctactactggatgccgaggacaatgtctttctttgtgattttggcctgtccaccacttccacttacatagagccaaacgtttgcattggtagttcgtactacatgccgcctgaaaggatctcatttgatagcgggaaatatcccggccctaaggtcaggggccataaattgaaaaaaaactgcccttcatgtaacggtgatttatggtcgttaggcatcatcctcattaatttgacttgtattagaaacccttggttgaaagccgacaaaaaggaggacaacacgttttactatttcaccaaggacgtcactgtcttgaaacaaatattgcctctttctgatgcccttttcttactactgtccaagattttacaattggatccgaaaaaaagaatgagtctgcaaaggatgatgaaagaagtcagttcaattacgagctttaccaatggcgggcctctgtcaaaagtaccccctctccctaggtccatctacgaaaaattcactgaccctgtcgataccaccaaaaagaatccatcgttcaaacaatacacgcatacggacgagaaaccattctattcctcgtcaaccgacgaaattgaccaagttaaagaacaagaacaagaagacagcgacagtgggagtgggagttttggaactttggatacagatactgggttccactcttcattcacaaacacatcgtgtgactccgataacgacctcaccaagcttcccaataagatgtctttgttcgaaaaaaaatttaatgagcttcatatgaatgcctcttccttgacgaactag

SEQ ID NO: 2859 - DNA, 450 bp, Saccharomyces pastorianus
atgcctgtagatcaagaaaaattagcgaaacttcaaaaattgtcagcaaccaacaaagttggtggtactaggaggaaaataaataagaaaggtaatctatttagcaataacgacaaagatgatagcagattacaaacggaaatacacaaactacatccgttgactattgaaaatgttgccgaagcaaacttcttcagaaaaaatgggaaggttttacattttagcaataccgttgttgaaattgcgcctcaatgtaatgttacaatgattcatggccaaccaaaagagaatacaattaatgggttgtaccctagtatagcctctcagttaggtagccaagagcttgattatctaacagatctagctcacaagctagaaaatgagcagacaaatctcgaccaattagttgacaatggtaccgaaacaaatgggcaaacgacaaatggttag

SEQ ID NO: 2860 - DNA, 1140 bp, Saccharomyces pastorianus
atgcaaaaccctccactgatccgtcctgatatgcatgctcagggaaataattcaatgagcgcgtgcagcacctctgacaaaggcgtaaatgaacaatcgtctcctcatactgtgcagtcaagcgtagcccaaaaattccctcataaattgaatcatactactaataacaatgacaccgatgtctctgccgtcaataatcctactcagaccccgttaccaaacctgttgcatttacctggtccaccggactacagatcaatgcaccagaaccccatacatccatcttacgttatccctccgcattcaaacgaagggaaacaatcagcttcttataacaaaccctcaaatgcccatgtaaatatgcaatcatccatggtgtttccaccaaagaattatcctgtaacctacccacatcatcaaataaatcctcccttaccaaatggacttccaaacaagaatataaattcaaacaaagactatattattgaaggtcaaccatcgtatttccaatcgcgtaatactagtattacatctgtaccccttcattttgaaaacagtgctgctagcgctactaacctagctgctagtactagcgtaagcgaaccccttgtagataaagaagtaccgccggcaggtagttcaggaaagactttgagaaatacaagaagggctgctcaaaacagaactgctcaaaaggcatttagacaaaggaaggaaaagtacatcaaaactttagagcagaaatcaaagatattcgatgatctgctagcagaaaacaattacttcaaatcattgaatgacacgttgagaaatgataataatattttaatatcccaacacgaagctataaggaatgcaatcacaatgttaaggggtgaatatgacgccttgtttaatgaaaataatatgttgaagaatgaaaataacatcgtaaaaaatgaacataatatgtcaagaaatgaaaacgaaaatctgaaaattgaaaataaacgttttcatgctgaatacatacgaatgattgaagacattgaaattacgagaagaagggaacaggatcaacgaaatgaaagagagcacctgattaaaaaaattagatcgttagaggaaacagttaaaaatcagcccagtaaaggcccgtga

SEQ ID NO: 2861 - DNA, 831 bp, Saccharomyces pastorianus
atgttcaacctaccgattagcatattgctttatttttctgtgttatgcgcagtggagcctacttttgtaagaggcaaaaatgttgtcagcttaattgcctttaaggattcagatggcaaactacataaaaggttagcacctgaagaaatccctcgccgggaacgtggtcatcacctaggttttgacgagttagaatatatgtatgaaaaaaatctgggagcgcgcgactcttcaagattatcgataaacctggacaatgttttgggaacacaacaaacaaagcaacaggaattttcagctgacttatttcctttatccttggaatcaaaactctcattattaaaggaagtcgaaatatttgcaggatatgtaagaaatgatgtggaaactttcaataaaatcagtaatcctaatgaagatttaataattattgcaccaacgaataaggctgtttcccagcttacttcgaaaccatggcaatttccgaataatattgaccagcttgaaaggaagggagcgacagaaaaggaactagatgccgcaattcaaaacaatatctccaagtttgttaggtcacatatcatcgcatacaacggtgataaaaattcctacagaataataagtccaggttgtacgctattgcagagtatcgactttatggaaaatcggaaaagcgatggagagctttttggtgatattttagtcaaaaaagatggcgacgcatattatgtggcatctacgcgagacaagaactttcacgttgtcgagaatattgaaagtggaagtaacggtatcattttgacggttgatttttctttagtttggccttga

SEQ ID NO: 2862 - DNA, 993 bp, Saccharomyces pastorianus
atgtcatctattaatttaatcaaatctctaaaactttacaaggacaagatatggtctttggatttttctcaaggtatattggctacaggttcaactgaccggaagatcaagctggttaatgtgaaaaacgatgattttgcgttaattgatgtgctagatgacactgctcacaagaaagcaatcagatctgtggcgtggagaccccacacttcgctgttagcggcgggctcctttgattctacggtctccatctgggctagagaagagactgctgacagatcgtttgaaatggacttattagccatcatcgaaggccacgaaaatgaagtaaaaggtgttgcttggtctaacgatggatattatctggcaacttgttccagagacaaaagcgtatggatatgggaaactgatgaaaatggggaagagtatgaatgtattagtgttttgcaagaacattcgcaggacgttaaacatgtcatatggcatccctctgaagcactactggcttctagttcatatgatgacactgttaggatatggaaggattacgatgatgattgggaatgcgctgctgttttgaatggtcatgaaggtaccgtttggtcttcagattttgacaagactgaaggcgtgcttagattatgtagcggaagtgacgattccactgtacgggtatggaaatacataggtgacgatgaagatgaccaacaagaatgggtttgtgaagctattctcccggatgtacacaaaagacaagtttatagcgttgcatggggctccaatggcctaattgccagcgcaggcgcggacggagtactagccatctacgaagaggtggacggagaatggagagtccttgctaggcacgaattagcccatggtgtctacgaagtcaacgttgtgaaatggctggagttgaatggtaagactatacttgcaacgggtggcgatgacggaatcgtgaacttctggtccttagaaaagctaacataa

SEQ ID NO: 2863 - DNA, 918 bp, Saccharomyces pastorianus
atggctaaagacattgaattatctgaatccgaatccaaattcatcttagaggccttaagacaaaactataggttggatggccgttcctttgaccaattccgtgatgtgaaaataaaatttggcaaagagtatggtgatgtcagcgtggaaatgggcaacaccaaagttcattgcagaattagctgtcaaattgcacaaccatatgaagataggccatttgaggggctgtttgtaatatctactgaaatatctccaatagctggttctcaatttgaaaatagaaatatcaccggggaggatgaagttctatgttcaagaataattgaaaaatctgtcagacggtcaggggcactagatgtggaaggactgtgtattgtggccggtagcaaatgttgggcagtgagagcagatgtacactttctggattgcgatggtgggttcattgatgcttcatgtattgctgtgatgacaggactaatgcatttcaagaaaccagatataacggtccatggtgaacagattatcgttcatcccgttaacgaaagagaaccagttccactgggcatactgcatatccctatttgtgtcactttttcgttctttaacccccaagatactgaagaaaatataaaaggtgcaacgaactcagaaatttcgatcatcgatgcaacattaaaggaagaattactgcgagacggtgttttaactgtcactttaaacaaaaatcgtgaagtagtacaagtttctaaggctggtggtttaccgatggatgcgttgatgttaatgaaatgttgccataaagcgtatgccatcattgagaagataactgaccaaatactgcagcttctaaaggatgactccaaagaaagaaataaatacgccgcgatgctcacatctgaaaatgcacgtgaaagttaa

SEQ ID NO: 2864 - DNA, 309 bp, Saccharomyces pastorianus
atggatacatcgaaaagctctgaagtactgaaaatggaacaacaggagaaagaaactctaccagtaaaactagttacaagccgaggggaggaggagaaggtcaagtctggtgattatatgatagatttagaagcaggtcttctaccgcacgaagttagtgagaagggtagcactttcaagcaatatcgtgatgcctttgtaggatttattgaggaactcgtcatcattgttgttatcgtattactgctgtattttttgaccatgattggtctcttctatgtgatggcgatgacaaaagttctgttttaa

SEQ ID NO: 2865 - DNA, 876 bp, Saccharomyces pastorianus
atgaacataaataggctttcctttatgaggacgccctttaacatagcgcctaagtggagagtggaggacgttttgcttctcatcattatggtggtattaaactaccccatatattaccaggaaccgttccagcgccaattttacatcaatgacctcaccattgcacatccttatgcaacaactcagcgtgtcaatgattttatgctttttgtttatagtttcgttgtgccttttttgactatactgattgtaggttccattttgggcgatagaaggcatttggtctttattctatacacgtctcttttgggtttatttctcgcctggtttagcaccagtttcctcacaaacttcatcaagaattggataggaaggctgagaccagattttctagctcgttgtgaacctcaagaagacctaccgttcgacaccttatttaccgcaatagaagtgtgtactacgaaaaaccacgaacgtttattggatgggttcagaacaactccgtcaggacactcaagtgagagttttgcaggattaggatatttgtatttttggctatgtggtcaacttttaactgaatccccagtagtacccatatggaggaaaatggtagcctttatacctttgttaggagcttcgcttatcgctctttctagaactcaggactacagacaccatttcgttgacgtccttttgggatccatactgggctatgtgatggggcatttcttttatagaagaacctttccggccattgatgatcccctctccttcaagccattgatggatgattcagatgtcacactggaagaaacgattaaccatcaaagaatttcagacgaggagctacaccctttgtctgatgacggtctttaa

SEQ ID NO: 2866 - DNA, 351 bp, Saccharomyces pastorianus
atgtcgagaatgaaagagcttttccgttctatgcacacctctaggatactattgcaagatgcaaaggtaaaactgacatttttctcaaaacccagttgtgggttgtgcgagcaagcaaaggaagtgatagatgatgtgtttgaaaaagaagagtttcataataagggaattcagttcgaggtaataaatatcaatgaccgaaaaaatgcaaaatggtggaaggaatactgctttgatataccagtacttcatattgaaaaactgggcgaccctagatcgtgtacgaagattttacactttctggaagaagacgacgtcagtgaaaagatacgaaaacagcagtcaagctga

SEQ ID NO: 2867 - DNA, 3234 bp, Saccharomyces pastorianus
atgcagcaggaaccgcctaataagaaggctaagttggtgcatgagggaaccaaaaaaagtgatgatttcaagaactttgaacagttttttttccgcctcaatacactttacacatttctaatttgcagaaagcatgttgtacctaccttcaagacgctttgtgatcctataggagctgccttgaagagagccattacgaaagaagatctagctagggtgatggctcttatgccaagggactgtgttttcaagtacatcgacgagaaccagatttataccgaaactaaaatctttgattttaataatgggggtttccaacagaaggagaatgatatatttgagctgaaggacgcggaagatcaatatgaacgtggaagatccactcagctacttatattcgagtttatagatgggacgatgcaacgttcttggtcggcaagtgataaattctctcaggtaaagatacccacctatacaacggaggaaatgaaaaaaatgatttcgaagagggaagtcctctttgaatcgagattacaggagttcatccttgagaatgaaaagcttgggcttgatccattcttcgagttgacgaaactggcgcaaaagtatattccaaaggaaagagattatgaggatcctattgaggcaatgatgaaagctaagcaagaaggtgctgagatggttatccccgatgattctggtaatccgggtatagctacaatccctcaaatgattgaaaagttgaagcatactgaattctacgcttctcagataaaacactgctttacgataccatcaagaatagctgcgtataaagacctcagttttgaactcgcaccagaagtgtatcagggattggagcacaaccgcttctatagtcatcaagcagatgccataaatgcccttcaccgaggcgaaaatgttattattacaacttcaacgtcttcaggtaagtctctaatctatcaattagcagccatcgatcttttgttaaaggactcagaatcaacgtttatgtatatatttccaacaaaggctttagcccaagaccaaaagagagctttcaaggtaatactttcgaagattcccgagttaaaaaatattgtggttgacacatatgatggggacacagagtcaagcgagagagtctatattcggaaaaatgccagagttattttcactaatcctgacatgatacatactagtgttttaccaaatcatgccaattggagacactttttgtatcatctcaagctggtggtggtcgatgaattgcacatatataagggtttgtttggatctcatgtagcactagtaatgagacgcttgctaagattgtgccattttttttatgaaaacactaacttgcaatttatttcttgttcagctaccttaaagtccccgattcagcatatgaaagatatgtttggcattaacgaagttactttgatacatgaagacggatcacccacaggtgccaaacacctagtagtgtggaaccctccaaccctatctcaacatgaacgtaaacgagaaagttttattcgagagagtgctaagattttagttcaattagtattaaacaatgttagggccatagcgttttgttatgtccgtcgtgtctgtgagctattaatgaaggaagtgcgtagtatttttactgaaattggacgagaggatttaatcacagaagtcatgtcatatagaggtggttattccgcttccgataggcgtaagatagaacgtgaaatgttccacggaaacttgaaagccgtcatatctacgaatgctttagaacttggtattgatattggtggtcttgacgcagtcttaatgtgtggttttccactatctatggctaactttcatcaacaaagtggtagggctggtagaaggaataatgattcattaacgctcgtggttgcaagcgactcgcccgtagatcaacattatgttgctcacccggaatctttattggaagttgacaattcaaattcttttcaagaattaattctggatttcgataatattctgattttggaaggacatatacaatgtgcagcatttgaactaccaataaacttcgagcgcgataaggaattttttgctgaagctcatcttcgcagaatttgtgtagagcgcttacatcacaatcaagatggataccatgctagtaataggtttttaccatggccatccaagcgtgtatcgttgagaggtggtgaagaggaccaatttgccgtcgtggacataacaaatggaagaaacataataattgaagagatagaagcatccaggacaagttttaccttatatgacggtggcatatttatccatcagggatatccgtatcttgtaaaggaatttaatcccgatgaaagatatgctaaagttcaaagagtagatgttgactgggttactagtcaaagagactttacagatgttgacccacaggaaatcgaattaatacgttctttggaaagcagtgatgttcctgtgtactttggtaagatcaaaactacgattgtcgtgtttggcttttttaaaatggacaagtataagagaattattgatgcgattgaaacacataatccccccgtcattattaattctaagggtttctggatagatataccaaaacgagtactagacatttgccaaaagaaacaattgaatgtggcaggggctattcatggggctcaacatgcaatcatgggtatgctcccacgatttatagtagcaggtgtggatgagatacaaaccgaatgtaaagctccggaaaaggaatttgcggaacggcaaactaaacgaagacggcctgctagattagtattttatgattctaagggtggtaagtacggttctggtttgtctattaaagcattcgaacatgttgatgatataatagaatccagtctgaagaggatatcagaatgtccctgtagtgacggatgtcctgactgtgttgcggcttctttttgtaaggaaaacagtttggtgttatcaaagccaggtgcccaagttgttttacattgtatcctgggacatatggaaaatgattttatagattccatcaaagatggtccggaaccaaatatgccagaaataaaagtggaaacagttgttcctgtgtcagaacatgtcaacttttcagaggatttcaaaatcattgatgtgagaaaaacaacggaagatgttacttcttctagtgatgttattaaagaagaaaaatag

SEQ ID NO: 2868 - DNA, 1050 bp, Saccharomyces pastorianus
atgaacgtgacaccgaacgcgactgctgccgctttcttcccaccggcctttggtttgaagacctcttttggattcatgcactctgcagaggcacctgcgattaatctacacatgaaggaatccttgttaccggagatgagcgatggagtgttggcgttgatcgctcccgttgttgcctactgggcgttgtccagtatatttcactgcatagacaccttccatttggccgaaagatataggatccatcccagcgaagaggttgccaagaggaacaaggcctccaggttccacgtcttcgccgaagtgatcctgcaacacatcatacagaccattgtaggatacatctttttgcacttcgagcccacccacatgactgggttcgaagagaacgctatgtggaaactgcgttccagcataccccaaatcgttccggatgtcgccctctactacggctacatgtacggaatatctgctttgaagatttttgctggctttttgttcgtcgacacatggcagtatttcttgcatagattgatgcacatgaacaagactttgtacaagtggttccactctgtccatcatgaactatacgttccatacgcatacggcgctctttttaacaaccccgtcgaaggttttctgctggacactttaggaacaggtatcgccatgatgttgacccatctgactcatagagaacaaatgttcctttacacttttgccaccatgaaaaccgtcgatgatcactgtgggtacgctctgccactcgatccattccaatggcttttccccaacaacgctgtctatcacgatattcatcatcagcagttcggtatcaagaccaattttgctcaaccgttcttcactttctgggacaacttgttcgagaccaacttcaagggattcgaggagtaccaaaagaaacaaaggcgtgtcaccatcgacaagtacaaagagtttttgcataagagagaactagaaaagaaggaaaaaatcaagaacttcaaagctatgaacgctgctagtaatgacgtcaagaaggaaaactag

SEQ ID NO: 2869 - DNA, 1287 bp, Saccharomyces pastorianus
atggagaatactactgagaacaaatcgtatactttagtaattaaactgggttcttcatccttagtcgatgagaagaccaaagagcctaagctggccatcatgtcacttatcgtcgagactgtagtcagactgagaagaatgggacacaaagtcattattgtttccagtggtggtattgctgtcggtttgaggaccatgcatatggataaaagaccaaaacatttggcggaagttcaagctatcgcagctattgggcaaggtaggttgatcgggagatgggatcttttgttttcccaattcgaccaacgtattgctcaaattttaataacaagaaatgatatattggactggacccaatataagaatgcccaaaacacaattaatgaactgttgaatatgggggttgttcctattgttaatgaaaatgacactttatccgttagtgagattaaattcggtgacaatgacactttatctgcaatcacgtcggctttgatcggtgcagactatcttttcttattgacagacgtggactgtttatatactgataatccaagaacaaacccagatgctatgccaattttggttgtcccagatctgtccaagggtttaccaggcgtgaacaccactggcggttcaggctcagatgttggcactggtggtatggaaacaaaattggttgctgctgatttggcaacaaatgcgggtgttcatacactgatcatgaaaagtgatacccctgcaaacataggaaagattgtagaatacatgcaaactctagatcttgatgatgtgaataaggtcaaaaaggcgtacgatggtgatttaaaggaactacaaaaaacagaactcaaaaaattacaagcccttggcgtcccattgcatacaaagttcattgctaatgacaataaacaccatctgaaaaacagagagttttggattttgcacggccttgtttctaaaggtgctattgttattgaccaaggggcatgtgctgccttgacaagaaagaataaagctgggctgttgccggcgggtgttattgatgttcagggtactttccatgagttagaatgtgttgatataaaagtggggaggaagttgccaaatggtgaaatagacccagaatttcctttgcaaactgtcggcaaggcaagatgtaactacactagtacagaactaacgaaaattaaaggtctgcacagcgacctaatcgaggaagagttaggttatagtgacagtgaatatgtcgcacatagagaaaatttggcattcccacctcattga

SEQ ID NO: 2870 - DNA, 1203 bp, Saccharomyces pastorianus
atgatcagtgccagtacgacgaacgttgagcacagtcacatgaacctcccacaaatgcggtcgatttggctggacgaagacgaagaggcagagaagctatacggtctgcaagcgcagcaattcatgggctctgacgatgaagaaagtataggtatcactttcatcaacagtgataagcctttgctcagcaataagaagaacatcgagttgcctccgctactgccaaagacgcacccatcgagttaccataggaaaaatacttccaattccgcggtttccaggaagccttccactcccagcgccgacaagacaaagcacaagaagggatttttcaagttcaactccttgaagaaaaaacttctaggcccaccattggacgtaagagccaagggtatctccactccatttgatttccaacacatttcgcatgctgacacccgaaatgggttccaagacgagcccgaccaacaacaacaacaacaacaacaacagcaacaacaacaaccgccactgccacttcccattgcggtcgaagacgacgccgcttcctctccaagcaaaaaccgtttaagctcactaagtaaagcttttgtcacagaaaggatccctgctaaccgtgaaagcaaactcaattcgaggtcgcacgacacgaggtcgcacgataaaaagacatcatccaggttctccgtcgctcgttccatctcggtcacttcgtccaattactctaaaaacacacagggcaacaaccattcaatcaacggcagggtcgtgtccacttccaccatggccacatccctctttgaggattctccaaatacatcaccaaagcagttcaaagccaagctacatagtctggggcataaacataccgattccacggattccagtgaatcttcgttggattttttgaaaaactacagttttcccacattattagaagacagaccaattttggatttcctgcctcgctcgcaaagatcaagcgcctaccgtagccttcttttggagactccaaacttaaataaaaatactgggagagcatttgcttccccagaacatagcccgctccccatgagaagaaactcgatagcgacgccatctccccagtctaaatcctcgtacaccgactccccagccaacttcagaaggtcttttgatgatatcctttgtttttataatcaactagaacctcttcaagtttga

SEQ ID NO: 2871 - DNA, 3231 bp, Saccharomyces pastorianus
atgatgtctgagagcaccgtagccccttcagataataatagcagtctgcaaagacttccgtctgcattaagggacgaagaagatgtcctgccatctaccaacgtccaaaaccaagctgaaaatgtccatgaagcaaacacagaaacaaatgataaagttttgccatccatcactgaaattccaattagtgacgattctgatatgaagcgacacgatgcctcggatttggttttaaatcattctcatacgataaactacaaggatcttcctcacccatcaatcagcatgttgaaaaatgatgtagaagaggtctctaaacaatgcaacgatttgaagtcagctttgctttccaaggacacttccctgactgattccgtgcaggatttgttcagttccttgaaagtcttgtcacataatcaatcggttttggaaagcaaattagataatgttatgaaaaaccaagtcaatacagatatattagtcaataatatgaacgaacgattaaataaaatgtcaacactactgcaaaacacttcaaaagcgaacccctcaaacgtttcgatagaacaatcatcacacaacacaaactcacagcataattcctcttcttcccgtagaggtcccggcagaccaagaaaagatacctcaacttccacaatgaacaaattgatgtcaagtgcggcctcagccaattccaaaagtttgtctaatcacaatgcacccctttcaccagtaaatgtttctttaccgacgaatgtagttcaaacctctaaatctaaaagatatttcgttgagccatcgacgaaacaggattcgctgctattatctgccccgtcgtcgtcaagggatgatgctgagatcactctaccttccataccacaaatagcaaactctgaaaatgggaaagaacaaacttccactgcgaattctagttcaatgacaccgacccctgttacaccaaacaatttaattcaaatcaaaagaaaaagaggcagaccaccaaagaagagaacggtggaaacaatgatctctaactccactgatacgatagaaaaatctgacttgtcaactcgaattaaaaatgagatcccgcttaactcgttgcttcctccttccaaattccatcaaattccatcatctccatcgaaccctacatcacagcaggtatcggttcgtattccaagaccagccacaaatgaagcggattcgaaaagtttagagcctctttctcccattttgaccaatgacgacgccaacgctaaagacttaaataccaatgaaactgtttataatagtattgaagaaatgattgatggcgaagccaataaaacccagaaagaaaagacaataaccatcaaagttggtgacagcagtagcaatagcaaaaacaatagcaacaataacaatgacaatatcataaagttttctgcgaactcagacatcaatagtgacattcgtcgattgatggtcaacgagcaattttcattaagttacgatgccagcggtaacatcacagttaagctgccacccgtttcctctcctgcagccgcaacggcagccgcagcagccgcagtgacttctgaaatgaatagacaacaaagagaactggataaaaggcgcgattcaagagagaaaatgcttgttaatatgaaatataatgatcgtgataaggccaagtcatttatggaatctaacaagaaactattaaaggcgatgaaagaagaagaaaggcggaaaagaatgacttcaataatacacgacaaccacttaaatttgaatttaaatgacatatccacacgttcaaagataaagaatatggaaaagccaactaccgtaggtagctcgatgtcaccaaaggtaaggccccattctcccgccgccatatccgatcttcaacgcgaagaaagcgaatcatcggaacaagaaaagtcagctgacattgacaacgagggtacgaacatgaataacgagacgcacaagatgggtctgactatgtctgctacgggagcaattcacaaagtaggaatacagtcgatgctaaattccggtgaagaagcaatagcgaacgacgatgcgttggaatatgaaagaaagcgctcaagagatgaagaaacaactacttttgttcccttagaagaatcgtcttcgttagatatggtggggagaagaaacttggacaaagccgaacaagatgatcaaacggaagatcagggcagcacgaagaaaagacgtttatctgatgaagcaaaaggcgaagaagaggaaaaagaagaagaagaagaagaagacaaagaagaggaagaaaaagacggagaggaggagagagcaactagtcataatgaaccattagccactgttgagaatgcctcaggagacgtctcaacagatttgcctgaggagactccatcgatccataatgacaccgagaatgccaacggaaatgggaacctgggcttgggcacagagtcacgcaacacactattaacggctaccccaattgaattgatttgccgcgaagggttcttctatcgaagagacattcctgacgtgcccatcaccaccggggcctatctagaattcaagttcaaggccaaagaagaggaactgatcaattcaagtatcaacgaagaagattacgccacaaaatccaagcatgaaaaaatgaacgcccattttttcaagcccgatattcaagaggagactgaacttgcctttgagatcttgagtaaaactaccttaacagagaaatacgttaacagtttagaatactttttaatggaattcagatgggaaaataaactagtcgggttaggtctcaagctcagagaatctaaaaggacttggcaaagaagaaaggcactgtttgcccttttcgaattctggagagaccaatcaagagacaaaaggaagttccataactacaccatcttgcatgcggtgaaggaaatggaaaactacaggattttcatcaatcgctccgtttcgtggttttacaaccatatcacgctgttgaaaatgatcctctatgatctctgtgacaacgtagatacccaatggagagaatggatgttccctcacagcgaggcactgccaaccttaggtcaagagggaatcaacgaagacaacttgaacgagaccatcgacaacatgctaattttcgatttccttgacgacggctcggagaacaaccaagtgaaatattcccgaatcataccgccggatgtccgctag

SEQ ID NO: 2872 - DNA, 1932 bp, Saccharomyces pastorianus
atgtcacattccggtgctgccattttcaagaaggtttcagggataatcgctattaatgaagacgtgtctcctgcagaattgacgtggaggtctacagatggtgacaagatccatacagttccattgtccaccatcgacaaactgcaagctactccaacttcaagtgaaaagatgatgttgaggctgattggtaaagtggacgaatcaaaaaagcaaaaagataacgaagggaacgaagtcttgccgaaaccgcaatctcatatgttttcgttcaacaatagaacggtcatggataatatcaagatgactttacagcagatcatttcccgttataaggatacagacatatatgaagagaagagaagaagagaggaatctgcgcaaaacacagagacaccgatgagcccctctcccgcggagacagacactccaacgccacatctggatacaccacatctgaataatggagctccgctaatcaatacagccaaactggatgattcgttgtccaaggagaaattactgattaatctaaaactccagcaatctttgttaaagggtaacaaactactgatgaaggttttccaagaaacggtcatcaatgctggtttacccccactggagttttggtctactagaattccgctgttaagagcctttgctctatccacttcgcaaaaagtagggccctataacgttttgtccactatcaaaccagtggcctcgtcggaaaataaagtcaatgttaacctgtcaagggaaaaaatcttgaacatttttgaaaactatcccattgtaaagaaagcatacactgacaatgtcccgaaaaatttcaaagagccagaattttgggcaagatttttctcctcgaaattgtttagaaaattaagaggtgaaaagattatgcaaaatgacagaggtgatgtgatcatcgataggtacttgacgttggatcaagaatttgacagaaaggatgacgatatgctattgcatccagtgaaaaaaattatagatttggacggaaatatacaagacgatccagtagtacgaggtaataggccggattttactatgcagccaggtgtagatatcaatggtaacagtgacgggacagtggacatcttaaagggtatgaataggttaagcgaaaaaatgattatggctttgaaaaacgaatattccagaacgaatttacagagcaaatcgaataatgcgaacgatgatgaagatgaagatagggacgaaagaaatgaactaaaaattgatgacttgaacgagagttacaagaccaattatgccatcatacacctcaaaagaaatgcacacgaaaagacaacggacaaggatacagacgacgtggcaccaaagaaaaaggcggatttgaatgtttctaaccaacaaatgctgcaacaattatcgttggttatggacaatttgatcaataagctagacttaacgcaagtggttcccaataaagaggtgagtaacggtatcaacaaaagagtcataaccgcaatcaagatcaacgctaagcaggcaaaacacaataatgtcgactcggcactcggcgcttttgtaggcaccacctctcaggcaaacgaatcggaagtgaaaagtgacctcccagtagacttgttagagagttgcagaatgctacacaccacgtgctgtgaattcttgaagcatttctatatccatttccaaagcggtgagcaaaagcaagcctccaccgtcaagaagctttataaccatttaaaggattgcattgaaaagctgaacgagctgtttcaagatgttctcaatggtgacggcgagcctatgtcgaatacatgcacagcctatttgaagccaattctaaactctatcactcttgccacagacaaatatgacgagtgttacgacgagtataacagctcgaacggtgctacataa

SEQ ID NO: 2873 - DNA, 3102 bp, Saccharomyces pastorianus
atgcataattctgacgggaacgacattaatacaaaaatctttaactcagttgctgaggtgtttcagaaggcacagagctcgtatgcgggacacaggaagcatatagctgttttgaaaaagatccagtcaaaagctgtcgagcaagggtatgaagacgcttttaacttttggtttgataaattagttacaaagattttgcccctgaagaaaaatgagattatcggggacagaatagtaaaattagtcgctgcgtttatagcctctttagatcgagagttgatcttagccaaaaaacaagattaccagctcacgaacgatgaagaaggtgtattttcaagatttgttgaccaattcataagacacattttgcgtggagtagagagtctagacaagaatgtcaggtttagggttttacaattattagctgttataatggataatatcggtgaaattgatgaatcacttttcaatttgttgatactttctctgaataaaaggatccacgatagagaaccaactgttagaatacaggctgtgttttgcctaaccaagtttcaggacgaagagcaaactgagcatctaaccgagctttctgatgatgaagataattatgaagccacgaggaccttggttgctacgattcagaacgacccgtcagctgaagtgcgtagagctgctatgctgaacctgatcaatgataataacaccagaccctatattttggagagagcaagagacgtgaatatcatcaatagaaggcttgtgtattcgagaattttgaaatctatggggaaaagttgttttgatgatatcgagccacatatttttgatcagttaatagaatgggggttggaggatagagagtcgtcggtaaaaaacgcatgtaagaggctcatttctcatgactggttgaacattctagacggtgacttaattgagttgctagaaaagctggaggtttctagatccccagtatgtatcaaggctatagaagccctattccagtcacggccagatgtactctccaaaatcaagttccccgaaagcatttggaaggactttaccgtggaaatctcctttctctttcgggccttttattcgtactgtttggataatgatataacagaaatgttggaagaaaactttccagaagcttcaaaattatctgagcatttaaaccattacattattcttagatttcatcaagaagatgtgcccaatgattctccagtaagtttagatgacagaactttagaatttattattgaacagctattaattacggcagaaaaatatgattttagcgatgaagttgggaggagatcaatgcttacagtcgtaagaaatatgttagctttgactgcactatccgagcctctcattaaaattggcatccgcgtaatgaaaagtttgtcgataaacgaaagagactttgtaacgatggcaatagaaattatcaacgacattagagatgatgatattgaaaagcaagaacaggaagagagaaagaaaggcaaaaaaaatgatctgtctgctaacggagacgatgatgataataacataaacgatgatgccgctaatgacgatgacgaagacgataatattgcgtccttccactctgcagtagaaaacttagtgcaaggaaacggcaatgtttcagagagtgacataatgaacaacctcccacctgaaaaggaggcaagctcagagacaattgttctttgtctcacaagatcgtcatgtatgttagagttggtcaatacacccctaacagaaaacattttaattgcatcgttaatggacactttaattacacctgcagttagaaataccgcaccaaatatcagagagcttggtgtcaaaaacttgggtttatgctgtctcttggacgtcaagttggctattgacaacatgtacattttgggtatgtgtgtttctaaaggtaattcatcattaaaatacattgcgctacaagtcatcgtagacattttctctgtgcacggtaacactgtggtggatggtgaaggtaaagtagactccatatcattgcacaaaatattttacaaggttttaaaaaacaatggtctaccagagtgtcaggtgatagctgcagaagggttgtgcaaactttttttagcagacgtgttcaccgatgatgatttgttcgaaacgttagttttatcatatttttcgccaatcaattcctcaaatgaggcattggtgcaagcatttgcattctgtatcccagtatactgtttttcacatcctaatcatcagcagcgtatgtcaagaacggctgcagatatacttttaagactatgcgttctttgggatgacatgcaaagtactgtagaaactggagctaatcgtgaggcaatgctaaagcccaacattatatttcagcaactaatattttggaccgatccgcgcaatttagttaatcaaacagactctactaaaaaggatatagtgcaactcacattcttgattgatgtgctcaagatatttacacagattgagaagaaggaaataaaaaaaatgatattaacaaacataaatgctatatttttctcggctgaccaggactattctactttaaagaagattcttgagtattctgatgatatcacagagaatgataccttagacagtgtcagcaaaaatgctctggacaaattaagaaacaatttgaatgtagtcatcgaagagattaacgaaaggtcaggaattcaaacaaaagatgaaaacaacacgacgaatgaccaatactcatccatcttaggggattcctttaataaactggcaaatggcacaccagataacagtatcgatacaactgccgaaaatgacacgggaaccaccaaagcgcctgaaaatattttagtggcagataacgcaggagaaaagaaccaaaataattccaggaaaaggacaaggtctgaaacggaacaagatactacatccactaatccagaaactactttcattcaaaacacttcagctgtaacaaagaatgtgagttttatcttacccgaagaggaagcagacgcaatgtcggtagacgaagaagataatagtccagattcctttacggatgtttaa

SEQ ID NO: 2874 - DNA, 1323 bp, Saccharomyces pastorianus
atgttgcccccaaaccaaaggccacgctcgcttctgcagaggcatcgaggcaagttgcttgtctcgctgacagggatagctgctctattcaccacagggtcggtggtgatgttcttcattaagaggtggttgtataagcagcagttgcggattaccgaacagcatttcatcaaggagcagatcaggaggagatttgaacagacgcaggaggactccctgtacacgatgtacgagctattgccggtgtgggagatggttttgaacgaaaacgacttggatttagacagtattgtcactcaattaaaggaccagaaaaaccagtccgccagatcaaacgctgacaaaagcgcagagagtctaccgttgaagacgaaagccgagttgtggaacgagttggagcttaagagcttgatcaagctggtaacggtgacgtacacagtgtcgtcactaattttattaacaaggctgcaactaaatatcctgacaagaaacgagtatttggactctgcgataaagctgaccatggagcaggaaagctccaataagctcaacaataagctatataactgggtcacatcgtggtggagtagtccagaggacaacatgggcgatgcaacggtggcgaagaagacaaagaaagatggccaggaagcgtatatcaacgagcaagctttcttgtcgctgtcgtggtggattctaaacaagggctggctgaactataacgaaataattacaggccaaatcgaaagtgagttgagcggcattaacccaagggatactttaaccctagaagagttcagttcgcacctcaccagaatcttccagaacataaactctcaaatatttcagcagaataatgatagcctgatttcaactttcctacccagaagctctggcgaacaagaattcctgctttcgcaaacgctcgacccgcaagcactagccggcttccactccaacacactggttttcaaacagctaataaacgagttgactcgatgcatcgaaagcaccgcaacgtccatagtgttggaatcgctgataaacgagtcgttccactacataatgaacaaggtcggagtgaaaaccatggccaagaagaagccggagcaagaggaccagcagcactaccaaatggccgttttcaccatgtccatgaaggactgctgccaggaaatgctccaaacggcggcagcgtcaccccacaccggcagcgtcaacgagttcttggccacactagactcagtgcagccgctggacgacctgagcgccagcgtttacagcaacttcggggtctctagctcgtacgcctttaagagctga

SEQ ID NO: 2875 - DNA, 1497 bp, Saccharomyces pastorianus
atggtggaaggaaagatagacgagtttaaggccatcacgggcgctgacgacgctgccattgccacccaattcatcgagatggcagacggtaacttggatactgccatatcattgtttttcgagaacggtggagctgccttgctgagcagtaacaatacccctgccccatccaattcggcttcagcggttcctatttctgcagacgcagattcagatgcacaattggctgagaggctgcaacgggaagcttaccaacagcaacagccagatcacgattacgtgaggccccctgatgaagcgagacacgaagtactaaccgagatagcagggttccagacttcttatcccggtatcggcggagggttcgagccattgcatagagtcaacgatatgtttgatgaaagaagacccgagagtatcttcaatcagcgattggacgatacaactaccgatacttacattaacgatgactcttcagactccctggaggtatctgaagatgatgacgacgatgaatacgagtacgtggaagaaccagttattgagctcgacgaagacggcaacatcaaggagtacaccaagttggtcagaaagcccaagtttatctccaaggagcaaaagctagctttgttattcaagcccccattctcaatcatgtccaagctagacttagacgcagcaaagcaaaaggcaagaagtaagcaaaaatggataatgattaacatccaggattcagggatctttcaatgccaggccctcaacagagacctgtggtcgtccagacagattaaaactttggtcaaaaaaaatttcattttcttgcagtatcaatttgaatctcgtaatgctcagccttacctacagttctaccacctaaataacaaggatgatttaccacacatcgccatactggatccaattactggtgaacgtgttaagcaatggaataggaccgtccctgctgcagaacaattcatttcggaaataaatgagttcttgacttcattttcactggacccgagggtttccaatccaacggtcaatgagcctttacctaaattagatccaacaactttaaccgaggaacagcaaatggaactagccattcaagagtcgttaaataataataccactcaatcagacaaagaacaagtaccgaagacggatcaagagctgaaagaaacacacgagatcgatccattcgataccgtagaggccaaatcgcatcccgaaccgcccaataaaccaggaatcaccacaagagtccagatacgtaccggggacgggtctaggctagtccgcagatttaacgctctggaagacaccgtgcgtactatttatgaagtcatcaagacagaaatgggtggttttgcagatgcaaaattcgccctgaacaatcatcaaagagaggatttgattgacaaattggacatgaccatagccgacgctggtttgaaaaacagttccctgctactagagaaaatagagtccgagtaa

SEQ ID NO: 2876 - DNA, 2064 bp, Saccharomyces pastorianus
atgatttcaagagcccccattaaaatcccaacgtatgttatcctgcgaaatctacttcgtaagaaagtcataaaacgttgttactcagtccccgtgcttagggattatcagcaagatgctatagatgcatgcgtgaattctatccagcaaggaaccaaaaggataggggtctcactagccactgggggtggtaagacagtcatattttcaaaccttatcagccaattacggcaaaagaattccaggggcaatgaaagaaattttagatctttgattctcgttcacagaagagaattggccttacaagcaacgaatactctcaaaaggatattccctgacttaaaagtccatatagaaatggggaaatatgattgtgatgtagaggattctgacgttgttgtggcgtctgtccaaactttgattagaagacttgacaaatacgatactgattcgataaatctcattattatcgatgaagctcaccattctgtagcaaattcctataggagtattttggaacatttcaatgcttcaactgcagatacgaaaattcctgtcattggatttagtgcaacttttgaaagagcagataagagagctttgtcaatggtaatggatgaaattgtataccatagaggaatcatagaaatgatcgatgataagtggttatgcgaggcaaaatttacatcagtgaaagttgaggcagatttatctactgttaaaagcactacggatgattttcaactggcaccattatcgtccataatgaatacaaaggaaatcaatgaagttatcatgaaaacttatttacacaaaaaacaagaaaagtctttaaaatccacattattgtttggagttgataaatctcatgtacgaacgctacataaactattcaaagataatggtattagcacggactatgtcacatcggatacaaagcaagtggaaagagataatatgattcagaaatttaaaaatgggaaaactgaagtactgatgaattgtggtattttcactgagggaacggatatgccaaacattgattgtatattactatgtagacctacaaaatcacgttcacttttgattcagatgataggaagaggtttacgattacactattcaaaagatcattgtcatatcattgacttcatcggagcctctaatgtcggggtggtttctgcacctacgctattaggaataaagggtgatgagatcgaattcgatgatgcaacgatggaagatctaagggctattcaaggcgagatcatatctaaacaacagaaaatcgacgaaaagttaagggctctatttcagagtaacgaaacaacaatggaagctatatctggaaaaaatgaaaccaaaaattggatacaaaatgcaaactcactggacttgacgctgtgttcatttgatagtttcagaaacttcacggagaacaataattcactcccagccggtaaagagctatacgagtcttctgaagcaattaaagaaatggaacttttaatgaactcacaatatccatgggtgaagtttgcttccaatgcatggggcctctccttacaaggcaaaaatcatttgagaatatataaggaaaaatccgaaaacaaatcatcagcactgtatcatttgaaaatgtaccggcaattgccatctttcataaccaataaatacgccgagtatgtccctaaaacaataataaaggattccagtctttggaatgtgatgtcaagcgtagaaaagattataaacactttaaactcaaactcggaagggcaagtcatgaagtatcaagcaatatccagaaaatttacgaaatggagatctgcagctcccacgccgaagcaaaggaattttgttaacaggaaattgcaaaaagtgcatggggaatcttcaaaagacttcaccaacttatctttggatgatattaacacatacacagatactaaaatgacgaagggagatgcctcgaatttgatatttgcaagcagcttagcacctgtctacccgttgaagtcactattacgaatcctacaatatcaaaaaagaaaatcaacataa

SEQ ID NO: 2877 - DNA, 2163 bp, Saccharomyces pastorianus
atgagttctagagcattgaggaaattacaagatgacaacgccttgctggagtcgctactatcaaatgcaagcgcgaataaggtatccggtggtaggagtactgccaataacagtcaaaaacagcaaaacatgttttctttaatggagaatgcaaacgattcaggtagtgccagtggcgaggagcaggaatctgaacacgatgaagaagctggtgtaggtagtcagctaggtagctcaagcaacactcaacctgaaaaagtcattttagtatcaaaatcttctagaaggaagaagaacaagaagacaaagaagaagcaaaagacccagactaccgcagcatctggagatgaagattctgacgatgaagagtttgataagattatccagcagttcaagaaaactgacgttttaaagtatggtaaggcaaggaaaaatgatgatgttaaggaagaggattttttcacggctcctgaatccgaagagacattcaacataccttggagatcattcttgagtctggaaaatgacccgggcttcactaagttccccgtttcgagtttaaagcattcttgcaagtttttccagaacgatttcaagaaactagaccctcatacagaatttaaactattgtttgatgacatttcgccagaatctctagaagacatcgattcgatgacatctacgcccgtgtctcctcagcaattaaaacagattcaaagacttaaaagattaatcagaaactggggtgggaaagatcataaactggcacccaatggccctggtatgcatccacatcatctgaaattcaccaagatcagagacgattggattccaactcaaagaggtgagctatctatgaaacttttgagctctgatgaagtattaaattggcaattatgggagagacctttagattggaaagatgttattcaaaacgatgtcagccagtggcaaaaattcatctcattttacaaattcgagcctttgaattcggatttaagcaaaaaatcaatgatggacttttatttaagtgttattgttcatccagatcatgaagcccttataaacctgatttcttctaaatttccataccacgtacccggactattacaagttgctttgatactgatcagacaaggtgacaaatcaaacactaatgggctactacagagggcgcttttcgtttttgatagagctttaaaagggaatattgtttttgattctttaacatgtcaattaccttatatttattttttcaacagacagttctacttggccgtttttagatatatccagtcacttgctcaaagaggtgttataggtactgctagtgaatggacaaaagttttatggtcactaagtccactggaagatcctctggggtgcaggtatttccttgatcattattttttgctcaataatgattatcagtatatgatcgaactatctgactctccattgatgaactgctacaaagagtggaatactttgggattttcgcttggtgtggtattgagttatttaagaataaatgagaaggaatcagcacgcagtgcacttctaaaaacattcaagcatcatcccttgcaattgtcagaacttttcaaggaaaagcttttaggagatcacgccttgactaaggatttaattattaatgatcacttggcagaaattttagagttcaaagcttatatggctcgtttctcttcactttggaccaaaagtgaagagatatcattcttacataatgaattatcgagtattttaaaagattaccaaactggaaacgtcacaatcgattcaaatgacaaaaaacatggcgataatgccgatgaacctcaatcacctttctttattgaaggcatcccaatcaacctattaagattcgccatattatctgaagagtcctcagtaatggcttctattccatcaactatctggtctaattatgaagtatatgaatttgatgtattacctccaacgcctacgtctaaggagtccattgatgtgattgaaaacatcaagagctttatcaatgaaaaggatttgactgctcttcaaatggaaagattgcaagacgaagatttattgaaccaaataagacagatttctctgcaacagtacatccatgaaaatgaggaaccacacggaaacgaggactaa

SEQ ID NO: 2878 - DNA, 2028 bp, Saccharomyces pastorianus
atggcgtcagtacctgtaaagaagagaggaagacctaggaaggccgtggtacctcaagttgcgttggatggttccagtggaggcgcatctgatgattcgagaagtaaaagacctaaaagaaacgcctcgaagaaggcaatcgcgaacctggcgcagttgatgacggttgatgtggatgatacgataaatactcagcgtctcagtaaccaggacgacggcggcgatagtgatttcaccgtgaacgaggaaaacaatagcgaggacgattatgatgttgacttggaagacgataaggagctggaggcttctaaagaaggagtgtcagatttaaatagcaataaaagtggcaattctgatcaatcaaatggtaagagaaaggcttcgaagaaaacaaatgcaaagaagagctcagctgataaagtaccgaaaaataaacgctctcatggatcaagtttggaacagaaaggtcgccctatcagacttttaaaggatctttccagcgcgagggataagattgaaagaatttatggactcaacagagaaaaattattgcagttggcaaaagtcaaggaaggctttgagacaagcatttttgattttccactggagaatattcagcccgattccccatattttgtatgtccacaacctccttatacaaaggaaaatgtatatgacaaagttataggagataaaaacaagactatataccacgagattactaagatagagtttgagaatatggtgaaattgagaaaagaaagattgaaattacttgttggcgaagtcgatgcaacgatgtctactgatgacaggatggagtttccgatacttcctaatggcaaaagaactggattcgtttacaatgtaggaggtttagtaacagatattgcgtggctcaatgtagacaaaggtcttgatacaaatgaaaattatcagtatctagccgttgcaatttcacaatacatggatgaacctttaaatgaacatttggaaatgtttgatagagagaagcactcctcctgtatacagattttcaaattgaatacctttactttacagttcgtaaaggatcaaactattgtacactcatttggtgaagtgtggaacctaaaatggcatgagggatgttacgcatctcatttggttggctgtttatcatttgttagccaagaagggtcggttaattttttggagatcattaaaagcgttagtgatattcatgtctttaagatatgtgagaagccgtctttggttttgtctttggcggacagtttgataactacttttgacttcttatcttcaaccacggtggtttgtggcttcaagaatggatttgtggcagagttcgacttgagcgatccagagttgccatcgttttacgaacaactccatgattcctatgtattatccatctcggtagctttttctgattttgaggataccgttatcagtacagtttctgtagatggtttcttttatgttttcaatccaaaagacatagctacaacaaagacgacgatctctagatttaggggaagtaatttggttccagttgtttattgtcctcaaatatactcgtacatctattcggatggtgctagttcgttaagggctgtcccaccgagagctgcctttgctgttcatcctttagtatcacgggaaacaactataacggccatcggagtttcaagattacatccaatggttcttgctggatccgctgatgggggtctagttataacgaatgcagctaggcgccttttgcatggtattaaaaacagttcgtccactcaaaagtcattgagactttggaaatgggattacagcatgaaggatgacaagtacagactggatagtgcttatgaggtttatccattgacagttaatgacgtgagcaaagctaaaatagatccacatgggattaatataacgtgcactaaatggagcgaaacaagtatggggggtaaattttacgcttttgctaatagtgctggttttttgacacttgaacatttagggaaataa

SEQ ID NO: 2879 - DNA, 1329 bp, Saccharomyces pastorianus
atgtcacctaaacaagatggtgttgttgaattaacaaaggatttaaaaggcataaatctgcgtgacgcacctaacgcagtgaaagagcaccaaaagaaatcatccaaatggagcacaatttctgctccgtcttcaacaaggccgtcttcacaacaaggaaatgaccatctagaaggaagccctaaatccacacgtatcccatatacttcgtttttgcatacgagtatacgcagttttcctacaaaatcaccagcagatatattttatgaaagtaaagaagtggctttgttcaccgacagccagttgtatgccgctacacgcaaagacgttgtacccaatttgaaaaaggacatttctcacctatatgaaagtccgcttcttgaggcaaggaagctcaagaccccgtatttgggccatgatttattttccaatatcgcggagcttgtccccatgacgatatccgaattagatagtgtagcaccatgtatctcatatattgaggattggaggctaaataatcctggtaaacccttcaaaataggtaaaaaatttaccgtcgttaccacaaggcaccatatcgtggatctaaccatgcatccttttgatagacgaaataaacataagtcattaattgctacatatatggggaatggttttatttcactttctagaaaccctaaatacgatcatcagatatccaaggagggcatttattcaggcgatccaaatatcaaaaaaatttgctattcaggatttgaacttgagaattgtttgactgaaaataccaagaactctcgttctaacgcttcaaaatgtcctgtcttttctattgtggagagcaaactttcagaggatattggtctattaatgcgttgtgagatggatgcattcaaccctgtttcgaaaacaaatacggaactaaaatgttttggcccattatcaatgcaaaattctaaccataggaaaaaactcctgaaaacttggatacaaacaggtttattaccaaactcagatattatgataggtttgagggacagttacagcggccaactactggacattcaatggtgctcaagggaatcactattcagaaaaatcaatcatccaggtttacctttgaataaaaaagaaatgaattataacgccaaagttgcggtggaatggtgcaaccattgtatcaaatcgacttgtgatttggtagaggcaaatatttcccattacaactgtgataaaccggaatctttcgagatcaatattgatgcaaacggcactatcattattactaaacttattaccattccaaggaatgtggaaatattcaagacttaa

SEQ ID NO: 2880 - DNA, 1536 bp, Saccharomyces pastorianus
atggtaaatcactcgcagcaccacagatcaaacaccagcctcatatcacatttgctaatactacttatcgtcataacaatcatcattgaaatgtgtttatataacaaactttttaaaaaccaaagatccgaagatataaaggacagctttcaaaacgacggacaccaagtgcccaatacggctcaaaaccagaatcctagtggtgatagcgatggctatgtatcgggtgtctattattcaaactggtcaccatacaagccaagattccatttccctcacgacattaacctaaagcaagtgtcgcacgtatattatgcctttttcaagatagatcccaaaactggctgcataggaagcacagatagttggtctgatttggacatgaacctatataaaccgttggcgatcaaagcttcgcaattggttgatgataatctgaatgacaacaatatgcagaatattttgcctttaggctgtataggcgaactgttttatctgaaaaatgcttgttctggcaggaagttcaagagtattatgtctatcggaggctggtcggatagtgaaaacttcaaaaccatagtcaaaaatgaaaaactgctacaaagtttcgttgactcatcagtggaaacgatgtttaagttagggttcgatggtattgatatagattgggagtttcctgaagacaataaaatagaaccccaaggctatttaaagttggttaaaatgttgcgatcgaaattaaataatctagaatctgaaattttcggcgagagccctaaggatcacttccaattatccatcgcagcacctgcattcaaagataaactgttttttctgcaaattgcagaaattgatcaatatatcgactattggaatatgatgacgtacgattattacggttcatggtctgaaacaaccggatatcacagcaatttatttagtgagacagaattaagtggaaactttgccatacactatatgattggtaaatttggtgtcaatcccagaaaattagtgttgggaatggcagcttatggtaggagtttccatattaaggataacaaattccaaccttttactaaaaatactgttttaatcaatcaacaatttaaaggggtagggaagcctggtaaagaaatagataaagcagatggcaaagaaggtatatggccctacaaaaaattgccaaagaaaggcactacagaacaatatgaccctaaatacgtttcagcatattgttttgatgaaaaaaactcgatatttattggttatgataatactgaatcagtcaaaactaaggcagactacgtgatgcatactaagttaggtgggggattttggtgggaatcatgtggtgaggattatgcagataaagcaaggtcgttaaccaacgcgttcaatgaagcccttcactttaacgtgttatcgaaaccgtccatgttccaagacaaaagagttatgaaatactacttaagtaagtatggcgatggcggatttttagctccatatctaaagcatttggaatcactcaaatag

SEQ ID NO: 2881 - DNA, 1971 bp, Saccharomyces pastorianus
atgccaaatagtgctctgaaacaaggcccaaaaaatgaaaatgcttctccctctaaaggtcacgtcccaagtttttggaaacagttcataaacaaccccaaaagtatgtcatcagagagtatcagtgtccccaggtcaccaacttcactttccagaagtgcccaaccaacgactttaaagaggcctccgctgtcttcgagaccatactcatataatactccaacgaaagataggaaatccttctccaaatccgcaaaacagaacagtagcagcaacaacactaatgcggggacatcgccccacgcagagtttaaaaattatagagatatgtttttatctaatagaaatggcttcactggcagagtttttggtgtcactttagctgaatcgttaagtgttgccagtgcggaagtcattgttcaaagcgaactagttagtttcggtaggatacctatcgtggtggctaagtgcggtgcttacttgaaagcaaatggtttagagacctcaggtatatttcgtatcgcaggcaatggcaaaagagtaaaagcactccagtatattttttcttccccccctgattacggtaccaaatttaacgattgggaaacatatacagtgcacgacgttgcatcgctcctgagaagatacctcaacaatctagcggaaccattaatacccctagcgctatatgagcaattcagagatccgctaagagctaaaccgagaatcctaagacatatgctgacccatgaagtttctcatcccaatgccaataaactgaataacgcgacagcgaaatccagcagacaaaattataatgatgaaggcgctaatgatggtgatattgaaaaggacgaaatcaaagatgacgaagaaaaaagaagaagaaaaatacgtcacaagaggagactcacacgtgatatcagagcagctataaaggaatacgaagaactatttgttacattatccaacgacacaaaacagctgacgatatacctgttagatctcttaagtcttttcgccagacaatcacaactaaatctgatgtctggaagaaacctagccgccattttccaaccttcaatattatcacatcctcaacatgatatggaccccaaagaatatgaactttctcgactggtagtggaattcttaatcgaatattcctataagttgttacctcatcttctgaagttagctaaaaaggagcagcaagaaaggctatcgaatgaaaaaaaagatatcgacgcaaataaacaaaaatctgatcctataccaataccgaagatcacctcatcagatgttccaccaatagccccttcaaacccatatccgccaacaattgacaacagtaataaattcaatcatccaacattatcaccaatatctacttcaattccagaaaactcatcagacgtacagacttctaaaatgttgaaacctccgaagcaaagacgacctcactcgaagtcttttggttctactcctgtgcctccagatgtgattgctagtaataaaaggcggacaagcctattcccatggttacacaaacccggtatcctgagtgacactggtgacaatggcgatttgaccggtactgaagctgaaggcgatgactatgaagacgaaaatattgatccatacagtcaatctccatcaagtatgcagtcgggctctttaccaaagcaacatcatttaccaattccgcagatgaacagatcgttgagtgggaacagtacctcgtcgtcattcaacactaggccaatctcgatgatattgactggtgccaataataattcagcggatcatttagaattactagacaatgctcacagcaataatggggagcgaaatcatgcttctccactaactgaagacgatgatgaggaaaggaattcaagatcacggaagagggaatcctggtttcagagattaacaagccgatcaggctcagcaaacagagctcaataa

SEQ ID NO: 2882 - DNA, 663 bp, Saccharomyces pastorianus
atgtctgcaaacgataaacaatacatttcgtacaataacgtacatcaattatgtcaagtttccgctgaaaaaatcaagaacttcaaaccggatttgatcatcgcaatcggcggtggtggtttcatccctgcaagaattttacgtactttccttaaggaacccggtgtaccaaccatcagaatctttgctattattttatctttgtacgaagatttgaacagtgtaggcgctgaagtggaagaggttggtgtcaaagttagcagaacccaatggatcgattacgaacaatgtaaattggacctagttggtaaaaacgttcttatcgtcgatgaagtcgatgacacccgtactactcttcattacgctctaagtgaattggaaaaggatgctgctgaacaggcaaaggccaaaggtatcgatgttgaaaagtccccagaaatgaaaactagtttcggaatctttgttctacacgataaattaaagccaaagaaggcagacctacctgctgacatgttgaatgacgagaaccgttacttcgcagccaagaccgttccagacaaatggtatgcctacccatgggaagccactgatatcgttttccataccagaatggctattgaacaaaataatgacatcttcattcctgagcaagaacaccaataa

SEQ ID NO: 2883 - DNA, 1470 bp, Saccharomyces pastorianus
atgtccattttgaaactcataggatttattttattaatcataatttcctacatcgccttcgtggtggttgttcctcctttaaaatttcctagaaatatacctaccattccgttctacgtggtgtttttacccgtcatatttccgatggatcaaacagagctgtatgatctttatatcagggaagcaatggaaaagtatggggccgttaaaatattttttggttcacgctggaatattctcgtttctcgttccgagtatttagcacaaatatttaaggatgaagacatttttgctaaaagtggtaaccaaaaaaagattccatacagcgctctcgctgcctatacgggcgacaacgtcattagtgcacacggaaaagtttggaaggactatagaaacgcagtaactaatgggctgcagcatttcgatgatgcacccttttccaaaaatgcgaagattttctgcaatttaatcaagaagagggctcaaaatggagaatcttcaattcaaatgggacctttatcccaaaggttggcattggataatatttctcaggtggctcttggatttgattttgctactttaacaaatgataaaaatgctttacatgagcatttagttcatatcaagaagcaaatatttcatccattcttcttagctttcccattccttgatatgcttcccattccttcgagaagaaaggcattcagggacgttgctagcttcagagagctcctcgttaaaagagtccaagaacaattgatcaataactacaaatttgaacaaacaacttttgccgccagtgatttgattcgtgctcataataatgaaattattgactacaaacaattatccgataacatcgtcattatcctcgttgctggccatgaaaacccccaactgctcttcaacacttcgttgtatcttttggctaagtattcaaacgaatggcagaacagtctcaggcaagaagtagaaagtgtcactgattcgaaagccttagcggacttacctttattgaatgcatttctttttgaggcagtcaggctatatcctcctttgagcacgattattaatagatgcacttcaaaagtatgtgtgctaggagccgacattgtgatacctaaggatgtatacgttggatataacaattttggaacatcacatgatcccaaaaattggggtccaacagcaaatgatttcaaaccagatcggtggggctcagatatcgaaactataagaaaaaactggagacttgccaagaataggtgcactgtgaccggatttcacggtggtcgaagggcatgtttgggagaaaaactagcgctaacagaaatgagaatcactctagctgaaatgttaagacagctagaatggactcttgatcctgaatgggaagaaaaactaactcctgcaggaccgctgtgtcctttcaatttaaagttaaaatttaaagagagggcaccaaactaa

SEQ ID NO: 2884 - DNA, 729 bp, Saccharomyces pastorianus
atgtcccaagaccatccagatgttgatgacgaacgtgaatatccagacattaaacgcaactcgctgcacgaagtaaccaaaacctcctatacgttggggattatgctgggcgtattcgtaggtttgttaccacaagctaggttcaagaatttcaatctttatattattgccctatctctatttcattttctggagtactatattacagcgaaatataaccctcttaaagtacattctgagtcatttcttttaaataatgggaagagttatatggcggctcattctttcgccattctagagtgtcttatagaaagtgttctttgccctaacgtgaagacattcagttattctcgaattaccaaagcctgcaccataattggatggctattaattattttgggacaatatactagaaccgttgccatgcatactgcgggacggtcgttttcacacatagtgaagactaaaaaagagactgatcatgtcttggtaaaaactggcatatattcctggtcgagacatcccagttattttggattcttttggtgggccatcgggactcagttacttcttctaaatcccatatccctgcttatttttattactgtactttggaaatttttcaaggacagaatttgtttagaggaaagatacttaatagagttcttcgggaccgattatgcagattataaaacggaagttagtgtcggaattccatttgtttcataa

SEQ ID NO: 2885 - DNA, 1026 bp, Saccharomyces pastorianus
atgccaggtccaaggaacgtgcgtacactgcatggaaacggaggccgtaatggcaacggtgacgtcatgggcccaaaacaattatggttgagtatccccccagtgacaagaactttacttactttttcaatagtcatgacgatcgtcgctcggttgcagtttatcagtccgatgtacttcatttacatgtggagttggaccttcaagaagtttcagatatggaggcttgtcacttcttgcctgattctttcgccacaagccatgccggcgctcatggaactctatactctttacgataggtccacgcagttggaacaagtgcattttggtcccggtttgtccaacagacaaggtcccatggtgtcactccactacgtctactatttgtgcttctgtatactaactatcgccatgacggctacgatcctgtatggatccggctaccctttcgtactcacctctggtttcatttcgtgcatcacatatacgtggtcaattgacaacgcgaatgcaaagattatgttttatgggctgatccctgtttgggggaagtatttccctctgatccaattgtttatctcctttgtctttaatgaaggtaacttcgtgatctccttgatcggtttcgccacaggatacctctacacatgtctagacacacgtacactgggtccactatgggggatgatatccagaaaagccgacccaaattacggtgtcttgcccaatgggaaattccctaccccgtggtggtttactagcctttatgctcgcataacgggtgcacacaatgcaccaccagcacccaacaacaactttgccgacgtgccggtaactccaagagaaacaagatcgtttagtggaagaggtcaaaggttgggcacctcccccattacactacctcagtctgacgactcaggcttggccagaacttcaggtactcggctgaggagcggctcgtccaacctgaacgagtttcagggtcgtggccagcgcgtaggccacacagacggcagtgctaactga

SEQ ID NO: 2886 - DNA, 372 bp, Saccharomyces pastorianus
atgttaccactgtgcttgacgttcttatccttctttctgtctcttggtggttccttcaaggcagtaatgaccaaagaagaagcagatgggacaacagaagcagcagcttgtctgttttggattttcaattggacggtaaccttgatacctttgaattccttggtggccttggcgatatcttcaccgaccttctttggggacaaacccaatggaccgatctttggagccaaagcagcggaagcaccgacttcaccaccgacagctctcaggtacaagtacttaacttcatttggatcaaactttggaggcatattgactattgatctatccttttattgggcacttatgattcttccaaccaaaagtatgtaa

SEQ ID NO: 2887 - DNA, 1896 bp, Saccharomyces pastorianus
atgtccaagttctcctggaaagacttgattcagctcggctcacctaacaaagcgtatgagtctagcttagcatgtatcgcccacatagatatgaatgcattttttgcacaggttgagcagataagatgtggcttaagcagagacgatccggtggtttgtgttcagtggaactccatcattgcagtctcttatgcagcaagaaagtatggcgtatcgagaatggatacgattcaggaagctctaaagaaatgtgataatcttataccaattcacacagccgttttcaaaatgggcgaggatttctggcagtatcatgatggatgtggatcttgggtacaagatccggccaagcaaatacatgtggaagatcacaaggtgtcattggaaccatatagaagagagagccgcaaagctctaaagatttttaaaagcgcatgcgatttggtcgaaagggcaagtatcgatgaagtatttctcgatctaggtcgtctttgcttcaatacgctaatgttcgatgaggcatacgaattacaaaatgatatgaagctcaaggacatattaagtaccattcgcgagatattcatagggggcgattatgatataaattctaatttacctcctatacctgaaaagataaagtccttaaagtttgaaggccacgtattcaatcccgagcacagaaacctcatcactgattgggatgatgtagtactagcgctaggttctcaaataactaaaggaatcagagatactataaaagatagtctggggtacacaacttcatgtggtgtgtcaagtaccaaaaacgtttgtaaattagcttccaattacaagaaacctgatgctcaaacaattgtgaaaaatgactgtctgtctgattttttagattgcgggaagtttgaaatcacatcattttggaccttaggaggtatccttggcaaagaactaatggatatcttgaatcttccgaatcaaaacagtatccagtacatcagggaggcctggcctgacaaccctggccagcttaagagttttttggatgacaaagttagagaagcagatttcgatcgttcagcaagcaatgtcgaccctctcaggacagcagatttggcaggaaaattattcgagttgagcaggggccaataccatttgcctctgagttcacgccctgttgtgaaaagcatgatgtcaaacaaaaatcttagaggtaaatcgtgcaattcaatagtggattgtatttcctggctcgaagtgttttgtgccgaacttgcctccagaatccaggatctggaacaggaatatagcaagattgtgataccaagaacagtatctgtctctctgaaaacaaaatctaatgaagtatatcgaaaatctggtccaattacttacaagagcatcaaatttcaaagtcatgagcttctaaaagctggtgtgaaatttgtcactgagcttgacgctaaaggcaaaaatacaagatactaccctttaactaaattaagcatgacagttaccaattttgatattttagatttacaaaaaactgttgttgacatgtttggcaaccaagccaatacctttcaaagatccatagacaaagaacgcgacaagaaagattccgggtctagagatgttaaaagtggcccaagatttgaatgttcgaaatgtcagattacttttgctgatgaaagggcttttcaagagcatagagactaccatctagccttaagattgtccgaaggtctgaacggtgctgaagaaacgtccaaaaatttgtcttatggagagaagagactgctcttttcaaagaaaagatcaaatccacaaaactctgatacccctcgaaagaaacaaacttcatcctcgaaagatattctttcgtttttcgcaaaaaaatag

SEQ ID NO: 2888 - DNA, 1605 bp, Saccharomyces pastorianus
atgtccaatgcaaatttaagaaaatgggttggtttttgttttattgccatttatctttttgtaggggttccattgtggtacaagctaaccaccgtgtatagagcctcattgccaataaattacatcgaatcgctacaaaatgataaatttcaagatattcatctcgtaataccagtgtatgttaagtctgatacgtatagattcccagacattcatgatgctgttcaagtacaagttaaccacttattgaattcgaaagagcaacgggtgccatggtcgctacagattcttccttataacgagactgtgcagaagttagaggataaagacaaccagttccatgtcgttaccttaatgttagatgaattcattggttacacatcagcttatgatactaaggagacagtggtgtactatgatgacgcggctgttttaagtaatgatttgccattttttgttgcccaaactttagtggaacacactttccagttggagtggatgcatttaaacaaaacgaacgaagacgtatctacgaataaccaagttgccatttcttatgatccaaatatccatttaagtataactttgctatcaggtgatggaagtcccgttgcgtgggaaattgagcctactttaaccgattatttctcaccctttaggaagttcttgtcacctttggtaaatttcacagtagactcctctattgtctaccataatgatttgaatttacattctttgaatgggtcatctgctaacgttacttggtttgatctatcccatacaattgacctttctgaactctcttctatgacgtactatccagaggattctgcactaaatttagccatagtcttccctagtgtttcatcaacacctaacggcttagcgtttgttaacggtacccaaatcgccaatagtgtaattgcgttggactggaatagttatttagtgccacaatggggggtcataataataaacaaaaacccgctccaaccaaactctgtcatcagtgaagattatttagaacctatgatgtaccgcttttcaactgatattttccaattattaggattaaccgaaggttcacaagaactattatcaccttatatcactatagattcgtttaaaagactgacgatcttacaaaatctagacaaagccattgaaacattatggtccctagtgaaattaacccaacaatttcaaggcatgtccattcctcgcgaagtgtccgataatgtggtagaagctctagacttgagactagaaattatagatttattgaatggcccagaaaagggcggcgatatagtatggaacaatgccctacgtttgagcaatgagctggtcaaactttgcgaaaaggcattttttaatggagaaatggtccaacagaattttttcccacaggaacatatgattgccgtatatttgccattattaggcccaatatcagcagtattgttctttggtttctacaatgtaatgaaggagaagaatgacaagaagaatgggaccgagagagaagttgctaaagaaaaatcagagttggaagaagctgaaaaattgcacgctatcgacggtgaagatgaaattgtgggttga

SEQ ID NO: 2889 - DNA, 1152 bp, Saccharomyces pastorianus
atgtctttatcatgtaatattcgactcaggcgcagatggtggtttaggttcgtctttccaggaattgtttttggtttactctgctacggtacatgggcttactgtcataagttgtgctatgaccaaatctacaaacagctccatcacagatctatcgctattggtctcatttgcgtggtatgttttctagatgctattgtggttttcatatggtgccaaatggtgatctgggtcggtccaggtacacaaccccatgtagcgccctacttaatccttcccacagtatccaaggagggtgctgacgacgagggttctcaagacgtttcaatggaatacgacgcagtgattccaccaagttgttaccagtgtgacccccacggatatccgatatggtgtagtccatgtcagagtttgaagacggaacgaacgcaccactcttcagagctgggccattgtgtcccccggttcgatcattactgtctgtgggtgggaactgttattggtagggacaattacagacttttcatccaatttgttgcttatttttcgagtctattactcctgatgtggttgccaatctgcgtgtacataagggacattactcaacggcatcgcggccatggtcctcctttaaacgtgaatgtcatcttaacgttggctttggccatctttggttggctaatgaatacgagtacgttggccgcgactgtcttttacatgggtcaaaaccaaacgtcactggaagcgatcatggatagcaagaggaaaaaattcgggacaagaaagatattctgctactactcagtgcccaacaagtcacggtttgtagtagaattcgatagaaaggagtttcacgccttttggagtaagaaaacagtgcttgccaatttgaaagatttcatgggttcgaacatgctgatgtggataatccccctaggcaagccatacacgtttcattgtagaacagagctgtcagactccggaaatcatctacttccaagtggtcagagagtcacattaggcgaaatcctgggcccatatgaagagcgttttagtgactacactattcaagccattgaagacaagatagccaagggtaactacttgaccactctacgagcctttggcgatgaaataggtcctaaacgctag

SEQ ID NO: 2890 - DNA, 114 bp, Saccharomyces pastorianus
atgcaaccaatcgccaccgtctccgccgcttcaaaagacaagaccagcaacgaaaagaaggacaactacatcgtcaagggtgtgttctgggccccagcctgtgtcatcgtctag

SEQ ID NO: 2891 - DNA, 4482 bp, Saccharomyces pastorianus
atgccttatgatgatgatcacgatgatggagaaataaactttaatgaacttgtggggaatttattaagctcgcataatcaagaagagcaagcacaagagcaagcacaagagcaagcacaagagcaagagcaagagcaagagcaagcgcaagagcaagagcaagaacaaggcgaagtacaagcacaagagcaaggcgaagtacaagtacaagtacaagtacaaaagcaagaacaagaacaaaagagacaagatcttgacaaaataaatacaaatgtcgaagacatagaatccaaacacctacatagcggccaggctgaccatgatcatccggatcaaaacatcgaactacccgattttggcgatgaagaagatgaattagtatccgtcgtcgcaaatgctgttcaggatatcaacaatgacagtggcagtaaacccagcagtcatctaggaaatgaatcggaacatgaagtgtccaatacactagatgataaccacgaaaaacagcaacatcaagaatgggctcatatcttacagcaaggaatattacaggaggaggaagagtttgtaccggaacatacagagagacgtatcagctctagtcatcaccatcaccatcatcaccgtaccgatgaccagcttgaccaagatgatgaaaatttgagaatggctatattagagtctctgcaagaattaaacacagatgatggcccagaaaaagaacaacataaacacgaacacggtacttccagtgggaaattgtccagcaagaagtcttcaaagaaaaagaaaaaggacaaatccaaaaataaagaattatcaaaggaaaaatcctcaaaaaagagcaagtcttcaggtcactccaaaaagcacacaaaggatcgttctaaagaaaagtcaagtaaaaccgctagcaatgataatgcactcgatttcagtaatatattagataatcttattcatgaaaatggagatgctacagcagacacacgtaaatcaatatcagacattcaagaacaacccctcactgacaaaaatcgcgaagacgtggaagcacaggctctcgtggaagctacgctaaaggcttttgaaaatgaattactaagttcagcgccaactgcgggccccacacaagaccaatcaaccgaaccttcaacttctactaagacagccgaaccagcacggaaaccgactgctgatgatatcccgttggctatgttgcaagctttcaagcccaaaaagagacctcctcaagaaaaaaagaaatcaagaagtaagacttctaaacctgcatctacaacaaataaatcatctgcatctgaaccagcttccaaaaaaaagaaaaaaaagaaatcagccaaagaaactaataagactcaagaaaattacgaagaagatgaattctctagggtactagccgaaatggttaaccaagtggtcaatacttcactaaaggattcatcaatcacaacatctcccgccgctcaggataacaaaccggagacgacagctggttttgttgcgtctacccaaaaccagtacccatctaccataacttctaccacagattctggtgcagctaatgacgacacccttgatttaaatcaaatcatgcaaaatgctatggctatggtttttcaaaaccaaaatgacgctgatttcgatgaaaacattgtcgaagattttaaccgcggactaggtgatctgagcgttttggatttgttgcctcaagataacctttctgggttggataagaaatcatctaaaaatctgagcaaatctgaaaagaagtcatctattttgagtaaaaagtcttccaaaaaagcatctaaagatgtgtcagatacggaaaaggctagaatttcttccaaaccaaagaaaccttccaaatcagaattatctcaggaaaagaaactacgcaagaggtacagttccattgccagcgaggctgcatctgtagctagaaagaagagatgggccaagaacaaagaattaaaggaaaaagagaaacttgaacgtcaagccgcaagagaagaaagaaggcaaaagaaaaagttggagaagcaaaagctggctgaagagcaagaagaactgaccaaaatcgttgaccgtggcccaccctatcctccggatttaagactgaccaaaagcggtagaccaaagaagccgtataggagatggactcctgaagaattgttaaagagatcacaggaggcagaaaaaccaaggaaagtgaataaagaaagaagaaaaaaggacaagaaagttaagataccttcatccacattgaggaagattcctttattcaattttgttaaagataatgttcagccaggagcaagacaccgcttaaacgatattgaaggctcgctgtcctccattggtttacacagatcgcctgacggtgtccgcagagtcatttcaagacaaaaaagtgaagataacgaatggccattatcagactcctccacatcccaaaattatgatacgcatttaaaaaccgttgtgcataaagaaaaaatctctttccaccctccctggactataccatcccaaccaccatttgctttacctgttgcaagaaggaagaaaataccaaatatcaaaaaatacaaaaagagaaacaacaattctcctcgcatttccaaggaaagtatgctgagtgcaagaaacagaattataccagctattttattaccaataataaacacattaaaggcagccgcgaagtcccaaactgctgctggagcaacccccgaagaagcaagaaggcgcttggcagctattattcagcatgctaagtccactgttattaaggctgctttacaagcaagaaaaaacagtattcaagcttctagcgccaaggaaactacaccaggattggccgtaattccgcctcaaaagaagaatccactgagaatgattccaattttcaatacgtctcgggtgaaacaacaaccagagaagtgtccgattattgtaaagggagtcaccagttcagtgtccgctgataaaaacacccctggtttctactctaacactacgagtaatgaacaggcactcaagagtattgctgccccagttaagatagaagatggtgattcacatatacatcctattccaataatgcctataacttcaaaaccgacacaagatagtgtcgaagatattaataacgcgaaggagactgctaatgttgttgacgcaaaagcctcgtcagacgctgctggtactggtgacactgaactagcgaatgacactgatactgtagaagatattaaagaggttaccaacgtcgagactgtagaagatgttgcttcaaccgaaaataagatgaacgtggaatcaaatgatcaaaagagcactccaatcgacttttctggtgttgacaagatagacgaagaaaaaccagaagataagatgaacacagaaaaagatctaaataaaaataaaagtgcgcttggtaaggaaattgagaataagcgcatactggattccgaagttcctcaaactactggcacagatcgtacaactgatgttggcgagaagcctagatcgattgctcttactgataaaccactaaatgaatcgaaaccgagaatacccatcatatttcctttgaaaagaccgcaaatcaaacctgaagttaatgtcattgatttagttcagaacttggtgaaaagtaaaatgcctgaagtgaaaaacgaatcaattgacctgggcagtaacatcacagacattctttcctccactatcactaatatcttgcccgaaatcactgctgctgatgtaaaaaattatcaatatgaagacgaaaatgtcaaatatttgaaaaagacaccaagacaggttttaaatctagacggactagttcccccatcaggtagatgcattactaaagctaagcgcattcgtcgtatcaagaaaccctctcctgacgctaccgtttcgcaggaaactaacacgaaggcaagtaatgaaaccattacttacactttcgacatcccttctccagaagaaatgcaaagcaaacgtagcgtggtgctaaagtatgccaaggcgagattaacggagagtgaattaaactctttaaaaaaggagattaataatgtaaggaaaaggagatggagagaaattaactccacaaagaactgggaatacgacgtaaaatctaggttaaggaaacgtgcgagtggattttttggagaagaggaatctgaagcgaagtccaattggattgaagaaagattccgagaaaaggctagccaggaaaaatacaagagtcgccttgaaacaactgaaagccaagcaaacaatacgaagattgtgattgatgacaaggagattttgaacattcttgctgtaaacatgaatagtctcaacacggcacgttgcattgaaaaggacattcaagagtcattcaaagaggaaaagttagcctctatacaaccaaagaagaaaaggaagaaaagcatcttaaactga

SEQ ID NO: 2892 - DNA, 186 bp, Saccharomyces pastorianus
atggtttcattacttgccttcgtgttagtttcctgcgaaacggtagcgtcaggagagggtttcttgatacgacgaatgcgcttagctttagtaatgcatctacctgatgggggaactagtccgtctagatttaaaacctgtcttggtgtctttttcaaatatttgacattttcgtcttcatattga

SEQ ID NO: 2893 - DNA, 1233 bp, Saccharomyces pastorianus
atgtcagaactgcatagcttgcttactttcccagagaggcccatttctaaaagttattatgtgccaaaactgcagcatttcttagagtgtggtatacctgctacgtacactttggagcaggttgctgcgtttgagcgtgaagaggatgataaatgcaatcccacgctagaagtatgcagtgacgatgataagacttcaaatacgacgccattgcacgtgttggcaagatcgcttcccttggatatcaatgatgaggaactgcaagtggtgttggaaatgatgaatattctttttgaatatggtgccgggtggaacttcattgactacgaggacaaaacagtaggagatttacttttagagagaaaccaagatagggaaagtcctctttataggtgtcttgtggaagccggtatctctgcagagttgctgttgagaaaactcaatggcggtgacgtcgaattcttagacacggatgagtcggaggaagcgaatcctgaacaaaccactaaactcccattcgatagtgaggaacaagaaccggttgccgataatgatgctaccgctgcaaaccaaaaagtgtacctacagacaaaattagagtacaaagacgatgcgctcatcacaaaggataataaggacggtgttatgatggattgggaaactaaaattatggaaattgcctccaagactctattccccgaccctaaggccactggatccgccacaattttgaacattggcttcggaatgggtatcattgatacttttattcaagctcaaaaaccttaccgtcattatatttgtgaagcccatccagacgtccttgagaaaatgaaagaagacggttggtacgaaaagaataatgtggttattttggagggtagatggcaagatactttgaataagttactagacgaaggtgaagttttctttgatggtatttattacgatacatttagcgagcattatcaagatatgttggacttatacgatgtcatagtaggcttaatcaaaccagagggtgttttctctttttttaacggattaggtgctgacaggtcgttatgttatgatgtgtacaaaaatattgttgagattgatgtcggtaattatggtatgaaatgtgactatacaacgtattctttatatgaacagctaccagattggaatgatgtcaaaaggtcttattttaactgtaattattactatcatccacacatcacatttgtctag

SEQ ID NO: 2894 - DNA, 528 bp, Saccharomyces pastorianus
atgaatggagatgagaacaaaaatcgctacaatgaagttgcgacccctatagcgggggatgcttcaagtaagcatggacttaaagcagagcaaaatcaaggtgagaacaacaataactacagtaatcgtgataatggcattacagatataaatagtaataagaataacaactataataactcacaaacgggaagtataccatcctttccaacaaagggatcgaaaaacgttgaaaatacgggcaatcaaaacataaaaatagaagaatctagtggttcgaacttgacgatggaagagtcatctgattctaaaacttccaaattagaaaatgtgaatctcgcttccacagtaggcggttctcaaactaggaagtatttgaatgcaaacgtaacgccacacctattagcgggtatgaggctcatagccgtacaacaaccggatgatccgttacgtatgttaggggaatatctaatcaatcaaagcgaaattcagaaaagcggagaaaatgggaacaatgttagcgtatga

SEQ ID NO: 2895 - DNA, 855 bp, Saccharomyces pastorianus
atgcctcaaggaatcattcaaccaagtacatctgaccaacaattccaaggtaaatcggatgggtatgaatatacagtagggcctaaacaggttattacaagcgaggcctctgccgcttatgtgccttccaagatatattctgagtctcttcttttcaaaaagcaagaagtttctttatcagcaatggctttcttgttccaagaaatgatttcacatctgcacagaacgtgcaactctacaagtgactttgaaactaaattaagtgattatggacataacattgggatccgtctcttggaattgctaaatttcagggcatccgtctccccaagttccctttccaggacatctgccttcctctcacaaaacgaatcctcttcaaagtcactaaatgcatcaaattcatcaaacgttttgtctaacgccaatacaacaacttcatcgtctgccaatgaccgatttcaagaaaagcaaatggaatccttatccaattatatcacgaagatgagacgccgcgatttgaagatcctcgatatactacaattcatccatggtaccttatggtcatatctttttagccacgtaagtgacgatttagtcaagtcgtcagaacgtgacaatgagtacatgatagtagacaacttccctaatttgacccaattcattccaggtgaaggtgtttcttgtgagtacttcgtttgtggtataatcaagggatttcttttcaacgctggcttcccatgtggtgtaacggcacaccgcatgccccaagatgggtatagtcagcgcaccgtttatttgattcaattcgatagacaagtactactaagggaaggtttaagatttggttcgtag

SEQ ID NO: 2896 - DNA, 1698 bp, Saccharomyces pastorianus
atgatgactcacgcattagcaggcgaacagacacgtcttgtttctgggtctacctcgagatctcgtccaaacgggagacgtatctccaagaggtccaaagtagtcatagccacggtgatctcgattggtttgctactagcgttggtccacctggcctttcccagcacatttgcattgcgttctacaccaaacaaaaagaagaatgtcatcttcttcgtcacggatggtatggggcccgcctctttgtccatggctagatcgttcaaccaacatatccatgatttgcctatagataacatcctaatgctggaccagcattttatcggttcctccagaacaagatcttcggactcgctagtcactgactctgctgcgggcgccaccgcatttgcatgtgctttaaagtcttacaatggagccatcggtgtagatccacatcaaactccatgtggcacggtgctagaagcagccaaattggcaggttatttcactgggcttgtggtcacaacaagaatcacagacgctactccggcgtcttttagctcccacgcagacttcagatggcaagaagatctcattgctacgcaccaattgggtgaataccctctcggtagaatggtagatttgctaatgggtggtggtagaactcacttttatcctcaaggtagtgatgcttctccttacggccaccaaggttccagaaaagacggtagagacttgattgacgaagctcagtctaatggctggcaatacgtgggcgaccgtaaaagttttgactcgttgctaaatgcccatggcgacaatgttactctgccgctgctgggtctttttgcagacaacgatatcccattcgaaatcgacagagacgagaaggagtacccttccctcaaggagcaagtaagtgtggcattgaaggcattggaaaaggcttccgacgaggacgaagactctaacgggttttttctaatggtagaaggctccagaattgatcacgccggccaccaaaacgaccccgcctcccaagtgagagaagttcttgcgttcgatgaggcattccaatatgtcttagaattcgccaaaaattccgacactgaaaccgttctggtatccacctcggatcatgaaacaggtggattagtcacctcgaggcaaatcactgctagttatccggaatatgtttggtatccacaagtactggccaacgccacccattcaggtgagtttttgaaaaagaaactagtggactttgttcacgacctaggcgccactggcaagctagaaaatttcatcaaacatgaaatcttagaaagagatttgggtatcttcgactacaccgacgatgatgtgaatacgttgatccatttgggtgataacgcaaatgccattcaagagaagttgaacgacatggtttctttcagagcacaaatcggctggaccacacacggccacagtgcagtcgatgttaacatatatgcatacactaataggaaaaccacatggtctcgtatattagagaaactgcaaggtaatcatgaaaatactgaaatcggtcaatttttggcagactacttggagctaaatttgaacaaagtcactgatttgattcgcgacaccaaacactcattgaatttcagtgctacagaaataactaatgaagttcctcactacgatgaatactatcatgaattgtccacctga

SEQ ID NO: 2897 - DNA, 951 bp, Saccharomyces pastorianus
atgagtattactgctactagaaggagaaatcaagagaccgtctgttgcaagacaacaacgacttccatcaaggtagaagcgctcaatagtaaagccaccttgaggaaggagaagctgcttcacgattttcatgagctgccggattggcaaagagataacgataagattcttactgggtacgtacgcgagacgctgtcgtggaaaaagtgtttgtattccatgttttactggaataacgagactgtgaacatctacacgcacttagtgccagcaatcgtgtacttcgtgttcggtgtcacgcttacaaactatttcctcattcccgtgttcccctccaccacgtggtccgattacaccgtgatcaatatttttttaatgggtgcgttcctgtgtctaatgtgcagcagttgtttccactgcatgaaacaacactccgagaagcagagtgatttctggagtaagcttgactacttgggaatcatcagcttgatctcatgctcgatgattcctataatatacttcggctacttcgaccacgtatcttacttcagtctcttcacggtcgtcacgctggtcctggccactttttgcaccatctgtgtcctacatgagaagttcaacacttctactttccgtccctttagggccatgttttttatattattcgggttcagtgggctcctcccattgactactggtcttttcaagtttggtcttcaaggtgtgcttaacaggataagagtgagctttgtgttctgggaagcgctcttttacatttcgggggctctcatctacgggttcaggattccggaaactttggcgccaggaaagtttgactttttcggtagctctcatcaaatattccacattatggtcgttctcggttccgtttgccatctaaaggtcattatcgattcttataaattaatgcattctcatttccattcttag

SEQ ID NO: 2898 - DNA, 372 bp, Saccharomyces pastorianus
atgagcacaagattaaaggctttggatgcatacagacacggcctgagagctactcgaatagcattccagaatgatacgaaagtactattagctgctagagccaaaatgcggtcagggatggtgtctccgcccaatccaaaactcaccacagaggagcaggttcaacatttagaagatgtggctattttcttgagacgaaacttggttcagggtcaaaaagttgatgacaccgatatgaaggagcccaggtatcatctgaacattcataaagacactgaattgggtgacaatgagactatcgcggaccccacagcaagagtgaaaacaaacttgaaggcaagaccattcaagtgctccgatagaaagcactga

SEQ ID NO: 2899 - DNA, 3018 bp, Saccharomyces pastorianus
atggcaaaaaagaagataaaggtcaataacacaaaggtacaagataacgatgaaagagaatctaaaataggcatcgaacccccccatgaagaaaacgatgagaccggaacgaaagataatggccaagaaaccctcgaaggagaaaatcagcagtcgagtttacacagtgctaatcaagagggtgtagaggaagctgacaaattctctcaagaggaaagtcgatcaactgacaattcaagtttcgacaaggatacaacacgggaagccatagaaaacgacgtcacaaaagaagatacttcaggaacagaggccggaatgtccacaaatgataaccagaaagaagacttgtcactcaagataaacgaaggccctttcagactctccaccgtattagaaaatgtaccatcagacttggcatacacatgctgtgaagcatatgacaaccatatatttttggggactactactggtgatcttctacactatttcgaactcgaacgtggaaactatatgcttgtctctcaaacaaagttcgacgcagattcagatgcaaagatagacaaaatcttgcttttacccaaggtagagggtgcgctgatattatgcaacaatgaactagtattgtttattcttcctgaatttgcgccaagacccaatacggtgagactcagaggtatcaatgacgtccttgtctgtaatttttctcgaagctcaaacgcttatagaatatacgcatttcacgcagagggaataagactgcttaaaatatctgcaaattcattggtgttcgccaaaacctttaatttcaaactgatagataaagcatgtgcacacgaacaaacattaatgatttcaaagctaaacaattatgagctcgtaaatctaaaatcatcgcaggtaattcctctgtttcgaataagcgaaaccgatgaagaactggaacctataataactaatttcaatgacgataatgaatttctagtttgttctggaggaggatcatacgaaaatggtgctatggctttggtagtaaatcatcatggagatataataaaaggaacaatgctactgaagaattacccaagaaaagttattgtagagtttccctacataattgtagattcggggttccaatctgttgatatatattctgctttgtctagtgaagaatcacagttattacaaagtataaccaatccaaaaatagatctgaaaatttcaaggacagataaagttttcacgaacgccaacacttctgaagaatttagaaagaaaatatccaataagctacgattacagcctttaacccacagcgacaacaagtttagaatagaaagagaacgtgcattggtcgaagagtcctatgaggagaaatcttctttagtcatttataataatctaggaattcatttactagtaccgaaacctatggtcctaagttttacatcctatgatgaatctgaaattgataatattgaagatcaactgaaaaagctttcaagaagggatttgacgaagtttcaaaaaattgaagcaaaatatcttatatctcttttattgttcctaatgatgctacattatgatcacatagaagatgaggtaatgaaaaagtggtgcgaattttctgataaggttgatataaggatattattctacttacttggctggaaagtttacagcgaaatctggtgtttccgtggattagtagatatagttgaacaattgaagagtctgaaactgagtaataaatgtgaaaacgtcattaaaatgattttgatgataaaatctgatctgaagaaaagagacaaaaatggaattctagtaactgattttagtgacataatgaaatccatcgatataaccttgctcggcttgcaattggattcagggagcgaagtaactatagacatgtttgaacaggaaagttttgacgaaattataaaggaaatttattcacgtggagacgatatttctagaagaagattattaatcgatatccataaagaaaagggagagtatgtcgaaccactgaaacttttgaaaagggcaaaagattataagtcgctgatatcatttattgaagaaaacataagatgtcttcctgaggaatatgttaaagaaacactaaatgatgatcttattatcagccttagacaaggcaataaaaatgcagacagcaatagtatcaaacaggttctaaaaatattagacattgctggcataagtaagaatgagtttttagacaggataccagaggaaggtatatcattgaaagtatcgttcatagaggagctgggggttcagaatagtaaggattcaaaatttctttttaactattatttgacaaaattacaagagataatcagcaaagataaaatatggtttatacttgacgatttcataaaggagtacaaggacgatttggcctatgacaagacggatataacaagttttattgacatcaaattaaaacatagcgtgaagtgtgagaggttctcaaaatactatggaaaatgtgaaaacctgaaaatagaaaatatagaagatagtgaatttattaaatttactttcggggaaatttcaaagatcgatagagatcacatattatgcctgctattcttttccaatgatctcataaaatggatttcgcctaaagagttattgaaagtatacctatcgttcaatgactttagaagtgtagagaaattcacggataagccggatctgattgcagtcatgaaacaatatttgaagataacttctttaaactactcagttgagttgatttctaatttactacgaagaaattttagcctcttagatgacatagatacacaattaatggtgcttgaaactataccttctgactttcctatgcaatcaatatccgaattacttttaaagatgattatccagtaccaggataagagagaggattctaacttacgaaagttcttactaaaaaatcaaatttctatttctgatgaactgaatcggaatttcgaagctcaagaatga

SEQ ID NO: 2900 - DNA, 1158 bp, Saccharomyces pastorianus
atgacatttctagaaaacttagcggttttacagaatgcgctactagaccatttgcaaaagtggagcacgatctcccgcaaaaaggcattcggagaaggtaaactatatcacaagggcggtattgcgcttgatgacggcaatgacggtgaagaagaagaagaagaagttgagtttggcgctttgctgggcacaatagcgagcaaactacttgatttcgagtcgatactgagatgcagtattgttgagatgacgtacacatatccaggattgaaacttcagtgggagaaaagttccagatacgaccaatgcgataaattgaacattgtgaagctagataaacagatggttgcggaattgtatgcccagttgatggaagagctcgattctgtattacaattcatcgattggttttactgctaccgccttaaggtcaaagagatcctacgacaacaccatagacgcgaccttgcctggaatgacgaggaaagggaccaggccataaggtcacatgctgtggattacgagaagatgcatcaggggagcgaccgcgaagcgtcgtcgttgacaactccagcgtccatgtcaatggaaaatgcaagcacgaaggataaactcttgagcaagacaaaattactgaccaacaacctcgtgagaggcaatcaaattctacagtcgggtattttacaaagcgacctaaacctggacgagctgagagcccaaacgcactcactgatgcaagtcgacgacaagtacacccagtttgaaaccgttttcaagaaaacggcagacttggtcaaagtcttggaaaatgcctcccaccaggagaagcgagacgtatacctgtcactcggctttctcgtgtgctgcgtctcctgggttctctggcgtcgtattttcaagctgcccgtgaaagtcggcctatggctgctgttcaagtttttcaagggtatactgatgaccttaggcctagtgaagggctacacggcctcctcttcgtcaccgcaggtccccagtctcgtactgaacgcgccatttcttgccactacgtcttccacgtccacgcttgtggaaccatcagcgtctgaaccagttgtcagcaacatccaacgagctgtcgatgaagccatggatagaattatctcccacgacgagctgtga

SEQ ID NO: 2901 - DNA, 399 bp, Saccharomyces pastorianus
atgatcaacaaactgatgtaccgctccgtcaggctcgccagccataacagccagcccttgctacctcccttggttctatacagaagaatactaaggcagcacaagctgctacccaccgtccagaaagaaatgggcgaccagtacgtgcggaacgaattcaaactacacaaagatatcgacaacccattgcacgtggtcgggttcctggcttcgtggcaagactacctacacatgatttccaacaataagtggaaagatgcgactttatcttcggagactctggagaaactgtcccctgagcagactgttcagctatatgaactgatgaaggaaacgcagaagattaaccacgatactgaaacgacgccaaccaagaatataaaaccaactaaggactag

SEQ ID NO: 2902 - DNA, 1773 bp, Saccharomyces pastorianus
atgacgaagcctaaacaggagactgaaatagaagagaaacacatgtacactgagccggcctcaacgttctttcatgacgtagaagcttctcaaacaaatcacagacgtggatcattatcgctgaaagatgagaagagtaaggagatgtacccattgcgctcctttcccactagagtcaatggccaggataccttctctatggaggaagatatccaggacgaggacgaaggcgaagtgcagaacgctgaagtgaaaagagaacttaaacaaagacacattggtatgattgccctcggtggtaccatcggtactggtctgttcatcggtctatcctctcctctaatgaacgccggccccgtgggctctctgatatcttatttattcatgggttcgttggcttattctgtcacacaatcactgggtgaaatggctaccttcattccagtcacatcctctttcacagtcttttcgcaaagatttctgtcgcctgcatttggtgcagccaacggttacatgtattggttttcttgggcgatcacgtttgccctggagcttagtgtggttggccaagtcattcaattctggacgtacgctgtcccattggcagcatggattagtattttctgggtagttatcactgcaatgaacatgttccccgttaaatattacggtgaatttgaattctgggttgcctctatcaaagtcatagccattatcgggtttttaatctactgtttttgcatggtctgtggtgcaggtgtcaccggcccagtcgggttccgttactggagacacccaggtgcatggggcccaggtattatctccaagaataagaacgaagcaaggttcctgggctgggtttcctctttgattaatgctgcgttcacattccaaggtactgaattagttggtatcactgctggtgaagccgccaacccaagaaaatctgttcctagagccatcaagaaggttgttttccgtatcttgaccttttacgttggatccctgttattcattggtcttttggtaccatacaatgatcctaaattaacctcagccacttcttatgtctctacttctccatttatcattgccattgaaaactcaggtacaaaagtattgccccatatattcaatgctgttatcttaaccaccatcatttctgcagcaaattcaaatatttatgttggttctcgtgtcttatttggtttagccaaaaacaaattggccccaaagtttttttcaaggactactaaaggtggtgtcccatatattgcggttttcgccacttccatatttggtgctttagcttacatggaaacttcgaccggtggtggaaaagtattcgaatggttattaaatatcactggtgtcgctggattcttcgcttggttatttatctcgatatcacatatcagattcatgcaagctttgaaataccgtggcatttctcgtgatgaattgccattcaaagccaaactaatgcctggactggcatattatgctacttttttcatgataatcattatcatcatccaaggtttcaccgctttcacaccaacattcaacggtattaatttccttgccgcgtatatctctgttttccttttcttggcaatttggattttatttgaactgatattcagatgcagatttttctggagaattgaagacgtggatatcgattccgacagaagggacattgaagccattgtatgggaagatcatgagccaaagacactttgggacaaattttggaatgttgtaggataa

SEQ ID NO: 2903 - DNA, 3084 bp, Saccharomyces pastorianus
atgaccgggaaagtcaatagagacctattcttcaaattagcttctgatcttcaagaagaacgcctacatgcagctgtcgctttgatcaaggacttatctgctttagaattacccaatgattcagaagaatggtcatatgtattaaatcgtttgatcaagggtttggcatctgatagaaatagtgcaagattaggattttcgctatgtttaacagaagtaattaatctagctatgaatatgccatccggtcagcgtccgaagggtttggaatcaatgaatgaatttttggacacactgtcatttattctagatataaatgtcaatgacggcggtaagaagcctatcaagggtaaagacgaacgtgggattttatttgggaagctatttggtttgaaatcactattgaatgaacctttgttttcagaaatctttgtggaagacttaaaaaagggtaatactgaattcattatacgctttatggaacagttgatcgatttagctttgagaaaaaactggattaaagaaccatgcctttatagtcttttccagacaataaaaatgctactaccaactatgaatggaagcactgccaccgaaattcttttaacgtatgataaatatgatctaacattaacaaatgaaggactgtcaacctacttgttattgaagtatgaaagtgataaagacctagtttcttcggcactagatttgaagaacttgggctggaaaaacaacgatcctttagcaaaaggaaatctacctctattaacgaaagtcctaagggattctggtgtcgctccagataccaatggaaaggcacaagaaaataccaaaaagcaaaaaaatacaaattggaacccaagacttcattttgtttggaacattttgttgcctttattcggtagtgggaaactagagaacgcagagcacatctcgaagaaaagaaagaaagtcagcaacaaaaaagtccaaagttcgattcaatttccagagttttggcaaatggctgtggatgaatcatttttcaatgaaaaagcatcaagtgaaagaaaatatctaggtttcttaatcataggtgcaactttcaagactgtgcctggctcttgcattggctcttgctttagccgaaatgttatgagaactttaatcaaccaatctatagactcacaaagaattttgaataagattgctcagataactctagactctataatcaaggcctgtgaagaagatcccattaataagttagtcccttgtttaaactcgatgttatttggaccccatggttctataaactttgataagctaacgaaatctaacatcacctccaaacttatcgcgattaaggaattacctgcaactgttcttactcaattattcgatttatttgtactacaattgcaggagaagaaaggcgatataccccatacacatttcgtccttgattccttacttcatataatccgtgctcacaaagcagagattaatgatgtcgaaattatcaagcccgtgttgtcgccaattgtctctatggcatttttcaagcaagcaactgatgaccaggagttagagcaattacatgaactagcaaaagaaaggctatactccattttaggtgagctgactattaataaagaaatgcgttccgaagatcctgagataaactcgtggcaatttttgacattgaggttaattttggacatggaaaaatcccataaagatgatttaattaacccattagatgaaagactggaaaagactaaaaacgaagctatatcatccttgatcgaactatccaagtcaaacactagccaatcctggggcttaagcactttgctatctatgtgtttaatacagttatatgcgggcgaaacagactctatttccgtgattgaagagctgtgcgaatttgctaaagacgaaaatagttcaatggttggtattactgaaatactgttatcactactagctcaaaagaaggcattactcaagaagttgagtttaataatatggcaacagtttatcggggatgttggattgaaagaattgcaaatattattggatgttttgaaagccagagagaacaaacaagggtttgcccagttattcgaaggcgaaggagagtttgaagaagttgatgaagaagaaagtgctattgaagacgactcgaaaagtgaaagcgaaagcgaaagcgaaagtgaaagcgaaagcgaaagcaatgatgatgaagaaagggatgaagaagatgaagccaacgaagacgtcgtgaatatcgataaggaagctacaagtgcactaatcaaagcgctaaacttacctgataatatagtcaacgataaaggggaagtcgacatggaccagctcgatggaatttctgatgatggcgacgatggcgacgatgacgaagacgaagaatcaatggatgatgaaaagatgatggagttagatgatcagttatctgaaatcttcaaacgtcgtaaagaagcattatcgagtatatctaccggaaaccagagaaaagtggaagtaaaagaatcaagggaaaacgttatatctttcaagcatagaattgtggatatgttaaccgtttacgttaaacactgcgaaaaattggccattgctaataaaggtgaactttctagtgaaataggaggtccattgagcaatctgatttactttatcatccccatgatcaaatgtatcaaagagactcttgataggccacttgcggacaaaatttctaaattattaaaaggaaaaatcttcaagataaaaacgagtgcatttaaaaatctggacaaaactattgggcttctagatttattaaaatcaacacacaaagagatattaacttccaagccaggccaacatgctaatgtgttcttttccgcatgttcgacaagttcattatttttgagcaaattatatgtcgatattgacggcgaagataaatttgatgatttgatcgacttgtatgctagcactactaaagagtggacgcaaaagggaaaattcggcgtcaatgttctcattgatttcgttaattggttatcgtcgaaaaaggaaggtgttgaaaaaaaatga

SEQ ID NO: 2904 - DNA, 1536 bp, Saccharomyces pastorianus
atgatgatatctttgaagccaaatgttgttcgaatcttcagacaagtgcagcattgcagcatccgcatttgtcggtatcaatctacgaatccgaagaagtccctgacgcccttgcaagaatatgacaagctagtaaaaatggggaagctgcaggacgatacatatcaacgtggtattatctcctccttgggggaactgtatgattctttagtccgatatgtacctccggccgtcaaaacgcccaaccctgtggaccaattgggtggttggtggttgaaaggcctcaaatctgtcttcggtcgtggcaaatccaaaaaccttggagcagacgtggacgtatccagaattggtaattcaatacctcgagggatatatttatatggagatgtcggttgtggtaagacgatgttgatggaccttttctacactacagtccccaagcatttatcgaaaaagagaatacatttccatcagttcatgcagtatgttcataaaaggtcgcatgagattgttaaagagcaaaacttaaaggagttcagcgatgcaaaaggcaaagagattgacacagttccatttttggctgcggagattgctaatagttcgcatgttctttgctttgatgaatttcaagtcactgacgtggcagatgctatgatactgaggagactaatgacagccttattatcggatgactatggtgtggtactctttgctacttcaaatagacatccggatgaattgtatattaatggggtacaaaggcaatcgtttattccatgtatcgagttgataaaacatagaactaaagtcatatttttgaactcgccaacagactaccgtaggattcgaagaccgatctcatccgtttactacttcccagcagatagcagcataaaatattcatcaaaagagagtaaaaattgtcgggaaacccatatcaaggaatggtacgactacttttctcaggcttcccataccgatgactccacagattttcattcagttcataagacattttacgattatccattgaccatttgggggagagaatttaaggttcctaaatgtacgcctcctcgagtagcacagtttaccttcaagcaactgtgtggtgaaccgttggctgcaggagattatttgacgttggccaagaattttgaagcttttatagtgacggatattccttatttatctatctatgtccgcgatgaagtgagaagatttatcacgtttttagatgcagtctatgacagcggtgggaaactagcaaccacaggtgcagcagatttcacttcattgtttgtggaacctgaacaagtgctaaatgaatttgaattacgcccagcaattaaggaaaacgatgcagtcgacagtgaactactagataagatggtcgaaaagcacggattttcgaaagagattgccaagaaatcgcagatgtttgccctcgatgaagaaaggtttgccttcgctcgtgccttaagtagactgtcacagatgagctccaccgattgggttaccaagcccaaatactga

SEQ ID NO: 2905 - DNA, 876 bp, Saccharomyces pastorianus
atgtccgaatatcagccaagtttatttgctttaaatccaatggggttttcaccattggatagtttcaaaccaatcaacgaaaacacttctaccttcacctcatcttctatcgctaaaccagtcgttggtcaattaatcttcgataattttatcaaggctgaagaagacccaatgatcaagcaagatgctccttcaaaccttgattttgattttactctacctcaaacagcaactgcttccaacactgagactgctttaccaatttcagaactagacgccgctgtggtagaatctttcttctcttcaagtactgattcgactccaatgtttgaatacgaaaacctagaagacaattctaaagaatggacttctctgtttgacaacgacattccagtcacctccgatgacgttttatcggctgacaaggcaattgaatctactgaagatgcctctttggtaccatctaacctagaagtatcaacaacttcatttttgccaacccctatactagaagatgctaaattgagccaaaccaaacgtgcaaagaaaccaaattctatcgttaagaaatctcatcaccaccaccatcataaccacgatgaagatgaagatgatgaagaatcgagactagatcacttaggggttgttgcttacaaccgtaaacaacgctcgattccactgtctccaattgtgcctgaatctagcgatcctgctgctctaaaacgtgctagaaacacagaggccgcaagacgttcccgtgcaagaaagctgcaaagaatgaagcaactcgaagacaaagttgagcaactactgtccaaaaattatcagttggaaaacgaggttgaaagattgaagaaattagttggtgaaaattga

SEQ ID NO: 2906 - DNA, 1011 bp, Saccharomyces pastorianus
atgaatgatgaagacaagacgatattagaaaatcaaagtagttcgtcactagcgaacgacaattgtacaaccacgatcaaaacaaaaagtccgaaaaagaatagtgatccgagagttactgctattgcgggcgctctatctggtgttttatctggaatattagtttgtcctttcgatgttgcaaaaacaagattacaagcacaaggtcttcaaaacattagtcatcagagtaaacattataatgggttttttggtacgtttgccaccatttttaaagatgaaggcgccgctggactttataaaggtttgcagcctacgatcttaggatacataccaactttgatgatttacttttccgtctatgattttagtagaaagtattctgtcgacattttcccgcacagtccatttctctcaaatgcttcctctgctattacagcaggtgccatctcaactgttgccacaaatccaatatgggtagttaaaacaagacttatgctacagacaggcattggagaatactcaacccactataagggtactatagacactttcaaaaaaattattcaacaagagggatttaaggctctttatgctggtttagtacctgcccttttggggatggtaaatgtggccatacaatttcctttatatgaaaacttaaaaattaggcttaaatattcagaatcgactgacttaccaacagatttaacaagctcgaactttcaaaaattgatattagcgtctatgttatcgaaaatggtagcctctactgtgacttatcctcacgaaattcttcgaactcgaatgcaattgaagtcagatcttccagatgctgttcaacgtcatctgctcccgttgattagaattacgtataaacaagagggttttgctgggttttattccgggtttgctactaatttagttagaacagtcccttctgctgtggtaacattggtatcatttgaatactctaagaaatatttaagcaatctttttgataaagtataa

SEQ ID NO: 2907 - DNA, 2295 bp, Saccharomyces pastorianus
atgttggcacttcggagatttatattaaacaggaggtccttgaggtcatgtactataccaattcttattggtgctgtaatcattattttaggcctatttcaactggtaatgcgccgagatgatacactcatacagcctgtcgattcaaagaacgggaacaatgcaaaagtaaagagcgaggaccaaaaagtgctagagaaagcctttgggtctcctgtaaaagatccggtatacagtgttccagtatctccactagaactagtcccattttatgacaggttcatagattctaaaagaaaatctagttggttgattaataaaaatagttactataaacatttcaatgagttaagcctggatgaccgatgcaaattctatttccgtaccctttacacattggatgatgactggactaacagtgttcataaactggtgtacggcatcaatgacgatatatctgatgaagctaaagaactcaaaaaagattccgatggaaacccctttccagatgaacaatccgagaagctataccacagaaaatacgatatgtttttatcctttgaaagaatcagagcttacgataagtgctttatgcaaaatagtccgattaatatccaagacgttttcccaaaaaaggatagtaagccacaaagggagagcgttcaatcgaaattaatcaagacactaaatgtcacatttccatcaactgatacgcagaattacaagaagtatgaccaatttgaattcgagcgcaagatgtttcccttcgtaaatagttttaccgctgaaacattccacgaaataatgccaaagatcacatcgcctttcggaaaggtattggagcaaggtcagttacctaagttcaaccatgagacaggtaaggtcgatgaattctttgaatatgaatatgacccaacaaaaaccttctgggccaattggagggacatgagcactaaggtatgcaagcgtggtatcgtgttgagtttaggtagtaaccagtttgcattagccgttaaattcattgcttctttaaggtttcaagggaatacattaccaattcaaataatttatagaggtgatgaactgccacaagatatggtagaaaaactcatgtacgccgctagaagccctgagttcaaaccagttgaaaatagttacgacaactctactaatgttccgcaagaactttggtttttagatgtgtctaataccgtacatccggattggaagaatgacttcggtagttatagaagtaaatggctggtagtactgttcaatcttttccaggaattcatatttttggatatcgatgcgattagttaccaggaattagataaatatttcgaaagtgcggaatatcaaaaaacaggtactgtattctacagagaaaggtcactgaatgaaaacgtacacgagagatgtattgccaggtatgagacgcttctaccgagaaaactggaatctgaaaacttcaagaattcacttatgttcgatgctgaaaatgttctcaatgaatgtgacaagctcttaacaacagaggagtacatattcaaagcattctttcgtcatagaagacagcaccagttagaggctggtttatttgctgtagatactgcacagcatacaatccctctagtgcttgccagtatgattcatttagccaaacatacaagccactgtacacatggtgataaagaaaatttttggttaggattcttagcttcaggccatccttacgcactacagaaagtgtattccggcgcgattggcgattacgtcaagaaaacggacttaaatggaaagaggcaagaagctgcggtcgagatatgttccggacaaatagcccatatgtccactgatgacaaactactttgggtaaatggtggagggaccttttgtaagcacgaaaatgcagccaaaagtgattggaagaaagacggtgacttcaataaattcaaagaccaattcaaaaacttcgaagaaatggaaaagtactattatataactccaattagcagcaaatacgtgatcttacctgatccgaaatcggatgattggcatagagcatcagcaggtgcttgtggtggttatatatggtgtgcgacacataaaacgatcttaaaaccatacagccataatgaaagaacgactcacggtcgactaatcgaaatcgatgccgaccagcaggcacgtataaacgctgtcaacactgtttggtcacatgccaataaagataatacaaggtcattaactgaggatgagataaaaaagttagatacttcaagtcacgagtag

SEQ ID NO: 2908 - DNA, 438 bp, Saccharomyces pastorianus
atgatgggccccgacacaaaacactccgcaaaggccaagatctttaccaagaaaagctcgccttcgaccaaggaacacatccggcccaggaagcctcaggtagccgttccgccggcgcaaaatctgcccaacggcgacagaccaaacttcggcaacgctatcaagcagcatcgagagccgaggggccgcgccgccagggcaagacacgaagacgccgaggcgacgatggttactgtcaacatcgacgggttcttgagcgataagacccctaaaaaaaagtcatccaggaataagaagaagaaatcaagacacccccaagatgctgcggtgacaatagattccaaagcacgggaagctacccataccgttttcgccggtgcctctttcactaccgatatcccgcacgagaaagcactgcccaagcctagttttgtttga

SEQ ID NO: 2909 - DNA, 1497 bp, Saccharomyces pastorianus
atggactataaaaatgattttattgcaagccctgacccacttctaaatggcaggcataactcctcagtgtatacagatttgctatctgcaagcaatgcttcaaaagagcacaaatgcaagcaacaacagcaacaacagccagtgggccttataaatgctaattttaatccttaccatcaaaatactttaaacgaccgctccgtgcaaaaaaatttgggcccaatgtttcaaccctttggtatagatgtcactcatatgcccatcaccaaccctcccattttccagagctctttgcctgcgtttgatcaacctgtgcataaaagacgtatatcaatctccaatggacaaatcagtcaattgggcgaagacttggaagccgtcgaaaacctttacagcattgagcctcctttcctatcgtcaaagacggaacacaatcctgagccgcaactagtcgcaaatccaagtacagccacgtatccaagtttcggctctagcgaactgccgaacttggcacaaccacaagctaccgctgtacccgaggttgttcctcaggcaagtggccaaaatatttttcctcccccaacaccattcgatagtaacagcagtcttcatttatccgcagcaactgccgctgctgccgctgccgctgccactgctgcctctcctgttccacgcaataacgccgctattaaccaagcatacattaatatgcaactccgattacaagcgcaactgcaaagccaagtttggaagagtgcgcaggtaagcgtaaatccatccaccccggcgtcttcttcttccgtctcttcttctacttcatcaacttcttcttcttgccaaaatagtcatgatcaaaataacgaacccctacctatctattcttcaatacctcacaacggtaataacaatacagcctgtaataacgcaataaaaaacgacggtacaagcggtgcagctgatattaactcaacaaacgtttacttaaaacaggaatataacgaaagaattcctgcggtcggtgataacacaaataacaagttagccataccaaaccaatctgtttcatcaccggccttagcgtctgtgactactgctagctctcagtttgtacatgagccttttctgcggaaaagtggcaccagttctggtgacgttgaaactactgccaaagcatggaaacgcgcaagactactagaacgaaatagaattgctgcgtccaaatgcaggcaaaggaagaaaatgtctcaattacaattacagaaggaatttgatcaaataagcaaagataatagcataatgaagaaaaaattagaaggctacgaaaaattggttcaaaaaatgaaaaaagtctttaaagtgcactcacaagaatgtgcgctacccattaataccaaaggtaatccagaggctagaaacgcacattatcacactagcgatggttgtgtgtctttgaagatgattgaagaattgattgaaagctcgggtctggatggctga

SEQ ID NO: 2910 - DNA, 1578 bp, Saccharomyces pastorianus
atggactttcatactacatcgagccattcaaactgggtcgtacaaaagttcggaggtacttctgtcggtaagttccctatccaaatagtggatgacattgtaaaatactactccaaccctgacggtaccaacaatgacgtcgctgttgtttgttcagcccgttcctcatacaccaaggcggaaggtactacttctcgtctcttaaaatgttgtgatttagcctcgcaggaatcagagttccaagatattattgaagtcatcagacaagatcatatagataacgctgatcgttttattctcaatccggccttacaaaccaggctagtcgacgataccaataaagaattagaactagtcaagaaatatttgaatgcttcaaaagttttaggtgaagttagttcacgtactgtggatctggttatgtcttgtggggaaaagttgagttgtctgttcatcactgccttatgtaacgatcgtggttgcaaggccaaatatgtggatttaacccatatcgttccttctgattttagtgccagcgctctagacaatagtttctatacctttctagtccaggcattgaaggaaaagctagtgccttttgtaagtgctaaagaacgtattgttccggtcttcacaggattttttggtttggtccccacggggcttctaaatggtgtcggtcgtggttacactgatttatgtgctgctttaatcgccgtcgctttaaatgctgacgaattacaggtttggaaagaagtggacggtatcttctccgccgatcctcgtaaggttcctgaagcacgtttgttggatagtgtgactccagaagaagcttctgaattaacatattatggttctgaagttattcatccgtttacaatggagcaagttatcagagccaagattcctatcagaatcaaaaatgttcaaaatccattaggtaatggtaccattatctacccagataacatagctaagaagggtgaatctaccccaccacatcctccagagaacttatcttcatccttctacgaaaagaggaagagaggtgccactgctattaccaccaagaatgacatcttcgtcattaacatccactctaataagaaaacattatctcatgggttcttagctcaaatatttaccattttggacaaatttaaattggtcgttgatttgatctctacttcagaagttcatgtttccatggctttacccatccccgacgcagactcactaaagtccttgagacaagctgaagaaaaattaaaaattttaggttctgttgatgttacaaagaaattatccattgtctcattagttggtaaacacatgaagcaatacattggtattgctggtaccatgttcaccactctggcagaagaaggtatcaacattgaaatgatctcccaaggtgccaatgaaatcaatatatcctgcgttattaacgaaacagactctataaaagcactacaatgtatacatgcgaaattgctaggtgggcggacatctactccaagccaattcgaacacgccgttgatgaacgtttagaacaattgaaaaggctaggaatctaa

SEQ ID NO: 2911 - DNA, 1659 bp, Saccharomyces pastorianus
atgtatattaaggcagagcagaaacccccacaattcaaaaagaatgatgagaaatcacacagaaataaaaatcagcggctaccggatctcgaaacggattttaaggaccacggggttaatttggacttatacaggaaggatatgaatggcagcgctgaggagacgttaaactctctgaaatttttgcataaacctcaacgagtaacacagatgagagccaacaggttcccagaagaagaagtacaaaggaacactaacttaaacaagaggatttcttcggcaaggaacgatgaaaactctgaaaacgatgacgatagttccagcggtggacccgccacgggcaagactgaagcaacatcaaatagcagtgcaaagtatccattcaagatagagctgcctccgctttctccaagatcattcttagctaccccctcttacgaaactgaatatccggagaccaagtctcctggcaatgatatgaactttgaatacgatgaagagattctgattccatttgcgcctcctgtatataagaagtctggcgaactgctaaaaagctcactgaagagaagatcaaagtcgcttcccacaactccgggtataagggagagcaggggggacggttgccgaaggggaggtgatggtcctgtgttacttagaagtaaaagtgtccatttcaatcaagccactccggtaaaatacttcgcagaagacgaaagccctataaatgtcaataaaactgaacagtacgataaccgcttgagttttaagcataaaccagtgaacttgatggtagacccagatgaggaggaaaaactgttatctttgggattagaaactacttctattggtgacgatttgacaacggttgcacccaagggctttactaaccctgctaaaaatccaaatgctagtaatggcaacagtattaataacactaaattaaggaaaagtaaaagattccagagtctcgtaaaaaataaaacggtaattccaccacccaaactcaataaaaatttcacgaatggtggtagcattgacgaattccagaaccgggattcgactaactaccacgttgtcgggctctatagtaagaatttccccattttgagcaacaagaacccaaaaagtttaaagttaaacatttttattaacttgtcacaaaacaaaaaagtcttcctacaagaattatcactatacattcacagagacagcaactttctttttagtaccccatcatttaataatattcccgaaggtcacaacaacaacaacaacaatgaaggcatcatgaacaagggtaataacaccggctgtacaagattaattgtgggaaggatattggtgaaaaatattttctatgataaaagagtggtgatacgatatacatgggatgggtggaggacggcgcacgaagtggaatgcgtttatattagcaatggagatggaatcttgccgggcaccgatatggacattttccatttcattatcgacgacgccagcaaacttgatcctcggggcaggctggaattttgtatccactattccacacgcaacgactataaacgagaggaatactgggacaacaataacgggaaaaattataaagttgaggttgtcatggatggtttcaaagatccgttcgcagtagtcggttga

SEQ ID NO: 2912 - DNA, 324 bp, Saccharomyces pastorianus
atgagtagagccagcaaaataacctttacagtatcctgtctaataacggcagtgacagtggtcggagtgcattatgttcaagaaatggaaagggaaactctacatcagggtccgataaaagatgccaaacgagtcgaagagaagagactgagaaacctaaatggcactgcaccaatagatcctacaaaagaaagaaaaagatatttcaatatgagtgagcatgaggaacagaaagagctgcggaaaaaatatgaggccatgcaaccgttaagtggagaagttgttacgaaggacggagaagtggtaaaggaatctaaggattga

SEQ ID NO: 2913 - DNA, 1329 bp, Saccharomyces pastorianus
atgtcaaaaagagtggttgtaacaggactgggttgtgtgacaccactaggaagaacgttaaatgagtcatggagaaacttactctcttctaaaaatggactaacaccaatcacatccttacctgactacgaaaaggagtacaaacccagagagaagagcattccatcgacgataaccgtagggaagatcccagaagactttcatgataaggaatccgccatctccaagttactatttacaggccaagacgaaagaagaacctcaagcttcatcaaactagccgtacgtacgacatatgaagctcttcaacacgccggtctcttacgcccaaatgaaataaacattaacacatcactttgtaatttggaccactttgggtgcctgataggatctggcataggatctattcaggatatataccaaacctctttgcagttccataatgataataaaaaggtaaacccttattttgtcccaaagatcctcacaaacatggcagccggtaacgtgtccataaaattcaatctgaaaggattatctcacagtgtttctacagcatgtgcaacaggtaataattccattggcgacgcattcaatttcatccggttgggcatgcaggatatctgcgtcgctggtgcaagtgaaacgagtttacatccgctaagtttagcaggatttatcagagcgaaatcaattaccactaatggaatatctagaccatttgacacagaacgctctgggttcgtgcttggtgaaggatgcggcatgctcgtcatggagtccttagaacatgcccaaagaagaaaggcaaatataatatgtgaaatagtcggctatgggttaagtagtgatgcctgtcatatcacctcccctcctgctgacggaaatggtgccaagagagcgatagaaatggccctcaaaatggctcacctaaaaccgagcgacgttgattacgtcaatgctcacgccacatcaactttattaggcgataaagcagaatgcctggccattacgtctgcacttttgccaggaaggcccgaaagtaaaccattgtatatatcaagtaacaaaggcgcaattggccatcttttaggtgcagctggtgcagtagaaagtgtgtttacaatttgttccctgagggatgatatgataccacatacattgaacctaaagaatatactacatctggaaaatgacgagtccgacagactatattttgtaagagataaacctatagaaaaagctaatccgaaatacgcattatgcaatagcttcggatttggaggaatcaacacatctcttctttttaaaaaatgggagaaaatctga

SEQ ID NO: 2914 - DNA, 1524 bp, Saccharomyces pastorianus
atggctacccatatcaaaatccaaccggatattgactccctgaagcaattgcaactggaaaatgacgatgtttccataaatatgtacccggtgtatgcgtacttgccatcgttggacctgactcctcacgtggcatatctgaagctggcgcaactgaacaatcccaacagaagggaatcgttcctattggaaagtgccaagactagcaatgaattggaccgttattctttcatcggtatttccccacgcaaaatcatcaaaacaggccccactgaaggcttggaaaccgatcctttggagatcttggaagaggagatctcttcgtttaaagtggcagaaaacatccccggtttacccaaactaagtggtggtgctatcggttacatctcttacgattgtgttcgttatttcgagccaaagactagaagacctttgaaggacgttttgaaactcccagaggcatatctaatgctctgtgataccattatcgcctttgacaacgttttccaaagatttcaaatcatccataacattaacactaacgagacttcgctagaacaaggttataaaaatgcagtggaaataatcaccgacgttatatccaaactaacagacgactcttccccaataccatacccagaacagcctccaatcaagttgaatcaaactttcgaatctaacgtgggtcaagaaggttacgaaagccatgtctccactttgaaggagcatatcaaaaagggagatataatccaaggtgttccatcccaaagggtggcaagacctacttcgttacatcctttcaatatttacaggcatctgcgtaccgtgaacccttcgccttacctgttctacatcgactgtctggacttccaaatcattggtgcgtctccagaactattatgcaagtcggattctaagaataaagtgatcacgcacccaatcgctggtactgttaagcgtggtgctaccacggaaaaggatgatgctttagccgaccagttgcgtggctcgctaaaggatcgtgctgagcatgtcatgttagttgatttagcaagaaacgatatcaacagaatttgtgatccattaacaacaagcgtcgataagttgttaaccgtacaaaaattctctcatgttcaacatttggtttctcaagtgagcggtactttgcgccccgaaaagacaagattcgatgcattcagatcgatcttccccgccgggacggtcagtggtgctccaaaggtcagagctatggaattgattgctgaactggaaggcgaaagacgcggtgtgtatgcaggtgccgtcggccactggtcatatgacggtaaaacaatggacaactgtattgctctacggaccatggtttataaggatggcattgcctacctgcaagctggtggtggtattgtttatgactccgatgaatacgatgagtatgtagaaactatgaacaagatgatggctaatcatagtaccattgttcaagctgaagaaatgtgggcggataccgtggggaccgtttga

SEQ ID NO: 2915 - DNA, 957 bp, Saccharomyces pastorianus
atgcctacgaatagtatcaaattacttgcaggtaattcgcaccctgggttagctgaacttatctcccaaagattaggcttaccattatctaaagtcggagtttatcaatattcaaataaagaaacatcagtaactataggagagagcattcgtgatgaagatgtgtacattattcagacgggatatggagagcatgaaataaacgattttctaatggaactacttatccttattcacgcctgtaagaccgcctctgtaagacgaattacagccgtcataccaaatttcccttacgccagacaagataaaaaagataagtcccgtgcacccattactgcaaagctgattgctaatctcttagaaactgccggttgcgatcatcttatcactatggacctccatgcttctcaaattcaagggttttttcacattccggttgataatctatacggagagccaagtgtattgaattacataaggaccaagacggatttcaagaatgccatactggtttcgccagatgctggtggtgctaaaagagttgcctctattgcggataaactagacatgaattttgcactgattcataaagaaagacagaaggccaatgaaatttcacgaatggtgcttgtcggtgatgttgccggaaaatcgtgtttactaatcgatgacatggctgacacatgtggaacactagtaaaagcctgtgatactttgatggatcatggtgccaaagaggtaattgctattgttacacacggtatattttctggttcagcaagagataaattaaaaaatagtaggttgtcaagaattgtttgtaccaacacagtgcctgttgatttgaatttggacatactcgaccaagttgatatcagtccgacgatcgcagaagccattagaagattgcataatggtgaatcggtctcttatttatttacatatgcacctggttag

SEQ ID NO: 2916 - DNA, 942 bp, Saccharomyces pastorianus
atgcgagaaaaaaactatagtaataaaacattttctaataataatgtaaactacttaaagttcccgaacaaactgcaaagatattctcgattcttaaacaacaaaaaatttgatagaagcccatcaaaaaaatctaaattcagatatgcagagagaagtccgcctcgtctcgtcgacgaccacatgaacaactcgacaaataggaaggaaaacgttaacaattatataccagaagaaaataagaatactcaagagctacaaacggacgacctggaaaacggcgtcagaacgaaattgacaaagagtagtttaaaaaaactacaaaaagaagtattcgacaaagaactcaataacattgcctgccaccatggcctttgcagtaccaaaaatagaaaagatatcaaatattcacgactctggtttctgttcgagttagaaatgagcgaagattggaaagaaaaccttcggctcagctgttataataaatacgtgtattctgcaattgatgaatcttggaaaatggaaaatatactattaaaggaacaagaaaagtgttatgagtattttcctatacagcaattacttatacccgctatttctgaatcttccaataggcgaaagagcttggaaaacattcaagacttaacagtaaatgttgatagcattatagaaattaatcatgaaaagcaaagattattgccaagaagctttttgacaagaagggaaaatgaggttgcgtttaatgacttccaattggacgccaaaaagattcttgaagatttgagttcaacttctgaaaaccccttcggctcatttaactcttccccaagtacaaatatggttgagtcagagaagaaaatattaaacacagttcccaaaaggagaaaagagaaaaaaatcctgggtgcgctagaaaaaaaactatatttggatgaaaaataa

SEQ ID NO: 2917 - DNA, 537 bp, Saccharomyces pastorianus
atggccaattatccagacgtggctgcatttgacttagattataccgtctggccttgctattgtgacactcatttacatggtcccttcaagccggtgaaaagtaaaaatggcgaagtactcacaattatttgtagagatggttacgagctcacaatttataaggacattccacgtatactgagcgatttaaaggagaataaagttaaactaatgactgcatcaagaacatgggcccctgaaattgcgcaggaaatactgaaaatatataaagtcaagtacaatggctccttacttccgttggccgatttatttgacgagtttcagtggggtgagagaagtaagatcggccatttgagggacggtttaagagatctttatggcactgacgatttaaaatcaaaaaaaatatgtttatttgatgatgaaagtagaaataaagaagtagagaagtttggcgtcaaattcgtttatgtaacagatccagaaaacggaccttcttggaagctttatcaagactacctggatggaaagtgttga

SEQ ID NO: 2918 - DNA, 426 bp, Saccharomyces pastorianus
atggagcaaataccaataacaacactgctgccacctataaaaccggaacatgaggtgtcactggacgccggagaagctgcagcaaatcatccggccagtagctcgcccaacaacggcgagttaagggacgtgttcgacagaataaagacgcacttcccacccgccaaggtgaagaagataatgcaaacggacgaagatataggcaaggtgtcgcaagccacaccagtaatagcgggtaggtcgctagagttcttcatagcgctgttggtgaaaaaaagcggggacatggcaagagatcaaggaaccaagagaataaccgccgacatattgaagaagacgatactaaacgacgaaaagttcgattttctaagagagggggtgtgtgcggaagaaagccaagcacaggaggaagaagagagcgcataa

SEQ ID NO: 2919 - DNA, 4734 bp, Saccharomyces pastorianus
atgtcgagcacaattccaggtagaggaaatacacccatgtcaccgttcgaagatacgtttcagtttgaagagaatagtagcaacgaagatacacatatcgggcctccccatgtcaatgatggcgtaccagctaatgaatacagtcggccacgagttagttttaatgacgaaccacccaaaagtaaacgcgaagaggctgaagaattcacttttaacgatgatacagaatacgacaaccattcatttcaaccaacaccgaaactaaacaacggatcagggacgtttgacgacgtggcattagacaatgacaatggagactcaactgcagactacgatggcatgaaaagattccggatgggtacaaaaaggaataaaaaaggtaacccaataacggggaggtcaaagaccttaaagtgggccaggaagaatatcccgaacccattcgaagatttcacaaaagatgatgccattgatcccggtgccataaatcgtgcacaagagctaagaactgtatactataatatgcctctaccaaaagatatgatagatgaagaaggcaaccctatcatgcagtatcctcgtaataaaatcagaacaaccaagtatacccctctaacattccttcccaaaaacattttatttcaatttcataatttcgccaacgtttattttttagttttaatcattttaggtgcatttcagatttttggtgttacgaatcctgggttaagtgcagttccattagttgttattgttatcatcacagccattaaagatgctattgaagactcgagaagaactgtgttggatttagaagtgaacaatactaggacccatattttggaaggtgttgacaatgagaatgtttccacagacaatatttcactgtggagaaggtttaaaaaagcaacttcaagatctctattgaaatttatacagtattgtagagaacatttaaccaaagagggtaagaagaaaagaacacaaagaaagcgtcatgaactaaaggcacagagagctgctgcaacaaacggaccgaggtcttccctagactccgttgaaagttaccgtgtgtcagcagattatggtcgcccttcactagattacgataatatgggacaaggagctgctaataatgatgaagccaatataattgacagatccctaccacttagaacggattgtaaatttgctaaggactattggaaaggtgtgaaggtcggtgatattatccgtatccacaataatgacgaaatacctgctgatattatcttactttcaacatccgatgcagatggtgcgtgttatgtagaaactaagaatttggatggtgagacaaacttgaaggtacgtcaatcgttaaaatgtaccaattccataaggacttcaagagatattgctcggacaaaattctggatcgaaagtgaagggccccactcaaatttgtatacttatcaaggtaatatgaaatggaagggtccaacagatggcgagacaagaaacgagcccgttactataaataacgtcttacttcgtggttgctctcttagaaacaccaaatgggcgatgggtatagtcatgtttactggtgatgatacaaaaatcatgttgaactctggtattacacctactaaaaagtcaagaatttcgagagagttgaactattctgtcattatcaattttttacttcttttcatcttgtgttttatttctggtattgccaatggtgtatactacaaaaaaaaagatagatctcggttttccttcgaattcggaacagttgctggatcagcggctacaaatgggttcgtttctttttgggtcgccgttattctttatcaatcattagtccccatttcgctatatatctctgtggaaattattaagactgcacaggcagccttcatttatggggatgtgttactttacaacgcaaagctagactatccttgcaccccaaaatcctggaatatttctgatgacttgggtcaggttgagtacattttttcggacaagacaggtacattgacacagaatgttatggaatttaaaaaatgtactatcaatggcatttcatatggtagagcatatacagaagcattagcagggttgaggaaaagacaaggtatagatgtcgaaagtgaaggaatgcgtgaaagagccgaaatatctaaagatagagacacaatgattgatgaactaagagccttatctgggaactcacagttctatcctgaagaagttactttcgtgtcgaaagagtttgttcgcgatctaaaaggtgctagcggagatatccaacaaaaatgttgtgaacactttatgcttgctttagctctatgtcattctgttttggcagaagcaaatcctgatgatccaaaaaaattggatattaaggcccaatctccagatgaagcggcgttagtggcgactgccagagacgtggggttcagttttgttggaaagactaaaaagggcctaattattgaaatgcagggtattcaaaaagagtttgaaattatgaatattttggaatttaattcatccagaaagagaatgagttgtattgtcaaaattccagggttatatccagaagatgagcctaaggctcttttaatctgtaaaggtgccgattccgtcatatactcaagattgagtcgccagaatggtgccaatgatgaaaccgttctagaaaagactgctttgcatttagaacaatacgctactgagggtttaagaacattgtgcatagcccaaagagaattaagttggtctgaatacaaaaaatggaatgagaaatacgatgttgctgccgcatcgttagccaacagagaggatgaattagaagttgttgcagattccattgagcgtgaactgatattgttgggtggcacagctattgaagaccgtttacaagacggtgttccagattgtatcgaattgcttgcaaaagcagggataaaattatgggttcttacaggtgataaagttgaaacggcaataaatatcggcttttcttgtaatcttttgaataacgagatggaattactggttattaaaacaactggtgatgatgtgaaagaatttgggtcagatccaagtgagattgtggatgctttactttccaagtatttaaagcagtattttggattaaatggtatcgaagaagaagtttttgaagcaaaaaaggatcacgattttccaaagggtaactacggtgttgttatcgatggtgatgcgttaaagctagctttatatggcgaagatattagaagaaaatttcttctactttgtaagaactgcagagcagttttatgctgcagagtttccccatctcaaaaggctgccgttgtaaagctagtcagagactcgctggatgttatgactttggctattggggatggttctaatgatgttgccatgattcaatctgcagatgttggtattggtattgctggtgaagaaggtcgacaagctgtcatgtgctcagattacgccatcggtcaattcaggtatttggccagattggtacttgtacatggtagatggtcctacaaaagattagcagaaatgattccggagtttttttacaagaatatgattttcactttggcattattttggtatggcatctacaataattttgatgggtcttatctgtttgagtacacgtacttgatgttctacaacttagcgttcacgtctttaccagttatcttcttgggtattttggatcaggatgtgaacgatacaatatcattaatcattcctcaattataccgtgttgggattttgaggctggaatggaaccaaaggaagtttttatggtacatgctcgacggattgtaccaatctgttatttgctttttcttcccatacttgacttatcataagaatatgctggttacgagtaatggattagggctcgaccaccgttattttgttggtgtttacgtgacaactgttgccgtaatatcgtgtaatacttatgttctattgcaccagtatagatgggattggttcagtggtctattcattgcgctgtcgtgtctcgtcttgtttacctggtcaggtatatggtcttctgctatagcaagtcgagaatttttcaaggctgctgcacatatctacggaactccatctttctgggctgttttcttcgctggtgtgttgttttgcttattaccgcgtttcacttatgacagtttccaaaaatttttctacccaaccgatgtggaaatcgtaagagaaatgtggcaacatggccatttcgaccactatccggttggctatgacccaacagaccccaacaggcctaaagtcacaaaagctggggaacacggtgagaagatcatagaaggtatagcactttttgacaatctaggcacatccaactattcaagagacagcgtcgtgacagaagagatcccaatgacgttcatgcacgaagaaaacgagaccccaagcggatatcagaagcaagaagcctggatatcctcgccaagagaaacacaagatctactccagtctcctcaatttcagcagacccaggcgttcgaaccgggacctacctccaaagttaggtcgtcgctagaccgcacaagagagcagatgatggccacacatcaactagacaacagatactctgtggagagggcaaggacgtccctagatctaccgggcgtaacgaacgcagcctctctgatcggaacccagtggaacaacagattatga

SEQ ID NO: 2920 - DNA, 636 bp, Saccharomyces pastorianus
atggccaccaaacaaatattgagacggcaaatcaagagggcgataagggcccttgattacgatactatcgctacagaatcacatgctatatctcaagtagtacggtcattaattgcttccactcacgctaaaagtgtagcatgttatatgagcatggataaaggagaagtaacaaccggagaaatcatcaagaacctatttaatgatggaaaagaggtttttttgccaagatgcacacatacttccgaatccaagcatttcaaattacgggatgaccatcatccacatttaatattccatcgaatgactagtttgacaatggtacgtgatttgaagccccaaggtccatatcaattaaaggagcctgaatcccacttcgaggaagccaccgatttggatcttgttttggtgcctggggtggcatttgatctcaaaaccggtgcaaggatgggccacggtgctgggtactatgatgatttctttcaacggtataagatagttcatgatggccataaaccacttctagttgggttatgccttgtagaacaagtgactgcgcctattcctttggagaaacatgatttccctatggactgtatagtatgtggagatggatccatacattgggttaaatag

SEQ ID NO: 2921 - DNA, 675 bp, Saccharomyces pastorianus
atgaccatcgttatcggggtattggcattgcaaggtgcgttcattgagcacgtacgacatgtggaaagatgcatcgttgaaaacaaagatcaatataacgagaaactatctgtgattaccgtgagggataaagatcaactagcaggatgcaatgcacttgtcatacctggtggagaatctactacgatgtctcttattgctcagagaacggggttttacaatgatctctacaacttcgtacatgatccaaggaaaaccatctggggtacgtgcgcgggtttgatttttctttcacaacaattatcctacgaagcaaagttggtcaagacgttagatttgctaaaagtcaaagtaaagagaaatgcgtttggaagacaagctcaatcgtttactgaaacgtatgacttctcgagctttatcccaaactgtactgatttccctgcaacatttataagggctccggtgatagaaaagatattggatcctaaggaggtccaagtcctctgtaagctagaagaaaaagacaacagcggtcaagagttaatagtcgctgcaaagcaaaatgacaacatccttgtcacatcatttcacccagaattagcagaaaccgatatacgttttcacgattggtttataaaggagtttgttttaaagaatttcaacagataccagtga

SEQ ID NO: 2922 - DNA, 675 bp, Saccharomyces pastorianus
atgaccatcgttatcggggtattggcattgcaaggtgcgttcattgagcacgtacgacacgtagaaagatgcatcgttgaaaacaaagatcaatataacgagaaactatctgtgattaccgtgagggataaagatcaactagctggatgcaatgcacttgtcatacctggtggagaatctactacgatgtctcttattgctcagagaacggggttttacaatgatctctacaacttcgtacatgatccaaagaaaaccatctggggtacgtgcgcgggtttgatttttctttcacaacaattatccaacgaagcaaagttggtcaagacgttagatttgctaaaagtcaaagtaaagagaaatgcgtttggaagacaagctcaatcgtttactcaaacgtatgacttctcgagctttatcccaaactgtactgattttcctgcgacatttataagggctccggtgatagaaaagatattggatcctaaggaggtccaagtcctctgtaagctagaagaaaaagacaacagcggtcaagaattaatagtcgctgcgaagcaaaatgacaacatccttgtcacatcatttcacccagaattagcagaaaccgatatacgttttcacgattggtttataaaggagtttgttttaaagaatttcaacagataccagtga

SEQ ID NO: 2923 - DNA, 2016 bp, Saccharomyces pastorianus
atgtcggatgtagataattgggagcctgtgtctgatggcgaggatacaacagattctgtgaagcaattgggtcctcccttcgaacataccaatgatgatgactgtgccagcggtggtgaacgtgggttgctgaaggatgtgcccctagaggcagagatcactggtgcacgcaaagaactcgtagtgatcacgaatcccagtactgctgatggtcagtcaactgaaatcaaacacgaccaatcgatgacgtcttcgacgtcatcgttctttagtgggatgatctcttcgtttaaatcaaacgtacaatctccgacttctaggtcaactactccaacttcaccagtatcccagccaaatatcatatctcataggagggagccttccataggctccaagagaaggtccagccgtcgtatcagcaacgccaccattgctgaagtaggttctccgctacaacaagtagaacagcctgatgaagtcaagaccaggcgcacaccctctctactgaaagatgacatttatgaccacaagcggttcgtggaggaaaggtatctggacacgcctttccactacgcctctgagcaaaggaacaaggatttccatgaatcatttaagtctctgcccggggaagataggctgttggatgattttaactgtggactcaatagagagttgctttaccaagggaagctctacattactgaatcacacctctgcttcaactccaatattcttggttggatcgctaaagtgctgattgcattcgaagatattacgtttatggaaaagacgtcggctgctgggttattccccagcgctatatccattgaaaccaagatgggaaaaaccctttttaatggatttatatccagagacaccgcatttggtctaatgaaagaagtgtggtcaagaaccctgttgcaaaaggacatagccagcgaaagccgcaactctagcaacgataaatcaggcaatggtaaggaaatcgacgatgcaataaactccatcgacgaagacaataatgataaagatattaatgataacgacactaacgataacgacaatgacatcggctgtaccgacgaagcctcctcaaaaagcaatattccttccctggacaaagagaaagcgtataaactacgtagtgattcaccgtatcagtatgatggtccactataccatcattcaacaagctttcccaccgaactaatggccgccaacgaatttgttatcaaggaattaccgttcaattgtgcaccaggtattctgtttgagattatgttcaattctgaacagaacgagtacctcttggatttcttacgaggccaggagggctcacaaatcaccaagattaccgatttcacgagcgttaatggagctcccatgccattgaaaagagagtattcgtacgaaaaggcattgcactttcctgcgggacctaaatcaacgacatgttatgttacagaagtaatagaaaggacagacccagagacgtattacgaaattatcagcagcacacgcacaccgaacgtacccagtggcggcagtttctcgaccaagacaaggtatttaattcgttggaacgatgaaataacctgtttgctacgggtgtccttttgggtagagtggaccggttccagctggattaaagggatggtcgaaaacggctgtaaaaatggccaactggaggctggacagctgatggaacgtattctcatcaaatttgttaaggacaatgtcgaagaatctcaaattgttatcaacaaggaacaagaggagcctgagaaggaacagttggaagagaagccagtggaggcagacgtcgaacaaccaagaggagttatcgccgccacactagctgtcgcagagcctcaaggtatcaaggtcaccacggaaacgtggctgttcttatacttgattgcgatcattctgctactgttgaatctgttttacttgcgctcaattgcaagttccctccgtcaactagtgaagctgaacctggtaggactgaagtag

SEQ ID NO: 2924 - DNA, 5262 bp, Saccharomyces pastorianus
atgtccaatattagcgctgatggaccgcaggtcacgcaggagggactcggcatcaacaggctctcccccatatcatcaaattcgaaccaaagttcattgacttcctccaactatgaaaaatacctacagctggccaccgagaagaacccttgtactatcctggagctcgaactggacggaaaagtgcggtatgcctcgccgcaatggaggatgctgataggggcagccggaagcaagtgctcttccgccacctacatcgcagacctgattctcgggtctgatcgagataaagccgtctttaaaacggcaacagaaatgctgcttatgaacgacgacaccagctatatgataacgttcaatatcgcggctgccgacggcgagggcagtgccacaacgaccctggaggcccgcggcatcctcatcagggatggccacacgcaatcgccctcccacaccatgtggatagtcaagccccgtacgaacgactggtccgacttctacgccaacgaagacgcacaggatgacatgatcatccagctctccgacgattgcaacgacatcgacatccagcttccggaggagttcgtaaagaccctcgggtttggcgccaagatcttcatacaatacctgaaaagaatacggctggaaatgatcacggacgaattcaacctgcccctgcccaagatggaactttgccgggtctgtgaaaatttcgtccccgtctggtggctggagacccattcgcaaagttgtgtttgcgagcatcggacagaatcactgatacaactgctgcacgacaacctcattgaacagttggccatcctgaccaatttcagcaaagattccgaatataagggcacgcaggtccaagtacgctccagtaactttctgaaccaggtcttggactccctgagggaactttgccaggattctatagacataaaccccagcgaaatggtcccagatctctaccacagtgtctcatcattctcccaagataacaacaacgctttactggaacaatttcctatccaaaaggacacagttagtttgaattcatactttcagttctcaccaagaacgaatcacaatattcaaaatgtcacgtcatggcaatccagattttttctcaatgatgatcaagacccaggtctagcacttttgattcatgatactttggacctggcacggaaaaaagtggatgccgttttgaggttggacaacgcaatgacctattctctaaagatcaaaaacgaggttaacaattacgtcgtccaattgattcgcgaacaaattgaaatcaacaagcacgccgctctagctcactcaatgaatataaggtcctcgtcactctttcattctctacctcccacacaggctcaacaaccggaaccggaaacagaaactctaatatattcttcctccactcccatacaggccccacacaatcgagtcacgtcttttgatacatcctgcaaatcacatttggatcttatacctttcccctcggcagccaccaaaataggctctagccacgacattagacagtcttccccaccgccccccacgtacaccgataccgttatgaaattgcccaaacctcaaaggaaaaccaattctggcgggctgttctccgatgcctacttgaatgccgacatcataccgaacctaaatatcgaatccacgatatcctttgataaggatcgtaacgccaacgccaacagcagcggagctagtagcaggaagccacacaatacagatgacacagcagagtctcgaaaaatcaacgttgacagaccatcctcctcctcctcttcgagactaggaataagatcgagatccataacgccaaggcaaaagatggaatactcgcatgtaaataacgacgaccgcacgaatgaattttttgtaagagacaaagactctcttcagtctcaaccctccacagataccactgtaacatcatctgctcaaacaaacacaacaggcatcaaatctaacggtaatagttctgcaaactcagtattgcccaaactaatgacaagtatttcgttgactccaagacggggttcgccattattcggaaatttaacgagccattctatgcaacaaacaaacagtttcaaattaattcaagagaaatcgccaatatcttccccattcacattctccaaggattttttaaccccggaacagcatccctccaatcttgctagaacagatagcatcaacaacacaatgctaacttcaccaaatatgccattatcaccacttttattggcaacaaaccaaaccgtcaaatcaccgacaccaagcattagggattatgacattttgaagccaatcagtaaaggtgcttacggtagtgtttatttagcacgcaaaaaacttacaggtgattattttgctataaaggttctaaggaaatctgatatgattgccaaaaaccaagtaacaaatgtcaaatctgaaagagccatcatgatggtacaaagtgacaagccgtacgttgcgagactatttgctagtttccaaaataaagataacttatttttggtgatggaatatttacctggtggggatttagctaccttgatcaagatgatgggatacttgcccgatcaatgggccaaacaatacttgaccgaaattgttgttggtgtggatgacatgcacagaaatggaatcattcatcatgatttgaaacctgaaaatctgttaattgataatgcaggtcatgtaaaattaacagattttggtttatcgagagctggtttaatcaggcgtcacaagtttatcccgcataagtcgtccctcagcattagttcgaatttaccaattgatcaccaagcaagcagttttactatgaatgctaacaatagcaatcattcacaattatccaccccggatagtttctcgtctgatcacaaatcaaccaacagaagcaagaagtcatcattaggccaacaacacgatccttccgaacattcaagtaattccaattcccactcaatgacaccaacaccgagttcaaacactattgtttatccttcttactacagagggaaggacaagtctcacggaagttcaaatcttgatcttccagcgtctttaagaagaagcgaatctcaattgtcattctctctgcttgatatttcacgttctagtaccccgcctttaccaagtcttcaaaattcgaataccaacaatatcatgagaagaaaatcactgaatgagaacaaattcctctctaatgatctattatctctagatgcaaccacaaccactaatgctaataccaattcgaataataacacatctatgtcaccatcgccttcagatttggccttgttctatcctgatgacactaaacagaataaaaaatttttcgggactccagattatttggcacccgagaccattgaaggtagaggagaagataataagcaatgtgactggtggtcggttggttgtattttttttgaattgcttctaggctatcctccgtttcatgcagaaacgccagatgctgtttttaaaaaaatcctatcaggagttattcaatggccagaatttaaaagtcaagaagaagaagaagaatttttaacaccagaagcaaaagacctgatccagaagttactagttgttgatccttccaaaagactaggcgttaatgggatacaagaaatcaaagatcagccttatttcaaaaacgtagattgggatcacatttacgatgaagaagcctcttttgtccctactatagataatccagaagatacagattattttgacctgagaggcgccgagctgcaagattttggggatgatattgatagtgataatggaaacattatttacaatagaagtagtaacaacaccgatgtttccgatctatcttcggctaacctctcgctgccattgaatcataagaatatgttatcccggagactatcgatgagtaataccactaatagaagcacaaacaattccaatagtagtgttcatgattttagtacacataccccagttaataaattgagtattgcttctgtattggaatcagtaccgcaagaagctggatatctcacaccgagtggaacaggtacgactacagttagtgccaaaaattcccctaatctgaagaacttatcgttggccataccgccacatatgagggaccgcagatcgagcaagttgaatgattcacaaacagagtttgggtctttcaatttcagaaatctgtctgctttagacaaagccaacaaagatgccattaataggctgaaaagtgaacatttttctgaacaacctggagtgcataggcgaacttcttttgcgtctttgatgggatcgttttcggatggttccgtatcaaccgtagggagtattgcttcgaataacacaccaagcagtaaaatgaaagtacacaaacccacaatatctggttctccttcaacatttagctctttccccaaaacttttttgagatcagattcattttctaccagatcatattctcctgaacgaagcattagtattgattcttcaacgttgtcgaggaaggggagtataattggagatggtcaacaagcaactgcaagtagttcggattcgcctacgatgactaaattcaaatcgccattatctcccgctaacactacaataccaaattcatatatttcaaggcagcgagttctatcaaaaagtttttcacaacgaactaattccagtgatttgtctgcagaggaaagtgatagattacaagctatttcaagagtcaattctttaagacacagaaggcgtagtggccgtaaaagctccagtacttccgagattggatatcatatggatgttcttgtctgtgaacctattccgatccataggtaccgtgttgctaaagacctagaaaatctgggttgtactgtcgttagcgttggtgctggtgatgaactagttagtagagccaccagcggtgtaagttttgatttaattatgacagccttaaaactcccaaagcttggtgcaatcgacattgttcaactgcttaagcaaacaaatggtgttaattcgacgacaccaattgtgtccattacaaattactttcaagaagcaatagctagtaaagctttcgatgatgttttagaaaaaccagtaaatcttgatgaattgaaaagattagttgccaagtatgcattgaaaaaatcgcaagaggatgaagagcatacaattctgagtgattcagatgagatgcatttataa

SEQ ID NO: 2925 - DNA, 2286 bp, Saccharomyces pastorianus
atgtgtccgttccccctagctgagtttccattgcgtgaacttcctgttccctataactaccgtgtgtccagcgacaaaagcactctagagagtggtagtgcggtggttgctgccgctggtactcatcgaaattccacgaaaaccaatgtggttgacatgcaagatggtgatgaggatagcagtgaactccagaggaaaagaagtgttggttctggtgagtctactccagaacacgagaatttcaaaagatcaaagtcaaacaatcacgaatcctttcgtcaacctaatttccagtgtgctgttgaatcatccatggatattgatggtatccataacttgtcagagctacctaatgatgcagagagtctttcgatacccgttgacgatacatcggctgctcctgctgcgactaatacggctgcgacagcaggtagtgataccaacatcaacattaacaacactgccatcaatagtatcaatctcatggaagagggcgccctgccgttgtcgccgacagcttcttctccaggtaccacgaccccattagctaaaaccacgaaaggaaataaaaacaacgatattaccgatttaatagagtctaaagattctatcatctccccagaatacctgtctgatgaaattttctctgccataaacaataatttacctcacgcgtattttaaaaatttgttgtttaggttagttgcgaacatggataggagtgaactatctgatttgggaaccctaataaaggacaacctaaagagagacctgatcacatctctaccttttgaaataagcctaaaagtttttaattatttacaatttgatgatatcataaattcgcttagggtttcgcagagttggaacaaggtaatcaagaaatccacttccttatggaaaaaactactggtatctgaaaactttgtcagttcagaaaagtttaactcattcaacctcaaactgtcagagaaatacccaaaacttctacaacaagatcgacttagattgtatttcctggaaagtatgtttatcctgaagaattggtataatccgaaatttttgccacaaaggactacattaagaggccatatgacaagcgttattacatgtttgcagtttgaagataactatgtcatcacaggagcagacgacaaaatgattagaatctatgattcgataaataaaaaattcctattgcaactgtcaggtcatgatggtggggtttgggctttgaaatatgtacatggtggtatcttggtcagtggttccaccgatagaacggtgcgagtttgggatatcaaaaagggctgttgtacacatgtgttcaagggccacaactcaacggtgagatgtctcgatatagtagaatacaagaataccaagtatattgttactggttcgagagataacaccttacacatctggaaattgcccgaggagacttccactacagaacgtcaagacgattatccgttggtatttcataccccggaggaaaatccatattttgtgggtgttttaagagggcacatggcatctgtaagaactgtctctggacatggtaatattgttgtcagcgggtcctatgacaacacactgatcgtatgggatgtcgcccaaatgaaatgtctttatattctaagtggacacacagatcgtatctattcaactatctatgatcacaaaaggaaacgatgtatctctgcgagtatggattccaccataagaatttgggacctggaaaatatttggaataacggagaatgctcgtacgcgacaaactctgcgtccccatgcgccaagattctgggtgccatgtataccctacacggtcatacggcattggtcggtttattaagactgtctgataaatttttagtcagtgctgctgcggacggttcgataaggggttgggatgcaaacgattactctagaaaattctcctatcatcacaccaatttaagcgcgattacaacgttctacgtttcagacaatattttggtaagtggatctgagggtcagttcaatatttacaatctaagaagtgggaaactggttcattcaaacatcttaaaagatgctgatcagatctggtcagttaattttataggcaaaacgctggtagcagcggtggagaaagatggacagagtttcttagaaattttggacttcagcaaaatgtccaaaatcaactacgttagcaatccagcaaactcctcttcatcatccttggagtccatttctacttctctaggattagcaaggaccactataatatcataa

SEQ ID NO: 2926 - DNA, 2490 bp, Saccharomyces pastorianus
atgttgtttggtgtgaaattggccaatgaggtttatcctccttggaagggttcttatattgattatgaaagcttaaagaaatttttgaaggaagatagcgtgaaaggtggagcggatgataagaaaccaagctgggatgattcggatgagtctaggttcgtcgaagagttggataaagaacttgaaaaagtttacggtttccaactgaaaaaatacaaaaatttaattgaaagactaacccatttggaaaaacaaacagattcagaatcagctatcaaggctttagattctgatgcattccaacgtatcttggaagagctattgagtgagtctagtgaattagataattttaaaaggttaaatttcactgggttcgttaagatagttaagaagcacgataagctacacccaaagtatccatctgtgaaatcactgctagaggttaggctaaaggaattgccttcccattcggaagaatattccccattgctgtaccgtatctcctttttgtacaacattttgagaagcaacttcaacactatgtctcagtccttggctagtgcttctaagttttcgagtatcgccagtaatgacatggacatgaacctcaaaagttttaaattttgggtccataatgacaatttaatggaagtcaaaacaagaatcttgagacatcttccagtactggtttacgctaatgttccctccgaaaacgatgatttagtcaatagatttgaatcggatatcttaaatgatgacgaaattgtggctagttcaagttccagtggtagtaatgcagaaaacggtggtttgggagcacgttcttttgacccacttattaatactctttatttcgacaatgaacattttgaaatgtataacaacaagttactgaagttaaactcggcccctacattaagattgaggtggactggtcagctatctgataaaccagatattttcttggaaaagaaaactctcattgaagatgaaaccacagggaaatcggactttgatttcaccaaacttcaattaaaacaaaaatatattaatggatttatttttgatggcgataagaaatttaaagaccagactttaaagaaactaaaagacagtggtacgtcaaacagagaattggaaaagttgaaagaggattttgaagatattcaagatttcatcatcaaggatgaattgcagccagttttaagaactgtttacaccagaactgctttccaaattcctggagatgacaaggtaagaattactattgattctaacattgtatttatcaaagaagactcttttgacagaaaacgtccaattagagatcctagtacttggcacagaactgatattgatgccaatgtcacaaatcctttgaaattcttaagggagggtgaatatgctaagtttccatattcagtcatggaaatcaaagtcaaaggttcattagattcttcagtatcaagcaattctatgatttctaatgtgaaactgcctaagaagcatggacaatggctaaacgatttgacgaattctcatttggtcaaagaaattcctaagttctctatctttgtgcaaggtgtggcatcattgtatggggaagatgaaaaattagacattttaccattctggctaccagacttggaaacggatattagacaagatcctaagcaagcttacgaggaggaaaagaaaaaactgaaaaaacaaaaggaaattcaaaaaaaaattgatggcatgagaagattttccaacataaacgaaccccaacgtcaagaaccggcacctcatgaggaatctcaaaacactacttctcaaggtgatttggaggctgacgacggctcatctgacgaagaaacccaagatcagcctcaatcgaaaagatcaaggcaaactcggagaagaagaccaaaggctaccttcctaagaattttagccgggaaggatccgaagttaatgggagtggattctgaagaagaggaaattgaattgccacctggtgtgaaaaaaccatcgaatttattgaagaacgctgggcctgtcaacgtggaagcaaaggtttggcttgccaatgaacgtacattcaacagatggttaagtgtaaccactcttttgagtgttttgacattctcaatttacaattctgtgaagaaggctgaatacccgaatttggctaattatatggcatacgtttattttgctttaacactattctgcgctttatggtcatattctgtctatatgaaaagagtcaatattattcaacaaagaagtgggcaacatttggatgcaccccttggtccagtcttggttgcgatcgttttatttgttactttagtcgttaattttgttatggcatttagaaatgcagcaaggtctcgcgaagaattactaatacagaacttagaagttcctgaaagaataccagaagtattaagaccaattcaagattatcttttcagattaatgggaccaagcaaaaaataa

SEQ ID NO: 2927 - DNA, 2637 bp, Saccharomyces pastorianus
atgagcgaatccaacctatctagtttcattagcacaaattatttcaatttgaggtcagcggctaattcctcgaaccctgttacaaagtcaagtacaaagaagagtaagaggaatcaaagatctccaacaactagtaataactggacctttaaaaagagaactcttcaagcatcacagacgatatgggaggacagggaaagaagttcctccaatagccgttatctaatgaaccgctcaatggcatccagaactacaacttctttgagccggtatagtaccaatacttcacttattggccccagtgttgattgtgtcctctgttgtatatacgaagttccaagagacgtcagtacacgaattggactatgtataatcaactgcaacacggggcagctgtttctttcagatttcatggattctcagatctacattcgtgtagtacataaactccaaatataccaacctacagaaatactaattccaagcaactcactgacaccaacagtgtcaaaattagcaacaatgataaaattcaatgtatcagagactgttaaaattgaagagggatcacgaaagtgttttaatagccaagatggattagcggcaatcgaaaagtacttattggatgatacaaaaaaggatctaaaaattgaagagctgatagataaatcttttgctctctgtgctgcatccgctgcgataagctacatggaagagatcatatccaaaaatacgcgaaatttgaacgcatttcgtaaactacgtattcagttcgaaggaactgaaaacacaatgttgattgattctaaaactgtgagaggattagagcttgtagaaaacaaattggataaaaacggaatatcgctatggaaattcttagattccacctctactaaaatgggacaaagatcacttcggaacaatatacttcagcctttaaccgataaggaaagcattgagatgaggttagaggctctggtagaactagaggataacgatgatcttctgcaaaatttaagactcgaaatgaagtctttacctgacttagataaactgttttcgaggttgctttgcgtgaatcaagcggcaataaaaccggatcaaagaattaattatgtcttgttgttaaaggagactttacagagtgtaaaatcactaaaaactattttaaacaatgaaacaattaaaagccgcttaataggtgaaaccaataaaatattcaacaacgatgcaaacatagaaattgaaaagctgattaatgaatatataaatgaagattgtgtttgggcaacttcgactatggaactgcttaaccagcgttcatttgctgtaaaaagtgattctaatggacttttggatgtttcaagacaaatctacaaggaagtaaaggacgagtttttccatgaagtagagaatcttagctccgatcataaaatcaatctagatcataattacgattcagctagaggcttttacctcagaataaaaaggcaagatttcactgacaacatcgctgctcttccagatatattcatttcaagaacaacaaaaaagaactatattgaatgcactaccttaggcattattaaaaagaatgccagactgaaagaagttatggaagaaatattacttttaagtgaagagacagttgacgaccttctcgataaaatcgcatcccacatttctgaactattcatgatcgcagaagcgattgctatcctagatttagtctgttcattcgctttcaatttgaaagagaatagttatacaatcccgacttttgcaaacaatctacttatccaggattcaagacatcctttgctcgaaaaaatcatagataattttgttcccaacagcatatcaagcacgaaaaatagttccagcttacaaatcattacaggatgcaatatgagtgggaaatcagtgtatttgaaacaggttgccctcatttccataatggcccaaatgggttcaggtatatcagcacgctatggatccttccctatttttaaacgcctacatgcaagagtttgcaatgataccatggaattgacatcatcgaattttggctttgaaatgaaggaaatggcttacttcttagacgacataaacgaagatacgctactaattttagacgagcttggacgaggctcaagtgttgccgatggattttgtgtgtctttagctgttactgagcatttgcttcgaacgggagcaacggtattcctttctactcacttccaagatattcccaaaattatgtctaagaaaccggcagtttctcatcttcatatggatgcagttgttttaaatgacaagtctattaaaatgaattatcatctgacccagaagtctgtccagatagagaatagtggaataaaagtcgtaaataaaatattcagccctaatattattgaagaagcttacaatattcactcacttttgaagattgctaaagccagaattagaaatcaaaacttggatgatgttattgatgaaaatactataaaccaaatgaagagaattcacaatcttgtggcaattgtgcatgaatgtgtgaaaaacgaaaaagagcccttaaccttggaaaagctaagagaaataaattctgagtttattgaaaaatttgaaggatga

SEQ ID NO: 2928 - DNA, 612 bp, Saccharomyces pastorianus
atggcgccaaaaaagccttccaacagacaaacgttaaggagagaggttgcccctgaagtgtttcaagactcacaagccagaaaccagttagctaatgttcctcagcttaccgaaaaatctgctcagcgcaagcctaccagaacaaaggtaagaaaagaacaatctctcgctagactttacggtgctaagaaggataagaagggaaaatattctgagaaagatttagacattccaacactaaacagagctatcgttccaggtgttaaaataaggagaggaaagaaaggtaagaagttcattgccgatgatgacagtttgactttaaaccgtttaataaaaactattggtgacaaatatgacgatatagctgaaagtaagttagaaaaggctagaagattagaagagatacgagaattgaagagaaaagaaattgagagaaaggaagcgctgaaacaagataagcttgaagagaaaaaagatgagatcaagaagaaatcttccgttgcacgggttttacgtagaaagaacaaacgtgacatgttgaaaagcgaagctggccccagtgaagataaacctaaagaaaagaaggtgaagaaggtttcatttgcttaa

SEQ ID NO: 2929 - DNA, 1350 bp, Saccharomyces pastorianus
atggagatcggcaataagaggagagattctgaagatgggcaaaagcaagaggtagtgaagagggtaaagtctcaagaaccaaactatgcctatttggagacggtgataagagagaagttggatttcgattcagaaaagatttgttgtgttacactgtcttcactaaatgtgtactgttgtctggtttgtgggcattactatcagggaagacatgaaaagagtcccgctttcatccattccattaacgaaaaccatcatgtcttcttgaatttaacgaatttgaaattctacatcttaccgcaaaatattcaaattttacacgaagataaggtccaattgttaaatggcatcaagtatgcactctatccaacttatagtgtcaaggatttacaaagtttccccaaacaatgtttcgatttaagcaatcgcgcatacctgaatgggttcatagggttcaccaatacaacgacatacgattatgcgcatagtgcattacttttaatatcacacatgaaacccttacgtgattattttcttttgaacaattttgataatcaaggcgagttcatcaaaaggctatccatatgtatcaaaaaaatctggtcgccaaaattattcaaacattatttatcagttgatgacttcgtcacctatttaaaggtcaaagaaggattgaatctgcgtcttgtagatccacgggttttcctcctatggttattcaatagaatatgttcatcttccaaacagttgaaatcaatttcaaacaaatcttgtaaaggaaaagtgaaaattgtggaaatcggaaaagatcccaaagacgatggacctgctacgaccaaaatcaacgtaaaacccttttgggttttgaccttgaccttaccagaattttcgccctttaaggatggcaacacggtagataatcttccacaaataaacatctcccaactattgagtaaattcagcgatatcagagacccttccgctaacaacattttcaaactaacgcatttacctcaatttttgatatttcatttcaataggttcgaccatagtagtgaacatcctgtcaagagtaggaaccaaacgatagtagaattttccggtgaacttaaagttctatatgccaactatcgtttaaaggcaaacgtgatccatacggttattaagttgccatctacagacgggaacacgtctgatggcgatgaaagaagtcattgggttactcaactttatgatggcaaaaacgacaaatggattgaaatagatggtataaatacaacagaaagggaagctgaactactgtttctaggcgaaacgtttatacaagtatgggaaaagcaggaaccgtga

SEQ ID NO: 2930 - DNA, 1506 bp, Saccharomyces pastorianus
atgatgagtggtgaaacgtttgaatttagtattagacattccggtaaagtttacccaataactctttctactgatgccactgcagctgacttgaagagtaaagtagaggaattgactcaagtgccaagttctcgccaaaaatatatggttaaaggtgggttaactggtgatgagtccatccaaatatcctctttgatcaaaccaggaacaacagtcatgctattggggactccagatgctaacttgatctctaagccagcaaagaagaacaatttcatcgaagaccttgcgcctgagcaacaagttcaacagtttgctcaatcgcctgtcggtttcaagaatatgggtaacacctgctatttaaatgccaccctacaggctttatacagagtggacgatgtgagagatatgattcttaattataacccttctgaaggggcatctagtagtagtgcacaagatgaagaaacgcataagcaaattgtcattgagatgaaacgttgtttcgagaatttgcataataagagttttaagagcgttttgcccattgtgctattaaatactttgagaaaatgttatccacagttcgctgaacgtgatcaacaaggtgggttctataagcaacaagacgctgaagaattgtttacacaactgttccatagtatgagtgttgtatttggtgataagttttctgaagattttaggattcaatttaaaactactatcaaagatacggctaatgaaaccgatgttaccgttaaggaaaacgagagcgattccaaattacaatgccatatttcgagtactacaaatttcatgagaaatggactactcgaaagcttaaacgaaaaaatcgaaaaaagatcagatcttactggcgccaattccacttatagtgtagaaaagaaaatatcaagattaccaagattcttaaccgtccaatacgttagatttttttggaaaagatccaccaacaagaaatccaagattttgcgtaaggttgttttcccatttcaattggacgttgccgatatgcttacaccagaatatgcgcaagagaagataaaagttcgtgatgaattaagaaaagttgaaaaggagaaaaatgaaaaagaaagagaaatcaaaaggcgtaaatttgacccatcatcgtccagcgaaaatgacatgacaccaaaggaacaatatgagacgcaagtagctcttagcgaaagtgaacaagatcaatggttggaagagtacaaaaaacatttccctgaaaatttggagaagggtgagaacccatcgtgtgtttataacttaattggtgtcattacacatcaaggtgccaattctgaatctggacattatcaagcttttataagggatgaattggacgaaaataagtggtataaattcaatgacgataaagttaccactgttgaaaaggaaaaaattgaatcactagctggtggtggtgagagtgatagtgcattgattttaatgtataaagggttcggtttgtga

SEQ ID NO: 2931 - DNA, 1329 bp, Saccharomyces pastorianus
atggataaaaaagctccagaaaacaacgatacttcaacacaatccgttgaggaccctgagggtaaaacggcgcacgttcagcctgcttcgtatgccaataagaaaaattacgtttttggaaagacactgggtgccggtacgtttggcgtggtaagacaagctagaaattctgaaacaggagaggacgttgctgttaagattctcataaagaaagcactaaaggggaacaagatccagttagaggcgctatacgatgaattggatattttgcaaaggttgcaccatccgaatatcgtggcattcaaggattggtttgaatcgaaagacaagttctatattatcactcaattggctaaaggtggtgaattgtttgatcgcattttgaaaaagggtaaattcactgaggtggatgcggtgagaatcctggttgagattttaagcgctgtcaaatacatgcactcccagaatattgttcatagggatttaaagccagaaaatttgctgtatatagatataagcgatgaatctccattggtgatcgctgattttggtattgccaagaggttaaaaagcgatgaggagctcatttacaaagcagcaggttcgttgggttatgtggccccagaagtgcttacccaagatggtcatggtaaaccttgtgatatttggtcgattggtgtcatcacacatacgttgctgtgtggctattctgcattcaaagctgaaagagtcatggatttccttgacgagtgtacaaccgggaagtatccagtgacatttcatcggccttattgggattcagtatctgataaagctaagcgattcattttgaaagctcttgatttagatcccacaaagaggccaaccgctgcagaactgttggaagacccatggattgtttgtacagaactaaaaacgcataatttattgcctggcctgaaggaaggattggacgctcgccaaaaattccgtaactctgttgaaaaggtcagattaaatatgaagattcagaaactaagaaacttgtatcttgagcaaactgaaagcgattctgatttcgacgagaacaaccgttccacgccttcattacattcaatggatacaaaaccaacatctagtaaactatcaaacaaagagcaatccaaattaaagtctgagttaactagcgaagcttttgcacaactagtcaatacagtgattgcagaaaaagagaaattcttaaacattaacaggatctgcagttctgataacgaaagtgatagtgataaaaaaccgttggattatgcggatgcgacacaagatgaaaagggtgccaagacagatagctga

SEQ ID NO: 2932 - DNA, 1101 bp, Saccharomyces pastorianus
atgagatacagtcggagcctacacgtagttggtctggtgtgcgcgttagtactgctgggcgcacacagggcaattggctgggagctgtcgtacgaggagtaccacgcagcacatttgaatgaggctatcagcctcgacgacgacggcgataagccgggcagcagcagcagcagcaatctgctgctgccgtttaacaggacgcgcgttcccgggtccgaaggttcgcgcgaggtccgggagttcattgtcgagcacttcaactcgacactggcgggcgagtgggccgtggagacgcagcctttcgaggagaacggctacaacttcaccaacctcgtgatgacgctgcagaacaacgccagcgagtacgtggtgttagccgcccactacgacaccaagatcgaacccgcgggcatggtgggcgccatcgacagcgcggcatcgtgtgccgcgctgatgtacgcagcacaattcctgacgcatgtggcgcgctacgagcgcgccacagagcaggcgaagctggagacagtgggccccgtagtgacgggctctacgctgggcgtgaagatcgtgttctttgacggtgaagaggcgttcgaagagtgggggcccgaggactcgatctacggggcccggcggctggcagcgcagtggctagcggacggcacgatgccgtccgtgcgcctgctgctgctgatggacctgctgggcagcggcgaggaggagccgctggtgcccagctaccacgcagactcccaccaggagtaccagctgctcaaccggatcgaggacgacctgctgttccggcgcagcggcgactccgcgtcggagtcgccgctagccgcccaggccgcccgccagcgcaagcgcctcgaccccacggactaccgctacctagcgctcggacgcgcggtcgtcgacgacgaccacacgccgttcctggccgcgggcgtgcacgtgctgcacgcgatcccgctgccgttcccgagcacatggcacaccgtgcgcgacgacttccgccacctggatgccgcggagacgcgccactgggcgttgctggtgtgcgagtttgtggtgcagtcactgcgcgcccgtgctcagtga

SEQ ID NO: 2933 - DNA, 1512 bp, Saccharomyces pastorianus
atgaaggccatttttaaagtgttgactgctttggtagcttgcatggtcatgataaggtacctaatttgccagcagagtgggctagcacactcagatatggacttgaagcctatctgccagtacaccgggttttcggtaaactcattgcttcagcatcggatgctggagggctcgccggtagccgattacctggtagagaagtactcgcaatcgataagacctttcataaagacataccctgactcggtgctgggaaagatgacgggtcgtctctactgcgtgtggctcaagatttcttcttttttgaagctgaacgaactatgctgtacattgcattctaaattagggcccttgttgaaccacctgaggatcgcctggtattatctgaaaccgtataccgataatgtaaaaaacgtgctagaaagcccattcaactcttccacgaactggatgagacacgggtccttcagcgtcaatggtacacacgccaagcctatttttgagacagattcagaaactgaagaagaagaggatgatgaagatgctgatggtgtggagcatgctgataacgaggaggacgaggacgagtatgagcttgaggaagagtattacgaccgcgggaactcacaagttctcacggcagccattttgcaagatatgtcgaggattatcgtgggttccgacagctacacagatttggaaacgctcgaaccagaagcactaaagatggaatatgaagcatggatcaaagctgtcgactcgaaagtatccagcgcaataactctcttagattcagaaatacattccatgttcgaagctcaagcactgaacaaatctatggatgttgccagcaggctggatgacctaaacagaacttttagtgaacaactggtattcctggattcaaagatcaaagacatcaattgtacgtccaaattcgatcccgtacagaataagataaagtattttgacagatcgggtcggtttgaattggaaacatatgtcaccaaatcatcaattacatcgatactgaaaaactacaaattgcatctgtccaatgttgaggaatcgctctttcatgcattagattcctttctttctgaaatggctaaacaggcggaattaattcgcctcgaaaatgtcgaagtttatgaagaatgggcagatgtaatgataagtcaatggtcacaaagaatggcatacttggacataagaagtctgcacttggagaaccagtacgatcctgagtatattgacaaaaatcattccaattggcaagacttcatgaaattgaagaaaaaagtcatttcggagagaaaccacttgatcgaacatgatcttgatatgaagttggtacttgaatctatatcggatttcaaaaccgatttccagagcataaaggaggatatccaagccatatttttacaaagaatgaacacagcggatgctttattcaagagccgtgaactaaaagaacaacaggaagaggaattcgtacggcaagaacgttag

SEQ ID NO: 2934 - DNA, 1992 bp, Saccharomyces pastorianus
atgagttacaaggcgaatcagccatctcctggggagatgcctaaaaggtcaccgtccatcctggtgacggatgcaagatcatccaagaatagaataagtgcaccgtttgctggccatgctgccggaagcagaaagagtatggaaaacaagaacgtggagagatcgcagggcattcgctcttccaatgtagggccttcgccaatgatgaaacccgcacattcaagaaggcgatcctctggtagatttagcgatatttctatagacaatattctttctgacaattcagaaattccctccgccagaagggaggaacgactctccagctcgtcaagtgatagacctcgatactacgaacgtctaaattcacgcagaaaaatgatcaatcccttacctccaagaacatctaagacatcgcaaaaattagtactgatacccgaagaagatgatttaaaccaatttcgaaacacgccgcacaatgctttggacagacaaagaccgaaggtggtttctatgaagtctagctctcatgaccgattgccccgtcatttgagagagaaccccatggcaagaatcacggcgtataacgtcgctgacggatttaatctgaacctgctgtacagatttttggaggagactcatgaagtttcaccaagattatatgacgaatgtctgtacgtcgcgtacactttgccgttattgccaggtaaaggtgggttcaggataaaatcgaacatatccaagaaaacagtcggcggtaagacattgatcgataatttgatagatactagtgaacaaagagatcatcattatgaatattactcaggagtcgaaactgtagaagacgcaaataataattacgaattagaaaccaatgggggaaacaatagtacgagccaagatactgtcactgtcccagatcatttacccaatccagtgggtcaacaggattctttcaatcctatggaaccacagttctttgcagaagaaacccccttggaattagagaaacgagaaagaatcgaaagaatgaatatgttaaagaaagaagagaacgatgctgacgataacggtaacagtaacagcattaatgatgacgatgatgacactgaaaattatgtgctcgaaggcaccgatcaatatttgaagtcttctcgctcacaaccatcatccgcatcatcagcatacaccccatcgcctccatcttcagcacgcagggattctaatcgtggctatgaaatgcagaaagataacgaacatgagggcaatgatagacacgcagaaatttttatctttcattatggtgtaattgtgttttggaatttcactgaaatacaagagaaaaatatacttggcgacataacgtttgcagattacaaaaacttgatgattcggccattagacgaacaagatatcgaaaccgaacaattccacttcgaatatgacagagataccgagaggccgcgaatctttaacgatattgtcacattgcgttcaggggaccatatcatcgaattgacactatcacatgccattgcacaatcctccaaattatcaagatttgaatccaggatttcgccaattctaatatctgtcacgaagctacccaagaggctggcactatacggtactctcggattaaagcgagaacaattgctgaaaaagtcagggaagctattcaaactaagagtggatgtaaacctttcatccactatattggatacgcccgaatttttttggtcatttgaaccaagcttgcatccactgtacgtggccatgagagaatatttggagattgatcaaagagtacaagttctgaatgatcgttgcaaggtctttttggaattctttgacatctgtgttgactccgtcgcagaaagaaacatggcacgtgttacatggtggttcattctggtcattttattcggagttatattttcgctagcagagatcttcgttcgctatataattatacatcgtcattccactaaatag

SEQ ID NO: 2935 - DNA, 1668 bp, Saccharomyces pastorianus
atgataaggaaaaataggcttttcatatcagttacactattactggttctgttactgatttactatttacaagtgggttcgttggtgcagacgcagaatagcaatagtgatcgttgcctgcattattatgaagctcttgaatctggatggtcgaataggttcttcggcgtaaatcaagaaagtttggctcctggaaaggacgtggttcaattagtgacaagaatcaatattttttctagatgtttacagcagactggtaaccgtgatgctcaacttctacgagatattgagaagaggctatttccgtacttaaatttcagaggattagaaacaaatgaaatcaacttctggcccactcacacgagatggaatggtgaaatttatcatgcttctgcgttagagtttggccatagaaacggtcattttgttcgctctaggcccatcaagtatgattcagatctgtctttttgggagaattggctgcaaactgcaacgcagactggttcaagaggtatagttattagtgcttctgatgtacagttggatgagacactgagactgttaaaggttttaagatacatcaaaaataattttcccatagaaattgtttacaacggagatctaagtcaagacgctattaaatcattagtcaaacatgccaggaatcaggacgccccggagtatccggctcaagaaatatggtttttgaatgtgcatagtatgttaaatccgggatattctgacaacttcgtaacatattccaacaaatggctggcattgattttctcatcctttgagattcctatcttactggattctgatactgtacctttcgtctcaatagacacgttttataactcagaagaattccaaagaaccggggttttatttttcaaggatcggataatatccgatgatctctttgagccatctcaagtagaagttctgaaggaagttatatatgggtgtattggacttaatttgacggatgaatcaactgtacatgacaggattgttaatcacataaaggatccaacggttgtccaagtgctagaaaacatgctgattaagaagtataagcatcatctggaaagcggcctggtaatattggataaaggtaggcacctcttcagtatgcttacttctttggccttacaattctctccaattgcggaatacttccacggtgataaagattggttttggctcggtgcgttattgtcaaacaacccttttacattttatcctgtggatgcgtcaaatatcggtcagctggggaacgtcatctcaaaggaaaccactggcgaattttaccaaatatgttctgtacagctgtcccacacagacaaagatggatcattgctatggctaaatggaggtcttagcgtttgtaaaaaagcctcgtgggaatatgattatgagcatagccagagactagctgctaatttccaagatgcggaagaattacgcaaatattaccaatcaccagtgcaactggaagggattataataccagacactgatatatcgggctgggccaaatcgggtgaatgttttctattcaactactgcacgctattcaaagaaggacaatatggaaaggtaagtaagtttactggtgccgagaaacgccgtttttcacaaattgtaggcatttggaatgaatag

SEQ ID NO: 2936 - DNA, 927 bp, Saccharomyces pastorianus
atgtccacaagcatcacggtgaggaacagagaccggtccctgccacccctattattgcccagtgtttccttgttggaaaaggatttatgtcgtggaggtgcccagaatgtaggcataactgatccagaactctcatcagccatttggacaagaaaacgggctccctcgtctgacgaactcgctcccaacttagcaaacaattcaatattccgagccaagaggctaaaatctgctactatggacgtgaacaggtatgctatgggcatcgccacgataacgcctccgccaacaatacccgtcagcgccatcgtctcttcctcgcaaaattgcatttcctctttcgaataccaaaaccatgctcttgcctctatcggcaatgaagacggcaatgcgaccaccactacaatgtccatgacctctcgctccaccagtaactctaccatttcctccacagcatccactggctcgaattcaaaaaggcaaagaagcggtccaagttgcgacaagtgtcgtttgaaaaaaataaaatgcaatgctaaaattgaaatcttgctccaagacgactccatgataccattgatctcggacaagctacgttacattttgactcccaacgatattcaactgcataaaggcactctactgcaaaacataaccctaccagacggtgtaatcgaggggaccagctcacggaagctgatcaagcatattgataagctggttctgctcacgccttgtttgccatgtaccaagaaaaaacacgcccattcttcctcttcttccaccttttcaaaaaatgttaattgcacattttcgaaaggcttcaccagagccgacataaatgtttcatctaaaatctcttcaaaattcaaagataaaaccatatacgacataacttatgatgactacaaaaccacaaatctgtaa

SEQ ID NO: 2937 - DNA, 1047 bp, Saccharomyces pastorianus
atgagtactaaagaaatcactgttttcgtttccggtgctaccggtttcattgccttacacgttgttgatgacttattaaaagctggttacaaggtcatcggctcaggtagatcccaagaaaagaacgatggcttgttaaagaaattcggtaaccatccaaacctttcaatggaaattgtcaaagacatcgctgctccaggtgcttttgacgaaattttccaaaagcatggtaagcaaatcaaagtcgttttacacacagcttctccattccatttccaaaccactgatttcgaaaaagatcttctaatcccagccgttaatggtactaagtccattttagaagcaattaaaaaatacgccgcagacaccgttgaaaaggtcgtcgtcacctcttccgttgccgccctagctactccagaagacatggggaataccagcacagttcttaccgaaaagagttggaaccgggacacctgggaaagttgtctagctaatgctgttgccgcctattgcggttccaagaagtttgctgaacaagctgcttgggacttcctcaaggaaaaccaatcaaatgttaagttcacactatctactgttaacccagggtacgtctttggccctcaaatgttcgccgattcattgaaaaatggtgtaaatacttcttcaagtattgttgccgagttagttcactccaaggtaggtagccagttctttaactacagtggttcatttattgacgtccgtgacgtttcaaaagctcacctagctgcatttgaaaaacctgaatctgctggtgaaagattagtcttgagtgaagatttattctgctctcaggatatactcgacactttgaatgaggagttttcacagctaaagggcaagattgccgttggcgaacctggcagtggtccaagctttttggagaagagctcttgcaagcttgacaactctaagaccaaaaaactattgggatttaaattttataacttcaagaactgtattgttgacaccgcatctcaaatgttagaagttcaaaaggaaacctga

SEQ ID NO: 2938 - DNA, 936 bp, Saccharomyces pastorianus
atggaagaagaagagcctttgaaaatcgctcgaatcaaagaaatacaagaaaaaagccgaatgatatttcgaggatggcagatgagcagcaggccttatttgttggaccgattatttcttttactcagtctgctgtttgttgttaatgcggagttgagcagcgatgtaagtgccagagaagtttacatgcccattttcaacaacgttctatcgttcaagctgccgcccatcaagcgctcgtcactaagggaagccaccccgtacgaagactttgcgtacagctccagcatgagcgcatccgagggggagttctgtatggtgttcgatgaggccatggaccacatgtccgaagaagttgtgtttgaaatccacgtgatggatgtgttgcaagaggaaaccgattcgaacaggttcggcgggaccagccacgaccgcgggaagcaatcgctggactttggcatctttaacaacaggaacggtgacttattgagaagcaagaaaaacctggcaagtggaatgtcggtcatcgaggtcaaccctgaaaacagcgatgagttcttggtgtgtttcataaatctggtttacgacggatcatggagcgcgatagacaccgaaaaatcagtgacgataaggatgacccataacgatgaactcaatccagacatgctgtcgcatttggccaagcaaatgactccgcaagttgcacaagcattgaaaaatgtctccgacggtatattcacaatggtaggcgacaccgagctcttgcaaatggaaagcgataggcgaaacctgaacgaagccacttacagttatatgatcgtggggttcgtgtcgcttatcgtggcagagttggtttcgaatgttatggtgttaagctacttgatcatcaagatgagaagcaaactcccatctcatatcgaaaaaaagggtatgtga

SEQ ID NO: 2939 - DNA, 1329 bp, Saccharomyces pastorianus
atgactacaaacagcggtgcagaactagaagaattagaagattgtgacgcacgttctgtcagcttgggaattgtagacgattatagtactgcattcgagttacctttaaaaccgaaatttctacagagtgaaaatttctcagatttagcaagcgactgggaaaagtccatgccagatacacctgggccatcaagcagcagtaagcctgacaacctgcagtttgaagatgcagctgataatagtacttcaaagaatagggtgcacgtagagcagttgttgcgatctgccaatgaaatgaatacttatttggcacagaacatggaaaagataaacgacttccaagtagggctattaaatggagggaaagggttgtatagtgcaatgggcgatgattcaagtgcatgtctcaacgcaaccaatttgagttcgacatcgaactttgagttaagtgacgatgaattggaagatacgactggttgcacgagttctatctttgataaaaatctattacatcaacaaagtggattgaacataactcgacgtaaatcgccgctatctaaacctcgtaatcctagttttgaaattggcgattcttccgatatagacaagcacaatgtcaaagatttcgatttttccgaatgcagtagcataacaagttttgatataggaggtctacatatcaggccaccacacggtgaagaagaggacaagttggaagaagaccgcgatgaacaagaagagagtaatacagaaagcgaaaacccattattacgtggaatacctagcgatacagaattgccgcatatgtcagttgaagaagctttggcaaactttagcggcacgataaatctaatactagaacttagtaagaatgaaaactgcaccatttctaataataaggagacggaaaaagaatacgcaaacttttacatgaagagcaaaccctctttgtcatcagtggactttcttaagagggttcaagacaaatgtgaatatgagtcaacggtttaccttgtagcgacatatttaatggacacaatatttttgactagaaatggtagtgacgttttgcaattgaagctgaaattgcaagaaaaggagatccatcggatgataatagcaacagtgagactaagcacgaagctattagaagacttcgttcattcacatgagtactttagcaaagtatgtggcgtatctaaacgacttcttagcaagttagaagtcagccttttagtttgcttgtccgatagtgaattaatgataagtaataaaaaactggtcgcgtccggacgaattctggatgaactacggtcttcctgtaaatag

SEQ ID NO: 2940 - DNA, 1509 bp, Saccharomyces pastorianus
atggtagcaactgtaataaaatcaaagaatttcacgacgatttcttgctcaatccgcaccttcggaattgcacagcgtctaagattatcgcctgtcccttcgttatcaacaagtaagaaatatagtacgaaatcaaaccaggaaaagaataaggatgcggaagggacgataaatgtggaagacaaaaagaatcagttgaaaagttctagcgttccaacttcacgaatatcgagattatttcattatggttcactagcagctggtgttggaatgaatgccgccgcacatggtatatcagaagttgcaaagggcaaatctccaacttggaagtcgttgattttgtcggatgcaaatattgaccgcataactaataagttctctaaaatgaggggtgtagctttgaaaatagggcagttattgtcttttcaggatgagaaagtactaccgaaggaattgtatgaaatattatcacgagtacaaaacagtgcaaatcatatgcctcagagacaattagaaagagttatggtcaatgaattaggcgcaaactgggaagctaaattttctaagtttgaaaaagtacccatggcagcagcaagtattgggcaggtgcatgctgcagaattgcccgatggccaacgagtagttgttaagatccaatatcctggggtaaaggagtccatcgactcggatctaaatagtttgctaatgttgcttacggcttcaagtttattacctaagggtttatttttggataaaacaattgctaatgctagaactgaactaaaatgggaatgtgattataacagggaagccagggccttgcaaaaattcgaagcattgctggaggatgacccagcattcgaagttccccatgtgttccctgaatacactacagataaaatcataaccatgacgcgtatggagggaacggaaataatgaagctttccaaagcatcccaagacactaaagattttatttcagaaaatatcatgagattatgtttggaagaaattgctacgtttgaatacatgcaaaccgatcctaactgggctaatttcctttataatgataaaacaaacaagattgaattactagattttggtgcatctaggccatttgctaaagaattcattttaaaatatagaaaacttctaacatttgcggctttgaatgatcgtaagggggcctacgaaatgtcagtgcaattaggctacctaactggattagaatcacaagccatgaaggacgcacacgtagatagtgtgttgacaataggtgaacctttcagatgtgatgttaataaagcgtttgacttcaaggaccaaaccgtctcagacagaatcaggggcaatatcggactaatgttgagtgagagattatgtccaccaccggaggagacatactcattacacagaaaatttagtggtattttcctcttatgtgcaagaatgggtgcttccgttcattgtgcaaagctctttaatgaaatcttttccctgaaggattga

SEQ ID NO: 2941 - DNA, 2010 bp, Saccharomyces pastorianus
atggagacatgggaagtcctagcatcgataaaagaagcaacgaagggccttgacctaagcttgggttctccactcattattagatccgaagatttgccagtttacgttcttcaattactgcaacaaaaggataggcgccacatgaagcatatatgtgcaaactctaagaaggaacattttttgttagaggagtatgggccagggttttgggtaaaatggccgtacacttatttcaatgaatatagcctgccaaagaaaaatacggaaattatatcatcactgaaaagagagagaggcaaacgtgaaacattaaagacatgggaacaaatgaagtttaaagagctgctttatttatggtcggaagaacctaaggtttcacataaagtcgaaaaggacacatgcttcaaactggatatgaagcctccagacatgaaaggccaatcaaaggtcaatgtcgatcactccgatcctaaagagtacatagaaaataagtactatgaagctcttttctccatacatgtacccttagcatatttcgtcaagtcgaacttagtgagagtcaaaaatacatgtcgaacgaaatatggaagtggtagctataaaatagcttatcaagccatattgcaaaaattccttttatcgattgttcaattcaatgatagacacgacaatagacttttattagagccttttggcagtcctattgcagacgaaaaaaggaacggttgtctcacgaaattcgtcatacaaagtggaaacaacaatggttcaaccgtcgctgacttatgtgttatatttaaatctcgagagataaaactacaaatactattgttattggagattatagggctaaacaatttagattgtaatttcaaagactttgaaaaaaagtataagtcgaaattgaaaaagagatcactcaatttaaccaagcaaagattgatccgtcgaagaccaaagaaggctattaaacaacaaaataaggacatcgaaaaaatagcaactcctttggactattgtgaacaattggatttgtatttagatagggcatgtattctggatattctgctgtcgagtgaaacacctaatccggatgccatagaaataaccaatggtacaatacaagagcataaaaataatattttgaataaaaataaagaagcttcgctggtcggatttataaattatgtccttattccatatttcactaaaaaggtgccgcatgccgttgactttataatccaaaagctcaagggaccaagcatgaggccaaaaagagctcctaaaaaaatcaccgatactacaggtgggtcgtcacctagtacagcagaattgtataataagttatcgacaagccagcgtacatctcgctcttcactcgtcaactctgtgccatcgtcacctgcattaaacggaacagagcctaatatatttagcaggaaatcaataacgactccgattccagaacttttgaattttagaacgaactctaacttgaacgaatttctcgaaagcgagactaggagcttgaggcgtccttctcaattaggaagaacaaagtccgatttaaccatgaatcatttacagaaaagacaattttcagtttctgatttaagtaagtcaagaattcctagcccgtcaactattccactcaagacaaccttttcacgcacagttaatggtgtacatacctctacaaataattcctttcgtagagttggaaaacgtaaagatatcaatgaaacagtgccatctaatgagagtatagatcccgaggagaacgtacaagttcaagccacccctgccgcgaaaaataggacgacaacccccaataaaagagcacagctgcaaagcatcgttgaatcaccactaaatcccaaacctgatacactccacgaaggtgtggagaaccctcagaggaaaatctcgcccttggccgctactctcactaaaacttcgtcggaaaataactcaaagagaagagttagaagacgtttatttgccccttaa

SEQ ID NO: 2942 - DNA, 1383 bp, Saccharomyces pastorianus
atgagattattagttagctgtgtggataatggatccataaaggaacttttgtgtaacattggcactgacacttctgtacaaacggctctacaaccatttcacgtggctcctcatctagccgagggattgaaaagtcacattaacaaaatatggatgatttctaaagatgaagtcatattggctagaaactcaggtgtcgttgaactcgtggaaatctcaaagcatgcgaaggaaaatgaagttgcagaaaccgacacaaaggaagaaagtaaaggtgtgatggatcctttacctaaattcgacatttctgaatttgagattgtcagttcattatcgaatcttttgaacgacctgaaacttgagcaattgtcaaaaaaatctgttaagaggaccaagttagtcgatgaatttgttacattatgtcctttaaagaatgagccgctgaatagcactttcgtagctgccactaaatcaggttcgctgcatattataaagaaagaaaaagatggaaagctaaataaattggcgtcccttgaactaaaagcaccattggaatttcttcagctgtatgatctagaggaggcccataacgataaaattttatttgcatatggtggagaagaaaatctagtgaaattggttgaaatggaatctgactttacatctttagaacaagtatgggaagctaaaaatgtcaagaacgatagactagatatgagagtcccagtatggcctatggctttgaagttcttgaagccttcccccaatcaaacagataaagataaactgaattatcagttttccgctatatcacgctggtcccatttaattaaatacagcacacaacatggcaggaagccttttgcccaaatagatttattacccaaccgtgacccactatcccagatggaagtttttgacacacatggaaaaaatgttgtatcttctttaggaaatttacagtccggaagttttgacgagttgaatgtaattactaccgatctcaaaaggaacgtgtttaaatttgatggaaagggtaagatgttaagcaagataggtagagatgatatcactggtacatccacttacgttcatgtacatggtggtaaatatcttttacaaggtggcttagatagatatgttcgtgtcttcgatataaaaactaacaaaatgttggtaaaggcttaccttgggtctcgtataaatgccattatcatgttagatgatactgaaattgaaatgccattaagtgcaagcgctaaagctgccaaagagaagcaaaagagaaaaattgcggaaattgaagatgatgcagacgatctttggaccaaattagaaggaaaagcaggtgtatctaaagctagcaagaaaggtaaaacttaa

SEQ ID NO: 2943 - DNA, 390 bp, Saccharomyces pastorianus
atgtctcaacctattcaacgtgctgcaacacgctcatttattcagaaatacattaataaggagactttgaaatacgtcttcaccacacacttctgggggccagtatccaattttggtatcccaattgccgccatatatgacttgaagaaagatccaacgcgaatctcaggtccaatgaccttcgctttaattacttattcaggtgtttttatgaagtacgctcttgcagtgacacccaaaaactatttgctgtttggatgtcacttgatcaatgaaactgcacaattaggtcaaggctatagatttgtcaaatacacatatttcacaactgacgaggagaaaaagattctagaaaaagaatggaaggagaaagagaagccaagcaagtaa

SEQ ID NO: 2944 - DNA, 651 bp, Saccharomyces pastorianus
atgatgagcaacttatcggaggaaaatgatgatgaaacgttttcggcggttcattctctaacacctagtatcaactctcaaacgtatgcgatacctataacggaggaaatgtccagctctttccatgattcaatcagtaccagtagcaattcgagcagtaatcttgatagcgataggagtagtatctctaatgttgcagaggcgcatgagatggacaaccactctattgtagatgaagatttatttttggataatgatattcctcaaccaagcaatttattgcttacagatgctcaagatcctggcccgatattcgacgtttccaggtacatcttcgattcactcaaacaatctattgactctacagacttttcggaatctttatccctacagaccaagacttctgctatcataaattccaagagcttagaacttaagcaacatattgatgaaatgaaaatcagattagctcaattgcaggggaaatttgagaacggggtaggtacttcaaaaagaattaaacatgatctagaaacttctaggaaaaacatcgactacttaaactctgctttaagaatcgatttccccattgaatttaatcaggcgagagagaaagtactagaacggaaactgaatgaagacaatgactaa

SEQ ID NO: 2945 - DNA, 1164 bp, Saccharomyces pastorianus
atgggctccgaaactgatgcatttgatgctatttttgaatatgcgtggagtcagattgacaagcctattagtggggatttcgtatatggtaaagatttaccgaaattaattgagatcattgaaaatgttttccaagaggcccagagaaatggttcttataatcttcgactacctttactttctgaaaccgataaagatttgtgccgcacgttttctaatacaaagactttttttaaaatacacaaagacgattttgacgatatcttctttaatctggttaataggtctcttaaggaaattctggaaaaaacatttgacggtgtgaattccattcctcgtgattttatgaaaagtctggatctagacctgtcttccaaatcccttgttgagaataagggcaatagcattcaagaacccatatctttaactccgccggttaaacataccgagtcaccaatcaaacgattcggtcaaagtaatacaagaaatacgttgaaagtgcaagtagaggatttacaaagggaactgaacatgaagcaaaatttattgctggaaaacgaaagacaggtaaacgaattgaaaagaaggttaaagacataccaacaaaagtatgcttccatacaagagcaatttaacgatttacaaaaaaatagacaaatagaaaccaatcaatgtaaacctcaaactgcggatgctgaatcacatgtggctgtcggaattgatcaagaagccattctggaagaattcaaaagaagattacaaaaacaaacagagaccatctctaccttgaaagatcaaatacggcaagaaagaggaataaattacaataacgataaaactttgtttctaaaacgcaagccttcaacttctaaacacgcatctaagagtttcgcagacacgttttcacttaatctatgggtaaatgcaataataagaacgataatttgcctcactttaataattggtgtcttgtcatacgttatgaaatatttatatagctctgatgcgccaacacaaaactcaagattgcaattgtcatggtgggagaataatggcatattaagtaaaatcgtgtggttttttcaagatcagacagatttagagattgagtactcttcaaatgccgaaatagatgatgcatatagccgagtattcggtatatag

SEQ ID NO: 2946 - DNA, 2151 bp, Saccharomyces pastorianus
atggctgaaatgaggtcgaaggatgcagtaattaaggagatcaaaccaaagattataaatgaatattctctttcccaggaaaacggttcctctcacgattcgtggaaaagtttaatatcgtcagcaaaggacacacccttacagtataatcatatgaaccgggaaactttaaaaaaatacttcaacccgaatgcccagcttattgaaaattctttagatgcgccaattcaatttagagtgtgtgagaaatgtgggaaaccgttagctttgacagcgattgtggatcacctggaaaaccattgtaccggagtttctggaaagaataacaccaaaggtgagaatacagaacttaaagatgaaagcaccaatgagactatgcacaatgaaacagaacctactggggtaaaaaataacgatgatgacgatgatgatgatgacgatgatgatgacgatgacaacgatgacgacgacgatgatgatgacgatgacgatgatgacgacgacgacgacgatgatgatgatgacgatgacgacgatgacgatgagaaccccaacagtcttaatgccaacggtaacaactataagaaaggcgactcttcttttaaccccctaaagagatcgacatctatggatttagctaacacgcctggtacagatacaaagagatctaaaacaggaactcctcaggcctccggttcttctacaaaaaaacaaaagaaggtcaaacaaagaaatcctactgaaaagcacttgatcgactttaacaagcaatgtggtgtagaattacctgaaggtggctattgcgcccgttcgttgacatgcaaatctcattcgatgggtgcgaagagggccgttcctggtcgtatcaaaccctatgatgtcttgctggccgattatcatagagaacatcaaacaaaaattggtgcagcagctgagaagcgtgctaagcaacaagaattacaaaaattacaaaagcaaatacagaaagagcagaagaagcacacccaacatcagaagcaaggtcagaggtcgaaacaaagaaacgttaatggtggaaagtttgctaaaaatggtaacaaaaattcgtctcacaacagtaacagcagcaacgaaataggtcatatcaacctgacccctgaagaagagaccacacaggtactaaacggtgtatcccgatcttttccattgccattagagtcaacagtagtatcttcagtcagatacagaactaagtactttagaatgagagagatgtttgcctcctccttttctgtgaagccgggatatacttccccaggatatggggccattcattctcgtgttggatgtttggatttggacagaacaacagattacaaatttcgcgttagaacacctcaaccgatgagccagatatcaaaccaaaatctcaatccgaaacaaattcaaagattacagcagcagcgagccttacaggcgcaacttctttctcagcagcagcagcagcaattagctcagactcaggctcaggctaatactcagccgcaaaaccaaggtatggcaatggggtccaatcaattcccgaatggggcagggaattcgccatttaatgcgaatatggtcaacaaacaagtccagcaacagcagcaaattcagcaacaacagcagcaacaacagcagcaacagcaacagcaacagcaacagcagcaacagcaacagcagcaacaacagcaacaacagcaacaacaacagcaacaacagcaacaacagcaacaacagaaccagaagcttcaggatacaggtctgacaccacaagagatccaatcccaacaacaaaaactacgacaacagcaacttcaacaacaaaagtttgaagcagctgcctcatatctggccaatgctaccaagctaatgcaagaatcgagtcaagatagctacttacccaataataacaataacaataacaatagtaacaacaatttgatgatgatgaaaacatccatgggttctcctagaactagcgtaaacggtatgcagtctccttctggtatgaacaatactaatacttcggggcaaggcgtctccactggtatcaacggctctaataatagtggtagaatcgaagtaggcattggaaacaccataaatccctataatggcagagtaaattga

SEQ ID NO: 2947 - DNA, 1431 bp, Saccharomyces pastorianus
atgtctaggaagctaccccatctccttgccacgaggaaatcaaagacgataatcgcgaccattcttctcttctacactctactgtcgttccattcctcaaacaaaaaattgttttctcaattttaccctaataaaaatgactatactattttgccttctacttcgcattcgcaagatttgaatttaaaagcgaatctttcattcaacaagaagaacaacgaattgcacgatttacgtgatcaactttcatttgcattcccttacgaccctcaggctcccatcccgcagagggtatggcagacctggaaagtaggtaccggtgataaggatttccctgccactttcaaaacctttcaaaaaacatggacagcttcatcttcaaagtactcccaatactcattgatcccggacgacgcggtcataccctttttagagaatctttacggcactgttccgcttgtcgtgcgggcgttcaaactgatgcctaaaaatatcttaaaggcggatttcctgaggtacctattgttatttgcaagaggtggtgtctactcggacatggacaccacgctcctgaaaccaattgactcttggccttcgcaaaacaagtcatggatgaacgatataataaacgtaaatacccccatcccttacaaaaatttaaaggtttctcccgtcaaagaaggcaaaatacagcagcagccagggttggtcatcggcattgaagctgatccggatagagaagactggagtacgtggtatgctcgtagaatccagttttgtcaatggactatccaggctaagccaggccacccaatattaagagaactgatcttgaatatcaccgccacaacgctaatgagtgtgcaagatccaggcctccctgtcaaatttgttttagatccaaccaatagcgaagactacaatgtaaactatagatacaagagacgtaataacgaaacttaccctcactccgacttgaaaaataacgagaacgtcgatggtacagacataatgaattggacgggtccaggtattttctctgacatcattttcgaatacatgaacaatgcgcttcaacacaacaacgatatcctactggtcaacccgaacctgaacaagaacgacgaagaagacggagcttctgtgtcaacaagcgaggctgatggtaatgcattgttcaaatcaacaaggaggttttataaaaaaatatcagaatccttacagtcatcaaacgtaatgccgtgggaattcttctcctttttgaaagatcctgttattgtagatgatgtgatggtcttaccaattacaagtttctccccagatgtgaaccagatgggtgctcaatcaagtgacgataaaatggcttttgtaaagcatatgtttggtgggacctggaaagatgatgctgataaaaatgctggccatacataa

SEQ ID NO: 2948 - DNA, 168 bp, Saccharomyces pastorianus
atgaggaacttgcatcatttgagaataaggcataaagcccatcccacccatcatttgaggatgagggaacatttgagagggagggccgttggcgaactgcggattttgaaggctttcatttggaaaagtatgaggggtgaggacttcctcaggatcatccagttgtag

SEQ ID NO: 2949 - DNA, 1188 bp, Saccharomyces pastorianus
atgtccagttcacgagataagaacgctttgtatttgccttggaacgaatgcatttccatcgcttccgtcctaatcggcgcatatgcatcgtataaatattataaactatgcaaggcgcaggatataccacgtccaaaagatggtgtggagcagctaataggaaacactcccctggttcagattagatccctttccaaggccaccggagttaacatttatgcaaaattagagttatgtaacccagcaggaagtgctaaagatagagtagcattaaacataataaagaccgcagaggaacgaggtgagctaatcagaggcgaacctggttgggtgttcgaaggaacaagcggttcaacaggcatttctatagccatggtctgtaatgcactaggatatagggcacacatttctttacccgacgacacatcgttagaaaagttggcattactagaaagtctcggtgctacagtcaataaggttaagcctgccagtattgtcgatccaaatcaatatgttaatgcagctaagaaagcatgcgatgatttgagtaaggaaggtaatggagtaaaggcagtttttgctgaccaatttgaaaatgaagccaattggagagtacactatcaaaccacgggtccagaaattgcccatcaaatggaaggaaaaattgatgcgtttattgctggctgtggtaccggtggaacgataactggagtggccaaatatctaaaggaaagcgcaaaaattccgtgccatgtcgttcttgcagatccacaaggttcaggcttttataataggataaactacggcgtgatgtatgactatgtagaaaaagaaggtacaagaaggaggcatcaggtggatactattgtagaaggtatcgggctaaacaggattactcaaaatttccacatgggcgaagagtttatcgatgaatcgatacgtgtcaatgacactcaagctatcagaatggcaaaatacctatcagtaaacgatgggttattcgtaggaagtagtacagctataaacgcagtagctgctgttcaaatcgcgaaaagactccctcctggtgccaacattgtaattattgcatgcgacagcggatcaagacatttaagtaaattctggaaagaagctaaacaaatagagtatgacatatcgttaaaggagataacaggtggcattcgatga

SEQ ID NO: 2950 - DNA, 558 bp, Saccharomyces pastorianus
atgcaagtctctccagctattataaaaggtatcgcagtctcatccttgggtttatacgccggtattttaacttcatccacagtaatttctatcaccacccctataaacgttttgactcaacatttgaaaggcgttctttgcaccctaggttgttggagcactgtattaggtggactagccacgagcgcctttggcctcagctattatttatctacaccaggagacagaccaaactacctactgtgtgggttgggtattgccccactatctgcggtatacctgtaccttgtatcactgtttaatcacaaattggcaccaaaatgtacgcgtaatgacctagaaaaccaaaaggacgaaaagttacctcaaaatcacccacaagttgaagatggagaagccgcatgtccattctcaaaaatgaacaacgccaaaaaattaaaagctgaatcagaaagaagtgtcaaatgtcactcatatatgacattgcacatgtgcattgttaccggtttaaccattttcacgtttggcaagtgcattctagacggattcagaacatga

SEQ ID NO: 2951 - DNA, 2781 bp, Saccharomyces pastorianus
atggtggagcaagataatgggccttcacagaaattgctcaagacacaatacgatgccgtcttccacttaaaggacgaaaatggcatagaaatatatccgatattcaatgtactgccacccaagaaggaatatccggactattacattataataaagaacccggtatctttaaacactttgaaaaagcgattacctcactatacgtctccgcaagatttcattaacgattttgctcaaattccttggaacgcaatgacgtacaatgcgaaggactcggtaatttataaatatgctaccatactagagtctttcatcaaagagaaagtcatactcaatctaagaaagtactacccagatttaaaatatccctctttaggccagattccggaagtatcaggtgaggcaatacaacaatccaatatgtccccgaatatcgctaatataaaggcaaacgacaatagacctgaattacattcggaagtaaaggcagcttttgccaaactggataatactattattgataagatacaaccaagccaagattacagaggacaaaaaagtctaccagcactcccaacacactctgcctccattaccccgcaacaattggcttcgcccactccagtcgttaattatacaaacaacaacattgcacatccgaagacccatgtcaggcgtggtaggccaccagtcattgatctaccctatgttttgagaatcaagaatattttaaagatgcttagaagagaagtcgaccaaaacaataagacgcttactctgtattttgaaaaattaccagataggaatgatgagccaacttactattctgtcataacagatcctatctgcttgatggatattaagaaaaaagtcaaatccagaaaatataaaaacttcaatagttttgaaaatgatttccagctaatgttaacgaattttaagatatactactcccaagatcaaagcaatataataagagctcagttattggaaaaaaacttcaacaggttagtgagaatcgaattatccaaacccgacgaagactatctacctgaaggcgaattaagatatcctttggatgaaattgaaattaatgacgaaaggtaccaaataggtgattgggttcttttatcaaacccaaatgacataaacaaacctattgtaggtcaaattttcagattatggtcaactacagatggtaataaatggttgaatgcttgttggtattttaggccagaacaaactgttcatcgggttgatagattattttataaaaacgaagtcatgaaaaccggccaatatagagaccaccctattcaggatataaaggggaagtgctatgttattcatttcaccagatttcagcgcggagatcctagttcgaaagttaatggtccgcaatttgtttgcgaatttcggtataatgaaagtgataaagtttttaacaaaatcagaacctggaaagcttgtttacccgaggagctccgtgaccaagatgaagccacaattcctgttaatggaagaaaattttttaaatacacttctccaatagcagatttattgccacctaacggtactttgaacgataaaatcccagaacccacagaaggtgcaccaacggctccacctttagttggcgcggtatatttaggctctaaattagagagggatgacttgggagaatattcaacttctgatgattgcccgcggtatataataagaccagatgatccaccagaagaaggcaagatcgattacgagacaggaacaatcatcaccgacactttaaccacaggcggtatgcccaaggtgaacagctcttctacaatgcgtttgcctactttaaagcaaacaaaaacaatttccaattcaaattttggttcttcatcaaatatttcactgttgaatcagaattttaatcattcttccaactttttgaaattggagaatatgagtaataatacacacagcttattatcacatccttccatttctaaatttcaatctccgacgttaatagaacaagtcaatcgctcaaaaaatcatattttgaagaaacacggacatgcatcctcagcggctactaagaagtctgcatccaaaagttttacgttaacttcaatgatcaacagcctaactgctcatacgtccaaatataactttaatcatattgttatcgaagctcccggtgcatttgtagttcctataccaatgcaaaaaaacatcaataccatacaatcaacagaacacgccagcagaacaagaccaaaaaaccctcaaagcctcggtactactgtcattgatgataccaatgcgcctggtgagcaaataatatggtttaaaggtcccggtgtgaaaatttctgaaagaattattgattctggaaacgatctagtacgagtacctttgaatggatggttttgtaaaaatcaaatgaagaacttagattacgaagaaattgaagaagacattatagaaccattaaatgacactagcgatgatatgatagcccatattttcaatcctccttcaaatttaaatttagacatggatttgaatttgagtccctcttcgaataactctaccaattttatagattttagtacaatggcaaacggcgaggacgatgggaaggaaagcgacacagcagaagaaactgaagatgaagatgaagacacagatgacgagcataatatggaagacgtcccaacaacctcagcttttggcttaaattcatccgctgaatatcttgcatttagactacgagagctcaataaatga

SEQ ID NO: 2952 - DNA, 723 bp, Saccharomyces pastorianus
atgtcttcgatggtgagttcattggctcatttctgtgacaaacatggcccaaggatcatatcggtaacacaatctgcagaaaagggaacattaggtgaagacttattagtacctgattatccaacagactcttactgtgagtcatgtcttttacagttccctgaagaatcaacgaggtcgatgagatgcttcattgaagatgtcccatttataactacccaatactcttctatacggtaccaattgctaaattccataattaaaagagctttttccgaagagacaatgatctatgataatatgccattcatatattttgatgatttgcgaggattgaacttggtgataggtttcaaactgtatgatgagaatgctaggggtaacgagagaaggtattgcttcattttgacagtggattccagaaatcacgatgaatctatgaaaatgttaagtgaaaactggaactttattattggcgggttcgataaaatgatcacttacatcaaaaacattcacaaaagtgaatttatggggaaaaatcaaaagaaagaagataaactagaaaccttgaataataacgcgtttattggttcgtatttgcgtgcgaataagtctaaaatcggtcgtaatttagtgtcccttacaaacgacaaatttttgtttgttcggatacacaagtggaattcatttttattgcatgcgcttatgaaagaagataaatga

SEQ ID NO: 2953 - DNA, 1485 bp, Saccharomyces pastorianus
atgagcactgaagaggactatatcgatgaacttgatgccgatttcggtgaagaaagcagtgctgaagaagacgtagcgcaaatccgggagactatgaaaggaaatgatcaaacaaaagagtgtgacccattcacaattttacaagatattatagaatcatacaagacgttgccacaagtaagtccggacgaattacctctatcagagatatcacaaatttcgccaaaaattgtcaaaataaaaaaagttttagaacaggaggatatcgatttcataaagatgctgccgtgcttaaacgccatcgttccactcattaaaaatgatataaaatcattgcacaattttctgattctattatacagggaccgtttccctgaactatcttcattgataccgtcaccgttacaatactcaaaagtggtaacaatactggaaaatgaaaactggtcaaggaatgaaagtgacaagttatccattcgtctagaaaatgaggcaaatttgactaaagaacaacttcttgtcctaacaatgtcgttaaaaacatcttttaataatgaaaagcccttggttgatgattcgaagaagctggtttttgaagctggcagcatgctgtataatttatgggaactacaaaaagatgttggtcaatatgtaacctcgaagatatcacttattgcccctaatatgtgttttttggtaggttcagaagtaacagcccaattattggcacatgcagggggggttttggaattcagccgaattccaagttgcaacatcgcatctattgggaagagtaagcatctttcacacgagttacatacctcagagagcggggtacgacaagaaggatatttatttaatacagagcttattcaagattttccaattgccatccataaacaaatgttaaggattctatgcgcaaaagtaactcttgcagcaagggtcgatgcaggccaacgatgtggtgatacaaatgcacttctaggccagaaatggaaagctgaattattagaaaaagccaagaagttatcagaggctcccagcattgctgaaacgaaggctttacctataccagaggaccaacccaaaaagaaaagggcaggcaggaaatttagaaagtacaaagaaaagtttaggctatcccatgttagacaattgcagaataggatggagtttggtaagcaagaacaaactgttcttgatacttttggcgaggaagtaggcttgggtatgtcaagtacttcattacagcaagccataggcgccacgtccgacgctagaaggtttgcaggcaaccaggctaagctaacaaaggtaatgaaacatagaatttccgaggccaatcaacagactgatgaatacctgatctcgttaggccatgacgcagagcacatcgaccagtcacagtgggcaggccaagaacctaagaagccgcgcaccaacccaaagagagaccaagattggttttcacatcatctataa

SEQ ID NO: 2954 - DNA, 945 bp, Saccharomyces pastorianus
atgttcaaggaggaggactctttaagaaaggggcagaatgtggccgtatgggaaactttattggcaggtgccatgtctgggctcctagcccggactgtgacggcccccatggataccatcaagatcaggttgcaattgaccccggcaaatgggatgaagcccttcgagagccaagttctggaggtggccaagggcatgataaagaacgaaggcatccgggccttttggaaaggaaatatacccggttcattgctgtacatcacctatggagcgggacagtttagttcgtactcgttttttaacacatgcttggaaccgttcgggctgggggcccggttacacagccttgttgttggggccctagccgggatgaccagctcctttctatcctacccgtttgacgtgctgcgcactcggctagtggccaacaaccagatgcagtccatgaccatcacaagagaggcgcgagacatctggaagctggagggcctccccggattcttcaagggctccatcgcgtcgatggccaccatcacggtgaccgcatcgataacattcgggatatacgagacaatcaagatatactgcgacgaaaaggaaaacacggcaacggcaggtaccaaatggaagctgtccgctctgaaccacagcgccggtaccattggcggggttgtcgccaagatctccaccttccccttggagacgatccgcagacggatgcagttcatgaactcgaagcacctggagaggttttcgaagcattccgatgtatacggctcctacagagggtccggcttcgcaagaatcggcctgcaaatactgaaacaagagggggtaacctcgctctacagaggcatcctcgtagccctctcgaagacaatacccaccacttacgtgagtttctgggggtacgaaacggccatccactacctgcggcgatgctaa

SEQ ID NO: 2955 - DNA, 4887 bp, Saccharomyces pastorianus
atggcgaagcaagaggatccgttaaatgaaataagcccgaatactccaatgaccaaaaagtgtcatttattaaacgagacggtatcgaaagtccatcgcggtaaccaagcaagagcaccaacctccacattggccgaagccagtttaactacctctgatgggatactcacgatgcataatggcataattcaaaactttctgaaaactgcccacagcaatatagaattggctacagaagatatcaataatgtggaccgctcattaagttcgatatattctctattgaagagccgccatatgctgggccatatgaactctactgtcaagcagcacttgatgatagttgtcaaacttataaatggcaacgtattggggttagcttcatctgagatcatttttctttataatgaaacaaacttatttcaagctcacaacttgaaagacgtcctccttgcggacttcaatgtatggaatgattattatctttcgaacttaaaaatactgacgttacaacttatactaaagagaaagctagtgaaagaatatttaccgcatgtgttggagctgttttcccatgacgagagattcctgctgaaggattccaatctgaaagcgcacgcccttacaaaaatcgtattaaacttcttctctgtaataccgaattgtaaagccttatttggtctgaaatttttgcagtacgtcaagcagtataaattacctttcaaaaactacattagcaacatcagcattgaagatttcagtaaaaaacttctgcataaaagttatattgacacagggcctaataaaatatatttaaattcattttacttatcctattccagactgtacgatggcctggataagttgatgcttttagatcttttaagttacgaacagccttctaaattacaaggcatgaccagcgcgaagaaggagttgaatgagtactgcaatatgaccgaaaagcgccttctttggtcttgcgtttctcccgatgatttgggtgtggtgctcgaaagcgcgacagcatttttgcaaggcaaaaggaggaaattatcagtatcattagattctttagtatgtctttggtctactatacgtctagaaggtttacgaaagaataagaatattttaaggcaatttgatagtactatcatttatgttaattcgaatatcaaatccattgatgacgatcttactgtaaattcaatattcgatcttttgactattctatctgagatctgtattgattatagggagttcaaacgattggcaaacgtggttagtctttttttcaatgcatcagttttattcaaaagacattctttcctattgaagactgccgacttggaaatcaagagtcttttacttaataatgacccgaaaacagttcaccggaccatgttaaaattcgagaagtttatttcaagcgcccaaaatcttcaaaaaaaacttgaagttttctcctatttgttcaatgtatattgcctgctgaggattgactccttatcatttatttttgatttttgtcagaacgcattcatacactgttttacacgcctaaaatcatccaaattcatagagttttcaaactgctccgaagttatgctttccatactatatgggagctcgtctatagaaaatgttccgtctgagaattggtcacagttaactaggatgattttttgttcattaaggggaaaccttgacttggacccttccgaattgaatggcaaatcagataaaccacacctcttgaacaagtatgagttattaattaggatagtgtatttactaaacctggatatgagtaaacactcaacaacgaatctatcaaacatttccaaaatgtacataaacaaatggttaacaccgcatgaagtaaccgaaaagatatcaccatttgaaatgaattttgtcaaaatgctactgtgttacttaaattttaacagctttgataaactatccattgaactctcactctgtatcaaatcaaaggaaaagtgtttttccagcatcatgccttatgttgacaattatttactacaagcctatttgagcttacatatgattgatgacgcattgaaactaaagaatcagttacaaataacagcaaacttgcaaacagctaaaatggaacacgcactactacatgttgactccttaatggatattcacttgtgggaggctgacctaaaagcatttcaaataaactttcgcgaaacgctacctactctcaggcctgaattatttgatattaataacgaatacaagcaaccgatgtcattgtatatcagagttattcttttgaatataaagctttttagcgtaagcgcgaagctcaatatcaaggccggtaaggtaatatcggctgtactggattgtaaaaaggcacaaaacttgtctttatccctacttaaaaagaagaatcaactatcacagggatcaaggttggctttactaaagagtttatcaatcagctttttccaaatcatcgacgtatgtatacgtattggatctgcaagagattgtgaattctactgcaaagaactgtccaagattctgtgcgatttaggggaaccgatcattgtttatagatgtcttcattttcttcacaagtactatatgattacagagcaaagcagccttcaaagtataaccctaaaaaaagcaaacaaggcattcgactacctggatgcagaggcagatatcacaagtctgacaatgtttttgtacgataacaaggagttagtaaaactagaacagtcgttggtacttttttttggtgaccagctaaccaagacatttctgccgaatctatggagacttaaattgggaaaaaatattgatgatactatttgtttgcctgaatataaggctatgaatataatcaaccaagcccgcaacatgtggcagaaggtaatcagccaactggaggaagaccccttttttaaaggtatgttcgagtctaccttagggatcccttctttcttaactgctcttcctagtacgatgtccaacaatgtactcaaaaccccgtcgaagcatggtatggggctaaagctttgcgattctccaagatcatcgaacatgacacctaaagggaagaacatgagacaaaagtttgacagaattgccgctattgatagactaaaaaaaatgaaacaacttttagaaggcttaaaactagacacattggaaaatcatgaattgtccaagattgcctccctattttcactaacgctaaccattctttcgaatattactaacattcataatgttgagggtaatttaataaccagcttctctctaactgatctgccaaggcacatgcccttgctattcgataagacattaaataatatcaataatgaggagtacaaaaactttcatacatcttcactaaaaaccatcggcagcatatccgccgccacagaaaatgatgcaatttctgtcgctcaacaaaacataatggatagcaatttggatatcaatgtcatcactattgacttttgtcctgaaaccggaaatttacttttatcgaaaattgaaccgaagtacgaaagaagaacgcacttaagattatcattaatacgatcgaattcaagagaccttgatgaagcacacctttcgtttatggaggcaacaaaggaactactttctatcattaaagaaagtaatgaaacaacttcggtggaggttaccagcaagattaaaactagagaagagaggaagtattggtggaccacaagatacgaattggataagagaatgcaagcattattgaataacatagaaaatagttggtttaatggcgttcaaggtttttttagccctgaagtcgtcaatggctctctctttgaagaatttaaaggtaagttctatgagattttacatcaaaacctaccctccaggaaactctttggaaatccaaaaatgtttatgaagattcaagattgggtgatagaattgtttttaaagctcaacccccaagaagcagactttctttcaaagatggaagatttgatatattttgttctcgatattcttctattccatggagaggaaaatgcttatgatgaaattgatttcagcatgcttcacgtacaattggaggaacagataaagaaatatagagcgaatatgacaaccaatagtatattccacacgtttttggtagttagcagttcatgtcatcttttcccatgggagtgtctttcatttttgaaagatatttcaattactcgtgtaccttcttacgtttgcctaaatgaactcttattgcgtttccattataaattacccatttctgtatgcatcaaggataacattagtatggtattaaatccaaatggcgatctgtctaggactgagtcaaaattcaagggtatgtttcaaaaaataatcgatacaaagccttcctctcagttagtcatgaatgagaagccagaagaagaaacacttttgaaaatgctgcaaacctccaatttatttgtttacataggtcatggtggtggtgaacaatatgtaagagggaaagagattaaaaaatgcaccacaatcgctcctagtttcttgctgggttgttcttcagcagcgatgaagtattatggcaagttagaacctactggaactatttacacttatttgctaggtggttgccccatggtattgggtaatctttgggatgtgactgataaagatatcgataaatttagcgaagagctttttaaaaagatgggatttaccgacaacgttgacgatttgaatggcgataacttatctgtctcacatgctatctcaaaatctagagacgtttgccatctacgctacttgaatggtgcagctcctgttatttatggactaccggttcaattcacgtcataa

SEQ ID NO: 2956 - DNA, 2073 bp, Saccharomyces pastorianus
atggatttagaaacactgaaacatggggcacatagtgatcagatacatgaaattctaaggcaattagagacctgtaccaatgagccagtaaatctcgagacctcgatgatcctcatcaaattcgtccttcccgtatatccatcgctgccgggaaacactaaggtgatcctcagacggctagtttctaagtcgtttacgtttttagcgcacttgataacattctctacaacactagatcgtcgcggtgggatgaatgagattcgcatatatcaagagtttttgaaagacgttattagtcttgagcaaggatgtttgagctgctacataaagacatgcgctgctagtaacgtgaaccgtaatagcgtcaaggcttttttttttggaagtaagatatttaatttgttggccagccaaattgacatagctaaatacctggaatatttacgccttcagtggaaatttgttcttgagaacgacaatatcaaaacaaattcagacggattcctaggtgaatggctattgtcgacttttcttctcagtcctgcattagcaactgacatattcatggacgaattattcttacttgaagaaaactatttttcttcatttcaaaaaatagtatcaagtagtagtcccttagtgcaaaggaggcttgttactaagttcctaataccatatgtccaagcacatttaactgaagtaaacataaatgatgttaggaaaattctaaggcggtttgaccttgataaaatcatgagtctaaccgtactgctggaaatacagtctctacctctaaaggaaataatagttcgttcgatagataatggtacttctgtgaaaaccgcgaatgcattggttaatcaattcgcagattttgctgacgaggacagagatgaaaaaatttgcgaattacttgtgctgctcacggtttataacctgaacaagaatcagaaagaagaaatatcacatagcggccaatttttaaatggtgtaacgaagcatttgggcagcaacgaacgtgaggcaagagaaagggccatgtttattgctaagcttctatccgataatgagttaaagtacgaaagtgatttcaaaatcgatgtgccaaatttgaagttcgaaagcaacagtgatgacgaaatcatcgacttcaaatctctgaaaaccccatcagtattcaatacccacattgaggaaaagaacaacaaagttatagagatctcgggccgtgttcaatctcttgcaatgggtgacggtgatagtgatgacgaaaatgatgatgatgatgagtgcgttaagcggattgtatttttgaaagacttaatgagagagtatgaacatactggtgagtctcggaaaactcgattaataccgcttctgaagcaaacagtaaaattggtacggcagaagacagatttcccattagaagttggttattatgctcagggaattttgtcaagcctaacgtgcttaaacaatgaattcgatgaatcgcttttcgaacaatggagaatcaatgccttagtaagcgtactagtcgttcttccagcaaaggtaaccgatgcaataaagatcctttttaattcggggctttcattacagcaaaggatgtcattattatctgcgttaggtctttctgcaagggagttaagaggtcttgacgatccaaccgtcatcaaacctaaatttgattttcctacagatcgtttgccttgggacagccaaagccatggcaatttaacgcttgttgaagttcaagagtcatcgagtctaatgaaagagacgaaaacagtatggaagtctaggaaactgggcagggatcaagagaaaggaacacaaaaccggtttagaaaacacgcgaatttgttcttctacccattggcacacggttggctcaatggtattgaggtgggtacatacaaccagcttttcaagtcacattatttaaccacattgcgtatcatatattcttgcgccgatccagtccatgactttgacgctatgactcaattgatggatcaagtagtgagtctagcaatagaagagggagttcccctcaaccagaatcagtag

SEQ ID NO: 2957 - DNA, 4356 bp, Saccharomyces pastorianus
atggaagagacgggagattcaaagctagtccctagggacgacgaggaaatagtgaatgacaacgatgaaactaaagcgcctagtgatgaagaagaaggtgaggacgttttcgactcttcagaggaggacgaagacattgacgaagatgaagacgaggcaagaaaagtgcaagagggcttcattgtcaatgatgatgatgaaaacgaagatttaggaacaagcatttccaaaaaaagaagaaagcataagagaagagaaagagaggaagacgaccgattatccgaggatgatttggacttattgatggaaaatgctggtatggaacgcactaaggcaagttcctcttccgggaagtttaagaggttgaaaagagtgggtgatgagggagatgcagctgaaccagaaaatgaaaatgttgctgcttcagggcaagattctacatccaaattagaggatttcttttctgaagatgaagaagaggaagatttagtttctcgtaaaggtagaagcaacgaatatggccgcgacgaagaagatcaggaagatgaagacaggacggctgacaaaggtggaattctggacgaattggatgacttcattgaagatgacgagttttctgacgaggacgatgaaactagacaaagaagaattcaagaaaagaggcatttaagggaacaggccactaaacaacccactcaaatcacaggtttatcgtcggataagattgacgaaatgtatgacattttcggtgatggccacgactacgactgggctttagaaatcgaaaatgaagaactagaaaatggtaatgaaaacaatgagattgaggaagaagaaattgatgaagaaaccggcactgtaaaaagctccaagaaaaaaatctctttagaagatatttatgatttggaagatttgaaaaagaatttgatgaccgaaggagacatgaagatcagaaaaacggatataccagaaagatatcaagagttaagagctggtattacagattacggaaatatgtcatccgaagatcaagagttggaaagaaattggatagctgaaaaaatatcagttgacaaaaatttcgaagccacttatgacctaactgaattcaaggaagcaattgggaacgcaatcaaatttatcactcaagaaaacctagaagttcctttcatttatgcttaccgccgtaattacatctcttcaagagaaaaagacggcttccttttgactgaagatgatctatgggaaattgttagccttgatattgagtttcacagtcttgtgtacaaaaaagattatgtcaagagattttacgaagaattacacgttgatgatccaatcgttagtgagtactttaaaaatcaaaacactgcatcaattgctgaattgaattctttacaagatatttatgattacttggagttcaaatatgccaatgaaattaatgaaatgttcataaatcacactgaaaagtcgggtaaaaagcacttgaaaaattctagttacgaaaaatttaaggctagtcctctttatcaagcggttagtgatatcggtatatctgcagaggatgtaggtgaaaacatcagctcccaacatcaaattcacccacctgtagatcacccaagttacaaaccggtagaagttatagaatctatattgaacgcgaacagtggtgatttgcaagtcttcacctccaataccaaattagcaattgacacagtacagaaatattactctttggaattgtctaaaaataccaaaataagggagaaggtcagatccgacttttccaaatattacttggctgacgttgtgttaacagctaaaggtaagagagaaatccagagaggatctctatatgaagatataaaatacgctattaatagaactccgatgcatttccgtagggacccagatgtttttctgagaatggtggaggcagaatctctgaatttgctgagtgttaaattgcacatgtcatcccaagcccagtacatcgagcatttattccagattgctcttgaaaccactaacacctcagatattgcaatcgagtggaataatttccgtaaattggcatttaaccaagcaatggacaagattttccaagatatttctcaagaggttaaagacaacttagcaaaaaactgtcaaaaacttgtagccaaaactgttcgtcataaattcatgacgaaactggaccaagctcccttcattcctaatgtcagagaacccaagattccaaagatcttaactctaacctgtggtcaaggtaagttcggagccgacgccattattgccgtctacgttaacaggaaaggtgatttcgtaagagacttcaagattgtcgataatccatttgataaaatgaaccctgagaaatttgaggacactttggataatattattcaaagttgtcaaccaaatgccatcggtattaatggtcctaacccaaagacgcaaaaattttacaagaaattacaagaggttttacacaagaaacaaatcgttgatagtagaggtcataccattcctgttatttatgttgaagatgaagttgctatccgttaccaaaactctgagagagcagcccaagaatttccaaacaagccacccctagttaaatattgtattgccttggcgcgttacatgcactcccccttattggaatatgctaatttgtcaagtgaagaagtgaaatcgctttcaatccacccacatcaaaacctactttctgcggagcaactaactaaggctcttgaaacagcttttgttgacattgtcaacttggtaggtgttgaagttaacagggctaccgataacaactactatgctagcgcactcaaatacatttctggttttggcaaacgtaaggctatcgattttttgcaatcactgcaaagattaaatgaaccattgctggctcgtcagcaattgatcacacacaacattcttcacaagactatctttatgaattctgctggttttctgtacatttcgtggaatgagaaaagacaaaaatacgaagatttggaacacgatcaattagacagcacaagaattcatccagaagactaccatctggctactaaggttgctgctgatgctttggaatacgatcctgatactatatctgagaaggaagagcaagggacaatgagtgaattcatcgaactcctaagagaagacccagaccgtagaacaaagttagaatcattaaatttagagtcttatgccgaagaacttgaaaaaaactcaggattaagaaaactgaataatctgaatacaatagttcttgaattattggatgggtttgaagaattaagaaatgacttccatcctctgcaaggtgatgaaattttccagagtctaactggtgaatccgaaaagactttcttcaagggcagcatcattccagtcagagtagaaagattctggcacaacgacataatgtgtgcaaccaactctgaagtagaatgtgtagtaaatgctcagcgtcatgcaggtgcacaatttagaaggccagcaaatgaaatatatgaaattggaaagacttatccagcaaaggtaatttacatcgactatgctaatattactgcagaagtgtccttattagatcatgatgtaaaacaacaatatgttccaataagttacagtaaggatccttccatttgggatttgaaacaagaattggaggatgccgaggaagaaaggaaattaatgatggccgaagcccgtgcaaagagaacacatcgtgttatcaaccatccttactatttcccctttaacggaagacaagccgaagattacctaaggagtaaagaacgtggtgagtttgttatcaggcaatcaagccggggtgacgaccatctagttatcacttggaaattggacaaagacctattccaacacattgatattcaggaactagaaaaggagaatcctttagccctaggtaaggttcttgttgttgaaaaccaaagatacaatgatttggaccaaattattgttgaatatttacaaaacaaagtaaggttactaaacgaaatgacttctagtgaaaaattcaaaagcggtaccaagaaggatgtggtaaaatttattgaagattactctagagtgaacccaaataaatctgtttattattttagtctgaactacgataaccctggttggttttatttgatgttcaagattaacgcgaatagcaaattgtacacatggaatgtaaaattaacaaacactggttatttcttggttaactacaactatccaagtgttattcaactctgtaatggtttcaagacccttttgaagtctaacagtagcaaaagtagaatgaataactatcattag

SEQ ID NO: 2958 - DNA, 1428 bp, Saccharomyces pastorianus
atggatggcaattgcacctctaggttttacactaacctcttaattgcaaagtatttgaagcaaaatggcttggaagactcattggcggcttttataagggaaacggcactaccattctctgccttggaagagagcaaaaggtcgaacggtattgttggtgaggtaccgatagaaagtctacagaatatcattcaagatagaatttgctacaaaaaatcgtcattccaggaccgattcaaaactctttcggtaaacgatgaattggccccaatcgataatgcgagatatggaatcgagccgtggaatcataatataaaattttcacttgatttgaatttaaacaaagttttacccagggatacgttgttcattagtgcgaacttcatagataatgataaaaatttattactttcatcggcgacgggagagctgacaatctacgacgtccaaagaacgacgtcaaaggtccttaatgcccataaagtggttaaaggtattatcaagctatgcgggtcgattggtagatccggttatcactatgtgtgcccaatgaacgggagattttacctgttgaataagaattttgaatttatcactgatgcagtatggaaagttcattcaagaatgataacgcatataaagatttgtacttttacagaatcctcttggtatatcatttcaagtggcatggataatctcttaaaactgagcttattggaagtacaggatggtaagattttgttcaaacaattatcagaaataaagcttgtctccaattgtacgtcgctaaatgtgatcactgatgatggtaacaatgatggtcgtactaagttctcagtgtttctcactagagctgaattcacacatatagcatgttacgcgatttcagatgcaaaagcactggtgcattcatacaacatcgctttgaacaacgccgaatttagcacatacgcattcaacattcgagatgcaattgtagcagattttgttcattctggtagtgaagatgtgataaagctagcacaaagttccatgttagtagtggccacctcacacaaaccttatatgaggttgatgttagttgagatacccatggagatagaccattttgagtcgacggtatcagaggcaactccaaagacatattacgataaagtcttgagaaatttcgccacggaaattagccaagatgatttctcgttaccgattctccaaagtttgaaaacttccaacggtatactagttggaaatgatgagggaatttacagcattgatttaatgaacggtgactccagactattgaatattcccgatggggcaaaatcgctacgtaacaggataaagtgtatggatgtgagtgaagaccaaatgagagtagtcgctggaacatctgataaatctatttgtatgctgaacataaccaaataa

SEQ ID NO: 2959 - DNA, 1485 bp, Saccharomyces pastorianus
atggaaacgatggaaagtcgatctacagggcctcttacgacggaaatttacgatggccccactgtggcctttatgattttgggtgccgccttggtttttttcatggtacctgggctgggattcttgtactcaggactggcgagaagaaaatccgcattggcgttgatttgggtagtgctgatggcgacgctggtcggtatactgcaatggtacttttggggttactctttagccttttccaagtccgccaccaacaacaaattcattggaaacttggactcgtttgggtttaggaacgtatacgggaagaaatccgacggcgatgtctatcctgaacttgcgtatgcgaccttccagatgatgttttcctgcgtcaacttaagcattatcgcaggcgctacagctgaaagaggtagattgctaccgcacatggttttcctcttcattctagccactattgtgtactgtccggtgacgtactggatttggtctccgggcggttgggcttaccaatggggagtgctggactgggcaggcggtgggaacattgagattctgagtgccgtttccggattcgtctactcttggtttttaggcaaaagaaatgaaaaactgctgataaacttcagacctcataatgtgtcgttggtcactctaggcacgtccatactgtggtttggttggttactcttcaattcagcctcgtcactatcaccaaatttgaggtcagtttatgcctttatgaacacgtgcctcagcgccattactggcgggatgacatggtgcctcttggattatagatcagaaaggaaatggtcgactgtcggtttgtgttctggtatcatctcaggattggtagcagccacaccaagttcaggatgtataactctctacggctcgctaatccaaggcattgtggcggggatcgtctgtaattttgccactaaattaaaatactatgctaaagtggatgacgccatggatattcttgctgagcacggagtcgcaggcataataggactaatattcaatgctcttttcgcggcagattgggtgatcggtatggacggagtcagcgaacacgagggtggctggataagtcataattacaagcaaatgtacaagcagattgcttatattgccgcatcaataggatacactgccgttgtcacggcaatcatttgctttgtgctcgggtacattcctggaatgacgctgagaatatctgatgaagcagaagaacgtggtatggatgaagaccaaattggtgaattcgcatacgactatgtggaggttagaagagattattatttatggggtgtagaagaagattctcaacagtctactgtaaatcaccgcagtactgacactcgctcaactgttgaccatagcagcagtaccaatagttctttagacgggaacgaagaaatggcccggtcggaaaagataacaccatctcatcaagaaaagcctagcgataggtga

SEQ ID NO: 2960 - DNA, 2616 bp, Saccharomyces pastorianus
atgtacatggtcagatgtggcctcaaacctaatgtaccgtgtctttcacttgacctggcctttgcgctatcgaaacaactcataaataggcgttttagatctaccttacaaatggaagatgatagaaatataatggaaaccctcggcaaagacaaaagtatatcctccgaagaagttgagtttaagttagcacaactaagggaatttaccaagaacctaaagagccgtattcacaatgtcaagtcgccaaagttagctagttataaagtcaacgatgcggcgtcaatatctgaggaagctagaactctcgatattagcagaaacatctctttcgaaaatgaagcacctgtaactgagaataagggtaccggaaatctggtcagtttgatccaatcttcattttcagagaaggttaattatcttgtaccgaaagtaataagagaaagagtagccgatgacgacgttcttgcgaaaagtattctcgacaaatctcagaggaactgggcacctatcatagataaactttataccagtggtgaaagactaaaaaacactgattccaaggaaatgtccgtttggttaaaggatacaataaaagttttgccattccatagtatccttcaattggatgaaatgctgttggagcaaattgacggagacgttgctaaattcaacactcatatgtatgaatgcattttcaacaatttagggaacttaagaccaagcagctcgaatcagaatgctactattaacgacaaagtcatactcaaaatgaaacaattactagagaggtatgataacaccttgaaaataattgaagagagacgtgctaaaaatgaaggaccacctctgcgaaaaccaaagatgacccaactaatattcaataactgcctaaaatactcaagcaaatgctcgagcttcgaagacatggagtatttcattgtaaggtttaaggatatttatgacatatcgccaaacaaacaaaacttaactaccgtgatacaattctattctagaaaggaaatgactaaacaagcttggaatacttttgacacaatgaaatttttatccacaaaacacttccctgacatacgcacatataacaccatgctacaagtatgtgaaaaggaaaagaattttccaaaggccttagatttatttcaagaattacaagaccataatatcaaacccacaactgacacttatataatgatggcgagggttttagctacttcaagcagtaataccattgtaagtgagggcaaaccaagctctctgagactgttaggatggaaatatcttcatgagttagaagaaaaaaagctttatagacacaaaaatgatgagttaaacttatttctggctatgatggcattagccgcatatgacggtgacgtcgagttgagtagagctctgtattacttatttattgggaaaaagtacaaaactgtttgcgcacattggaatggaaacatttccaaagaccaagacaggatatggaaatctgttttgttacccgagatgctaaattacttaatgcttgcttatgcaaactttgatcctagaaaattgccagtgttatctggctacgagaaaggtattgagttgagaaggagattgttaagtgagttcgactccgccggaagattggatgatactaacaagtctgtcagatttaagttgccatttcttccaattaatagttcgactttagaagcgcaagtactggcggaatctaatgcagtttggaatttcaacctcgaaaatggaggaacatttcatacattgacatctacgaatgaaacaatacgagaagcagtaaaaaaagatgaacagttgttcgattcttttgccagggatgcaaatgatttaaatgatttcaaatttagaatcatgtatgaagtggctaaaaggaaaaaggatgacattaacgtcagagtgttcaacaaaatatctttatacacttatttgacaatacccataaacttaaagcatcaacaagaattcctgcgaaggttaacagtcttcacttttcaacaacatgaatttgaagctgtcataaaacgattatatgagagttattgtaacattctcttgactgatcatatcggtcaaaaatgtacgtcagatggaaccatttccacaaacgaggtcgagataaggaaagagtcaacgttgagaatggatgatatatggtacatcacctgtctgaaatataaaattatgatggatgccacgatgtacgaattggtaatgaaagctgcgacggaatttcaaaatgaggaattagctaaaaaagtatggaacgacaggggtaagttcaggacgactacgccgtttttacaaactgaccaaagaactaggatatcaaaggaccagaaatttgcacacttgatggtcgaatttttcacaaaacagggaaaatattctgatgcaatggctatcgttctatcttccaaaaatcgtttcaattgggcgtattctatggtcaggaacttgcacaaggccctggaagaaatcgatgatagaaataatgttgagatcttacttgatgtggttaataagaaatcgcatgcaaatgcattaaagtgggaagagcgggagctcaagttctaa

SEQ ID NO: 2961 - DNA, 1026 bp, Saccharomyces pastorianus
atgagtttagatgctacagattctaaagccatgatcctattgatgggtgtaaggagatgtgggaaatcatccatttgtaaggttgtttttcataacatgcagcctttggatacgctgtacttggaatcaacctcaaatccttccctcgagcatttttctacccttattgatttggcggtaatggaacttcccggacagctaaactattttgaaccgagttatgattctgaaagattatttaaaagcgttggggccttagtttatgtcattgactctcaagatgaatacataaacgctatcacaaatttggcaatgattattgagtatgcatataaggtgaatccctccataaatattgaggttttgattcacaaagttgatggtttaagcgaagattttaaagttgatgctcaacgtgatataatgcaaaggacgggtgaagagttgctagaattgggattagacggtgttcaagtttcattttacctgacatcaatttttgatcactcaatatatgaagcattttcaaggattgtgcagaaactgataccggaattgtccttcctggagaatatgctagataacttgattcaacattcgaaaattgaaaaggcctttttatttgatgttaattccaaaatttatgtttccactgactctaaccctgttgatattcaaatgtacgaagtatgctccgaatttatagacgttacgatcgatttatttgatttgtacaaggcgcctgttctgcgaaacagtcaaaagaactcggacgaaagtaatgcgataaacccccgtaacgaactgcagaacgttgcacaactggctaatggcgtaatcatctatttaaggcagatgattagaggattggcgttagttgcaatcataagacccaacgggacagacatggaaagctgtttaacagtagcagattataatattgatatatttaagaagggattggaggacatatgggcaaacgcaagggctagtcaagccaaaaacagtattgagaacggtatgtga

SEQ ID NO: 2962 - DNA, 1509 bp, Saccharomyces pastorianus
atgaaactgctcgatataatatcggtactcggtacctcttcgttgttgtccaaattggctgccgccgacagtacaactactactgacagtacacctactgacagttcgtgcaacccactaaaaactacaggctgttcagcagatactgccctagcaaccagtttcagtgaagatttttcatcttcatccaaatggtttactgatttgaagcatgcaggtgaaatcgaatacagtaaggatggtttgtccatgacgctggccaaaaggtacgataacccaagtctgaaatctaatttttaccttatgtacggtaaggtggaagtcatcatgaaagctgcgagtggtaccggtatagtttcatcattctatctacaaagtgacgatttagacgaaatcgatatcgaatgggtaggtagtgacaatactcaattccaatcgaacttcttttccaagggtgataccacaacatatgacagaggccaattccacggtgtcgatgctcctactgataaattccacaactacactctagattgggccatggaccaaacgacctggtacctagacggggaatctgtcagagtcctatcaaacacatcgagtgaaggttacccacaatccccaatgtacctaatgatgggtatctgggctggtggtgacccatccaacgctcctggtaccattgaatgggctggcggtgaaaccaactatgctgacgctccatttactatgtacattgaaaaggtcattgtcactgactattccacaggtaaacagtacacttatggtgaccagtctggttcttgggaatctattaaggtcgaagacggttctgtttacggtagatatgagcaggcgcaagaggatttcgctgctttagctaacggcggtagtgtttccagctcttcagctacatcatcctcagctacgtcatcatccgcttcatcttcggctacatcatcagccaaatcatcatccacttcatcttcagctacatcatcttcagccaaatcatcatccgttgaatcatcatccgctacatcatcatccgctacttcatcatccgctacttcatcatccgctacttcatcatccgctacttcatcatccgctacatccgtttcttcttcaagttccgttagttcttccaacaagcaatcctcaacttcaaccaaaaaatcagttactccctcgactgcaactgtctccaccatttcttctaccagcgccccaacttccagtagatccacagtcgctccaactacccaacaatcttccgcatctgaagaagaagaaaagggcggtgtagcaacatcaagtaacaatgcatcaaccagttcagctacccaaagatctagtgaacaatcatccgcagttgaaacctctacctccgaaactaggtctattagcactgttcaaaccgctaacggtgctaattttgctcaaagcctaccaagagagggaaaacttttctctctatttgtaacagctttattggctttattctga

SEQ ID NO: 2963 - DNA, 876 bp, Saccharomyces pastorianus
atgatgtgtgataagtcaaagaaaatactggactattcaaccgagttcttagataagtacataccagaatggtttgagacgggaaacaagggtccactatttcttttcgtatcaggtccacaaggttcaggtaaaagttatgcaagtatccaaatctacaatcatttgatggaaaaatatggaggcgagaaatccatcagttttgcctcaattgatgatttttacttgacacacgaggatcaattaaaattgagcaagcaatttaatgaaaacaaactactacaagggcgtgggctgcctggtactcatgatatgaatttgttgcaagaaatattaaatacgattatcaatgatgatcaacatccagaccaaaaaaccgttacattacccaagtatgacaagtctcaatttaacggtgaaggagatcgttgccctgctggtcaagaaattagacttccagtcgatattttcatcttagaaggttggtttctaggtttcaatcctgttctacaaggtattgacaacactgatcttctcactggagacatggttgacgtcaacgccaagctgttcatgtacagtgatttgttgtggcgcaacccagaaatcaaatcgttggggatagtattgactactgataacatcaacaacgtttacggttggagattagagcaagaacatgaactgatatcaaaggttgggaaggggatgaccgacgaacaggtacacgcctttgtagacaggtatatgccttcctataagctttattttgacgagtttgttcgcgaggaaagtctaggctctttagctacattgactttaggtattgattcaaggagagaagtattttctacaaagactagatgcattgagtag

SEQ ID NO: 2964 - DNA, 951 bp, Saccharomyces pastorianus
atgtcaaaagacgactttgaattgtataggtacacaccgaacctaggcgctgccatccttttcacgatactctttgcattagcgggggcattgtttacctacttgctggttcactattctgtcaagagcaagagagcaactgcatcagagatgagatctcagcctacgttacggtgttatggaatggtcaagttggccggtgcttatgttccctttgtagttgggtgtggtatagaatttgcggggttcgcccttagatgcaggtccgctaagcacaccatggagttgaatccatatatcattcaaacggttttcttactggtgtcgccaacgctgtacgctgctactttttatatgatttttggtagaatggccaccttattgttcgcagaaaacttgatgatcatgcccgctaaattcaacactacgatttttgtcatcggtgatgtggggagtcttttgttacaagcggctggtggtgccatgatgtctagtgcatcaaccgctagttctggttctcatatcgttactgctggtttgttcattcaaattgcgttttttggtttgttcattataaatgaattcttattcatttacaaaatttctaagaaaccaaccagtatatcagttagatgcaacacctggaaaagcttaaacatcaccctattggtaaacagttttctgattttaatcagatcaatcgtcagagctgtggaatttattgaaggttacgatggcgtaattgcctcgcatgaatggtttctttatgtttttgacgcattacctatgtttttactcgtaatagcttttgctgcagtcttcccatggaacaatatttttaggatacaggaggagtctattcaagcgcaacaatctacaaaatttgatagtgaggcttatcctaatgtagatggagtttccattgaagatgggtacacttccaaagagtaa

SEQ ID NO: 2965 - DNA, 2685 bp, Saccharomyces pastorianus
atggtacctttcaagttgacgaaaaaagtgtccacggatacggattcctcggtgatttcagcccagagtttgcctagagcgatgcccttcatggacaaccaaaacggtacccgaataataaccccttcagcgcctccaaatcaacaaagaaatatatcagaggcgtcaaccgctttaccttcgccaatggagcgccaagatgcagggaaatacgtctggaacaggatcaaactaaagaactctccgttcccccgttatcgtcattccgcctcacctattgttacaaacgataataggatttttgtgactggtggacttcacgatcacttagtgtatggtgacacttggcagttatctgctaatttggatggcactagctttgtttccaagacaattcagattggtcagaacacgccccctcccagagtgggccatgcttctaccatttgcggcaatgcctttgtagtatttggaggtgatacacacaagctcaatatgaataaattgttggatgatgatctctatcttttcaacattaattcttataagtggacgataccgcagcctgtcggcactagacctttgggtaggtatggccataaaatctctattattgctaacaatccgatgcaaaccaaattgtatctttttggtggacagattgatgaaacttatttcaatgatctagccatgttcgatttgtcatcgtttcgtaggccaaattcccattgggtatttttgaaacctattagtactgtaccccctgctgtgacaaaccatacgatggtaacatttgataacaaattatgggtatttggtggggaaactccaaagacgttaagcaatgaaacattttgttacgatccagtacaaaatgactggtctaaaatccaaacgacgggcgaaacgcctccaccaatacaagagcatgctagtgtggtatataaacatttaatgtgcatatttggcggcaaggacatcgataacgcatattctaatgatgtttatttcttaaatttgataacattcaaatggtacaaacttcctcgtatcaaggagggattacctaaagaacgatctggccattctttaacgttaataaaaaatgacaagcttgttatcatgggtggtgataagttcgattatgctagttcaagtgttcacgatctacatacttcatccactgatcaaggcgaaggaacgttattgtataccctcgatttgtcgcatctaggtgacctttgtccggggataatgggcgaatcgctatacaacgaaggtgacatttcaaattttccttatggaaaatccgcgaactcaaactcagttggaaatgaaaaccaagagatgataaatatcctcacacctaaattacccagtcttaaaactttcagcccaagtgatgtcaccggggccaccggaagtaactttaccgatgcaggggtccaaatgagtaaaacgcgacacgataaagaggaagaaaggtcacagccttgcgaaatcgacgaaactacaaaatctgaattttcacttcctgatgataaatttgcctttattaacaaaagggctgcatataataccgaaaatatcaaaaataatgctcctattctgcaaggtttggcaatagatacaaaagaatacaatcctccttcattcaaagaaacgcaaaacgacaaagtaattctcaggagtatatatgatgaattgtcttcggaaatccaatcattgcaccttgaaacgcaacagaaagaacttgaaactgctaggcatatttccgaattagagaaagaagttcaaagattaatgataataaaagaggcttcgaaagactctaatttccagatggcacgattcaagaatttagaaattcaaaagactttcttggaatctagaattcaagatttgctagagttagtagaaaagaaactttctcaagcacaagaaattaatagtgaaattgcaattcggaatacaaaactggaagcatactttgaagagagcgacactgaaaaggagcttatcgacttggagaggaagtgtgacattctgaagagtcaaaatgaaaaactcaaacgaaacgcagaaaatgggaatgccaaacttcccagtcgcatgacaggtttatccagccgtttgaatcaattattggcgatggggccgatcaacgctgcaacaccttcgaacgaaaaagataaaaaaattgaaggggtcgaaccgttgagaaaaatggacaggataatagatgaaatacacgaaacagctaaaataaaaaacgaattggtgaataaaaaacaaaatttaaccggtgaaaagactgctttacaagctgattttctggctaagaacgataagctggaagcgttaaaaaaaatatttgacggaagttcaaaatcaatgttattgacccagaaggctattgacttgtcacgatcagagcttgaaaaatacaagcaatgcaccgatgatttgcagcaacaaatcgacaaattgaaaaacgaacaaactggacaacaggaacgacatagtactgtcgcctatagcaattcagacacaatccacagaatgaaactcaacaatcttaagactgagctatatatctcgaaagaagatagagacactctcaaagaagaagtattaattttgaagaaaagactctacactcttcaaacacaacaatctcagtaa

SEQ ID NO: 2966 - DNA, 1284 bp, Saccharomyces pastorianus
atgctttcaagaaaatcgttatcgctactttctaagtgtgggcagttgagcaagctgagtgcgcaaaccgcacgccaagcaaagaggtacttgtccattcacgagtacaggtcagctgagttattgagagaatacgggattggcactccagaaggttttccagctttcacccccgaagaggcttttgaagcagctaagaaattgaacaccaaggaactggtcatcaaggcacaggcattaactggtggtagaggtaagggacacttcgacactggttacaagagtggtgtccatatgatcgaaggccctcaacaagcagaagaggttgcaaaggaaatgctgaaccataacttgattaccaaacaaacgggaaaagccgggaaacctgtatctgcggtttatatagtaaaaagagtagacaccaagcacgaagcctatttgtctattttgatggatagacaaactagaaaacctatgatcatcgcatccagtgaaggtggtatgaatattgaagaagtggccgagaaaaacccagatgccattaagaagttttccatcgaaacctcagagggattaagtccagaaatggccaagaatgtggccaagagtcttggtttcacttctggtgcgcaagatgaagcggcaaagaccgtatctaatttgtacaagatattcatggaaagagatgccacacaagtggagattaatcctttgagtgagattgagcatgacccaaaccacaaggtcatgtgcacagacgccaaattcgggttcgatgataacgcctcgttcagacaagagaagatatactcttggagagacctatcacaggaagatcctgacgaagtgaaggcaaagaagtacgatttgaatttcgtaaaattgaagggtaacatcggatgtctagtcaacggtgccggtttggctatggcaactatggatgtcatcaagttgaatggaggagatccagccaactttttggattgtggtggtggcgctacgcccgagaccattaagcaaggtttcgaactgatcttgtctaacaagaacgtcgacgcgattttcgtcaatatctttggtggtattgttagatgcgattacgttgccttggggcttgtggaagctgccagggaactggaagtcagagttccaattgttgctcgtttacaaggtaccaaagtagaggaaggttgcgagatcatcaagaagcctggtgtgaaaatttactcatttgatgaactggaccctgccgctaaaaaggttgtcgaattgacacagggctga

SEQ ID NO: 2967 - DNA, 606 bp, Saccharomyces pastorianus
atgagcagggccaaagatattcaagagaggctcaatttgcaagccaaacttcaatcaactttcagtaacaatacagctacggtcttagactggttaaaagagtcagaggaatgcgacagagggaaagttcacactgatccagaacatggtaaactgttagaggactacaaggagttggaggatagcaagaaggccttttttcaactccctgttgttcaaattggatctggtttacattttaagacggaagacgacctatctgccaaagaagatatacatacgattggggagttcattgagagtgacaagaaggttagttcgttggcgaagaaaaagaaaagaaacgatcagggattacaacgaaacgacatgtacaggataactaaagacgatactaaagctatggttgcattaaaaagaaaaatgaggaaaggtgaaaaagaaggattaagaaagaaacaagaggtgccggtaaagagtactcccaacttccacggctctagtgacgaagatgatatagatgtggaaagggtgccgcagaagtctacgaaaaaaacatttggtttactctttgataagaaaaagaaaaatcgtaaacgattttaa

SEQ ID NO: 2968 - DNA, 2103 bp, Saccharomyces pastorianus
atgagtactacgaactggtttgacgcttgggacgcagaggcgctttacaaagatgacgttgctggctgcgatgattgtgcaaagacgtccccgttaccagagtctggtgttatttgcgggcctgtgttgagactcatcaacatggatttcaaggaaaagcattatgaggggtccattatgatggtcgtcagaggtgaagaaaaaattccgaaaattgcttaccaactgggaccctctttgccctctgaaggtgaagaaactgaaattagcgaagcctacttcgacaatcagcttttccataaagatcagctaaaaggagatgatatctggttttacagatacgaaatccaattaccaatggctaaatacgaacaaatggtgaaatactccattgatggtacgacagagccgcactataggttcttcatcccgtctttcactcagaactcaaacgttatttcatactcgtgtaacgggttctccttaagcgtagacacgtcgaaattcaagggctctctgtggtatgatgttcttaggaagcatcagtacgtccattaccatgctattcttggtggtggtgaccagatttattcggataatattaaattgcacgctcctaatttcaaagcgtggttggagacaaaagaccctatcaagaagtacaatactaagacgactgaggagaccagggaccagattagacagttttatttggaacactacttaaattggtacggctatggtcattggtatggttccacacctacgtccaaaaccacccaaaagtgttttgtgaaatcgttggcgtgtattccagccatcaatgtttgggatgaccacgatatcatcgatggatatggttcctacaacgatgcatttatgagaactgagaactttgtgaccgttggaagaatggcttatagatattatatgctctttcaacatcacgtcagcgcctctaaggaagatggtgacgattttgcttatttacaaagcaaacagtggattttgggtaatgaagaggggagtccatacattggcgaaaggtctcactcgatattctcttggttgggccccaaaatgggcatgttgggtttggattgtagaactgagagaaaactacgccaagtattctcagaaagaagctactctttgatctgggaacgtgtagaaagcgaattgaaagctttgaaagggggacacttgttggtgatgttaggtatccccattgcgtatccaagattagtttggttagagtggctattcacctcaaagttattggctccagtcaaatatctctccaagaaaggtataattcccagtggcttggttaatgaattcaacggagacgttgaattactggacgatttaaatgaccattggtgtgcaagacaccacaagaaagaaaggaattatttggtaatgaaactgcaagacattggcgccaaatacggtgtcagaatcactatcttatcaggtgatgttcatttagcatctattgggaggtttagagcaaagacacatagacatcatctcattatgtccgaaaagaaggaaaaggaaaacgccgaaattatcgaagaaccaaccaaagatgaaaggttaatgtttaacatcattgccagtgctatcgtaaatacaccaccgcctgatgcaatggccaccttactacaaaaaagatgccatttgcaccattttgatacggaaactgatgaagatgcggtaccaatctttgccaaggaagtggatggggcacgtgaccgtaacgattcatgttttatgaataagagaaattggtcagatattatacccgtggaaaacgtattgaacaaccctcgattgagcaaagagttgaatgtaaaagttggagatatcgtcattccgggcgtcatcacagaaaaacaaaagttggcaccctcaaagagtgaccagttcaactcttatccggtgacttccgccggtctgtttgccactgttcgtgtggaaaaagacgtgagtcaagcggattcacaaactgtgagttatggtcttcctattccggaattagagattactcgcgaaaagttgtctcatgcaggtattaaacatctgaatgtgatgtaa

SEQ ID NO: 2969 - DNA, 5901 bp, Saccharomyces pastorianus
atgacaactgtatactctgctgattcaactaaatcattcatggttgctatgcaatctatggttgatgcatcacaaacctttaatttagataaatcgaaaattcaattgccagattttgataatgagttgaagagaagtagagaagatgaacgaaataagaagactgaactaaccgtactttctcaagatagaaacgactgggatgatattttcgatgagtttcaagacatttcatttcaacaattgcagtctaaaattgattcatacaaaaaagataattcagtggcaatctataaagaaattgccaagttaattaaaaaggccgcaacatcgataagcagcaatgtcctactagaatctgttcttcaaatggtttataaccacgaaaagcagaagttagagaaagaactgctggatttcttaggaacagaaaacatagagcttgtttctttgctgctgcagcatagaaggatgatcattgcgatgccaatagaaaccataatcgtattgattgaaaatgctgcgaaatcaacatcagaatttttgactcaacaagatatccggaaccaagtgttacaaaatgcggagaatgccaagaatcaaaaactaaatcccgctgatagaataatcaagtatccacatgtcttcagaaaatatgaagtggggtcaacttctgctatggcctttgctggacaaaaattcactcttccagtaggcactacaaggttatcttatcagactcatgaagaaataatgattcctgccgcagaccaggcgtctaataaaaactacctgtatacaaagctattgaaaatagaggacttggatcatttttgtaagactgtattttcttatgagactctaaaccaaatacaatcgctagtataccctgtagcttatacaacgaatgaaaatatgttgatttgtgcgcctacaggtgcaggtaaaacagacgttgcactacttacgatattaaacacggtaaaacagttctccgtgatcaacgaggaaaacgaaattgatatacaatacgatagtttcaaggttgtctacgtagcccctttgaaagcactggctgctgaaattgtcgacaaattcagtaaaaaattagcgcctttcgatattcaagtaagggaattaactggtgatatgcaattaacaaaatcagaaattttggccactcaggtaattgttacgacccctgaaaaatgggatgtcgttactcgtaaggcgaatggtgacaacgatttagtctcaaaagtcaagctgttaatcatcgatgaagtacacttattgcatgaagatagaggttcagttatcgaaaccctagtggcgcgtaccttgagacaagttgaaagttctcaatctatgattcgtattgtcggtttatctgctacattaccgaactttatggatgtggcggatttcttgggtgtgaatagacaggttggtatgttttactttgaccagtctttccgtccaaagcctctggaacaacaacttttaggttgtaggggtaaagctggtagcaggcagagtaaagaaaatattgataaagttgcgtatgataaactaagcgaaatgattcaaagagggtaccaagtaatggtattcgtgcatgcaagaaaagaaactgttaaaagtgcaaggagctttattaaattagcacaagccgatcatgagattgatttttttgcacccgaccctgtaacgaaagacaactattccaggcagctggcaaagaacagagataaggatatgaaggaaatcttccaatttggctttggtgttcaccatgctggtatggcacgttcggataggaatttaaccgaaaaaatgttcaaagccggtgctattaaagtgctgtgttgtactgcaacattagcttggggtgttaatttacctgctgactgtgtcattattaaaggtacacaggtgtatgatgctaagaaaggtggtttcattgatctaggtatttctgatgttattcaaattttcggtagaggtggtagacctggtttcggttccgctcatggtacaggtattctgtgcacgtctggcgatcgtttggaccattacgtttctttaattacccaacaacatccaattgaatccaggtttggttctaaactggttgacaatctgaatgcggaaatttcattaggaagtgtaactaatgtagatgaagccattgaatggcttggttatacatacatgttcgtccgtatgagaaaaaacccatttacttatggcattgattgggaagaagttgcaaatgacccacaactatatgaaaggagacgaaaaatgattattgtagctgcaagacgactgcacgctcttcaaatgattgtttttgacgagatatcaatgcattttatttcgaaagatttgggcagggtatcttcagatttctatctcttgaacgaatctgttgaaatctttaatcagatgtgtgatccaagagctactgaagctgatgtgttgtctatgatcagtatgagtagtgaatttgacggtataaaatttagagaggaagaatccaaggaattgacgagactttcggaagaatcagttgagtgccaaattgggggtcagttagatacgcctcaaggtaaaacgaatgtgttactgcaggcatatatttctcaaagtagaatttttgactcagcgctatcgtcggattcgaattacgttgctcaaaactctgtaaggatttgtagagctttattcttaataggtgttaacagaagatggggtaaattctcaaatgttttgctgaatatttgcaagtctatcgagaagaggctttgggcttttgaccatcctctatgtcaattcgatttgcccgaaaacattattagacgtatcagagatagcaatccctccatggaacatctcctagaactagagtcagaagagcttggagagttggtgcataatagcaaggccggatctaaactttatagaatattaagtcgattcccaaaaattaatattgaagcagagattttccctattactacaaacgtaatgaggatacatgttactttggatccagacttcatatgggattcaagagttcatggtgatgcgcagttcttttgggttttcgtagaagaatctgataagtcacaaattcttcatttcgagaaatttatcttgaatagaaggcaattaaacaaccagcatgaaatggattttctgattccattatctgatcctttaccacctcaggttgttgttaagattgtgtcagatacttggatcggctgtgagtcgactcatgctatttccttccagcatttaattagacccttcaatgaaactctccaaaccaagttgttgaaattacgtcccttgcctacttcggcgctccaaaatccattggttgagtcaatctatccttttaagtacttcaatcccatgcaaacaatgacattctatacactctacaataccaacgaaaacgcgttcattggttcgcctacaggttccggtaaaacgattgtggctgagttagctatatggcatgccttcaaaacatttcctgggaaaaaaattgtttatatagcgccaatgaaagctttggttcgtgagagagttgatgattggagaaaaaaaatcacaccagtgacaggagacaaagttgttgaattaaccggtgattctctacctgacccaaaagatgttcatgatgcaacaattgtgattacaacaccagaaaaatttgacggtatttctcgtaattggcaaacccgtaaattcgttcaagatgtatccttaattattatggatgaaatccatttgttggcaagtgatcgtggtcccattttagaaatgattgttagccgtatgaactatatttcctctcagactaagcaacccgttagactgttgggtatgtctacagccgtttcgaatgcatatgatatggcaggttggttgggggttaaagaccacggattgtacaatttcccatccagtgtccgtccagttccgttgaaaatgtacattgacggttttcctgataacttggcgttttgtcctttaatgaaaacaatgaataaaccagctttcatggctatcaaacaacactctccggataagcctgcattgatcttcgttgcatctcgtagacaaactagactgactgctttagatttaattcatttgtgtgggatggaagataatccacgtaggttcctaaatatcgatgacgatgaagagctacaatattatttgtctcaggttaccgacgatactctcaagctatcattgcaatttggtattggattacatcatgctgggttggtacagaaagatcgttctatttctcatcaattatttcagagaaataagattcaaattctaatcgccacttcaactttggcctggggtgttaatttacctgctcatctggtcatcatcaaaggtacccaattttttgacgcaaagatagagggctacagagatatggatttgacggatattttacaaatgatgggaagagctggtagaccagcctatgatactacaggtactgctataatttatacaaaggaatccaagaaaatgttttataaacacttcttgaacgttggtttccctgtagaatcttctttacacaaggtgttggatgatcatttaggtgcagaaataacatccggtagtataaccaacaagcaagaagctcttgattttttgagttggacatttttattccgaagagcacatcataatccaacgtactacggcattgaagaggatacaagtaccgcaggtgttagcgagcatctgagcttactgatagacaccacattagaaaatttagaaaagtcgcaatgtgttttattacacggagatgacattgttgccacgccgttcttaagtatatcgtcatactactatatttcacacttaacaatacgccagctattgaaccaagtgcatgagcatgcgacttttcaagaagtattaaggtggttgtcattggccgttgaatataatgagctacctgtgagaggtggtgaaattatcatgaatgtggaaatgtcacagcaatctagatattctgtcgagagtactttcaccggtgaattcgaattgccaatgtgggatcctcatgtcaaaacatttttactattacaagctcacttgagtcgtgtagacttacccattgcagattatatccaagatactgtatcagttttagatcaatctttgcgtatcttacaagcttatattgatgttgctagtgaacttggttatttccgtactgtattgaccatgataaagatgatgcaatgtattaaacaagggtattggtatgaagatgatcctgtaagtgtattacctggtctacaactgaaaagaattaaagattgcaagttcagtgagcagggattcatggaaacactaacccaaaataagaagagtttgctgactttggaggaaataggacgacttggttataagagactgatgggtgtttttaatcagttaacctcagggataatagatgacgaagatgtaaagaaaaaatttgtcaacgtttgccaaagattgccagtattagacagtataaaatttaacgagcaagagaataatgaagtcctaagtttttattgtaagcatttttctaacaaacataataacggttttgaagtatactgtgataaattccctaaaatacagaaggaattatggtttttgattggctacaaaggtgatgaattgttaatgattaaaagatgtcaaccaaagcaaatgaataaggaggttatcatacattgtgatttggtcattcctgaagaaattcgtggagaagaattggactttgttttgataaatgacgcgctaggattacgttatgatttaagccataaattaatgccctaa

SEQ ID NO: 2970 - DNA, 1302 bp, Saccharomyces pastorianus
atgttttctttacctaccctaacctcagacatcactgttgaagtcaacagttccgctaccaaaaccccattcgtccgtcgtccggtagaaccggttggtaagttctttttgcaacatgctcaaagaactttgagaaaccacacctggtctgaatttgaaagaattgaagctgaaaagaacgtcaaaaccgttgatgaatccaatgtcgacccagacgagttgttattcgacactgaattggccgatgaagatttactgactcatgatgctagagactggaaaaccgccgatttgtatgctgctatgggtttgtctaagttgcgtttcagagccacccaaaaccaaatcatcaaggctcatagaaagcaagttgtcaaataccatccagacaaacaatctgccgctggtggtagtttggaccaagatggtttcttcaaaattattcaaaaggcttttgaaaccttaaccgattccaacaaaaaagctcaatacgactcatgtgattttgttgccgatgtcgctcctccaaagaagggtactaattacgacttctacgaagcttggggacctgttttcgatgctgaagcacgtttctccaagaagactcctattccaactttaggtgacaaggactcttccaagaaggatgttgaacaattttatgccttctggcatagattcgattcctggagaacctttgaattcttggacgaagatgttccagatgattcttccaacagagaccacaaacgttacattgaaagaaagaacaaagctgccagagacaagaagaagaccgctgacaatgctagattagtcaagcttgtcgaaagggctgtcagtgaagatcctcgtatcaagctgttcaaagaagaagaaaagaaggaaaaggaaagaaagaaatgggaaagagatgccggtgccagagccgaagccgaagctaaggctaaggccgaagccgaagccaagatcaaggctgaatctgaagccaaagctagcgcttctgctaaggttgacaagaagaaagccaaggaggctgccaaggccgccaagaagaagaataagagagctgtccgtaactccgccaaggaagccgactactttggtgatgctgacaaggccactgccattgacgaacaagttggcttaattgttgacagtttgaacgacgaagagttgatctctgttgccgacaagatcaaggccaatggtgccggtgcaaaggaagtcttgcaagaatccgccaaggccatcattgaatccggcaaactgccttccagtttgttgtcttactttgcctaa

SEQ ID NO: 2971 - DNA, 1194 bp, Saccharomyces pastorianus
atggctttgcaacggttgaggaaaaaacatagaacaagacaagaattgctcaaagctcttactccccgaacacggtccatccatttgagcccaaatgaacactcaaatggtagtgctggttcaaatgcggaggttttgtctcatattaaacagatattgtcgttggcggctaattccttagagcaacaccaacagcctatttcaataatttttgataacaaaacaaaaggcaactccggtggcaacaaagtttccacgacactggacttccccttgactggcccgcacctgtttactcaccagttcaaattgaaaagatgctccatccttctaaacctattaaagatcgttatggaaaaattgcctctaggccaaaacactacgataagggacattttctactccaatgtagagctgttccagagacaagcaaatgtagtacagtggctggacgtcataaggtttaactttaaactttccccacgaaaatcgctaaatatcatacccgctcagaagggtctgatctattcgccgttcccaatatatgtttacgatagcatcacaaaatgtgaggatgagttccaagtcgagaaacagaccgtttctcccggcaagccctgcttgattccattttttcaagatgaagcagtcattagactagagacaacgagccattgcaatatcgtaattgtggaaaaggaggctgtgttcaccaaactggtaagcaattataacaagttgaacgcaaacactgtattgattaccggtaaggggttccctgatttcttgacaaggctgtttctgaaaaaacttgaacaggattgctccaatttgatctcgaactgttctatattcaccgatgctgatccttatgggattagcattgctctaaattacatcaactccaatgcaaacgcctcatataattgtccgatggttaattacaaaggtgtttacattacacagatcttggcacaaaataacaggacggggagcaaattcgtccaactattaagcctaaatcagcgcgattattcgttagccaagaatttggtagtttcactgactaacaacggagagggcattatatcatcgccatttaaaaacttcatcatagagtgccaacgggaaatttttttccaaaagaaagctgaaatgaacgaaattgatgtcagtatgtttcgattgcagtag

SEQ ID NO: 2972 - DNA, 363 bp, Saccharomyces pastorianus
atgcataataagatcattagggttgcatccagtgcgctgacaggaggcaagctactcgagaaactaaaaaccttgacccactgggaagcacagtgggatcctcacaggactaagtgtctagggataacaagagaagtgactttcaaggactacgagaccacctgggcattcctgacccgcgtgtccatgagatctcatctttggggccatcatcccctgatccacaccagctacacctgggtaaagcttgagcttcgtacgcatgacgcagatccgctggacccagacggggctcaactcagcgatatagacgcccgaatggccaggagaatagactcctatatcgacgaaatgatccgctga

SEQ ID NO: 2973 - DNA, 1215 bp, Saccharomyces pastorianus
atgaacatcggtggaggaagattcttacttggaagggtgtcgaataatccaacttctgggatagttggccttgcaaacgttggtaaatccacatttttccaagcaataacaaactcgaaattgggtaatccagctaattatccattcgccactattgacccagaatgtgcaaaagttaacatacctagcacgccattatctgatttattgagaatatatcagagtgcaaaaatcgtgcccggaactttgacgatatatgacattgccggactcactagaggagcctcccaaggccatggtttgggaaacaagtttttaaatgatattagacatgtagatgggatatttcaagtggtaagagggtttttaaaggaagatattacacatatagaaggcaatgtagacccggtcagagatttatcagttgtacaagatgagctgatcttgaaagatttggaatttttggaaaatatcagggaaaggctcagtaagaagatgcgaatggtttcaaagaattctaaagaataccaagaaatgaaagtggagacggaattattggatgcattagaagagcatttatttaatggtaagaaaatccgacattttaaggaccattggaacctggacgaggtcaaaattctaaataaacataattttctaacgtccaaaccaacgttgattttgttaaacgtatcacctcaagattatcttaagaaagaaaataaatttgtcaaagatattttgaaatgggttaacgaattttcgcctggtgacaaactggttcttttcagtgcagaatttgaatcgcaattaattgaatgtaaagacacgctatcagaatactttgacaaaatcaggcaagatacgagcatctctgatgaacaactagtgtctgcaataccacgaataattctagaaatgagaaatttgttgaatttgattagttttttcacatgtggcccacaagaagttcatcaatggaacattagagaggggaccacggctcaggaggcagcaggcgttatccacagtgatttgcgtgatacgtttatcaatgctgatgtgataaaatatgatgatttgaagacgatggagccatcattaaacgaatctttactgaaatcgaaaggcttggtcaaacgtgcggggaagcaatatatcatgcaggataacgatgttgccttcttcaaagccgccggtggtaaggcgagatag

SEQ ID NO: 2974 - DNA, 1185 bp, Saccharomyces pastorianus
atgcagagacacatttgtgcgaggaacctaagacgtctctcctccttgaggagcccttgcctatctaggagattccagtcttcatcatccgttccggtcaacaattccaacaacgatgaggttctgcttttgcagcagaaacaaatgtacgacgaaatccgtgcagagttaaagtccctttcggaaattcctgaagatgaaatgctacctgaactgaaaaagtcattaggggaaggcgaactatccgccaaggaacaactattggaaaatgagctgaacgagttcttcaagagttatgctcagtcgaacaagctgtttgaaaacgccacatctgctggacaatcttcggcagcagttgcagcagtcaataccacaagcaagccttaccctaatcttataccttccaccaacgacaaaccgtatacttctcaggaacttttcttgcgtcaattcaggcactctatgcataccgctaaattaggctccaccatatcgaaggtgtacttcccccacaaagacattttctacccacctcttcctgaagccattaccgtcgagaacttgttatctgctggtgtccacttgggccagtccacctcgctttggaggtcttccacgcaatcttacgtatacggcgaatataagggcgtccatataatagatctgaaccaaacactgtcttgtttgaaaagagccgccaaggttgtggagggcgtttcggaatctggcgggatcatcttgttcctgggaacaaggaagggacagaaaagaggcttggaggaagccgccaagaaaacccatggctattatgtctccacaagatggatcccgggcactttgactaactctacagaaatttcgggtatttgggaaaagcaggaaatcgactctcatgacacacccacaaaaagagaactatctccaaacgaaacatcgaaacaggtcaagcccgacttgctagtcgtgctcaaccctacagaaaacagaaacgctctgctggaggccatcaaatcaagagttcccaccgttgcaatcatcgatacggactccgaaccctccctggtcacttatcctatcccaggtaatgatgactctttgaggtccgtcaaccttttactaggtgttctggctagagctggccagagaggcttacaaaaccggttggcacaaaataacaagaattag

SEQ ID NO: 2975 - DNA, 1311 bp, Saccharomyces pastorianus
atggctctcggtaaactaaagaatatgtctcccttaataaacagctcccatagctctattaatggtacctccaatggtgcgaatgcgaaaccaaatggggcagatacagacgatattgatgagaatgatgaatccggtcagagcattctatttaatattatttcgcaactaaagcccgggtgtgatttatcaagaattactctaccgacctttatcctggaaaagaaatcaatgttggagaggatcaccaatcaattacagtttccagatgttcttttggaagcccattccaacggaaatgagctgcaaagatttgtcaaggtggtcgcatggtatttggctggatggcacattggtcccagagctgtaaagaagccattgaatccgattcttggagaacacttcacggcttattgggatctggctaataagcaacaggcattttatattgcagaacaaacaagtcaccatcctcctgaatcagcatacttttacatgatcccagaatcgaacattcgcgttgatggggttgtgataccaaaatcaagatttttaggaaactcaagtgccgcaatgatggaaggtctaactgtgttacggttccttgatatcatggattctaacggtaaaccagagaagtataccctgtcccaaccaaatgtctatgcaaggggtattttatttggtaaaatgaggattgaacttggggatcatatggttattacaggtcctaattaccaagttgacattgaatttaaaacaaagggttttatttccggtacttatgacgcgatcgaaggtacaattaaggattacaatggcaaggaatattatcaaataagtggcaaatggaatgatgttatctacatcaaagacctaagagaaaaaagttcaaaaaagactgtgctttttgacactcaccaacattctcctcagggtccaaaagtacgtccgttggaggaacagggtgaatatgaatctagacgactatggaagaaagttactgatgcgctagccgttcgtaatcatgaggtagccactgaggaaaagtttcagattgaaaatcaccaaagagggctggctaagaaaagaactgaggacggtgtagagttccatccgaaactctttagaagagcagaaccaggtgaagatttggattactacatttacaaacacattcctgagggaatggataagcacgaagaacaaattagaagtattcttgaaattgcccccattttaccaggacaagcattcacggaaaaattctctattccagcttacaaaaagcatgaaattcaaaatgaatga

SEQ ID NO: 2976 - DNA, 1392 bp, Saccharomyces pastorianus
atgtctgacggtactcaaaaactatggggtgggagattcactggcgaaaccgatcctttgatgcacctgtacaatgcatctcttccatatgattacaagatgtacaaggccgacctggaaggtaccaaggtatacactgcgggtttgcagaaacttggccttttaacggagacagagctggccaagatccatgaagggttggctgaaatcaagaaagaatgggaagctgacaaattcgtccgtcatgcaaacgatgaagacatccatactgctaacgaaagacgccttggtgaactcattggccgtgacattgctggtaaagttcataccggtaggtcgcgtaacgaccaagtcgttactgatttgagaatctactgccgtgacgtggtcaacgacagtctcttcccagccatgaagggcttggtcgatgttctggtcaagagagcagagggagaaatggatatcctgatgccaggctacacacatttacaaagagctcaacctattagatggtctcactggttgagttcttatgctacctactttacagaagattacaaaagactggttcaaatattacatagattaaaccaatcgccattgggtgcaggcgctcttgctggccatccttacggtatcgacagagaatttttggctgaaggattaggtttcaatagtgtcattggtaattcattggttgcggtttctgacagagatttcatcgtggaattgatgttttggggaaccctgttcatgaaccatatttcccgttttgctgaagatttgattatatactgcacggctgaattcggtttcatacaattaagcgatgcttactcaacaggttcctccttgatgccccaaaagaaaaacgccgactccttagaattattgagaggtaagtccgggagagtctttggtgacctaacagggttcttaatgagtttgaagggtatcccatctacttacgataaagatatgcaagaagacaaggaacctctgtttgattgtttgaccactgtagaacattccatgttgattgctacaggtgttatttctacattgaccgtcaacaaggataagatggaagccgccctaacaatggatatgttggctactgacttggctgattacttggtcagaaaaggtgttccattcagagagacccatcacatctctggtgaatgtgttgctgccgctgaaagattgggtctgagtggtattgacaaattgactttagaacaatacaaaaagatcgatccaagatttgctgaagatcttttcgaaactttcaacttcgaacaaagtgttgaaaggagagatgctactggtggcacagctaaattggctattcttaaacagttgaacaacttgaagtcccaattacaataa

SEQ ID NO: 2977 - DNA, 642 bp, Saccharomyces pastorianus
atgagcaaggaatctaaggatgatgacatgtcattggggaagttttccttctcccacttcctatactacttggtgctaataatagtaatagtgtacgctttgtacaagcttttcactggacacggatccgacatcaatttcgggaagttcttattgaggacatccccttatatgtgggctaatcttggtattgccctttgtgtaggcctaagtgtcgttggtgcagcatgggggatcttcatcactggttcctccatgattggggccggtgttcgtgctccaagaatcaccacgaagaatttgatttccattattttctgtgaagtggttgcaatttatgggctgattattgctattgtcttttcttcgaaattgaccgtggctaccgcggaaaccatgtactcgaaatcgaacttgtacactggttactcccttttctgggcaggtatcactgtcggtgcttctaatttaatttgtggtatcgctgttggtatcactggtgccactgctgccatttctgatgctgctgattctgcattgtttgtcaagatcttagtcattgaaattttcgggtccattctaggtttattaggtttgattgttggtttattgatggctggtaaagcttccgaatttcattaa

SEQ ID NO: 2978 - DNA, 1119 bp, Saccharomyces pastorianus
atggtgttgtgtggcgtgtgtggtattaatgagttcaagtacaagtgtcctcggtgtttggcgcaaacctgttccctggagtgttccaagcagcataaggcgagggacgattgttctgggcaaacacacgatccaaaggattacatatcaagtgagactttaaaacacgcagacgatgagaaacgcgaacggaacgtttacgtgcagagagactataactatctgacgcagttgaagcggatggtgcagatacaaaagatggacgctagggtgaagaacaagagagtgctagggcccgcgagccatagtgccggtttgaaaaggaggagatacggcacggatgaggatgaccacggtgacatggagtgccagaggataatcaggagaggagtgaactgtctgatgttgcccaaagggatgcagcggtcgtcgcaaaacagaagcaagtgggacaagacaatggacctgttcgtatggagcatagagtggactttgtgtcccatgcaagcgcaggaggaagacaagcgggttttcaagcatatcagccatcggattaaagagacggattttttggtccagggcatgggcaagaacgttttccaaaaatgctgtgaattctaccactttgctggaataagcgaccacgaagagggcgaagatgcctcagagaccaaggaggaacgaacagagatcctgcaaaagagtgggctcaaattctacacgaaatggttcccttacaacactacgcatataacagattccaagaagctggtagaattgccgatccacgagaaatgcattggagagctattcagaaacatgacggtgatcgagttccccacgatattcattgccatggccgaagacgacttgccagagggctacgaggtagtgcacgaggaaacgcacagggcggaaaacgacaagcatacgaacccattaaacaagttcatcgacgatgtgaaggaaccagaggacactgcaaaggacgcccagccggcagaggaacccgtgcaaaaggaaggtctagacgacgccaagggcgagcgtgacagtgatagcgacagcgacagcgacgattacaatcctggcttatctatggatttcctcactgcataa

SEQ ID NO: 2979 - DNA, 741 bp, Saccharomyces pastorianus
atgccacaattcttagtagatctatgcctttttgatttagatgggactattgttagtacaacaatcgcagcagaaaagtcctggaccaagttatgtcatcagtatggggttgatcctgctgatttattcaagcattcccatggtgcaaggacgcaagatatcatgaagcaattttttcccaaactagataatacaaacaataaaggtgttattgccctagagatggatatggctggtagttatttggacaccgtgagtcttattcctggtgccgaaaatctgctgctgtctttagatgtagatacagccaataaaacgaaaacgccttcgagaaaatgggctatcgttacttctggttctccgaatctggcatattcatggtttaagacaatattgaaaaaagttgggaaacccgaggttttcattaccgggtttgacgtgaagaaaggtaagcctgaccctgaaggttatgccactgcccgcgatctgttgtgccaagatttgcaattggttggtaaaaaggacttgaaatacgtcgtctttgaagacgcacctgtaggcattaaagccggcaaggcgatgggcgccatcacggtgggaataacatcatcgtatgacaagagtgttttgttcgattcaggtgcggattacgtagtttccgatttgactcaggtttccgtggtcaagaacgatgcagacggtattgtcattcaagtaaacaacccgttgaccagggattga

SEQ ID NO: 2980 - DNA, 183 bp, Saccharomyces pastorianus
atgttcagcgaactaatcaatttccaaaacgaaggccaccaatgtcaatgcaaatgtggtagttgcaaaaccaatgaacagtgtcaaaaatcgtgcaactgtccaactggctgtgacagtgatgacaaatgcccctgtggcaacaagtctgaaaaaaccaagaagccatgctgctcggcttaa

SEQ ID NO: 2981 - DNA, 951 bp, Saccharomyces pastorianus
atgattgaagagaaaaatcaccaacaaatggagctgcctcaaatgagatccatctggatagacgaggaccaagaaatggagaaactgtatgggttccaagtgagacaacggttcatgaatgggcccagtacggattccgaagaggacaccgatgaagacttggggattgttctcgtcgatagtgaaaagctggccctgccaaacaagaacaacatcaaattgccccccctgcccaattacatgacgatcaactctaacataaattctaatcacaagtttttgaccaacaaaaagagaaatttcctgggaatgttcaagagaaaggacttgctgtcaataaaaccgcatgggcccaccaaaactacgaaacaatccagtatatctgccccatttggctttcatcatatctcgcacgctaatggtaaaaaggaggacaacaactatgaatcgcaggacgaaagagaggaacaggacgatggcgtagagcctttgttcaatttcacgtcgttggcaccacaacctcgaccagaatcaaacgtctcttctagatattccaacgttgtgatgaacgattcgagcaggatagtctcttcttccacaatagctactacaatggattcgcaccacgatagtaacaaaaccagcagtacccctaataagactaagcaaatggactggcctacggaaatagagatgacattggaagacctgaaaaactattcgttcccctcggttcttggggacaccgccggtgacgacactaataagccttcaccctgtgcttcgtcactttatagcaaattcaaaccaagagactcgaatgcgatacatacccctgagttgaaaaactatctcaacatcgacgaatcgctgaattcacctggtaataggatatctgtggatgatgtgttaaaattttattaccagtgtagtgaaacaagtacaccttaa

SEQ ID NO: 2982 - DNA, 693 bp, Saccharomyces pastorianus
atgtatgaaaatcatagattcactccggattctaaagagtttggtgttgttgttaaaggtaagaatctctccactagcagtaacccctaccagacccctcccactgagacaaacagcactcttcctcctcctcaactcagttccattaagaggaagacaaatttagcaattattatatcaaattttgcatccgaaattagtcggcctctctcaaacaacaaaatcgacaactcccctcaaaacattctaaaattcttaaatgaagtctttaaaagatcaaagtgtagcaaggaaaacgccgtcctggccaccttttatttccagaagatctaccaatccaacataggagacgagccctcgctgcctgaattctcgcgctgctccaagaggatattcctctcttgtcttattctgtcccacaagtttctgaacgacaacacctactcgatgaagaactggcagattataagcgggctgcacgccaaggatctctccctcatggaaagatggtgccttgggaaactggattaccagctagccgttccatacagcgatctcttgctgtgggaaacaaacactttgatgaagaaatcacaccatatcgcaacccccatcatcactttgccaaagagagccagagattatgatcaagattgtaatgctcactctagaaaactactaaaatctcactaa

SEQ ID NO: 2983 - DNA, 1203 bp, Saccharomyces pastorianus
atggctgacagtttaagaagaaaaattgccttgtcccaactcgaaagagccaaatatgtgctagatgccacctttcaagaggcagatgaagatgatgaagatagttgtgatgtattaggagcccttccattattaaaagaccggctggatacgaataggagccctggaagtaataacgataaaatagccaatagtattttgagcgaggataggggcaatttgcccacctggaaggatttctttgataataaggagctggtaaatcttcacaataggagcctcgaggtaaatacttattatacattgccttcttcatcgctatcgaatacctcttcaattcctatctttatttttcatcacggggcagggtcctcaggtttatcatttgcaaacttagctaaacagttgactactaaacttgacggcaaatgcggatgctttgcatttgacgctagagggcattcacaaactaggcctttagatgccgataagcctatgagctttgatagagattcttttattgatgattttgttagcttattagattattggtatgaatctaaaattagtcaagagccgcttcaaaaggtatccattattttaatcggccattctcttggtggaagtatatgtactttcgcataccctaaattgtcagcagaattgcaaaaaaaagttcttggtattactatgttagatattgtagaagaggcagctattttggccttaagtaaagttcaacattttttgcagaatacgcctaatgtgttcgaatcaattaacgacgctgtcgagtggcatattcaacgtgcactgtcgaaatttaagccgagtgcggaaatcgctatcccagctttatttactccagttaaatcagggaaagtcgtgcgaatcacgaatttagaaacctttagtcccttttggaacacctggtttacagatttatcacactcttttgtggatctaccagtaagcaaactgttgatattggcaggaaatgaaaacctagataaagaattgattgtgggacaaatgcaaggtaagtaccaactggtagtttttcaagattctggtcattttattcaagaagattcccccatgaagacggcagtcactttgattgatttttggaaaagaaacgattctaagaacaccgttattaaaaccaactggggacaacatcaatcagggaagaatatatag

SEQ ID NO: 2984 - DNA, 1758 bp, Saccharomyces pastorianus
atggaggaagtttttcgcttttatttgcattccaaaactattctgtttcataaaggcctttcattgaaacagtccactgtagatgaccccaaaagtggatacggtcttttcgtcagcccttcgaagttcagtaacgaagaacttgacaatgagactgttcaattgctaagaattcctaaacgctgcacatttaatatcaacacactactgactattctaggagatgagaacgaattttcttcactagaacaattccaaagaactggtgacaaaatcaagactactcttcgtgaaataatgacgtatcccaagtttagtaggtttctaacagaaacaaacctgctcattctttactttatgattttcgagactattcatgacagttacgagattcccggtagtatcgagtattatttgaagaatgttttgatgagcattgaagtagaatctgctgtcgattctatcgaaaacctagccaaggattatggccattacccacaaatttttgggctccaagaaatatcaggtttattcaaagatctgttccaagaatatttagacgcaagcgttattaagcacctttattcagcgataatttcacgttgcctcgaaatacctgaaaaatcggataccggagattacgaattcagtgttcactctaccttagttcccattctggattttgccaatcacgaaaactcacaaaagaatgcttattttgatgtcgacccttctagtaacgatgtgttacttctactcaatacggatacgattcggggaaagagttcgaagcctagagaagtgttcattagctacatgcctacagaagatttattgccaatgctaaacacatatggattcatcccagatttcaaagaatctccacagttttggaccatatcgtttgatagagggtttttgagagactacattgggttagatttgaatgcagatttgaggttattttataaatggctccgtataaatccagtcatctcattagtaaaatacgaacatgatgaccaaatccgatggtttattaacgatactacaaaagagttgagttcgcttttgctcccattcatcccacctttggataaagcaaaaaatgcacgttgggtgtatgattctgcctgtcatttgacgttcactaagatgcattgcttagttaatcctgagacgaatgaacatgcaacgttggttgcagaaaactaccattctctcatcgaagaagtagaactgaatggagatgattttattgatttaccgccgctagcatggtcgttgcactataaagatgcagaaagcggttgcctaagacaaagacatacggattgtgaagaggcaactagtatccttcaacatgaacaagaacaagacacaaccaaaaccaagctccggtttgttagcttcttccgggactttttaaagtataggaaagcgagaattgccatgccttccagtaattcaagtattgctcgcttattatttgagcaggagaaagagataattaatgacctagcagcagctattgataacaaatccacaatattttttagcgatctaaagacggcactgagcgcagaacctaataagttcccccctctgagatttcacaatgagcacacggagagcaacaagaataaagatgaactagtgccctatttcaaggacccttcttcttataatcccgatagattcaccgacttctttcaagacgaaatgaaccagtacgctgcattctttcgagacggttag

SEQ ID NO: 2985 - DNA, 1425 bp, Saccharomyces pastorianus
atgagcaacgatctcgtgtttgactacacttttagctggcctgctggccccaaagacgttattttaacagggacgtttgatgagtggagaggaactttgcccctggtgaaaactgcccggggcgatttcgaaattactatgccagtcagattggctagtaaaaacgataagttccaatttaagtttattgtggacggagtttggtgtgttagtgattcgtttggaaaggagcatgtcagtgagggaattgaaaacaatttcattcaaattactgactcggtcgaaacgcaagaagttgttggcgctagtaggattccagaggctggcggtctgctatgtggtaagcctgctcgtgttgcggggcccccttccactagtaatagaaagaagggtaaaagaaacaacaaaaagagaagatctaagttaaagaagaaaaccaacaagaataacaagacatctaatgagagtcaggaaggtgatgaagaagaaaaggaagacgaagacggtttagctggaaccactacagaagatgtcacaggtacctcgagggaagaaacaccggtggcggaaccactagatgccgccagtgaaaatccaggtgactttcatatccttccaattgaccaaaatgcaaacactgcttcattagagaattttataggtggcccaggtcctgttcttgtctccaatccaaatgaaatcaaagagtttagcgaaattagaaacgtcgatgccaaggaattgaacgaaaggctaaacaagaaggggcctgtcgttgagcctgctgttgaacctattgttggagagccagttgtggaaaacattactgaacttcctttagcagacgaaccaagtgaagaaattaaggaaattgctcctaaagtggacgagcctgcttctgaattagaaacaatcacacctgtcataaatgaacctgaagtccaacttgttccagaaacgcaggaatctatcgctgaaccatcaaaaattgaaccagtgggtaagaccgtccaacccgaattggtggaaaagcgtgaacctaccggtgctgcgttagacacttctaaagaagcagaaagtaaggtcaaacaagaagaaactcatactctagacccaactgttaagaaggactcgaagcaggccatgggagaaaaagctgaagttaaagctaggagatcaccagcagcttctgaagaaaaagataaaaagaaaaagagacatgaagagaaggtctctaaagagatcaaaagatctgaatccactaaggaaaagaagcattctactaaagagcctaaaaaacaactttctacaaaagttccaaagaagcaaacagcttctcctctaacgtccacatctgaagactcgaagaagaagaaaactgggctcttcggcaaatttaagaagctatttaaatgttccaattga

SEQ ID NO: 2986 - DNA, 3240 bp, Saccharomyces pastorianus
atgggctcattactcttatttgagcaacttaattttttaattttggtggcttcggaggccgaacttcccatcgctaactccactagagagctattgatggatcattcttgcaatgattgtcagatctataagctttatgataatgttgaagatggctcccagagagacaaaggttggtttatggacaaatttggcccgcaaacggtacattttgtcattagtaatacaattgaattttcgttttacagagcagtttatttcgatctgttaatccctgtcatatcccatacttgggtcagggattccgtaaagaccaagagacatctgagaacaaacatgtattcccctaacccattccatttgcttcgagactgtcaagtatacatctctaaaaactcgttcaataagtgtgaatacatcctatactccgacttactccatctgttgggtggcacctcggtcaattacatatcaaacagaacgacacacgtcattgtacaaagccccaaagatcctatcatagagacagttaacaaattgactttcggctctttttcttctccgtcttccaataaacaagtggagaaaccttcgagggactggaaatttgtctacccaacgtggcttctatatcactttaaaatggcaaagcctctaagtagtgaattagctagtttgtgcgaactggatatgaatgacaccaccgaggaacaacttttcgctaaatgggaagaagttactggtgataaagagacttcatcgacacagctttttcttcatccaaatacggatttgttcaaaaaccatcattttgctatatcaccagatttgaacttcttcacacctttatattggtttttaaaggaatttatcgaaaaattgaacggtaaggtaactcctttgagctcttctgatgacctaaactccatttgccaaggttcgcccgatatcgactgttatattggttattctgccaattcgccaatactaggccaaatcaatagcatcaaaccagagatttatgtcggaaatgtaagttggttattttatatctttgcattacagaaattcacacctgtatcgcaatgcaaaattatccatcagcctttccatgccaaattgtttacttccaaggaattaacagttgcgtacaccaattattttggttcccaaaggttttacattcagagattagtagaaatattagggggattcagtactcctgaactgacaagaaaaaatacacatttgataaccaagaatacaattggtaagaaatttaaagttgcgaaaaagtggtcattagacccccaaaatgctattatcgtaacaaaccatatgtggttggaactatgctatgtaaccaactccaaactaaaccccaaagacagcagatttcaaaatttcaaattggacgatgacataaaatggaacattggccaacctaaagtggaacagtcatctcttccaactttagacgttctatcgacgaatatcaaaaatgcccaaaccacaacaagaaaatcgtctcctctagatgaaaaaaacgcaggtgacactagtactcatacaagacaagataatacaccaaccagcacttttaccaattcaattgatgaaaagattgataaattacaaaaaatctcgatagaagtaagcaaaatgcatcctaccgaattggcacaaggttcagattctagtacttcaacaataggtctacctcccgtttccaacgtctatttacacggacagaattcaaaccctaacattgaaataaaaacggagaccgtgtttgagaataacggaatgggagagtcagtgaataatgggaaccagactgcgaagtatgataccaacatcaccgaaaaggtagaacgcaagaacagcgaacaagaactgagagaaaaatccacaaaaaaaaatgatgttgagtatgtggcaaaagaggaggagggttcgcaaatgcaattaggtcagcaagttaaagaggaagacgagttttggaaagaaaatgacaaagagaaaaagaccaagaaacagggtacggaactcgaggagcttaaagaagtcaagagaagtgaagaaaatgcagaaaacccaattacgcatgcaagaacagttgaaacttcagagaacactaatccaaagaacgcaaatgacaagtactcgcatttgtttgaaggattatctgatagcgacaatcatgttgatgatatgaaggctactgtcaattccagatacaccacgccgaagacgtcacaaaatgtcaagaccaatgctggcactccaatcgctactcaaacccaagttcacacgcctagtagcaattcaaggctggcaaagacacaagctgccaagcgattgcacacagatatcgaatcattgaatgaatttcagaaaaagctgaaaaggaaaaaaattgataccgaggagattttattgcctgaggagactggaaatttgaataaatacaagctattaattgcgaaggcagaaaaagttttgagtaaatttgatgaattgcctgattacaacataaaggcggtttgcaccggatgcttccaagaagggtttaatgaagtcgacatggaaatattaagccaattaggtataaagattttcgacaacatcaaagaaactgaaggactaaattgtatttttgctcccaagattttgagaaccgaaaagtttttgaaaagcttaagtttcgaacccttgagatttgcactgagacctgaatttatcattgatttgttaaagctagttcataccaagaaggaaaaagttgcgcaaatgaatctgaacctgtttgattatgagatcgacggggtcgatgaggttctattatcgaagactaaactacctaccaaggtgttcgaaagggcgaacataaaatgcatgaacctagtcagtgatatacctggtggagtgagcactattggttcagttctgcaggcccacggaatcaaaaacgtcaatattttacgcaataaaaaatgcatttttgaggacataatggataatgatgtttctgaacagaaagatgaaaacatctttaaatacgtccttattgtcaccaaggcttcacaagtgaaaaaattcactaaattaataaacgatcatgacaaggccagtacggttttgattgtagaatggaattggtgcgttgaatcgattttccatcttgatgttgatgttgagtcgaagtcaaatattttataccaaaaaaaaacaaaataa

SEQ ID NO: 2987 - DNA, 3693 bp, Saccharomyces pastorianus
atgatgcatgagcctaaagcggagctacggctgataactgttgcttttaatgaagcgtctaccgattcaccctctttcagagcttcggtcaactacttccatacaaaaatggagtctttgaacggttggttgcagaatgccgtagattacgtggaaaatacgtacagaccttcatttgaagattttcaaaggataaaggaaacgctattctcgcaattgctgccttctcccatattactttccaatgggtttgtaagcaaccaagcatacactccactgcttgtaagagattttgctaaagacatcaatgatctttcgaatacagttctgaagataattctgggcgacgaaaactctcaatatactacagccttgacagctctaagttcagatgccatcgatccttatcttagctcaagaaaaaactttgaatattaccagagaaaacacgattcatttatgaacgattttctggcatctagtaatgatggcgattctctgaccccacaaaatcttcaaaatgaaacgttgaagttgttcgatatcaagcataaatatgtagaagcttcgttggatttagtcgaagctatttcgttaatgaaggttaatttggataagtttctggttgaaacaatagatattatacgcaagaataataagatcacaaccaaagataccaaggatgtcactgatattactcctgaactcacggaaacgttaaaagaatggtccgactggatagaaaataaccgtcagacattccaggctttgtcatctaaatcatctgaagccaagcgtgccattctcaaactcaccctggcacggttgaagccatctcgtttgttgcaggattatgacctcaacgtcatacaaaacctgaaatttaactcacccaaatcagctagcggtaaggtaattcatgaacaaaaaggaatatcagggtggctttacatgagaacaactgtcggccataatcctaaaagagttgtgtgggtaagaagatggtgttttttacataatagcatttttggagttttctcactttcacctaacaagacttacgtcgaagaaacagataagtttggtatattatggattagtgtagaatatttgccaaaaaaatctaggaatttctgtttcaaattgaaaattcagaaccccaacaacaaaacaggtgaagaaaatacacacattgatattattttacaggctgaaagtgttggcgagttaaaagcttggattggtatgttcaactttcataaacagtacgccttgtcgataaaggatacaaacaatcctcgataccaactagccataaaaaagatcgaacctcaatttttcgagtttgcatctagcacttcgacctcaactgacaaattattaacttcactttctggtagtactttaacactggtagaggaattaaaaaaaaattacctgtcagaaaacgatattgactctattattgataatagggcttatcatttaaaggtgatatctacaccgattttcacgcaactgactcagttggctttattctccacatatttgtctgtgtcaagttactacccaggtgccacccaagcaaatgtatggggcgcagcgaattggaatgacttttcttacttatataatccaatcggggataaatctgtacacgagccgcccaaagtgtcaagtgcctctagattttctgtcacttatcctgaatattatccatataatatgaaaatcgatgatatacaattcaggtccatttttttttcagtgaattatgattttttagaagtccccaaagaattagttcttttaagatattcatctgtttggtatccaaataataaacaaaaattttcgtctatggcgttcgtcactctcaataatatctatgtctacttgaacatttcaggtttctcgtacttgagaaagatcgacctattagatatcgactcaattgaatatgacaggggcccaaaacacgcttcttcaaggatgctgcacatgcaaaagagtgatggggtgaaattcaatatgtccatcttctttactgatcgaagagcagtcgcttccaagttacaattcttggtagaaaataaagcaatgcacggtccaaaaggtgaaaaggaggttttggaagtatttcaaagattagatgaagagattaaaaacgaaaggaatgttatcaaaaataatctatccgaagtagaactttactcgaaagaacatggtcactttttgaagaacacctatgatttacattttgaaaacactgaagaaacaccagttgaattaatgagccggaaagtgcgtttggaaggggaagcccaattctattttcaagataattacagagtaggaagcaagaccttttttcacgtgctgtttggggataagtcccaagtttttcccagttcattatttctttgtaaaaagggcagcaacatgaacaattctacttattgggagtgcatcaagcatacagaacaggacgataattgccaatttgagcttgttcgtaagttacagtttcaactaaacaggacttctaattacatcaaagaacagttctgcttaaagaatgataatgacaattataaaatatctcttgcacagcgcatagtgaagataaaacaaaattactactacgaagtaaatgaaggtccatttattgtgaaatttccgctatgccatcctttagttgtcagtgtgaagtttatcattgcagaatgtatcacttctcaaggcgaatcactaaaaaagtgtgatctagcaatattgtacaatttcaaattcattgaatctgttgaccagatggatacgaaggttaaaaaattgtggcttttagaaaatatccatcttggttgggtattaagattttgtaaaattgaacattttgcgatcaataagaaagttagagagtacctaaaaaaattcaacgatagagaaaggatgagtgatgtcatcaaactgtgcgggttcctaggtgttttacctacaaaaagttcacagagcaagaaaaaaacagattataacgtgcaacccgtacagatcaattacgattttctgttgcttttgaaaattattaccaaactaacagttttttatctaagcggttttattattaggacgacaaggatcctgatagcgataataatgttaatttgtagatgttttgcgaagttcaacaaatccttgtactatggtcttttaatgtccgcactaattaatctggtcttcgttggtaagtccattcattcttatttctcagtgaaaagagcagaaactctttttcaaaattatgccaatggtggacaagcagagcttcaaatcatgcatcggtctttaacagttcctgatttaaacgttcttacggaaaaaatgattgatgatgatgatcaagcgggtgtagtgttcagacggttcggggaggaggagaactcataccagtacaaggaaactagacaagaaattgcaattaaacgaaatcaagtgctagtggatttaagaattctgcagagtacggagaacgaattggtgcaaggaagctaccgaaagtttttaataacagaaagagacaagtgtcttaccacaaaaactgaaatgcctgaactatggatgaacgacccgaaactacagggttattgtaacgaatgctttgcagaatatgaacgattatctaccatcccggtttaa

SEQ ID NO: 2988 - DNA, 795 bp, Saccharomyces pastorianus
atggtggtcatgacaggagaagaaggacgtacgtatttcgagtctctttgcgaggaagagcagagcctgcaggaaagtcaaacgcacctattgaatattcttgaaacactagaagcactgacaaaccctgaatcctcggatgattcactcacagagtccctaaaaaacctacctgctttacatgaagagttgctcaagagttccattcgtctgcgatacgataaatatcagacgagagaagcacagctcttggaggatgcggaatccggaagggatatctcagcaggagtacagaatcgaaagacgattagtgaatactatactacttttgaacaactgaatagggatactttacggtatataaatttactgaaaagactgtccgttgatttggccaaacaagtagaggtgtctgatccgttagtgacagaatatgaagtggataactggggcccatctgagaaactacaaggtatccttgagcagtactgtgcaccagaaaccgacatacgtggtgtcgatgctcaaatcaaaaactatctagatcaaattaagatggcgcgtgcaaagtttggcttagagaataaatactccttaaaggaaaaactctctagtttgaccaaggaactaaaccattggagaaaagagtgggacgacatagaaatgcttatgtttggcgatgatgcacactccatgaaaaaaatgattcagaagatagactcattgaaatccaaaatagaatattcgtctggaagcaaccctgtggacgcagaaggcgacattttgttagagtaa

SEQ ID NO: 2989 - DNA, 1893 bp, Saccharomyces pastorianus
atgtcatcagaaagggttttaaattattcagcaccattcaagtcatttttagatacttcttttttccaggaactatctagactgaagctcgatgttctgaaattggactcaacgtgccaaccgcttgttgtgaatctggatcttcataatattcctaagtcctccgatcaagttccgctattcttgactaatcgaagttttgaaaagcataataacaggtctgatgatgaagtgcccgtaagaggaaagatatacaatttcaatgtattagacgaattcaaaaatctggacaaacaacaacttctgcaccaaagagctttggaatgctgggaagatggactagaggatataaataagtgtgtttccttcgtgattattagttttgctgacctgaaaaggtacaggttttattattggctaggtgttccctgtttccaaagaccttcttcaaccgttgtttatgtgcagggagaaggagactcaaaccatgtttggaaaacatatcaagagtggtttgataccaattattcaaaatgggtgtgcatactgaatgaagacaatgacatcataaattataataaagatattttcggaaagactaaagtcctagcggtgagagatacaagtacgatggaaaacactccttctgcattgacgaaaaattttttaagtgtgttacagcatgacattccccatttgacagattttaagttgctagttattagacagcataagggaagttttgctttgaacgttacattcgcctcccgtggcgtacagtctttatcgaccaacccagatatgaaagttgctggatgggaaaagaatattcaaggaaagctgaccccacgcgttgttgatttgggttctttactagatcctttaaagattgctgatcaatccgtagatctgaatctgaaactaatgaaatggggaattgttcctgatttaaacttagatataatcaaagatacaaaagttctattactgggtgctggtacgttaggttgctatgtatcacgtgcactaatggcgtggggcgttagaaagataacgtttgtcgatagtggtacagtttcttattcaaatcctgtaagacaagcgttatacaattttgacgattgtggaaaaccaaaatcagaggctgcagctgcttctctgaaaagaatatttccgttaatggatgcttcaggtgttacactaaacattccgatgattggtcacaaattggtaaatgaggaaagtcaacacgaagactttaataagttaagaggtttaataaagaagcacgacgttatattcctattagtagattcccgagaaagtagatggttgccttcgttattgggtaatatagaagataaaattgtcattaatgctgctttggggttcgatagttatctggttatgaggcacgggagtagaaatgaagagcctttgaagcaactaggctgctacttctgtcatgatgttgtagcgccgactgacagtttgactgatcggacgttggatcagatgtgtacagtaactaggccaggcgttgcaatgatggcatcttctttggccgttgaattgatgacttctttgctgcaaatcaaaaactcgggttcagatacgactgttttaggggaaatacctcatcaaatacgtggattcttgaataatttttctactttaaaattagaaactccggcgtatgagcattgtccagcatgcagccctaaagtcatagaagcatttacagagtcggagtgggaatttgtaaagaaagcgttaaatgatccgttataccttgaagaaattagcggtctgacgcttataaaacaagaagttgaacagttaggtaatgacatttttgagtgggaaggtgacgaatccgatgaaatgaaataa

SEQ ID NO: 2990 - DNA, 1203 bp, Saccharomyces pastorianus
atgtcatttgtaaaagattttaagccacaagctttaggtgacaccaacctattcaaaccaatcaagatcgggaacaatgaacttttgcaccgtgctgtcattcctccattgaccagaatgagagctcttcaccctggtaatatcccaaacagggactgggcagtcgaatactacacccaacgtgctcaaagacctggtaccatgattatcactgaaggtgccttcatatccccacaagccggcggttacgataacgctccaggtgtttggtcggaagaacaaatggtggaatggaccaaaatcttcaacgctattcatgaaaagaaatcgttcgtttgggttcagttatgggttttgggttgggctgctttcccagacaatcttgccagagatggtttgcgttacgattcagcttctgacaacgttttcatggatgccgagcaagaagctaaggccaagaaggccaacaacccacaacacagcctaaccaaggacgaaatcaagcaatacattaaggaatacgtccaggctgccaagaactctattgctgctggtgccgatggtgttgaaattcacagtgctaacggttacttgttaaaccagttcttggaccctcattccaatactagaaccgatgaatatggtggatctattgaaaacagagctcgtttcaccttggaagttgttgatgctcttgtcgaagccattggtcatgaaaaagttggtttgagattgtccccatacggtgttttcaacagtatgtctggtggtgccgagaccggcattgttgcccaatatgcttacgttgctggtgaattagaaaagagagctaaagccggaaaacgtttagcttttgttcatttggttgaacctcgtgtaactaacccattcttgactgaaggggagggtgaatacgaaggaggtagcaacgattttgtttactccatctggaagggcccagtcattagagctggtaattttgctctccacccagaagtcgttagagaagaagttaaggacaagagaaccttgatcggttacggtagattcttcatttctaacccggatttggttgatcgtttggaaaaaggtctacctctgaacaaatatgacagagatactttctaccagatgtctgctcatggttatattgactaccccacctatgaagaagctctcaaattaggctgggacaaaaagtaa

SEQ ID NO: 2991 - DNA, 720 bp, Saccharomyces pastorianus
atgaatcaagactacgcacaactttcgatccccgagctgaaagaaactaggacttctaaattaaacaaaatgaacaattttcgaagctccccaattgctgaaataatgaacaagataccacctgactgcggtaagacacaaaatactacgttccctgagttcaatccggtattaagaaggcgacaatacgaacaacggcctatgtacgagaagccaatgcgagtcgcagacagtatgtctccacaactctcctcaatgaactgtttgccaaacttgtattccaacggttcactgccattaccaaatccttatttatcatatttaaatcatcttgaaaaggtcaattaccaagacgccaaattcaatagctggggtattctacaaaactcgaatagtggtttggccattccaacatatttcagtccccgaacagcacaaaatatgccttgttccgagaaagtagagacatggcttgaaagattaccaatattcgtgggatttgacgggtatttatttacaacttgctttgattatgaatatatgttggattgggaggaaactgaatttacctttgaaaagacagcatgcatggaaactgattattctagagctttaactgatactgatatcatacatattcaagaaaaaaagatagaaactttgataagaaaccagtatttaaaggaatatgagttttctcagaaagatttcgagttttag

SEQ ID NO: 2992 - DNA, 2301 bp, Saccharomyces pastorianus
atgtctgaggaatttattgctgcttccacgctggccaaaaatttggaattcgccaaaggtaatgagttccataccattttgaccactttacgatctccactatatatcgatgaacatctgctgaagtctgaattaagctttcttgttacaaagattttgaagttgattagatcaagcaatgactttgatctttggaaagggtgccatacttctgtcgtagtttgcgcttacaatccattgattctatctactcatggtggtcaattattagctgctatttattctagactggaacagaaaaccggcttctactcatccgttgtctcttcgtcacacggaaaacaactttttgatacattggtttcctctatggcagttatcattgatttagtgaaaagcaaacctactttatcaagagaagcattagtgcccaaattaaaggccatcattccaacattaattactttgtctcaatacgagcctgaactgactttgccggttctaaaaaagatcttaaagagaaataccaccactttcaagccatttgttaataaatttcgcattgtgttaacaaacttgataaaatctgattacgcgtctttaggctcaaagactcaaagattagtctgtgagaactttgcttatttgcatctgttaaaaattcaagcaagcaatgcaaacgatgacgaatcccaagcacatcacaaagtttaccctgatgccaattggagaacagggttgttatctattctatctcaattcaagcctatcattcaattgtgtgaagaaatcttggattttgaacaagataatgaactacagaaattggtcaaggctttaccagttgacatcgaatcgaacaacgaagtcgaatttttgcccaaactgaaactagatttcaacgcacctttaactttatgggaaattccacaacgtttgtcattattagttgacatgcttgtcgcatttatctctttacctactccatttcccattagagttccattgggtagtatcaactctgtttgtgaagttttattaagtgtcagtcaaaaatatctacctttgaagaaagagttgcgtcgtgataatgaattgaatggttccatcaattacattttgcctcaaatccaattccagggtatcaggctatgggaaaatgtggtttcaaaatacggcaaatgtggtttgtcactttttgaaggaattctttcttccattgaactttttatcccattaaagaaaaagagtaacaatgaaatcgatttcaatgtagtcgggtcattaaaatatgaattttttacagttttcagactagtaaacatgattatgtcccatttagggcatcaattgaacacagtcagtgttgtatctcaattaattgatgtcgccttgtttctatcccgtgataggactttagtcgattctttatttaaaagccggaaaggtaacttgaagcaaactaaaactaagcaatcaaagaagaacaaaaacaacgaaggtgcactatccgatatttttacacatccagagctgtttgtgttcaaaaattccatagattggtcgaacgaaatcaatgaatttttcattacttctttgaataactggattttaccttccacaccacatattcaaattttgaaatatagtattactcaatctctaagattgaaggaagaatttggttatattccagaaagttttgttagccttctacgttgtgaagttctccatccaggtaatgaacgtgtatccattttgcccattgctatatcattattgaagaacgccaacgatgatttatttgaactactgtgtcatccaaaggtccctgttggtatggtctaccaattgcacaaacctttggacttgggcgaacaggaggagcaagaagaagaagaagaagatatgggtgagagagggaacagcgttactggatcatattcgcatgcgattgtagacacgaaggcctttaaagcattggacaatttagaaaatgtagttattcctgagcctgaacggacagtttctggaccagttgatgatgccgctgtattcaaaaagagattagtagaagaagtctccgaaagggaaaccacgtcgatgaataagaaggttaaaattgtggaagaggcaaccttggaaactagcgagggaactactgtggaaacaattgtggctcaaacaaaggttgaagtgaaatcagcagaggaaagtgaaggtgaagaagatgaagagtttgaaataccagctatcgaattaagtggagatgaagatgaagacggcgagggcgacgaatag

SEQ ID NO: 2993 - DNA, 1185 bp, Saccharomyces pastorianus
atgtcaccactaaagaagaccattccagagtttttaacttacttaaaatcgctaccgatttcaaaaaccgcaagcggcgacattttgacaatatgtgttggtaatgaatcagcagatctagactcaattgctagtgcgataacttattcatactgccaatacatttacaaccaaagctgcaattctgaagaaaaatgcggtttgactataccaatcatcgacattcctagggaagatcttagcctaagaagagacgtgatgtacgtcttagagaagttgagtattaaggaggaggaattatttttcattgaagacctagtgagcttaaagaagcaagcccctaacggcactaaattgaactcatacctagtagacaataacgatgctccaaagaatttgaagaattacatagacaatgtggtcggaatcatagatcaccatttcgatttgcaaaagcacttggatgccgagcctcgagttgtcaatgtttccggaagttgctcctcgttagtcttcaactactggtacgagaagttgcaaggtgaccatgaagtggtgatgaatattgctccctttttgatgggcgccatcctgatagatacctcaaacatgcaacgcaaagtcgaaccaagtgataagcaagcggtcaaaagatgtcaagaggccatcaatcgtgcggccgatgaagtgtcggcccaaggcttgcaagacaccagcgtgttttacaaagaaatgaaatcgagaaagaacgatattagagggttttcagttagcgatatcttgaagaaagattacaagcagttcaattttcaaggaaaaggccgcgaaggcttggaaattggtctttcatccattgtgaagagaatgtcatggctgttcggcgaacatgacggggaaacagaatttgtcaagcaatgcaagaggttccagaacgaaaggggtctcgatgtgttggtgttattgacatcatggaggaaagccggcgtttcacacagagaactagtcatcatgggtgatcccaagatggtacgtgcgctcgttgaaaaagtcagtgataaacttgctttgcaacagttcgggggcgattttgaccaaggcgtggcgatgttcaggcaattgaacgtcgaagccaccaggaagcaggtcgttccctacctcgaagaagcgtactctgaagtaaactga

SEQ ID NO: 2994 - DNA, 1602 bp, Saccharomyces pastorianus
atgatgctattgaaagctttcattatccttttggcaggttttgtagccaatatatcggcaacaatgacaaacaaaacaagcgacagacctttggtccacttcactcctaacaaaggttggatgaatgatccaaacgggttgtggtttgatggaaaagatgccaaatggcacatctacttccaatacaatccaaacgacactgtatggggtttgcctttgtactggggccacgctacttctgaagatttgactcactggcaagacgaacctgtcgctatcgctcctaagcgtaacgactctggcgcttactctggttccatggtggttgactacaacaacaccagtggctttttcaatgatactatcgatccaagacaaagatgtgttgccatttggacttacaatacacctgaaagtgaggaacaatacatcagttactcccacgatggtggttacacctttacggaataccaaggcaaccctgttttggctgacaactccactcaatttagagatccaaaagttttctggtacgaaccatctcaaaaatggatcatgaccgctgccaaatctcaagactacaaaattgaaatttactcctctgacgacttgaaatcttggactttggaatctgcctttgccaatgaaggtttcttgggttaccaatacgaatgtccaggtttgatccaggtcccaactgagcaagatcctactaaatctcactgggtgatgtttatttccatcaatccaggtgctccagctggcggttctttcaaccaatacttcgttggctccttcaacggtactcacttcgaaacttttgacaaccaatctagaattgtcgatttcggtaaggactactacgctatgcaaacttttttcaacaccgacccaacctacggctctgctttaggtatcgcatgggcttccaactgggaatacagtgcttttgtccccaccaatccatggagatcatccatgtctttagttcgtaagttttccttgaacaccgaataccaagctaacccagaaactcaattgaccaatttgaaggcggaaccaatattaaacattagtaacgcaggtccatggtctcgtttcgcaaccaacaccactttaaccgaggctaactcttacagtgtcgacttgaataactctagtggctctttggaatttgaattgattttcgccgtcaacaccactcaaactgtctctaaggctgtcttctctgacttatctctttggtttaagggtttggaagactctgaagaatacttgagaatgggttttgaagcaagtgccgcttctttctttttggaccgtggtaactcaaaggtcaagttcgtcaaggagaatccatactttactaacagaatgtctgtgaacaatcaaccattcaaggttgaaaaagacttgagctactacaaggtctacggtttactggaccaaaatattttggagttatacttcaacgatggagacgtggtttctacaaacacctactttatgaccactggtaatgctttaggctctgtgaacatgaccactggtgtcgatgacttgtttcacattgaaaagtttcaagtgagagaggtcaaatag

SEQ ID NO: 2995 - DNA, 591 bp, Saccharomyces pastorianus
atgctaaggttagtgactagaagtttaccgagattgacacgttcttctgctgggggtatgctggtgcgtggctccctgctgcaatcgttcttcactagtgcgcgattcaatagcagtatcactgaagatgaagccaagatcgtcttgaaggacaagaacaggcccttgagagtggacagagagttgcctgacccaactcaggaaagaaagaagcgaatacttgggttcgtggtgttttccgtggccattgggtctgcgctatcgttgatcttcaactatgagaaaactgagtcccccatcatctctaactcgctgtaccatataagaaggtctccggcaaccagagacatactgggcgaaagcatagaattcgacggcatcattccctgggtctacggtgaactgaactctgtcaagggtaaaatcaatatcacgttctatatcaagggggacaagaacgtttctgggaccgttagactggtcgccgataggaatactcatgacgaggagtttttgattcacgaatggagcgtcaccgccggtggccataagattgatcttctagccgagaactccaagagacctatttag

SEQ ID NO: 2996 - DNA, 3660 bp, Saccharomyces pastorianus
atgcgacttcgtcttccgtcaaggtcgctattcacccctccgtttaggataggcatccgagctcaactgacagccttggtgagtatcgtggctttaatatcgctgataattttagctgtaactacaggtgtctatttcacttcaaattataagaacttaagatccgatagactgtatattgccgcccagttgaagtcgtcacagatcgatcagactttaaactatctatactaccaagcatactatttagcttcaagggatgctttacaaaactcgctgacaggttatgttgcaggtaacaaaagttcggataactgggtggactccataagtattgtacagaaatttttgagctcttcgaatttattttatgtggctaaggtttacgattcttcatttactactgtcttgaatgctacaaacaatggaactggtgacttaataccgaaggatatttctgatgagttgtttccgttgtccaccgatatgccattaccttcttcactagaaactacaggtatactaacagatccaatactcaacagcaccgactacctgatgtctatgtctttacccattttcgcaaatccttcaattatcttaacagattcgagagtatatggatacatcactataatcatgtcagcagaaggtctaaagagcgtattcaatgatacaaccgcattagaaaaatctaacgttgccattatttccgcagtatacagtaatcaaagtaaagcctctgcataccatttcatctttccgccgtatggaacctcttcaacaataacaaaaactaattttccaataaaaaacaacacgttcataagtagtgctttcagaaatggtaaaggaggatctttgaaaaagaccaatagctttggcataaaaaatttagctctaggttactcatcatgttcattccaattagttaactgggtcgccgtagtttcacaaccagaatcagtcttcctctctccctcaaccaaattagcaaaaatcattactggtactgtcattgctattagtgtatttgtgattctactaaccctacctctagcacactgggcagttcaaccgattgtgcggttgcaaaaggcaaccgaattaattacagagggaagaggtctgcgacctagtaccccgagaacagtaagtcgtaccagctcatttaaaagaggattcagttcaggatttgctgttccttcctctttattacaattcaatagcggagaggctggcagcaccacaagtgcaagcggccatggatgtagcgggcgtggtagcggtgccgtaatgtcaacagatagtagtatgaaaagtgctataaatattggtaatgaaaaactatcacccttagaagaagaaaacaaaataccgaatcaccaaaacaatgccaaaatatcaatggacggctctctgaaccatgatttgcttgcacctaacgccttaaggcacaatgataacgataggagctccagtagatctcacactcttactacctctgcgaacttaactgaagctagactaccggattatagaaggctattttctgacgagctttctgatttaaccgaaaccttcaataccatgactgatgcactagatcaacattatgccctcttagaagatagagtcagggctagaactaagcaactcgaggctgctaagatcgaggcagaagctgcgaacgaggccaaaacagtcttcatagctaacatttcacatgaattaagaacacctttgaatggtattctcggtatgacagctatctccatggaagaaaccgatgttaataagataaggaacagcttgaaacttatatttaggtcaggtgagcttttgctgcatatcttaacagaactgttaaccttttctaaaaatgtacttcaaaggacgaaacttgagaaaagagatttttgcattaccgatgtcgccttacaaataaaatctatttttggtaaggttgccaaagatcagcgtgttcgtctttcaatttcattattccctaattacataagaacaatggttctttggggtgattccaacagaattattcaaatcgtgatgaacttagtatccaatgctctgaagttcacaccggttgatggtaccgttgaggtcagaatgaaactcttaggtgaatacgacaaggaattaagtgaaaaaaaacaatttaaagaagtgcatgtcagaaaggggacagaaatacttgaagacatagaaaaaataaataagcatcacctcaaagaagcagcaaatttcaaaaaaagcatggattcagaatctacgaccacttccgtcataagtaacagagatacttctacaattcaagaagagataacaaaacgaaacactgctgcaaatgagaacatttataagaaaacgagggatagagagaaatcatcgaatgacgatatctcttcaatagcatcgacaagtactagctcatatgatgatgcgatattcaacagtcaattcaataaagcacctggttctgatgaagatgaagggggtgatcttggaaaaccaatagaaaacccaaaaacatgggccatttccatagaagttgaagatacggggcctggtatcgacccttctttacaagagtccgtcttccacccatttgttcaaggtgaccaaacattatccagacaatacggtggtaccggattaggtttatctatttgtagacaactagcaaatatgatgcacgggacgatgaaattagaatctaaagttggtgttggtagtaaatttacatttaccttacctttagatcaaactaaagaaatcagttttgcgaatacgaactttccatttgaagacgaatttaatcctgagagtaggcaaaatagaagagtcaaattcaatgtcgcaaaaagtataaagagtcgacagtcgacatcttccatcgcaacacccgctgccaataggtacggttcaactaatgaaatgctacgagaatcaagaaacaacgaggaagaagaaggcagaaaagccacaaatattgaagaagaaaaagaaggagggaacgaatcagatgaaacacaccaacaactccaagagaaaaaagtaaaaaattctatatctttttcaagtgctgacagcaatgtgcaaaagagtacgccttccacacatcattctagagaagaaagtgtaggttctgtaaatcttgatagaccatttctacaaagtactggtacagctacatccagtagaactatacccacagtttcaaacagcaatacgaatgactcaagtatcaagatattggtcgtggaagacaatcacgtgaatcaagaagttatcaaaagaatgctgaatctagaaggtattgagaacattgaactggcttgcgatggccaagatgcgtttgataaagttaaagaattgacatctaggggcgaaaattataatatgattttcatggatgttcagatgcctaaagtggatggattactctctaccaagatgataagacgagatttgggttacaaatctccaattgttgctttaactgcattcgccgatgatagtaatatcaaggaatgcttagaatcaggcatgaatggatttttatcgaaaccaatcaagaggccaaaattgaaaaccatccttatagaattttgtgcagcataccaggaaaagaaaaaataa

SEQ ID NO: 2997 - DNA, 747 bp, Saccharomyces pastorianus
atgaataaatgggtagaaaagtggctaaaggtgtacttgaaatgttatatcaacttgatcctctttcatagaaacgtgtatccacctcaatcattcgatttcaccacatttcagtcattcaacttgccacagtacgtcccaattaatagacatcccgcgttgatcgattacatcgaagagcttatactggataccctctctaaactgacgcacatatataggttttctgtttgtatcattaataagcaaaacgatttatgcatcgaaaagtatgtcttagattttggtgaacttcaacatgtgaataaaaatgaccaggtcattacggaaactgaagtatttgacgaatttaggtcttccttaaacagtctgattttacatttagaaaaattgcctaaaatcaacgatgattcagtaacatttgaagtggctattaatgccgtagaattggaattaggacataagttagacacaagaaaaaaggttgataatttagaagaaaaactagaagtcgaaagagattcaaattgggtgaaatgccaggaggacgcaaacttacctgatgaagatatcagtgattttcaacatcccaaaataaaattattctctttaatcgggtgtgatgtgggacccttaatcattcatcagtttagtgaaaaattaatcagcagtggtaatgacaaaatcttggatggagtgtattcacaatacgaagagggcgaaagtatctttggatccatatcctaa

SEQ ID NO: 2998 - DNA, 642 bp, Saccharomyces pastorianus
atgaagtatgaagatttaaacctgattgccatttggccatcaccgacaagagctgacctttgccgattcatcaaggagaatcttttgaacaataatgttattacccaattattctttatcgatgctacaaactcattcccgctaagccatttccagaaactagtaccgccagatctttcagaaaacgccaagatatatgaaaatatcagaattaacacctgtcttgatctagaagagcttagcgccataacagtcaaaatactacaaattctatccatgaacaagatcaacgctcaaaaggacacagaagacgctgctgctgatccgctaaagattatattatacatcaacgggttagagatcatgtgtaggaactctcaaattaaatcgtcgcctcaacgctcacatgaattaataagggacattttgcttaaattgcgtgtaatggcgaataatgctagagcacccataagaacagtgttggaatttcctaaggagcaactattggactattatttcatgaaaaagaataaaactagtgccctgttaccagcatcgacgcatagcaagaggagaagaatgaagaatggagattcccttgctgagtatatctggaagtactatgcagattccattatttga

SEQ ID NO: 2999 - DNA, 1452 bp, Saccharomyces pastorianus
atgtctgttaccaatgctgaacaagaatttagtggtaaatatagttcgtatacagtccaggatcgccaaggtctcgtcaatgccgtgacgtgcgttcttggatcgtcgtccgaacccgtagccgtgtcgaccgactattccaataatctgagcattgccagagaggtcaacgcgtatgccaagattgccgggcgtgattggacctactatgtgcagaaattggaagttaccatcggcaggaacacagacagcttgagcttaaacgcacacccagacgcggttgtccagaaaaacatagacattgatttaggtcctgccaagatcgtgtccagaaagcatgctgccatcagatttaacttggaaagcggatcgtgggagcttcagatatttggtagaaatggtgcgaaggtcaattttagaaggatccccacaggtccggactctccccccacggtgctacaatcaggatgtattatcgatattggtggtgttcagatgatctttatattaccggaacaagagactattataccagattattgccttaatcatctcatgcccaaattgctatcaacctatggcacaaatggcaataacaatccgttgttgcgcaacgtcattgaaggctccacctatttgagagagcaaagattgcaagaagaggctcgattgcaaagattggaccacttgcacactccattgtcgtcgtcatcagaagtaaacgcattaggcgaccctcatggagacacgattatgatggaagacgaagatgatgatgagaacgaaacaagagagggcatccgaccaaatacctactcggccagtaacagcaatgttatcaacaacaatatcatgcctcatatagacaacccttcagacttgtcactagatgaaaatagatacgttaaacctccacagtcatatgcctcgatgatcacccaagccattctttccacaccagatggcagcatttcattagcagatatttacaaatttatctctgacaactactcattttataggttttctcaaatggcatggcaaaattctgtgagacataacttatccttaaataaagccttcgaaaaggtacccaagagagctggccaacagggtaaagggatgaactggaagatcagcgatgagatcagacaagatttcttgaacaaatggaacgccggtaagttaagcaagatcagacgtggtgcatcagtaacaagacaattacaattacacatgtccaaatttggagagataccagcccccgaatcttcacttacagctacaagggagataaaggcgcagaaggtgaagcgaccttcccaaaacacaagaccagttttacaagagactaccccacaattgcaagaaacccaattgactagtcaaatgccgtccaagatgtcgatgaacatagccacaaatgccaacgtgaataatggttctctctga

SEQ ID NO: 3000 - DNA, 4092 bp, Saccharomyces pastorianus
atgcttcaggaacagtctgcgtcgatgagcgcggtgatgaataacacgcccacaacggtcgcggccttggctgcggtcgctgcagcctctgagacaaacgggaagctagagtcggaggaactgccaaagattataattcccaaacctaagagtagttctcaactagagcagctgctgtatcggtacagggccattcagaaccaccccaaagagaacaggttggaaatggcggccatagaggacacattaagagtcatatcacgtgaccaagatatttacgagactaaactagacactttgaggaagagcatcgatgaaggatttaactacaaagaaggtctacttcagaagcatttggttgcattacaattactggagaaagatacggacatccccgactatttgttagacttatcagatattgatagtgatgaaactgcagtagaagaggcggatttctctgggaagaagccaataaagatttcaatggattttaatgcaaaggccaaaagtttgggtttggaatcaaaattttcgaatactgcgaagaccgtattgggcgatccagaaaccgaaataactatttctgcccgtatatccaacagaatcagcgaattggaaaggttacctgccaatttgggtacgtactcattagacgactgtttggagtttatcacaaaagacgatttatcctccagaatggatactttcaagatcaaagctcttttggaattgaagagcttgaagcttttgaccaagcaaaaatctatcagacaaaaattaatcaataatgttgctagtcaggcacatcacaacattccgtatttacgtgattctccctttacggcagctgcccaaagatccgttcaaattagaagtaaagtgattgttcctcaaaccgttcgcttagcagaagaattagagagacaacaactgctagagaaaaggaaaaaagaacgtaatttgcactcacaaaaaataaacaacattattgattttattaaagaaagacaatcagaacaatggtctcgtcaagaacgttgttttcaattcggtagattaggtgcttcattacacaaccaaatggagaaagatgaacagaaaagaatggaaagaactgctaagcaacgtttggctgctttgaaatccaatgacgaggaagcttatttgaaattgttagatcaaactaaagataccagaatcacacagttattaaggcaaacaaattcttttctggattctttatcacaagccgtcagagtacaacaaaatgaagcgaggatactcagcggtgaagaagttcaaccaatcactgatgaagaaagagaaaaaactgattattatgaagtggctcatagaatcaaagagaaagtcgataaacaacctaccattcttgttggtggctctttaaaggagtatcaaatacgtggtttagaatggatggtctctttgtacaataatcatttaaatggtattttagcggatgaaatgggtttaggtaagaccattcaatctatttctctaataacgtacctttatgaagctaagaaagatacaggacctttcttggtcattgtacctctatccacgataaccaactggacattggaatttgagaaatgggcaccaagtttaaacaccatcatttataaaggcacaccaaatcaaagacatactttacaacaccaaattaggattgggaacttcgatgttctattaacaacttatgagtatattatcaaagacaaatcccttttggccaaacacgattgggcccatatgatcattgacgaaggtcatagaatgaaaaatgccaattccaaattgtctcacacaatttctcattattatcgtactagaaatagattgattttaacgggtacccctttacaaaacaatctgccagaattatgggcattattaaacttcgtcttgcccaaagtcttcaactctgccaagacttttgaagattggtttaatactccttttgccaatactggtactcaagaaaaactggaattaactgaagaagaaacattgttgattatcagaagactgcataaggtgttaagaccatttttgttacgtcgtctgaagaaagaagtggaaaaggatttgcctgataaggtagaaaaagttattaagtgtaaactttccggtttgcaacaacaactatatgaacaaatgttaaaacacaatgcgttatttgttggtgcggggacggaaggtgccactaagtgtggtatcaaagggttgaacaataaaatcatgcaactaaggaaaatttgtaaccatccgttcgtgtttgatgaggtagagggcgttgtaaacccttcaagaggtaacggtgatctactttatagagttgccggtaaatttgaattgttagacagagtcttaccgaaattcaaagcctcaggccacagagtactgatgtttttccaaatgacgcaagttatggatattatggaagattttctgagaatgaaagatttgaagtatatgagattagacggtagtacaaagaccgaagaaagaacagaaatgctaaatgccttcaatgccccaaattcggactatttttgtttccttttatctacaagagcaggtggcttgggtctaaatttacaaactgctgatacagtcattatttttgacacagattggaatccacatcaagatttacaagctcaagatagagctcatagaattggtcaaaaaaacgaagttagaattctaaggttaattactacggattctgtggaggaagttattttggaaagagccatgcagaaattggacattgacggtaaagttattcaagcaggtaagttcgataacaaatccactgcagaggaacaagaggcatttttaagaagattgatcgaaagtgaaacaaatagggacgatgatgacaaggctgagttagatgatgacgaattgaatgttactttagccaggagcgccgatgagaaaatattatttgacaaaattgataaagatagaatgaatcaagaaagggtgaacgccaaagctcatggactcagagtcccacctccaagattaattcagttggacgaactacctaaggtgtttagagaaaatatcgaagaacatttcaaaaaggaggattccgaaccgctggggagaattagacagaagaagagggtttattacgatgacggtttgactgaagaacaatttttagaggcagtggaagacgacaatatgtcgctggaggacgccatcaagaaaaggcgcgaagctcgtgaaaagaggaaattacgtcaaaataacacaaaagaaaacgaaatagaaactcttgaaaatacacctgaagcacccgagtctcaactcacagataccaatagctcgattacggctgtggatgtggacactgctattgataaggaatcggtagtttccacgtccaaacgtcgcacaactagaaggaaaagaaccatcgcagttatttcaggggaaggtaaagaaaacttagaagaagactatcgtccccaagaaaatgagagtccaaaggcagaagaagaactaaagaataactccgttgagattataggcggatcagaatctaggagaaagaaacctaagttgacagtcaagattaagttaaagaagacgcctgcgatggacaataatgataccagccaaccagaggagaaaccagaggggaaatcagaggaaaaatcacctgtaaagaaagctccagccaaaaaaatgaaagctaaacccaagcctcttggactgttccctttggtggaaaaactagtagaaatgatgcgtgaacagttggacgaagtagattcccacccaagaatttccattttcgaaaaacttccatcaagacgcgactatccagattacttcaaggtcatcgagaaacccttggccatcgacattatattgaagaactgcaaaaacggcacgtataagactttggacgatgtaaaacaagccttaaaaacgatgtttgacaacgcaagattttacaacgaagagggatcctgggtttacattgacgccgacaagctgaatgagtttaccgatgaatggttcaaagaaaactcgccctag

SEQ ID NO: 3001 - DNA, 972 bp, Saccharomyces pastorianus
atggccatcatcaccgctgttaagagaggtttgccaaagttaaccacatccgctgcttcaacaaccaccgctacttcagtagcagccggtacttcaacgactgctacttcagtcagttctataacatctgttgcctcttctaattcttctgcctcactttcatccacttcaacatcatcttctatcctctctagtattactccaccttccaaaaatgggaatccatatatcataggtaccagcagtgtgcctagtggtacagtttttattatagtgggtgccattgtgggtgcaatatttttagcaatattagtatggtggacaatggtaacgtattcttcacacaggttgactaaaagcgttcaagattatgagtcaaaaatgttctcaccacagaatactcaatactacggcgactctccataccaagactctgccaacgatcattaccaagatggtgtccatgattgtgatgacattactagagatgattccgtgaaaattgggctaatttctcagaatgtgaacgagaaggtaacatcaccgatcgatttcgaaagatctttgtccggattagtttcaaattcgaacagaaactccctctttatttcgccaacaggtgatattttaaacaagacaaggctatctaagctttatcaggaaagccctcgattgattcaaaaaccattcacaatgacgagtaacagcgaatcctcaaattctttggtttctacagtctcttcatcgtctgtttcgtcatctgataataccgatgagaagaaaatggcggaggacataaagaaacccgccaaaattgcagtttcgccacatcggacactacagagctcaccagggagtgataatagttctaaaagctctcgcagtagggggaatctgttatctgtggaagctagaagaaaagttacaccctccacctacctagaagatatgttagagggtaaggaaacataa

SEQ ID NO: 3002 - DNA, 1161 bp, Saccharomyces pastorianus
atggtttttgatttggaaaaaattgttagaccaaaaatatataacttggaaccttaccgttgtgctagagatgatttcacagagggtatattgctagacgccaacgaaaatcctcatggacccacccaaaatgaattgattaaaagcaatttacaccgttatccagatcctcatcaattggaatttaaaacagcaatgaccaaatacagaaacaaaaccagtagttattccaatgacccggccgtaaaacctctaactgctgataatttgtgtttaggagtgggttccgatgaaagcattgatgcaattattagggcctgttgtgttccgggaaaggaaaaaatcttggttctgccaccgacgtattctatgtactctgtttgtgcaaatatcaatgatatagaagttgttcaatgccctttggttgtttctgacaattccttccaaatgaatgtcgaaggtgtgctaaccatcttagaaaatgatccattgattaagttagtatttgctacttcaccaggtaatccaactggggccaagattaagacaagtttgattgaacaagtcttacaaaattggcaaaatgggttagtcattgttgatgaggcttatatagatttctgcggtgggtctactgcaccactagtcaccaagtacccaaacttagtaactctacaaacactatccaaatcgtttggtctagccggcattagattgggtatgacatatgcttcaaaggatttagccaagattttgaatgcaatgaaggcaccttacaatatctcttctctggcttctgaatatgctttaaaagccgttcaggaccataatctaacaaaaatggaagacaccgccagatcgattaacgaagagaagatgcgtctcttaaaagcgttaactgctttggaatatgtcgatgaccaatacgtgggtgggttggatgcaaatttcatcctactacgaatcaacggtggtgacaacactttagcaaagaaactatactatcaattggccactcagtcgggcgttgttgttagatttaggggtaatgaattgggctgtactggatgtctaagaatcaccgttggtacccatgatgaaaatacacaattaataaacaattttaaagagactctgtataagttggccaacaacaattag

SEQ ID NO: 3003 - DNA, 4422 bp, Saccharomyces pastorianus
atgtcctcgttacaagatgaagtgtcaacagagacctcggaagacttcggtttcaaatttctaggccaaaaacaaattctacctccctttaacgaaaaaccaccgtttgcatctttacaaaacctcgctatttccaacagcaaatcattatttattgctgcttccggaaacaaagtggtgattggggagctgcaaatgctaaaagaccacatcacatccgattctaaccctattccattggtgttcaaatgggaaaatgaagtcgtggatgtaatatttgtatgtttcaatggcggccagggtttaatagcaaccagagatacattatattcgataaacttggaaaaattgggagaactgcaaacagttttctcttttgagacaccaatttgccaactaaaggatttcgataacaccctgatatatctaagtacaaacaacaatttatcaacgctggatctaaaaacaaaatcaacaaaccaattagcccaaaatgttgcttcttttgaccttgcaaactcacaattgctagttctactaaaggatagaagtttccgaaacttttcgctgcaaaaaggtacgccggagaaaacattcgagttttcaataccgtcggaattggacgagttctctgtcgatgaatacgctcctttaaatgttactatactctccaaacagatataccttgtcgtgttcggtaatcccgtttcagagaccgatgaggaagcatcgtacgatcaaaagatgttcattatcaagtataccgatggaaacgcttcgtttcaagaaacttttgatattataccaccgtttggtcagattttaagacttccatatgtttacaatgtcaccttgccagatttaatcaaaccagctgaaaacgtgaatatactagcatcatcatgttcaagtgaagtaagtatatgggattcaaatgatgttatcgaaccctctcaggacgctgaacgagccgtacttccgatcagtgaggaaacggatatggacacaaatccaattggtgtggctgttgatataacctcctcgggtaccatttcagaaccttgtcccagtgttgataccatagagaggttaccacttgtttacatcttaaataacgaaggtaacttacagatcgtaggattattccatgttgcctcaatcaagaatggtaactataacataaaattggaatctgaaggaagtgagatgccagcctcaggctctaaccttccatttacggcacctttgaccttagaaagaaataatacggtagaacaagaacaagaaaaagaacaagaaaaagaacaaagtacatcctctccatctgataatccgttcatatcaccaaatacctcaggctttagcttcctcaaaaaggagcaacccagcacttccaacagcttgaaatcgcaaaatgcatcagccttcagcgcctcctcgtttggatcatcgggattttccttcagttcattatcaaacccatctgttgattctggtactgcatctaatgaacaaagtgccaccggcactgctttcgggaagccggcgtttggtaagcctgctttcggaactttcactaaagaaccatccattcctgcatctgcctttggtaagccttcttttggttcagccgcatttggttctgaagttacggctgccgaaccttcagcttctgcacctgccttcggtaaaccttcttttggtaaacctgcatttggggctgtagcttcagagtcgtctacttctgaatctgcttttggcaaatcttctttcggtacacctgcatttggaactaccgccaatgagccatcaacatctgtatctacgtttggaaagcctaccttcagttcatcaccctttgcatctattactaaagaattttttgactcaggttctgccgccgcaaaacctgcagttagtgcattgtgtgcgttttcttctaagaagaatacagaaccctcttcgacactatttggtgttgatcctaacacgtctaagcaaacaaataccaatgccttcagttttggaaactctacccttgggccttctggtttttcaaacgctttgaattcagtggacactggtaccaataccataagctttggaaccccggctttcgggtcctctggcgtctcaaatttttcgaacactgatacccatatcaattttggtactcagtcttcgccattttcttctcaactgggcaagacttcaccattcagttccctcgcaaaaaacagtactgaagtcgaaacaatagaaaagggctccgctagcgaagttgatgacgaaaacgataatgagtacgatgatgagcatgataatgaagacgatgattcaagcataagcgataatgacctaacggacactactgtagaacaaacgcctagtagattagctgaactaacctcgaataccaataatggagttgtggaagatgatagacccgaatcctccattggtagactcactgaaacaataaaaaagagtgctaatatcaatataaacgatttggagaaccctgtttttgagaataatgtaaaagcaaaatccgaatcacctttctcagctttcacgactaatatcaaaaaacccagctccaccactcccgctttttccttcgggaactccactctaaacaacaatagcatgtttatggcaccaagtgcttctaaagaggtaccttcgtcatcaaaagaaggaactaataatagcgaaagccgtgagaaagaagcgctaacctcgaaggatcaaaatacaagagaagaaaatccttttttgcctaaaggaaaagagaatgataaggaaacttctgaagaagagagcagtcaagaagaaagcgacgctagttctgaatcaaatggtgtgaattccgagaacaccccggaacaagtctttagcacttataaccaacagaaggacgagcggaagaatgtaataccgcaagatgagaacattattgaaaagcttgaaacgggatctaaagatagcaagcatgttgctaaatatggtgacaaccccaaatcaacagatgaagcatcagatactgatgaaaatatcgatcaagagacacaagaaggagaacaagaggacggccatggctcagaagaggagtttgagccaaatagggcagtaaaagaatttcaagaccacaattttgaagaagatgctgtgagcgaacaagatgcatatcaaaacaatgaaacagaagattctggtgaggataacccatcaactagtgatcgggaagaaagtatttctgaatcctacgacaagctagaagatataaataccgatgaattcccttgtggtggagaagctccaccagtaaatgatgaggaacattctgctgattctaatgtacaaacttcacttgaaaagaattacgtcgagtctggtatacaaacagatctttctgaaagttcccaggagaatgaagttcagacagctgtcgtacctgtaaagcaccattatacccaaactgtcgaaaaggaagtagttgacaatgatattcaaactgaacctgttgagacaagcaatttttcggtacaagcgtttgaaggtgatgagaactatttagccgaacaatacaaaccaaaaccattgattgaatactacactggtgcgaaagtatccaatattccctttctttcacaaaattccaccttgcggttgattgaaagcacgtttcaaatggtcgaggctgaattttctgttcttaaagaaaatatccaaaatatggacagtttttttattgaccaatcaagcacccagcttgaaacacgtacaatacattctgtcaataacatgtacacctggagaataccagaggcagaactgttgtcgaacatccttaatgatgttaagtcagaacatatgcaagtaacgagcgctaacgttaagaaattggaagaaaaagcgtcgagttacattgaaaaagatatcgcaagtgtaaatgacgatcttatggatgcaaaagagcagttcttgtttttatctcatttcaatgaggcctcgagtgaattcgttaaagatctcagtacgcaccaatttaagatgcaaacagcactacgtcagaaattatccaaggtttctgccgaaatcaatcatgttgaagaaatgttgaacattttaaaattattttctgtaaaaaacaagaggttggatgaaaatccattagtggcgaagctcgctaaggaatctttcacacgtggtggattattgcaggaaataaagtctttgcgagatgaagtaagtaggttgcaattgaaggatgaaagtaaagaaactacatcattggagtcatcttcttctttgactaaagacataaatggatccaaagtcgtagaagttgggttgactttgaatacgaagaaacaaattggcggctttttaaagaacctaaacctgggtaaatattag

SEQ ID NO: 3004 - DNA, 1134 bp, Saccharomyces pastorianus
atgtcattttctttcggctttacttctaatgattttgatgatgatgaactagtagtccaacctgacgcctcatttgaaccagtacaaaaaaatggaaaaaacgacactcaccccaatccattggattctgggtttttgttgcagcccaatgttgtccagccaaaagtggaaaatctagaaacgttgttacaaggtctcaaggatgtcagattaacttttgaagagtttcaatctccattatataaaatgccattaattagaagagaattatttgacgtcaaacaccaattgatgttagaaacggatactgattccagcaataactcaacggagctggatattttacttggtgatacttctgaagatttgagaaagaacgtttatgaagggggtctgaaatcatgggaatgttcttatgatttagttgatttgatatctgagaagattgacaaaacaataaacaatattgacgcagtcctagaaataggctgtgggaccgcactaccctcagaatttctgttcaaatcagctcttctacgagatgacacatccaacaatttaaagttcattttgtccgattataacgctagtgtattgagattagttactataccgaatttaattataacatgggccaaaacagttttgacaaatgaagaatggagcgctttgcaaaagggcgaaagcgaagacatcccagtaagtagcgaagaattgctcctgtcatccaacctgttaaccgccttttatgacgacgtccaaagaagaaacatcaccattgttcttatatcgggatcgtggggacgcaaatttaacaacttgattcatgaggtgttgttggacagcaaaaaggttctattgttaacctctgaaacaatttatcaacctgataatctgcctgttatcgcagaaacaatactcgacatacacagctcaccacaaactgaagttcaaacttatgtagcagcaaaggatatttattttggtgttggtggcagcattgttgaatttgaaaattatttgaataagaaaatatcttcaggaaacttaccaatccggtctgaaaggtttaaagttaactctggtttgaaaagatcaataatatgcattgagacaaatcaagctatgtattaa

SEQ ID NO: 3005 - DNA, 2094 bp, Saccharomyces pastorianus
atggtgagctcgaaggatatcgatctattcaatctgagagagaacgagcaaatcgtgtctccttgtcttattatccacgggaaatgcaacaagcagaatggtgcgaagactgtgcaggtgcagcatcctcagttacctcctgtgacctaccccatacataaccaattcttcaaggcaacagtactgttgacgcccggcgagaacaagctgacgttcgtcacggacactaatactgctaggactattgtgtgctattacacgccgctgttgcagaaccctcccgtgcatctttgtttgatcttggctaaggactctcctgagcagttcgactctcctcgagagcaaaaggacagagagggtgggaacggtcttcaattggccatcaagaagcttagactcggggcccggctcatgcaggcctacactaacgagcagatgctcaggaacggcatgggcaaccggaccttcccctttgttgaggagtttgcctgggacacgctgttcgaccagcctgggatgagaagcaccatcaaagtgcatgtgattcgctccgagaagacggtgaaggagatccaagaccctgacgtggcccagcagaactccaagggtaagaacacgggcgccctctttggtattgccatggacgcccttaagcactatggtgggccctttaccaacaatgagaagccggttcaagcagcatgtattttcatggacacccactgggatgggaagctgatcaggggtcacgccgccttgggtggcggtgacgacagcatcaagctggctatcttcgggtcccacgggctctattcatggccaagctcccttgagcaactgttgccctacttcaccgatgagacaagggcctctgtcagcgaagtggccaatgattgtaacgagtgtggcacctactgggagtgtttgaccatcactttgggggcgttcatgcacgaaattggccacctgttgggctgcccccacgaggaaagcggtgtcatgctaagaggctataccaccttgaacaggtctttcctgactaaagaggcattctcggtaagaacaaaatccaacggtgccagcccacccattttccccaaggaggagtgcacatggcaccgtctcgatacgctgaggttcttgtaccatccctcttttacattgccacaggatttctatgatccatcgtttatgagacctacgaagcttggcgggttccccaatacaaaacattcagtttacccaatggggaatggcacctgtcgtatcttgtccccgacgagtatttatctgattgagatcatatgtgatgacttgtgcaagggtcatattgagtatttacccacctctttaggtggaccaggtcctcaacgggaagtggtggtcactttgcaagatctacgtggcagattgcccaagaacgaacttgccaaattcggtgatacttttaaactaaaaatccactctgttaacgcaccggagattgagtttgataagttcccatcattggtgaacattcagccattggacatgtccaaatacgggtttgccaagaacgttcaaggtattaaatcaccattgtacggttgcagtgataggggcgccgatgctggagttatagcctttgatgtaagattagtcactgctgtgagaatataccacggttacgcactagatggtgtaagattctatttcaaagataagcacatatcatccaaggaatctcccgttgctaaaccatctgtaccaccaagaaattacttctcaaaaattacgcagactgtcaaaaatcaaatttcaatagatgatgaacacttgaaaagtgtactgtttggacatgaaactcaaaacttcacagatgctactttagagcctggtgaaataatcactggatttaacgtaagatgtggagcttggatcgatgccattcaaatgataacaagtcatggtagaatgaccgatatgttcggtaataaaaatggtggtggtttagctgaattgcaaccaccgaatggtcaatatattttgggtgtcataggtagagtcggtcaatgggttgatgcctttgggatcgtatatggatctttggagtaa

SEQ ID NO: 3006 - DNA, 1287 bp, Saccharomyces pastorianus
atgagtgactctacggaatccaagaagcaaccaagaaggagatttattggcaaaaagtctgttggtgggaattccgataaactaaccacggttgctgaaaatggtaatgaaattgtccataagcaaaagagtagaatctccttggctaggagtatcaaccatgtgtctgatgatattttaaacgacaaagatctaaatgaagccgtcaaattattacctttcaactacaactttgaaattcacaaaactgtgtggaacatcagaaaacataatgccaagagaatagcactgcaaatgcccgaggggttacttatttactcattaattattagtgacattctagaacagttttgtggcgtagagactctagtaatgggggatgtttcctatggtgcatgttgtatcgatgattttactgcgagagcgttggactgtgattttattgtgcattatgcccattcgtgtttagtgcctattgacatcacaaagatcaaagtattatatgtgttcgttacaataaacattcaagaagaccacatcattaaaacattacagaaaaattttcccaaaggatccaggattgccacatttggtactattcaatttaatcctgcggtacatagcgtgagagataaactacttaatgatgaaaatcatatactgtacattattcctcctcaaattaagcctttgtcaaggggtgaagtgttgggttgtacctcagaaagattagataaggaacaatacgatgctatggttttcattggtgacggtagattccatttagagtcttcaatgattcataatccagaaatcccagcgtttaagtacgacccatacaatagaaagtttactagggaaggatacgaccagaagcaactggtggaaattagatcagatgctatcaatactgcccagaaggggaaggtattcggcctaattcttggtgcattaggtagacaaggtaacctgaacactgtaaacaatttggagaaaaacttgattgcggcaggtaaaaccgtggtgaagattatccttagcgaagtttttccacaaaaattggccatgtttgatcaaatcgatgtttttgttcaagttgcatgtcctagattatccatcgattgggggtatgccttcaataaaccactattaacaccatatgaggctagtgttttattgaaaagggatgttatgtttagcgaaaagtattatccaatggactactatgaagctaaagggtatggacgtggtgaaaccccgaagcatgcaattgaatattctaattag

SEQ ID NO: 3007 - DNA, 468 bp, Saccharomyces pastorianus
atggatagagcaagagcactgcacggttacaggggactcataagagcgatcctcaaatacgaaaggccgagcaatgtggccaattgggagactttgcgaaagacaatgattacgaaattggagtatttcaagaagcaaaatccgaaaatctcacacgaggataccgacaagcaactagcaagctggaagaaactagaccctgtgaatgacagatctttgaacttgtatgtatccgactctaaacagctgcgttctatactacaaaacgatataaagtgggatgagaaaatcgcccagggccagaatgttgacgagatgttcgagcacactttcgacattatcagattcttggacaaccaaagagagtaccaagaactggtggataggtacaaccccggcaacaagttgacgcaggacgagaaggtcaaaagaaccgcaaacatcgtcgggttggacgttccggcatag

SEQ ID NO: 3008 - DNA, 1356 bp, Saccharomyces pastorianus
atgttttatggtgccaagggccctctactaattgaacgtataggccatctactctctacaaattacggcagtagggaagaaagaagacaatgggccatccaaggcataaactatttgcaaggaatccagtacacgaattctccctatataggtcttttaataaaagagagcggattaagacttccagatcaacttaaaagccaactagtaggtaaaccgcatttttcattgcttggtggattcgatgagagtactgcgcaagacttaatttcacataattttagtaatgctatatttcaaatggagtcaaaagaggttcccttgagtaaacaataccagcacttagagaaaattactcaaatatatttattatgccggaatttcaaaggcattgaagaaattgaatataatttgaaaagcttcactaatagccacgagaataatgataacttaaaattcgcccataatgagaagacgacaatggtaaaagaccgaaataatcacgatattgctcaagaaaatcttttttcacttataaggatacaactgatgttctgcgtttcatattttttacaggaaaggtactttgactgttgcacgaaattctttctaataataaattcagaacccctgacgttgaaagtcctttcagaatatgtagacagcatggagtttatttccaaagaggagtttctaatgatgattaatatttccgtgctcatttccattccgttggacaattatgacgattttatttatttaaacgatataaagccgttcttccaaatgacaccagtcctaatcaaatgtctcgaattattgatcaatacaaactttaatcagtttttccaagtatggcatggtgaaataaatagggtttgtatggaaagcttttttctagaacctagctggtcatcttccgctgctattataatgagatgcaagatttatttcttttatttgagaatttctagaagactacagtttagttatttatcatccacattaggtattgatctggaggatattaaagaagaactaactaatctgatagtgtcgggacagctaaatttcgaaattgatgatgacgtgatacactttgaggatagctcaatcctgcaaagtattatcaacgagattggaaaaaacggcaccataatcaacaaggccataggtgagctgaaaaatgaaaacatggatttgaaagacattattcaaagtaatcccgtacaatatagttgtacaaacaatgcaataaatgctatcaataatgaaagcagtgaagatatggatatagatgaaattatcgatacaagtgatatcagcaatacagaagacggtttatttggaaactga

SEQ ID NO: 3009 - DNA, 2415 bp, Saccharomyces pastorianus
atgtcttccgatccattgaaacaagtttgcgatctaataaagggagacctatcccttgaaagggtacgagatatcaaagaacaattactgaaggagaaatctgttgtagaatatcaattgaataaagaatcagataaatattatggtgaagtcgaagaatctcttaaactactaaatttgtccaaaagctcggtcacttcaataaaacaacagattaatgaggttaacagattaggtaatgacaaccgctttgcaattaatcgttatgatatacttttccaagccacaaaactttatgaaacaatcaataccacatcttcaatatatgaccggatatgtaacttcgttgcattgatggaccatatagaaagactattggtgacagaactggcggaggatgccctagagactggctgtcctcatcttttagaaattcactttctgttaacctcagcacgagacttccaagaacaaattactgtgatggctaaagaagctactgaggatgcacaacgtacagtcatgaagctgttttcgagactttctggaataatatctaagtttgataagttgctggatggactgacttatgatattgtagaaatggccagggcaggacaaatatcgttagcaatccgcctttttaaaatatacgacctagaagagagagaagacttgagaattgaagccattagaaacattatcaagaaaaaagaaatcgaaattgaaaaatctatgataaaaaaacttccaaatagtaaaaacactgcaagattacaagaggagaaacctacaattatagaatatccgacaaataagggattatatcaagaaataatgagcgggacaatttcgacaaggactgctgctcgcggttacaagcactttttgatgaatggtataaataattcgatttctgaaatgttcggagaaatgaaagagaaatatgttggcgatcaaaaatttgatgtccttgacaacatggactgggtttttaacgaattgattattgtaaaagaacatattgccaattgttgtccaccacattggaacatattcgatgtatactttaaccagtactataaggaattacattctttaattacagaccttgtggagtccgaaccagaaaccattatcatcctcgacattttggattttgataagacgtttcaaaacaccctcaagactgattttggtttcaccaagaacgacatcaaatctgttattggtgatgaagaaaaagaaacattattcaaggattatttgaacttgattgttgttaagatgactgaatggatcggtaacttggagaaagcagaatttgacgtgttcttggaaagaagcaccccaccacactccgattcagatggattgcttttccttgatgggaccaagacttgtttccaaatgtttacacaacaagtggaagtagcagcaggtagtaagcaggctaaaattcttgttggtgtggttgaaagattcagtaatttattaacgaagagacagaaaaattggactgtcaagataagtggagaaataaaaaaacaaatcaattacaatcacaaatatgatatagacccggagggtataactccggaagatgagtgtgcaggaggcttagtggagtatctgattgcagtatcaaacgatcaaatgaaagctgcggactacgccgttgccatttcatctaaatacggtaaacttgtttctaaagtttacgaaaagcaaattacaaatcacctagagggcactttagatggatttgccgaagttgctcaatgcagttctttaggcttgatcacattaatgttcgatgatttgagaaagccataccaagaaattttcagtaagaattggtatgtggggagccaagcacaacagatagcagacacactcgatgagtatttattggacattaaaccacaaatgagctctgtgttatttgtcaatttcatagataatgttattggtgaaacgatcacaaaattcttgagtgcgttatcatttgagcattctttcaaaagtaaaaacaataaatttttggaagcaatgaagagggatttcgaaatattttatcaactatttgttaaagttctggatgctaatgagagcaaagatgttttgatcacacaaaattttactgtgatggagtttttcatggatctaagctgtgaaccagtagataacatattggatatttggcagaaataccttgaagtatattgggattcacgtatagatttgcttgtaggaatactaaagtgcagaaaggacgtaggtagctcagaaagaaaaaagatcgttcaaaaagccacagaaatgttacaagaataccgtcgcaatatggaagtcaatggtgtggatcgggaaccaactttgatgagacggtttgcgttggaattcgagaattaa

SEQ ID NO: 3010 - DNA, 1872 bp, Saccharomyces pastorianus
atgacttctgaatcacactacagtgccaagtcggctgcctctgccaatgcctttgttgccggtgctgcgaatgaaaatacgaaggcaggtgcaaacgcaaacgcaaacgctgctccaaagaaaaaagtctactctcaggcaaaaggcatttccatacgaatcgataatctccctccgggcaagacgtgggcccaagtcaagtacctgattggtggggtcatataccatacttacatcctgcaggtgaaaatgctgcccccaatgacttccatgatccctcccttcgtcactttccagagctgcattgtcattctgaaaagctccatagacaaagagtccctggaaaacctgctgctcactttgaacacctatcaatgggactatcacgacttgtttgtgtatctcttgccgtacgcaaacgattccatgccgctgcgatattcagaagcgagtgataacgatctcgatagcgccaatgaggacatgaacagatcggtatcaccccggttcaaaaatcacgtctcatccgtcactccgcaaccattcgattccgccccgtcttctcagtatttcaatttctcacccgaactgggcctgcagatgaatgaaaatggtacgcctcttcccacgccaatgtcggtgcccgttagtgtgctaccacccccacctcatggccccttcccaacctcaatgctgcccatcttgggcgctccgccaggtgcccttccaaatatgcaaatgccctaccaagccacactgcctccatcaactgctgctgcttctggcccattgggctctccctcgcactatcctcgacgtcggcatttctaccaccagaaccaaagccagtttcaaaaatacatgcaaaataactccagaaatttgggaactggcacaggcccccaccccccacatcagcaccatctctcctcaagaaacaacaagataaacccatcctataatgaaatatctgcgctatacaacttgaacatggcatcgaatcccagtaccattaccggttctaacgcaaatacgaatggcgaagaccgtgttcttgaaattgaaggcggtggagcgattccgtcgtcacagactcaaatcaaccataaaagactaaagcacatcttcaatgagaaaagcttcagaaagcaaatgaccaatagaggtatgtggcagttgaaaatcttggacttcccacctttcatacctatagaactggtggagaggatatctgattcagcctttactgaattgttggatcaagggaaatacactgttattgagatcagggaaaagggccaattagagaaatttgggagactaagatggactgttctaaaagattttattaagctaaaatgcccgaagctactgcagttgcaagaaaggcaatttctgcaacaacagcggaacgacgtttctttgctcaatgagtcgatagacgcattgaagatatcagaaaatgagaacgccggtaagaatatgaataacggtacatacgcgaatggcgggtctcggtcatcgataaataacacaagagagttttacgtgggggtttatgaggaccatgaagagtcaactctgttaaaattcgaactaccgaacgacgagttggtggaatttaacaaacacgtgcagaatatctcaacgctgggtgaagacacttctgagttggaagataacaaccatgccaaatacttcagggtcagcgcaattgtgcacaacgcgatcgtcgggttccacgataaggaactgtccgacttgacattcgaatccttgcaagatcaagaatactcattgggatataagattcatgtaatggaactgccgccatttgacgaggatgatttcgaggatcagcagcaatactag

SEQ ID NO: 3011 - DNA, 3198 bp, Saccharomyces pastorianus
atgtctgccagaaaacgcaagtttaacagtctcaaaccgctagacactttgaatagccctcgcgctcgatctccaaggccctctgcttctttgccccccaagcggtacaacactttccgtaaagatcccaagatagtcgatcatcttaataatgcctccaccaaggatttcttacccattctacacaccagcactgaaaacaggaggcaggtcgaactgtccgacaacgacgaaggtaacagtgggccttcagaccgggagttcgagcctttggaaagctctcccttgaaaaggcactcggcgctcaaaagcacttcgaatggtcttttatttcagatgtcaaatagtattaatgacgccgccgcagcagcagcaacaacaacagcaacaacaacaatcctttctgaaagtgactccattgtttctacaaaactaaacctaaacggccagttttcttgtattgattcgaatacatttcaaatctaccggcataaatctccatgcataatgactttcatttcggatcataaccatcccagattttctttatatttccaacaattgctcatcaagaactcacagatcaaccttcttgaagatacgaagttgatcattctagatcaaaaaaactctttaatggctgtgattctaaaggattcaaaaaaaattaatatgacattgaatgtaaataattcttcagtcaatatcaacacgagagtcttgatatggtccaacactagctccaattcgaataaaagaataaaatccattaagaggtttttgttagcgtcttatgcctcgacaataaacgttcaaattttagataataaagaacagattctagaacggctaaatggtttagcgcactcgacctcttcatctccaccgccttctccgccttcatcaaacatggaaagggcaatcaattccaccaaaagtgcattcgattcgctaaggctcaaaaaacccaaattctcgaacaatgatgatgaccatccgcagactcacacgcgtttcttatcgaacaaaccccatggtttacaatccctaacaaaacgggcgcgtgtcacgaatgttgctagcaaagatcattccatatctataccaaaatcgaatatttcgcccctagatttttacaacagtggttcagcgaatacgttgcaatcacatacggtttctcaattaagacgatctaatagaattaaagatgttttgcagtcggactcaaattcaaactcaaacacagaaatcgacgatactattgcagaatttgaaactccagagccatttaagcctaatctttgctataagttcaatgatggttcaagttacactataacaaaccaagatttcaagtgtcttttcaacaatgactggatcaatgatagtatcttggatttcttcactaaactttacattgaatcgtccatagaaaattcaatcatcaagcgagaacaagtttatttaatgtcttcttttttttacacgaaactagtaagtaatccagcagattattattccaacgtgaaaaaatgggttaataataccgatctgttttctaaaaaatatgttgtcattccaattaatataagttgtcattggttcagttgcattgtgactaatttggacgcgatcttagatttccatcaaaataaagataaaaacgaagccatcaattcggacgaaatttcgatcaataacccactggttaatatcctgactttcgattctttaagacaaacccattcaagagaaattgatccaataaaggaatttcttatatcatatgcatttgataaatactcaattcaattagataaaactcaaatcaagatgaaaacctgcccagtcccacaacaacccaatatgagtgattgtggtgtgcatgttattttgaatatcaaaaaatttttcgagaaccctatggaaacaattgacatctggaaaaattcaaagattaaaagcaaacatttcaccgcaaaactaatcaacaaatactttaataaaagtgaaagaggtaatgcaaggaaagacttgagacatactctaaagctgttgcaattgaactacataggatatttgaaacgtgagaacctgtatgatgaaactatgaaaaatgaggagaaaaaatcctctaataccgataatgatgacgatgacgatgaagaaattcaaattattgagaatataaatcagcaatccagtaaggaaaataacgctcagttaacatcaaaagctcccagtcccgaggctacccaatcaccgccaccgggtgtaaacaatcccaccactaaaacggaagcgacgaatctgacaagatcggaaaatgtagttgaccaggaaatggaaccgcaatcaacaggcgaaataatatccgatggggaaggctctgtgcccgctgctagggaaaccccatcggtttctcctatcatccgccataatattctacaaagttcgtcaccttcgatgcctgaaagtgcaagtaaagcggaacaagaagagtttacatcaccctactttggaaggccttctttaaagacaagagcaaagcagtttgaagggatttcgtcgccaataaggaccggtcaagctcagtcatccatccacgatgtaactataccatcgcctcgaccaaaaaggatttacccaagcaaaaaaaccccaacattgtcaccgtatattcaaaccctctccgcagattctgcggatcgtccttctgaaatttacaatggcaatattatcatctcagatacagaacaagatttggaaactggactaaatttccagaacaatgatactagtaatattactaataaggatgactcagacgtgaatctgattgtcggtttgttgccaactacttcagagaaaattgccgataatagcaatcaagatagtaatggtaataacgacagtcttggaaaaatattgcagaacgttgataaagaactaaacgaaagattggttgacattgatgacatggcatataataaacccaccggggatctttcaagagctagcaaaaggagaaaggaaccaagtccacaacttcttctggattatgaaaatgacagtagtaacgaggaagtgatggtgcacataagcgagcgaaatgataatgacagcaataatcgatccccgaatagtgttcaggatgaaagaggagagacccatatactcttagaagacgacgcttaa

SEQ ID NO: 3012 - DNA, 786 bp, Saccharomyces pastorianus
atgacaagatttattgggtgtatagatttgcataacggggaagttaaacaaattgtgggtggcacgctgactagtaaagaggaagacactccaaagacgaactttgtatcccaacatccgtcttcgtattatgccaaactttataaaaatcacgacgttcaagggtgccatgtaattaagctgggccccaacaatgacaacgctgcacgcgaggcccttcaggaatcaccactatttttacaagtaggtggggggattaacgatacaaactgcttggaatggttacagtgggctagtaaagtaattgtcaccagttggctctttaccaaagagggcagtttccaattgaagcggttgaaaacgatggcaaaactatgtggcaaagaccgtattgttgtagatttaagttgtaggaagacgcaagatgggcgttggattgtcgcgatgaacaagtggcagaccttgactgacctcgagcttaacgcggaaacgtttcgagaactaaaagagtacacaaatgagtttctgattcacgccgccgatgttgaaggtttgtgcggtggtattgatgagcaactggtatctaaattatatgaatggaccaagaattacgacgacttgaaaattgtttatgccggcggagccaaaagcattgatgatttgagattggttgatgaattaagccacggtaaagtcgatttgacgtttggtagttccttggatatatttggtgggaacttggtcaaattcgaagactgctgtaaatggaatggagtgcaaaattag

SEQ ID NO: 3013 - DNA, 753 bp, Saccharomyces pastorianus
atgtcccaagaagaaaaagtcacttccaacacaacctcaagggctgagacgtcgaacaataaaaaaagcaacaaacaagaacttgaggtagatgagctcgtagggaaactgtctattgaaggtgccccccaggtctcacaaaagttaagcaaagaagagaaacacgcttatcaacttgaagctgattcccgttccatcttcgtaggcaacattacgctagatgttaccccggaacaaatagaagagctcttccaagattgtggtataataaaaaggataacactactctacgataggaatacgggtgcaccaaaaggttacggatatattgagttcgaaagtccagcatatcgagaaaaggctctccagttaaatggagcagaactaaagggtaaaaaaattgctgtatacagaaaaagaactaacattccaggatttaataggaactacaacacacaaaaccaatactttcaacaatggcaatggaactatcctttaatggcctatccgaatcccgacacattcccttattatccacagtatcctccaaaccaatctcctaatcagaattttggatataataagaatggatattatagaggcctatataccaataaaaacagaaatcatcaaaaaaagaataccagtagtgcaaaagattcttataagattagcagaccttcttcccaaaaatccgtcattattccaatgggtaatagtaaaaatatctcccgggatgaagttccagaatga

SEQ ID NO: 3014 - DNA, 1299 bp, Saccharomyces pastorianus
atgatggagccccaagaagagtttattaccaccgaagaagttgagcaagagattgtgccctctgtggaggcggaacaggacgctcctatggacattgaagaggagagtgacgatgatgcgatgggtaacgaagatgaggaggacaatttggaggtcgatatgtccaacaactcgcacacatacttcgacaagcacacggactctgtgttttctattggccaccatcccagcctgccgctagtctgcaccggtgggggtgacaatctggcacatctttggacatcgcactcacaaccaccaaaatttgccggtacgttgaccagttacggtgaatcggtgatctcgtgttcgttcacttgtgaggggagtttcttagtcactgctgatatgtccgggaaagttctcgtgcacatgagccaaaaaggcggcgcacaatggaaactagcgtcacaaatgcaggaagtcgaagagattgtttggttgaaagcccaccctaccatagcaagaacgtttgcattcggtgctacggatgggtccgtttggtgctaccaaatcaacgaacaagacggttctttggaacagttgatgtctggtttcgtacaccaagaagattgctccatgggtgagtttattaatattgacaagggtgaaaacaccttagagttagtaacttgttccttggatagcatcattgttgcatggaactgtttcactggacaacaattgttcaagatcacacaggcggagatcaaagggctgaatgctccatggatttccttatcattggcccccaccacattaaccaagggtaactcgggcgttgtagcatgtgggtccaataatggtcttttggcggtgatcaactgtaatagtaacggtgccgttttacaattgtccacagtgattgaattgaagccagaacaggacgaattagacgcctctatcgaatccattacatggtcgtcaaaattctcgctaatggccattggtcttgtctgcggtgaaattcttctatatgatacaagctcgtggagagtaagacacaaatttatcctggatgactctgttacaaaactaatgtttgacaacgatgatttatttgtgtcatctattaacggtaaagtctaccagttcaacgcaaggaccggtcaagaaaaattcgcctgtgtgggacatggtatgggggttcttgattttatagtattacatcctgctgccgacgccggtgctgaagaaaagaggaaaataataactgcaggtgatgagggtgtatcgttggtgtttgaagtgccaaactga

SEQ ID NO: 3015 - DNA, 432 bp, Saccharomyces pastorianus
atgggtaagaaagcgcaaacaggaaaggcgaagccaaagatcgacgacaatggcgttttgatagtgccaccaccgagaaccattgcgaaccaggatcatttccacagactcaactacctctaccaactatccgcgtaccagacaaagccgagagcgggcgccgtaaaggggcacacgcccttggcgcgcaactacatcaagtcgatggacttgatcagcaaaaagaccaagacctcgctgctgcccacactaaaaagaaccatctgcaaaagatgccatcggctgttatgggcgcccaagcggctggagatcacgcgcgacggcgcgctcgcggtggtgtgcgggtgcggcgccgtgaaacgctacaacgtcgcggccgacgccgactacaagacgtactccgagcgggagggtaacctcatcaacccgtag

SEQ ID NO: 3016 - DNA, 1089 bp, Saccharomyces pastorianus
atgacagaaaacgcagcaccaattgaggaagaagtcgttaggatactggggggtatataccttggtgggatccgccccattgtcgaccacagaccattaggtgcagacttcaacatcactcatatcctttccgttacaaggttccaagtaattcctgagtacctgataaggaagggctacacgctaaagaatatacccatcgatgacgacgacgtgacggacgtgctacagtattttgacgagactaaccgattcatcgatcaatgtttgtttccgaatgaaatcgagtattcgcccaagttagtagactttaaaaagaagccacagcgtggtgccgttttcgctcattgtcaagcagggatttcgaggtccgtgactttcatagtagcgtacctgatgtaccgttacgggttgaaactatcgatggccctgcatgctgttaagcggaagaaggcaaacgtggagccaaatgaaaattttatggaacaattagaactgttcgagcacatgggtggggatttcgttgatttcgacaatcctgcctataagcaatggaaattgaagcagtctatcaagttggacccatccggtaatgaattggtatccaacgctgatatgttcaaagactcagaatcatctcaagacctagataaattgactgaagctgagaaaagcaaagtcaccgctgtgagatgtaagaactgcagaaccaaattggcactatccacatctttcattgcgcacgatccgccgagtaaggaatcatcagagggacatttcattaagagagcagccaattctcaccgtattatcgatattcaagaatcacaagcaaactgttcgcatttcttcattgaaccgttaaagtggatgcaacctgaattgcagggcaaacaagagttagaaggtaaattttcgtgtccaggctgttctaggaaagtaggtgggtataattggaagggctctaggtgcagttgtggtaaatgggtcattcctgctatccacttgcaaactagtaaagtagatcaatttcccctgcagtccactgtcttgcctaacatggttaattttgaatccgaaaaaaaataa

SEQ ID NO: 3017 - DNA, 738 bp, Saccharomyces pastorianus
atgacagaagcaaatatacttgttgtcaatcctaatagttcgaaatcaatgacggcttccttacaggaagccatcgaaaagacatttccaagaaaatcgtataaggtcagctattttacagggccggatacttccccatcacagattgacggttgggagacaagcatgcagagtatggaggcctgtcttcctctcctggttggcgacaaaggatcaaaatataactatcggaagtttgatggggtattaattgcctgtttctctgatcatcctttggtaaccaagataaaggatgcggcggctgtagaaaaatccgatactccgattgttggtttgttagatagcagtatccagtattgcaatttgatcggaaagaagttttccatcattacctcaaataaagagtggatccccatattgaatgactctgtagaatcaaaatttttgactggaaacacaatcaatcgaaatctgtggaaggggacggtgtcaactgatttacaagtgctcgatctgcatagtccggagaatttccagcaaattgcagatgttataggaagggaaaatattgaaaagcttggttccgagattgtaatattaggttgcgcagggttttcaggattacaaattaaactagcaaaacgttttgagaaggacggtatatttttcttggataccattggaataggcttagaaattttgatcacaatgataaagtttatcaactctcaaaaataa

SEQ ID NO: 3018 - DNA, 792 bp, Saccharomyces pastorianus
atgggcaaagtcattttagttactggtgtgtcccgtgggataggcctgcaattggtgaagactatgttcgaaagggacgccggatgcgtcatatacggtgtagcaagaacagaggctagtctgcaagccttgcagaaggagtatggcgcagacaggttcctgtaccgcgcctgtgatatcacagacaggtctcaagtgcaggctctggtggaagagatccggagcaagcacggccggttagacagcgtcatcgcgaatgccggaatactggaaccggtgaaggccgttacgcagtccagcaccgagcacgacatggagcggtggaaacggctgttcgatgtgaacttcttcagcgtcgtggccctggtgacgttgtgcctgccgctgttgaagacctcgccgctcgtgggcaacatcgtctttgttggctctggagccagtgtgaagccatacaacgggtggtccgcatacggctgttccaaggctgcactgaaccactttaccatggacatcgccagcgaggagcccagcgaccaagttcgcagcatctgcgttgcgccgggcgtcgtggacacgcaaatgcaaagggacatcagggaaaccctgggcccacagggcatgtcgcccgagggcctggagaggttcacccggttgtacaagacctcgtcgctgctggaccctgtggtgcctgcggcagtgctggcccagctagccctggaaggaatttccgatgctctgaacggccagtatctccgctacaacgacgaccgattgggccctgtacaagcctag

SEQ ID NO: 3019 - DNA, 708 bp, Saccharomyces pastorianus
atgatgtcgttgcctattatcagagttcattggttggaccaatccagagcattcagactcttgtggttattagaccatctaaaacttgaatacgaaatcgttccttataagagagatgcaaactttcgtgctcctccagaattaaagaaaatccatccattagggagatcaccattgttggaggttgaagacagggaaactggtaagaaaaaggtgcttgccgagtccggtttcattttccagtacgttttgcagcatttcgaccactctcacgttttaatgagcggagattctgatattgccgatcaagtcaattactatttgttttacggtgaaggttcgttgcagccacctttgatgatcgagttcgttctgtcaaaggtcaaggattccggtatgcctttccctatttcatacttggcaggaaaggtggcagacaagattagccaggcctattctggcggtgagttgaagaatcaactagactttctagagggtgaaatcaaaaagaacaacggctacttggccgacggaaaactgagcggtgctgatattctaatttctttccccttgcaaatggcatttgagagaaagtttgccaaagctgaggactatcccgttattgcaaagtggctggaaaccataacatcagaggactcgtatgccgtttccaaggagaaggctcgcgctttaggcagcaagttctaa

SEQ ID NO: 3020 - DNA, 987 bp, Saccharomyces pastorianus
atgagtagtaggatattattgtctggtttggtaggattaggtgccggtacgggcttaacataccttcttttaaacaaacgttctccagggcaaattgttgaaacaccgttcccggtcaccgaaaagccaaatggtaaggtccaacctcattcattcaacatcaatcctgccggattcttcaagtatggatttccgggccccattcatgatctacaaaaccgcgaagaattcatttcgtgctacaacagacaaactcaaaatccatattgggtcttagaacatatcactccagaatccttagctgcaaggaacgctgacagaaagaactcctttttcagagaagatgaaatcattccagaaaaatttagaggtaaattgaaagactattttaggtcagggtacgatcgtggccatcaagcgccagctgctgacgcaaaattttctcagcaagctatggatgacactttttatttatctaatatgtgtcctcaagtaggagctggcttcaatagggactactgggcgcatttggagtatttttgcaggggattgaccaagaactatcggagtgtaagaatcgttacgggcccgttatatctgccaaaaaaagatcctgttgagaacaaatttaaagtcagttatgaagtgattggcaacccacccagcattgctgttccaacgcatttttttaaattaattgttgccgagtcaccaacaaacaatcctactagagacgatattgctgtcgctgcgtttgtattaccaaacgaaccgatatccaatgaaacaaaattgactgattttgaagttcctctagacgcgcttgaaagaagcactgggttagaatttttgcagaatgtaccattgccaaagaaaaaggcgttatgcgaagaagtgaattgtcaaatcgtggtgagagacttttcgaacgctgcgatcaaacaatcaaatggtgtgaaattattgcctcctccaaagaagagctga

SEQ ID NO: 3021 - DNA, 2661 bp, Saccharomyces pastorianus
atgagattttcacatttcttgaaatataacgctgtgccggaatggcagagccattatatggactacagtgacctgaaaaaccttatttatacactgcagacagatgagcttcaagctggtgataacgaagacgggttatctggggctggtaagagccccaccattgctggtaggttcaaaaataagttctcgttcaaaaatggcaaggaggatgctccctccggcatcaacaaagatgcgggcatcgtagaggaaaccatcgaactgcgggagctgcccaaggtgcccacgagtggtgccaaatcttcgggacccttcaggaggatgaaggagaagatattcgacaagagaaggtcttcctctgtgtcctctgcctcttccaccactaacgaaacgccggaattggacacctaccacacgttcgttactgatttaacaggggagaagctaaaagtggacgatttctataagaggactgaagcaaagttctacgagaaatttgacgccttggtgaaggacctgaagaaaatcggcgtgatagaatatgatgtcgacgaagacactctcttcagcgaaccggccgcaaacggaaacgcaaacgaagagctttctccacaggacctggatgacgatgaagaagacgacgacgagttctacgataaccaatccaacaccgaggacaacactgcattgttgcaccattcgcaatataacatcaagtctcagaagagatctctgttgaagaagtccatcgtgaacctgtacatcgatctgtgccaactgaagtcgttcatcgagttgaaccgtattgggtttgctaaaatcaccaagaaatcagacaaggttcttcgtttgaacacaagggtggagctaatcgaatctgagcagttcttcaaagatgcgtacgcattccaagcagacactcttgcaacattgaactccaagatatctgaactggttactttctatgccgccatcacggatcaaccccacaacattcctcacagcaagcaagaactgaagtcctacttgcacgaccacatcgtttgggaaagaagtaatacctggaaggacatgttgggcctactgtctcaaacggacgaattgacgccgaaagaaaaggagtacaacgcaatcaagctggtgggcaagctggatctggaatactacagatggccgctccctaaaccgataaacctgaaatttaccaccataaacaacttcacaatacctaaattatttttcaccaggaaagcgtacaaaatttacttcatcatcctggttacgggacttctcttgggtataaagaccttcaatgaccctgctcaacaccgttgtatggcccttgtcgagtgtgttgctttcctgtgggctagtgaagccatcccactacacatcactgcattcctcgtgccactactggcggttcttttcaaggtcttaaagacctccgacggctctatcatgggtgctgctagcgcgtcatccgaaattctggctgccatgtggtcctctactattatgattttgttggccggtttcactctgggtgaagttcttgcacaatataatatcgccaaagttctcgcctcatggttattggcctttgccggctgtaaaccaagaaatgttcttctcatggcaatgtgtgttgtgttcttcttatcaatgtggatttccaacgtcgctgccccagttcttacgtactcattgctatcgcccttgttggacactatggatgccgatagcccattcgcccaggcattggtcctaggtgtagcattaggtgctaacattggtggtatggcttctccaatttcgtcaccacagaatatcatctccatggcatacttgaaaccctacggtattggctggggtcaattcttcgctgttgcgttgccatcgggaatattagccatgcttttggcttggatcttactgtttacgtctttcaaaatgaataagaccaaattggaaaagtttgagccgataaggacaaaattcaccattaaacaatactacattatcgctgtcaccgtcgctaccatcctgctatggtgtgtggaaagccagattgaaggcgcgtttggatcttcaggtcaaattgccatcatcccgattgttttgttttttggtactgggttactatccacacaagatttgaatgctttcccatggtcaattgtcattttagcaatgggaggcattgctttggggaaagccgtctcatcgtcagggttattgtctactattgcaagagcattacaaaagaaaattgagaatgatggtgtttttgcaattttatgtatttttggtatcttgatgttagtcgtgggtacctttgtttcacatacagtctccgctatcatcatcattccattagtaaaagaagtcggagataagcttgataatcccaaggctgcccctatcctggtctttggctgtgcattattgtcatcttgcggtatggggttagcgtcttccggattccctaacgttaccgccatttctaaagtggataggaagggtgaccgatatttaagtgtcatgacgttcttgacaagaggtgtcccagcttcaattttggccttcctgtgtattattacgcttggttatggtatcatggcatctgtccttaagggtaccgctacctctggataa

SEQ ID NO: 3022 - DNA, 1542 bp, Saccharomyces pastorianus
atgtcagttatgcccataaccccaacgaagcgcattaggagaactctgtttgacgatgtcccagcaacacctccaaggcctctgaagaagaagagattgctcttcacaagtatcacacctgagtcctctccagaaaaactacagttcggtcctcaatctatcttcctaaggacgaaggcacttctgcagaaatcatcagagttggtaaccttgaataacaatggcggtgctttaccagcaagaaccaaggaatatgagcatgtgatgaaatttttgtccgaatctatctctgagcacaaatctgattcgctatacatcacagggccaccaggcaccggcaaaactgcccagatggacatgattataagacagaagttccaatcattaccactgtcactatcaatgtcaagttcggcccacccaccaaggcacacgaacccgcacttgcagaacctgtcttggtttgaattgcctgatggtagactggagtctgtggcggtgaccagtattaactgtatatcactaagcgatccgtcttccattttccaaaagatttttgattctttccaagatttgaatggccccactttgcaaatcaaaaacatgcaccaattacaaagatttttagagccttaccataagaggaccaccttcgtggtagtgctagatgaaatggatagactattgcattccaacacgaatgagactcaatcagttagaacaattcttgagttgtttcttttggcaaaattgcccaccgtgagcttcgtgctgataggtatggctaatagtctggatatgaaagatagatttctttccaggctaaacttgaatagagatctgttgccacaaacgatagttttccaaccatataccgctgagcagatgtatgacattatcattcagaaattaagcagtctacccagcatcatcttccaaccaatggcaattagatttgcagcaaagaaatgcgcaggtaacactggcgacctgaggaagctttttgatgttttaagaggaagcgttgaaatttacgagttggaaaaccgattgctgctctcgtcgatgagcaagtccatgaggtctaagcaggtaccgttaacgccaacgacatcaccagtaaagcaaccatcgtctcaatcacaaggcaaaataggtttgaactatattgccaaagtcttttccaaatttatgaacaataactcgacaagaacgagaattacaaaattgaacattcagcaaaaattaattctttgtactatcatccaatcgcttaggataaacttggacgctacaattgacgaatcgttcgatcattatatcaaagttatcactaagactgacactctagccccgttgcaaagaaatgaatttttagaaatttgtacaattttagaaacatgcggtctagtctccatcaaaaagacgaagtgtaaggggaaaaccaaaagatttgtagataagattgatgtggatctcgatatgcgggagttttacgatgaaatgacaaaaatttcaatcttgaaacctttcctacgctag

SEQ ID NO: 3023 - DNA, 702 bp, Saccharomyces pastorianus
atgttttcccggattgttcttctgttatgcgtactcggatctgtaattaatgctacagtcacaggaaccattaagggcaggttagatttagcagcaaataatatcaccggctttgttttaacaagaacaagttttaaactctatcagatcggtaatttctcaacggaatacccttacacagctactactacctttcaagatgatgaaggtaattttgagtttgtaaacgttcccctaaaccaaggtgttaatgcaaccacatattatgttatgtatccagcatccatggatttcaatttgaaaccgaatagaattcttattgagttccagaacctagaaaatggcacattgcaattgaacgcattcaagaacttttttggaagggagaatttcccatcaaaggatataacgtatccagaaaaactagaatctatgattgtagacccttacattcaagtggaaattttacagaaagcaccaataaggtcgtattttcaagcaaggaatgtcagtatcttttccacaggtatagttggtagcatcttgaattcacgttggaaattggcaggtgtcattacattaatcgcccttgtcattttcccaatcatagtggaaaaactggacccagaaactgcacgagccatcaaagaggaagcaaaaagaaaacaaagagaaaagtatggagctattacttcgagttag

SEQ ID NO: 3024 - DNA, 375 bp, Saccharomyces pastorianus
atggcgttaccgatggcagagtatagtgcaccagacggtgtcaataagagttttgtgccaatacccgacgacccgaggtacttgaccacagagggcagaaccacaggccccagtgaccatgtactgaacgctggacaaattgacagagacaagccctcagaacccaagagggtacagggcggaacacaaatgacgtacttgggtcagctgcgtacgcagctgacgggtctacaggacgacatcaatgagtttttgactgaaaggatggaactagccaagaacaagaagaagaaggcggacgctgacgaaaagcggatacaggaagagatcaaccagctgctggacggtggcgacgccgaggaggaagccgattag

SEQ ID NO: 3025 - DNA, 2211 bp, Saccharomyces pastorianus
atgtcaatgaaccacagtgtaagtgcatcggaagatgaaaaagaggtacccagtgccaatgacaagggccataatactccaaagctatttgatcaggagcctgactctacgaaggaggtcttgaccaaattcgaaaacttggaagattgtatatatgcgaataagaggatcgggacatttaaaaataatgatttcatggagtgtgactgttatgaagaattctctgatggggtcaatcatgcctgtgacgaggattctgactgtatcaacaggctcacgttaatagagtgtgtgaatgacttgtgtttgacttgtggcgataactgtcaaaaccaacggttccagaaaaagcagtatgctccaatagccatattcaaaacaaagaataaaggatatggtgttcgagctgaacaggatatagaggcaaaccagttcatctacgaatataaaggtgaagtgattgaggagatggagttcagagatagattaatagactacgaccaacgtcatttcaagcatttttattttatgatgttgcaaaacggcgaattcattgatgcaacaataaagggttcattagcgagattttgtaaccactcttgtagtcccaacgcatacgtcaataaatgggtcgttaagggtaaactgcgtatgggtatttttgctcaaaggaaaatcctgagaggtgaagaaatcacttttgactataacgtggatcggtatggtgctcaggctcaaaaatgctattgtgaagaaccaaactgtattgggtttcttggtggtaagacacaaactgatgcggcgtcattattacctcaaaacatcgctgatgccttgggggttaccgtttctatggagaaaaaatggttaaaattgaaaaaattgaatggcgagccaatcattaagaatgaaaacgaaaacgtaaatattgaattcctgcaatccttggaaatcaaacctattgatgatcccatggatgtcacgaaaattatgagtgtattgctacagcaagataataaaattattgcgtccaaactattgaacaggcttttcaccattgacgacaattctttgcgccaccaagctatcaagctgcacggttatacgtgttttagtaaaatgatcaagttgtttgaccccaaacaacaacaaaagcaacaagaagatgaatttgacaatgaggaagacgaaaaaagttcaatgatcaaaaaaatcctggacttcttattagaactgcccaaaacaactaaaaatggtatcttgtcatcacaaattggtgataatataacaattttatctgcggaatgtgcagacttaaagccagaatgcgatgaactattagagaaatggtcgaagtttgaaacctataaaagaatcaccaagaaagacattaatgttgcatccagtaaaatgatagatttgagaagaattagattgcccccgggctgggaagtcattcatgaaaatggtcgtccattgtactataatgcagaacaaaaaacaaaactacactaccctcccacagggtcttcaaagacatttagttcaagatcaagaacaccagttgaagccatgagtagtggtggaattgtgaaaaccattaatgcttcagatatcaagaaacacaaactgagtgatgaagagtacgaaagaaaaaaacgcaaaagactcgaatatgaaagaaacgctttagaaagagccaaacaagaagaactagaaaatttgaaacaaaagctaaagctcgaaaatgaaaggaaaagtgtcttggaagatattatagcagaagctaacaagcaaaaggaagcacaaaaggaagaggctaaaaaattagtggaagctaaagaggccaagcgtttgaaaaggaaaacggtctcgcaatctcaacgattggagcacagctggaataaatttttcgcgtctttcgtgccaaatctaataagaaacaatccgcaaagtaagcagtttgatcatgaaaatatcaaacagtgtgctaaagatattgtgaaaatgttaaccacaaaggaattgaaaaaagatttatcgagagcaccacccgatgatttaagcaaagagaaaaagcataaggttaaagaattcataaagtcttatatggacaagataattctcaaaaagaagcaaaaaaaggcatcgatctcggcatcggcatcaattaggatgtcttctcccccaccttcaacatcatcaaactga

SEQ ID NO: 3026 - DNA, 408 bp, Saccharomyces pastorianus
atggatagagaccaccgcgacggagaccgaatgagatattccatcaacaaggacgatttgttgctgatggtgctggccgtgttcatcccaccgctggccgtatggaggaggaagggcgtattcgatagggacacgttactgaacctgctgctgtttctgctgctgttcttcccagccatcatccacgcctgctacgtggtgtatgagaccagtgacgagcgcacctccgagcggtcacgtggccgcgatctagaggcgcaccctcaggaggaactccccgaagaagctcaagcccaggctcaaggccagattcagcccccagcctacgactatggcgacgacgacgaggcccgcgctgacgtgcccctaatggataacaaacaacagctgccatccacccgtgcctag

SEQ ID NO: 3027 - DNA, 891 bp, Saccharomyces pastorianus
atggcaacgaagttcaacagtgacaatgagaagcaggttttcgataagcttaaaaaggcgcttcccgttattatcaaggaaaaatgtgaagggtatgatgaactgtatggctataagttgaattctgagggcctcactccagaagaggttgaaaaatactatgacgaaaagattgcccattgtttgcttcataaactttgtaaagcgtaccaattcgaatacgacaccattgtgcaaaacttggttgatatcttgaaatggagaaaggagttcaatccattgagttgcgcctacaaagaagttcacaacacagagctgcaaagcgttggcgttttgacattcgacgcgaatggtgagactaataagaaagccgtgacttggaacttgtacgggcagttggtcaagaagaaggagctgtttcaagacgtgaataaatttgtgcgttacagaatcggcctcatggagaagggcttgagtttgttagatttcaccagtgaggacaattcttatatgacccaggtccatgactataagggcgtttcgatgtggagaatggactcagacatcaagagctgcagcaagaccgtcattgctattttccagaaatactatccggaactgctgtacgcaaagtattttgtcaacgttcccaccgtgtttggctgggtgtatgacctcatcaagaagttcgttgacgagagcactaggaaaaagtttgtggtgttgactgacggtaagaagctaggccagtacttaaaagactgtcctcaggaagagtacggcgggaaggacaagcaaaacaacttaagcaagcaaaacatcactaacgtccacccaacggcatacggtttgtacatcttgcaaaagcaaattattgaagacgtcgagtaa

SEQ ID NO: 3028 - DNA, 1143 bp, Saccharomyces pastorianus
atgattaagaaagttgctctttgcacgttattatattcacgggggtatttacctggtgccttaactttagcgtaccaattacaaggactcttgagccagactgtagtagaggacgaaataactatatgtctattagttgcaagaacgttgttcgaagatgaatttactccccaggaaatagttttgataagaagcctcttcaaggagatcattatcatagaatcgttagagggtcaagcgaagagcgtcgaaaataacaaggcaaatcttgacttgttgaaaaggccggagctatcttttactttactaaaagccagattatgggaactggtgcagttcgatcaggtgctgtttttggatgcggatactttaccattgaacaaggagttttttaaaattctacagctatatcctgaacaaacgaggttccagatcgctgctgttcccgatatcggatggcccgatatgtttaacaccggtgtcttgctactgattccagatttggaaatggcgaagagcttgcaggattttttggtcaagactgtatcgattgacggggctgatcaaggtattttcaatcaatttttcaaccccgcatgcaattacagcaaggagatcttgcacaaaatatctccgcttatggagtggatacgacttccgttcatctataacgtaacaatgcccaattacggataccagtcctcgcctgcgatgagctttttccagcagcatatcaacctagttcatttcatcggaacgttcaaaccgtggtcacatagtgcattcaaccacgataattattattatcaattatggagggatacagagagggatctacacaacgaacaccacttgagtaattatttcacacgcttgcaactcggcaatctcgaaagggaaacagatttccatcacgaggctccctgcatcaacacgctgctaaggcaaaactcaagggagaatcaaaagcaggttagccctgatgaaacccaggtaggtcctaatgctgcacaaaatatacctatacaagaacacgatcaaaaagtgacaactgctgatactcaaagtgccttcaagtttgagtgggagaatacggactatttgcaccacgtccagagagcgttcccagactccgatatctaa

SEQ ID NO: 3029 - DNA, 2247 bp, Saccharomyces pastorianus
atgactaaatcttggctgcttgtctttatcatctgcttaagtacctcgtttgtaaaaaaattacaggctgccggtgttaccacccatctgttttatttaacaagaggtgctcccctaactttaaaggaaaactactatccttggttgaaagctggttctttcttcccagatgccctatactcgtgcgcaccatccaataaggattggtctgattttgcagaattcactcattggccaaacttcttaataatagctttgtcttattggcagcaaacgtacggtcaaaacgatcaactccgggaatcacatcgttcgctaacgctgaaatcgttcctgataggagtattcactcatcaaatagtcgacacctcttggcattcactagtttccgattatagaacgcacggtttacttcgtgttctcagcgaaactgaatttgattcggatatcgaaactgctcatacatttttagacgtaatgggtgaattcataaccttgaacaatgtgattcgtgataccgccaataacgaaaactggaattacttcacttattcagactgggaactgcctaacaaaaaagatttgacggcaatcattcagaaggcaggactttctaaggaaaaactaacatacccagaattagagttctgcgttaaaaggggcatggcggctgctgtaagtgaaagctacatatttcgctctcaaagacacaagttattaagcaatatttactcgacctcccccagagctaatgatttagtactaaaccattggttggggggagaatccaacctagtggcgatgctgcaaaaatgtgtgcctttctttgagtctttatttcatggtaaaactagtaatgaggcccaaattgaagaattgagactatgttcaaatttaccgccagtctcgcaccgagaggtagaaacttatacttcgatagctcccattgaagtgcggagagagaacaatcatatcgtcgtatcccccatgagatctttctccaagtttggcacaagcttcacattgggaaaatttttaggtgatgatgcaaattatcttgctgtaagtgccccactggaggatacgattggtgcaatctacttggttccatgggaaatagtatctatatcgagcagagaggattttagtgttttgcaaccaatcacagccatgtacggttcaaaggttggcacgtttagcataggcgatgttgattacttggttgtttcggaacctgataggtgcaagattcatttttattttaagcagacaaaaattctaactatggaggaccgcaccactgaagaagccaatcagttgcaaatagctttgacagaagactttgatggagatggaattcccgatttgataatatcaagcacaagctacggaatcaacgaaactggaattgtggcgtttatcccaggatcttcaataattccatatctgataaattcaaataaatatcaaattattgatatttcgactttaaaaggcattgtcagccttgatggatatccttttcaaaacccttttcaacactttggcgcatcagtccagttatccaacacacttaataaacaaaagttaatatacgttacgtgtcagagcttgggtaccgtgtttgtttatttgagcaatgacttacaggattcgtcaaccccaaaatattacataactagagatcgtgtaatctcagcgaataataaggatcgcgtcgatttgggcgtgattccttcaaaagagcatggcatgttcggttcagcgatacattcttggcattttggtggctacgattttgtagccatttctcaacctatgttcgatgccgtctttatatacattgagaactctggtgaagtcaaatttttcttgaagctgactttaaaagttggtacccactcaggaactattcccaatgggtttggtacttccttgttgtttagtaaagaggaaaaggcactgtatctttcatcaccaggaagttttgacgagagaggaagtatatggaaaatcgggatgaacgaactactgaaagctaacgaacattcaaagcgaaagagccttttgatcaacaacttaaagtaccttgtgctcataaaccctgacaaagatagtaaaggtgtgacagattttgggaagagcatgatttttggcccccaagaccatcttgtagtaggcatccctcaatatgggtatggaaatttggaccatatgcaattaaccggcagaatattggtactataa

SEQ ID NO: 3030 - DNA, 1071 bp, Saccharomyces pastorianus
atgctagagcttttattgagaagaggactttttcataggtcgttacctctaggaagtgtgcgttattttcactgtacaaagtactttcacaaagacaatgcatcatccactacagatatatttcgcaatgcaatgaaacgcaaacgtgaactagggggtcttagagagcaaagtcattcgaatggtgctaggaatgtcgcttttcctaaagagtatataaagcgtcaaaagcaaccgccgaggaatgctaccaagaagaaacgaatcttaatcacttgggccaccggaacagatagagcaaaagaggcggcaaattcagtggtaagtgaaatattcaaaaaaaattccaagggaaacattaaaattgttgatcccactacccacagaatcgaaacgtctaatattcgatattttgccaagggcattgaccttgataaagtcggcttaagtgtcgtcaacgttgaacaaatcgacgatgaaaaccaaattccccttgtaaaactagttgaaagtcgtgtggctttaaaaaggtattccgactttttagctaaaagaaaagaaatggagctaatgaaactcggagtgatgaatagatctttcaggacattagaaaccgataaaaaggaagataatttgaagcagataaaggtatcatggcagattgagagtgacgatttacgaaggcagaaagctcatgaaatagtatcgttattgaagaagggaagtaaggtaacgctatatcttgatgacaagaataacataaattcaaataattggcttgagggttttgaagagctggaccgcgttcaggaagatggcacaaataggctaccaaaatctgtattgcaaaaaagggctgatgttttggagacattgaaagagacggtcattgaatatgccaatgagcctataatagtaggcagcatcgctacaaaaatgataatgaaactaacaccaaaagatgtgaagccatatgacaacgataaaagggcattaaaggagttgaggaagaaagagaggcaggaaaaattgcaaaagagaatagagaaaaagaagctaaaggacacgtaa

SEQ ID NO: 3031 - DNA, 3711 bp, Saccharomyces pastorianus
atgcaccttagaggaactatgagtagagtgcccacattagcctcatttgaagtgcgatacaaaaaatccttcggtcacaaatttcgtgattttattgctttatgtggtcactattgctccccaatcaaaaaatatgttttccctaattttatcgcagtccattatttttatacgatagttctcacaataataacctctattatgttgtatccagttaagaacatcagatatattgatgctttgtttttggcagccggcgcggtcactcaaggtggtttgaatactgtggatgtcaataatctaaccttatatcaacaaatgattttgtaccttatttgctgcatatcaacccccattgccgttcacagttgtttggcattcgtaagactctattggtttgaacgttatttgacgggtattagagactcttccaggcgaaatttccaaatgagaagaactaagacaatcttggaaagggaactaaccgctaaaaccatgaccaaaagtaaaacaggcactcaaagaatgtcacgtcccgggaaatcggataaaagagacgatttccaagaaaaattgtttagtggagaaatggttaatagagatgagcaggactcggttcatagtagccacagttctcgtgatagtaatagtaatagtaagagcaataacaccagtaataacaatgggagtagtggcagtttggacgattatgctaaggaagacgaagcggatgaggtccaaagatacccaggaaacaagtcctattcaagtgtaggtagttcttccaatacagccacagacgaaaacataagccaaaaattaaagccaagtagtcttcgatttgatgaatcacaaaataaaagaaaacgtacaggagttccctcagaaaaatttgcgagaaggagaggttcaagagatattactcctgaagatatgtatcgatccattatgatgctacaaggtgagcacgagggtactgcagaagatgaaggaccacctttagttatcggatcgcctacggacggtacaagaagtatgggcaacagtaataagttaaaatcagcttctatgaatgatggtaaagtcaagattcaagataaaggagctaaaattagtctagaccaggactatgtatcacatagttcaaattcttccgcatgcacttcggatgaagattctcttcccacaaattttggaggtactacaccttcattaagcggaaagacacagaaatcaagttcaggcccaatagcgtttactgaagggggggaagctgacagaaaacagggtccatcgattcagtttaatatcactaagccgccaaggagggcttccaagtctaagagggtttctactatggacgacttaaacccaagatcatttcaaaaaaaaacatcgaagggatacataatgaaacatttcccgagagcccagcgaatacggcagcagattaaaaggagactttccacgggttcgatcgataaaaatagtagcaacgacgctctcgatagagagcccgtttctggtctagacgatggtgatgatgatggtggcaacgaaggtgataacatggaagagtactttgccgacaacgaaagcggggacgaagatgaccgaatgcagcattctgaaccacaatctggctcagaacttaaatcgaaacaacagcaacaacaccaattgcagaaaaacctgcatcgtatgtacaagacgaaatcctttgacgataatcgttcaaaagctgttcttatggaacggtctaagactatcgatatggccgaagctagagatttaaatgaacttgccaggactcctgactttcaaaaaatggtttataagaattggaaggctcatcataaaaataaaccaaacttcaaaagaagaggctggaatggcaagatgtttgaacacggtccttatgcctccgacagcgatcataactatcaggataatggcaataatagtaatattttagttcactacgcggaatccattttacatcacgataattctcatagaaatggaagcgaagatgtttcttcagattctaatgagaccacttatcctgtgaatggaaacaatgattacaaccaaaacgataccaatggatatcccacttacaacgatgaagaggaaggctattatggtttacatttcgattcggattataacttagatcctcgccatgctctaacccgtagtggtaccaaaaactatttgtcatggcaaccgaccattggacgtaattcaaactttcttgggttaacaagagcccaaaaggatgaactgggcggtgtcgaatacagagccatcaaattactatgtaccatattggttgtctattattttggatggcacatcgtctcttttgttatgttggtgccttggattaacttgaaaaaacactatagcgatattgtcagaagcgatggtgtttcacctacatggtgggggttttggacggcaatgagtgccttcaatgatttaggattaacgttaaccccggactcaatgatgtcattcgataaagccgcatatcccttgatcgttatgatttggtttatcattattggaaatacagggttccccatccttcttagatgcattatttggataatgttcaaactttcccctgatttgtcgcagatgagagagagtttaggttttctcttagatcatccacgtcgttgttttactctattgtttccaaaggctgctacatggtggctgcttttgacccttgtaggactaaattttacagattggatcttatttattattctagatttcggttcaactgtagttaaatcgctatcgaaaggctatagagttcttgttggcttattccaatctgtcagtacgagaaccgccggtttcagtgtcgttgatttgagtcagttacacccctccgtccaagtatcctatatgctcatgatgtatgtctccgtgttaccattagctatttctattagacggacaaatgtctacgaggagcaatctctggggctgtacggagaaatgggaagtaaaccagaagatactgacactgaagaggacggcgacaacgacgacgacgatgacgatgacgaaggagaagaagaggcgagccaagaaggggcaagtaatcgtaggggcaaaccaaagaaagaaaataaaaagaaaaaaaagagaaaagaaaatgagaaccccaacgaagtatcaaccaagtccttcattggtgcgcatttaagaaaacagctttcttttgatttatggtttttgtttctcggcctatttatcatctgtatttgtgaaggtgacaaaattaaagacatccagaggcccaacttcaatgtatttacaattcttttcgagatcgttagcgcatatggtacagtcggactatcattaggctatccgaacactaatcaatcattttcaaggcagctaaccacattatccaaattggtcatcatagctatgctgattagaggtaagaatagaggtctgccatattctttggatcgtgccattattttgccaagtgatagacttgaacatatcgaccacattgaggacttaaaattgaagaagcaggccagaaccgatacggatgatccaatgacggagcatctcaagaggagttttagcgatgcaaaacatcgttgggacgtacttaaaagcaagagtagccattcccggagttcgagaagaagtaccaaaaccaattga

SEQ ID NO: 3032 - DNA, 1656 bp, Saccharomyces pastorianus
atgaattttggaaatcaaacacccacgattgtggttctaaaagagggaacagacgcatctcaaggtagaggtcaaatcatctccaacatcaatgcctgtattgcagtccaagaggcactaaaaccaactctaggtcctttaggctctgatattctaatcgtgacatcaaaccaaagaactactatttccaacgatggtgccacaatcctgaaattattagatgtggtgcaccctgctgccaagactttagtggatatttcgagagctcaagatgctgaagtgggtgatggtaccactagtgtgaccattttagccggtgaattaatgaaggaggccaaacctttcctagaagaaggcatctcgtctcatttaatcatgaagggttatagaaaagcggtttctttggctgttgaaaagataaatgaattagcagtggacattaccaaggaaaaaagcaccggcagagaactattagaacgttgtgctagaactgcgatgtcatccaagctgatctataagaacgcagattttttcgtcaaaatgtgtgttgatgccgtactatcccttgatagaaacgaattggatgacaaattaataggtattaagaaaatcccaggtggtgctatggaagaatcccttttcatcaatggtgttgccttcaagaagacattttcttatgctgggtttgaacaacaacccaaaaagtttaccaacccaaagattttaagtttgaatgtagagttggagttgaaagcagaaaaggacaacgctgaagtacgcgtagagcatgttgaagattaccaagccatagtagatgcggaatggcaattgattttcgaaaagttaagacaagtagaagagacgggtgtaaatattgtactatctaagttaccaatcggtgatctagccacccagttctttgctgatagaaatattttctgtgctggtagagtgagcgcagatgacatgaaccgtgtcattcaagcagttggtggttccatacaatctaccacgtctgatataaaaccggagcatttgggtacctgtgagttgttcgaggaaatgcaaattgggtctgaacgttataatttattccaaggttgcccacaagccaaaacatgtacattgctgttgagagggggtgctgaacaagttattgccgaagtggaaagatctttacatgacgcaatcatgattgtcaagagagctctacaaaacaaactggttgttgcaggtggtggtgctctagaaatggaggtatcgaaatatctaagagactattcaaaaactatagctggtaaacaacaaatgataattaatgcattcgccaaggccttagaagttattccaagacaactttgtgaaaacgctgggttcgatgcgatagaaatactaaacaaactaagattggcccacagtaaaggtgaaaaatggtatggtgttgactttgaatcagagaatattggtgacaattttgccaagtttgtatgggaacctgctctagtaaaaattaatgctttaaatagtgccacagaagctactaacttgattttatctgttgatgagacaatcacgaataagggaagtgaaagtgccaatgctggtatgatgcctccccaaggagccggaagagggagaggtatgccaatgcaataa

SEQ ID NO: 3033 - DNA, 2037 bp, Saccharomyces pastorianus
atgggactgttagctttgggaacgcccttgccatggtttgagtccaggacatacaatgagcacatcagggacgaaggtgttgagcagttattgtacatcttcaaggcggctgccaaaagagacaatgatcctctttattggggagatgaggtcgaatacatggtggtggacttcaatgacaaggacaaaaactctatgcttgacgtctgtcatgataagatactcactgagctcaacgaggaagagctgccactctgtgaggccaacgacgtcagcttccatcctgagtatggtcgtttcatgttagaggcaacgccagcttcgccgtacttgaactatgtgagcagttatgtcgagttgaacatgcaacaaagacgtgccatcgcagaatacaaattgtccgaatatacgagacaagataataagaataacgtacatgttggttccaggttggtgcctttgacactcactgtctttcccagaatgggatgccctgactttataaatatcaaagatccttggaatcacaaaaatgcagcttccaggtcactgtttctgcccgacgaagtcatcaatagacatgtcaggttccccaatctgacggcgtccatcagaaccagacgtggtgaaaaagtgtgcatgaacattcccatgtacaaggacacggataccccagaatcagacgattccatctatgaccgagattggtttctccccgaagacaaagaggccaaggtggcttccaaaccagggtttatttatatggattcgatgggattcggtatgggctgctcttgtttacaagtgacttttcaggcccccaatattagtaaagcgcgctatctgtacgattccctggtaaatttcgcacccatcatgctagcattttcagcggccgctcctactttcaagggttggttggcggaccaagatgttcgttggaatgtcatttctggcgcagtggacgaccgtactccaaaagaaagaggcgttgagccattgttgcccaaatacaacaagaacggatttggtggaatttccaaagatgtccagagtaaagtcatcaaaataccaaagtcgaggtatagttcagtagatctttttttgggtgggacgaaattctttaatagaacgtataacgacacaaatgtcccaataaatgataaagtgctgggaagactactcgaaaatgacaaagctccattagattacgatatggccaaacactttgcccatctttatatcagagatccggtatccacgttcgaagaactactgcatcaagacaacaagtcatctacaaaccattttgaaaatatccagagtactaattggcagaccttacgtttcaaaccgcccacgcaacatgctactccagacaaaaaggatgcgcccggttggagagtggagttcagaccttttgaagtccaactgttggattttgaaaacgccgcatactccatgtttatatatttgatcgtcgatagcattctgacattttctgacgacatcaatgcttacattcatatgtctaaagtttgggaaaatatgaagacggcccaccacagggatgctgtcctgaatgaaaatttccattggaaaaaatcgttccagaacaaagatggcgtggaaacggaagaatgctcggtagacgaaatttttcacaattcagagaacggtattttccctcaattcattacaccaattctatgccaaaaaggttttgtagcgagagactggaaggaattgaaacactcttcccaacataaaagactatactactacctaaaactcatttctgaaagagcaagtggtaaactaccaacaacagcgaaattttttagaaattttgtattacaacatccaaactacaaacatgattcgaaagtctccaaattagttaattacgatttgctttccacgtgtgatagaattactcatttagacgattcaaaaggtgaattgacctcctttttaggaagtgagattgctgactatataaaaaataacaagccgtcgatagaaagaaaagcgtaa

SEQ ID NO: 3034 - DNA, 654 bp, Saccharomyces pastorianus
atgtcaaaaaaactttcatccccattgtcctttctaccactgtataatttgttttctgcagttggttggtcgtatttgctttactcggtcgtttctctctatccaaagattggtcagccatcattcttctaccaaactaggaatattgccactcttatccaatgtggtgctgtaattgagatcatcaattcattattgggaattgtgcgctctccattgtcaaccactgttgctcaagtgtcttctagattactagttgtcataggtatattccagttgctgccaaatactagcggcgttcaatcgattgtgtacatctcgttattgctggcatggtctataactgagattgtcagatacttgtattatttttttactttagtgtttaaaagtggtgcaccaaagatcttagtcctattgagatataacttattctgggtcttgtaccctacaggagttgctagcgaactatgcattatttactgtgctctgaacgctgccgaaactcagtattgcctactttataagagattattacaggtcgcaatgatagcttatatccctggcttcccagtgttattcttacatatggtaacacaaagaaagaaggttatgaagggcttgagttctccttccgggaaaaaactaagttaa

SEQ ID NO: 3035 - DNA, 3153 bp, Saccharomyces pastorianus
atgcccatggaccagcctatctcatcgccggtgtttcctgcggaaaagagtatcgatatttctctagataccacgcctttggcacagagctcttcattgcagctcttcattcatctggctgagccggttgtatttcttcaagggtttgaccctcaaagaacggaatatccctcagtcgttcttcggggctgtttagtggttcggatactgaaaccggcaaagctcaaaagcatcaacttggctttcaaaggatattctagaactgaatggcccgagggtatcccgcccaagagacaagagtttgtagagatcaaggatattgtagaccatacatgggctctgtatccgccaactgaacagaagggaaagaaaaaatcatttgctaccgatagcggcaatgcaaatgataattttttgaaaagggaaagtggtgcctccctttatagaacactatcagatagcggtgctttgaacagtaggaaaaactccatatcaggtttatcctctttgaacttatcacctctaggtacgccaggtaattcatcggtcaatgtgagagatagagaaagtaggcagagatctagatcttcctcggttacttcctccacggctccttcaagaaatttgtctccgataaatttgttgaaaagagctacatctccttctacatcccatcagaatttcaagcctactaccacctctatcttttctgacttgctaaataacacattttcccataacgactcaccgtctcatcataatcatcatatacccgccagtagcggtcacctggcaatggcaagcaatcactacaccagcgggcctggtggagattccttcatcttccaaccaggtgactatatttatgccttcgaagaactaattcctcaagaatacccggaatcagttaaagccgactttgggttcgtagagtatttcttatttgccagtatagagagaccgggtgctttcaaatcaaacattagtggaaggcaggttgttgacattgtacggacacaagctcacaattccgtggaagaaagtgaaccgatcattatatcgagagattgggagaaccagttatactatgatatcgtcatagcttccaaagatattatactggatgcttttttgcctatcacattcaagttcgctcctcttgataaagttacactgcacagaattagaatttacgtcacagaaacaatggaatactactgcagggataaaaaagttcatagaatggagcctaccaagaagtttttattaacagaacaaaagggtcctagactacctaacttacccaatgatgcgaatttgtcgaaggccaagaatatgggcaacctattgacggacccaaaaaatggagacttgattaataaggagtatgaatatcaaatttttgttccaagccgcttcaacaaccatcaacagctacatccagatacttcatatgaaagcatcaaagcgaaccattggataaaaatttgtttgagactatctagagtagtagataataagagaaagcattacgaaattagcattgattctcctatacatgtcttacataggttatgttcccatgcaaatactcttttaccaagttatgatggccgtataacggctattccagaagaattaaactcctccacttcttcaatattagaatcatcggaaaacaatgccaacatgtatcataattcaaatatttttttccccaaggaagttctgtcatcaccagttctttcgcctaacgttcaacccttggatattttgattcctcacttaccgtccacctcatcgttaagaaactcaaggcaatttattagaaattcaaaatctcattcgaaagatagcactgttttcaattccgccaaattgaagtcgaacatttatcaaccagaaactatacaaagagaactcgcatcgcctcaggcaatcccgctttcaccaataacatcacctatgtcaaacatggagataccgccgccagatttcgatttttcttccgatttgatatctgatggtacgtctgaaaccaccactactgaagtgtcctcatcagaatcgagcaccttgccaaaagacccgccatcttataaggattccatgctgcacgataatagtcaaaagaggaaacaaacctcaaggcaccccacgcccgtgagtttaaaaggttcacgctcgagcaaacttttggataccagtactcccgagactatgaatgaacaagaatcaatgtcacgagtagaagataataaacacgaaaagaacagcacacctaagaagagagaaaatagggacataattaaaaacgcagttccacaacacgaagaaagtaaggaccccgtacccgataagaatcaatgtaaaggaaagaaaaatgaaagggacaggaagagggtactgagtttatcgtcctcacttcatagcttgccaaccaataacgccttcatatcttcgacacattccactttaggcaacctgagcagtgattcattacgatcattgactaaaagagaaagtgtgcaagacaacctgccatccacagtaagacatgatagtccatttttcaccgacttaaatcaagtcttaatagacgatgagctcaacaatcatgacaaaaacgaattgaatcgaaacgttacgaattcttcgagcacacccgcatcggccagatcttcttttgattactcgggaataaatataagtaaggacaagttaactatggaacccttgttaagcaaaacggagactttgaccaatagaatgaatgacgactcctttttagggcctaatgattcctttgtcaacttgcttgaaccctcggtagacaccacggttgatatcacagctccgtatgcaagaaattcctctgcatggcatccttcacagtatgacacagagaacaatcaattctctcccctcttaagaagtaatgaaaactttttgaacctgattaacggacaaaattcaactgagtcagattacaataatgatgttactacgcagggctccgggttaacgggaagctcgaaaaattctgacactgaggaaagaattatttcaagactctcttcacctgagaaattgttgattaatactttagacaacgaatccggattacagagcattgatgaaagcacgcattag

SEQ ID NO: 3036 - DNA, 1938 bp, Saccharomyces pastorianus
atgatactgattacaggctgttgtcttctactctatagtcttattttaccaacactgatatcggcctctaaatcatgtaacttagcggagttgcaacgactgaacaagcatttgaaagtagacactgagtcgctgaccaagtaccaatggatcgcaggccagttggaacgaaattgtctaacagcggaaccaaaaagcgaggatatgacagatgtcatcaggctagccaaccagatatactacaagattgggctgatacagatgtctaatgatcaacacctgagggccattgacctgttcgaaaaaattgtctccaatgaaacctataaggactcctttggaaagcttgccgagaagaggctgcaagagctttacattgatttcggtatgtgggggaaagtgcatcagaaagatgaacgttattcaaaatatctttcgttgaatgaaactattggaaagaaactacaatccagagatgtttctgttgaggaggatctctcagagctacttcgaattacgccatataatataaacgtcctatctacccatattgatgttcttttccataaattggctgaagagattgacgtttcgttagcagcatctattattttggattatgaaactgtccttgacaagcatctagccgtcttaagcctagacacaaggcttaccattcattatgttatatcagttttacaaacttttgtgcttaactctgatgcgtcctttaatctaagaaagtgcttatccattgatatggataatgagaaatgtaaacgtctaagtttaactatctctaaattaaacaaagtgaatccatccaaaagacaaatcctagatccagcgatatatgcttttgaggaagcaggatctacaaactgggataagactatagatttttatctaaaggataaaaagccatttattgctcaaaaaaaagctcttaacagagatattgctttcaaaaataattactcatttttgcaagaaattatcaagcaattgattgttgacgttcaagtattaagacctttgacagcaaatttatttgaggatccatcaaacaccgacaatgttgtcaaaccaaactcctacttccatactgactacctaatctatattgactccatcctttgtcaggcttctacaacgagtttggacgccaagagagctaaaatggctgctccattttgcaaaaccgttttaaaacaatcactaaccctagaaacatggaattactaccaggatgcgaagtctcagcaaaaacgtcttcctgaaacaatattagacgatgtatggaactccaatcctcatttggtaatgtatatgataaattcaatcttgaacaaaaataagtctaaaccacattctcagcctaaaaaacagctactagatcaaataaacaaattttttcaagacaatggcctttccgagtcaaccaatccatacgtgataaaaaatattcgtttactacagaaacaactacaaacttataaagagcaaaagcatcggaatttcaaccagcaatacttccaacaacagcaacagcaacagcaacagcaacgacaccaagcgccaccaccaggagttagccataaccctcaaaaggattattacaagattcttggagtagcacctggtgctacttctaaagaaataagaaaagcgtacctgaatctgaccaaaaaatatcatccggataaaataaaggcaaaccataatgacaaagaggaaaccattcacaaaaccatgtcccaaatcaatgaggcctacgaaacgcttagtgatgacgataaaaggaaagattatgatttctccagatccaatcctcgtcgaaacacattcgcccaaggacctagacagaataacatgtttaaaaatccgggaaatggatttccgtttggaaacggctttaagatgaattttgggttctga

SEQ ID NO: 3037 - DNA, 756 bp, Saccharomyces pastorianus
atggggttctatcaaggtgacgacgatgacaccgacaccaagacatttaacgacaagttcatcaaagaccggaagttcgccacggctcccttctggagcctcttccccaagttgaaggacatcgacgaggacgatgactcgctcttcccgctgcccttcaagttcaacttcaaggattttggcgacaatgccttcgccatggcatcaggaattccgaccgtgaagcagttcgacaagtgccaggagctaaagggccagtccgcgtggacaacccagggcatttggaagtgcctagtccccggccaagcgatccctccactgcccaacctggacttcctcttgccgttggaagacgtccagtcagacaagtcgcattcccgtgggctgttcttcaacgacttcaacctttttttgaaatggagatcgcacatgaacaagctgcaacagcaaagaaccatcaagtccgctgccctggaacccgtggctaggaccccggaggacctcatgttgagctgggacgacttgcatttgagtaacgatgctgagtacgcaactgcgaacggggccaagaaaatcgtcggtagggcacagtccatcaacactactagggactccagtgattcaaaacctaacactgtcaagactgagaaaatttactacgacgacggcaccgtggagatcaccaccaccaccaccgccaagggttccaagcctcaggtgaatcatgaagtggtgaaggccgatcaagataaatag

SEQ ID NO: 3038 - DNA, 258 bp, Saccharomyces pastorianus
atggttttgaatccctccaagtaccaggacacgcgcacgtggaagatgacgcccgccatgatccgggctcgcaaacccttctttaagggcaatctgctcgggctcacggtgctgctgggcatcacgggttccgtctactactatacatacagcttcctgcacaaggacaacgactttgcagacgtgcccatcccgcccatcgacgcgaaggagctcgaggctctcaagaaagagtacgaggccaagaagaagacctga

SEQ ID NO: 3039 - DNA, 747 bp, Saccharomyces pastorianus
atgacaatggagagtggtaacggaagtagcggctctagtagtggccgccaagagcacggcaagtctgtgtgtgtgtactgcgggtcttcgtttggaactaaaacgctgtactccgagagcgctgaagagttgggcgcccttttctataagcttgggtggcaattggtgtacggtggaggtaccaccggtttgatgggcaagatagcaaggtccaccatgggcccagatttgaacgggcaagtacacggcatcatcccggatgcgctcgtgtccaaggagagaactggtgaggatgaagaggaaatcaacgaggcgctgatggagtccgtggaaaaccataagggctccacccccatctccaaggagtacggggagaccacgattgtgccagacatgcataccaggaagaggatgatggccaatttgagcgacgcgtttgtggccatgcccggcggttacgggacctttgaagagatcatggagtgcatcacgtggtcgcagttgggcattcacaacaagccgatcatcttgttcaacattgacgggttttatgaccaactgctgcaattcatcaaccactccatcgaagagggcttcattagtgccaaaaacggggaaatcgtgcaggtcgcatcgacctcacaggaggtcgttgacaaaattgaaagatatgtcgtccctgaaggccgtttcaatctgaattggaacgacgaaggtcgaagccacgagcattgtgccaaacaatag

SEQ ID NO: 3040 - DNA, 1449 bp, Saccharomyces pastorianus
atgacttctgaacccggaaagcctgttacgaagcctgctaagaagcctgctaagaagcctgggtacaccaatccggctttcaaagcccttggcgtacccaccttgagactgccctccagaaactggatgatcttctggtccgtgctaacggtatccatcggaggcctggcctacgacaagtacaaacaacgacagattttgaagcgggcgactggctcggtggaaccgttggcggaagaagttttggaggtagacagaattccacggaagatcaccgttttcattgcacctcccccaaacgattatctggagagttcgttgaaagtttggaggcgttacgttaaaccagttctttaccatgccggcttggactacgaactggttcaggaggacagacagggaactataagaaccaatgtggccaatagaatcagacagctacgaaaggagctattggcgcgaaaggatgaacagttaccaaacgggtccaagccaatgaaaacaacagtagattcgaagaactctttatcgagtaggctttcgtcgctgctaccgttcagtaggactggctcggttgattcggcagacgatgagccatttgatccagagattggaaaagaattcaagaaaaacttcgattggagaaacgtcattggtattttctatacaacgcccaagccaacagatataataagtgaagattcactggtagaagaccctattctatctgggggtgttatctgcttaggcagaggtgcatataaggagtatattgccggtatacatgaaggtttgctgggccctattgaaagggaaatcgaggtggttgaggctacggaacccaggataacagaagttcctgagatcaaggatattaaggcagatgcaaacgaaccgaaccctgctgcgttgccggatgcaaagaacgatgctgatcctgcagagacgaaagtggatgatgatttgaagctaaatgaggaaaacgctacagaggagtcgcaactttttttaaagcctttcatcaccccagaccaataccctgagttgcaaatcgctccggaattacaaacggcagatggcaaattcataagaaaccccgacacaaatatccctcttttcataaaccaaccattactagtcatccccatacccaatttaataggattcactacgattcccacaagaatttaccggttctaccagaagcgtttctatgtcgaggatgtgtgttccaatgtagttaactgtgcacaacagtcacacattagaccatttgacatttcaaaggacatcgatatggcgaaggatgaagaaaaggactggcctcaaaactggatcaaacaaggtaaagagaaaaacagtgaatggacccaagaattggaatgcgatcctagagtcacagagcacatgtccgtctatgagaatccatccaaggaagagcccaaatag

SEQ ID NO: 3041 - DNA, 1350 bp, Saccharomyces pastorianus
atgaaattggaattaccagaatccagattgccgtccttatatagggattttaggccattgaaagatttaaaccctgatggctacgatgcaaacatcaacacatggaaggagtacttacgcgaacggtatctcagttgctcaggtaaagtcacatttgcgataggaacgagactattgcaagagttaactcatgaggtttatggagtgccaaaaagtatcgatatggtaatcgatgcccttgttagcgaaggagatctggtgcctatggaagtcttccaccgaggtggtttatactctgataataacaagcttggattttggaggtggattagaaactggaaaggatccacgaatacatataggagcagaagagatgaatctaatttttacttgaaggaagatgaatttgttatcaagacaagattggaaaaggagtatcaaagatttcatgacctactgaaaaatagcgtgtttacaaaagcttcaactattacagatttggtatttacagtgaacgattttgtaactgaggagagtatagggcccttttttgagacttataatgaaatggcaaagaaggtttttttattttttttggagaattataagcacgtcataatttcgaaggataatgtcgtcaagatcattgcacccgaggttgaagatgtaattagtagattttctacagacgtcacagaaaacgacgttagaattgctactgttaaagttgggatactgaacattagcaaacaaattacaagactacgaaaagagattgataaatctggagctaggctgaatgatcccgagttcaacgatctacctaataaaatacggattgaatataaacagaccagattattatctgaaagacacctttccaaacttttgaagtttcaaaataacttagctgaagtacgaagccaaatagatactagtcttaccaacgcaatgttatttcaaactctgagcgaatccaatgaagtaatcaaatcgatcaacgggtacattggatcaactgaaaaagtggaagacttgctagaagaaatcaaagagggacacgatcgtacagaagagatcaacgatcttttaactaattacaaaacagggcaagacaacgaagaggacgaagaaattgaaagagaactagaaagattacaaattgatgagatgaataagaacagagaaaacgactcaaaccggaatgcggatgagtcaaaagaaagtagtaacgaagacttgttggatagactgaacagtttgaaaatagatacgagtgaagaacctgtgaagaatgatacgagtcaagataaagaaaggaggaaagttatggtggaagaactacattaa

SEQ ID NO: 3042 - DNA, 1191 bp, Saccharomyces pastorianus
atgccaagtataaatagcctcttccaagaaggtgtggtccatgaccagtccagtattagtgagcaggctgtagttgtctatataagctcaggagttgatgacgattcatggcttcaacagtggtttagaccaggcaacctcagcagcctggaacgtgaaaacatagtgtgggtgaagctggtaaataacaccaaagagtgctttctcttcaggagtattttcccctcattgtctgcgccaagtataagtatactgcagaacggcctactcgagtgttccattcaaggtaatagtgtctcccgggatctggatctttgggaaacattcgttaatgggctagagctaaccgttaggggacaaacaataaagaggaagttattcaccaagggcaatgaagagtaccaaagagtcaagagaatgattcagaatgacaagctggaaaggaagtacgtatttcaaaacgccaatgaccctcagaggacacaacagagatggaagcagcttatggtcatggataatgttagctataagagtcagagggttttcctcgcacagaactattgtaccctgcagttgaagctgcccaatggctacaccatttcaaacacctttcctcctcaaacgaagctgcacaaagtgagaatgtggttggactacaattgctacgacgatggtactccgtaccttttccacaggaacgtgccaagagtgacccttacgcaagacgacgagttgaaaagtcttcaagaactagacctactgcccagatcgacccttattttggagccgctggaagcccataataattactttgacgacatggaacaatcatctatattatacaaagtctattccgggttaacttcgttttgggcaaaaggaccggaagcaggcccttcctcctctcatctaggctaccagagattaggcacaaacgtctcgaacaggacaagctacagcatacagaaaatatcgagtttagagattgtgtctgacggaaacgattcgatggccccttcagcgtataccactccaagaatgtacccttctggtggaactactcaagtgcgacagaacatatctgaattaaatctatcttccaataattctgcatctaacaccaaagtccgtacattaggctattctagtaaaagtagtaagagtaataatagcaatagtggcagtaattga

SEQ ID NO: 3043 - DNA, 1383 bp, Saccharomyces pastorianus
atgaaggatgtcttagaatgggcaattgaccactacgagacacgagatcagctgatccagaagggcatttggaaaggtgaactgtaccgcggatccatttttgaagagagcagcagaggttggctctggaaggcgttgcttttgtacgatgagaataacagcggcctgctggccgacaattctaaggaccgggacgttaaccagttcggcttggtgcccgtgccgatactgacggatgaggaggaaaacgatgagggcaagaagaatagcggaaacgtgcctgaaagggtcttgcactctaacgtctcgtcttcgctcgggatcagacggctgactcccatcgaggctgtcgacaatcatcccctgtccggcaacaagactaaagctagttcttccaacaagggtgcacccaaggcgcgggaggacaatccattgacactaagggaaacgctggaaattatagacttggacctttcaagaataatgctcgacgatatattccaggaacccagagttcatgctcaaatgagacagcttctgtacaactatcttctcatccataaaaacgaacaattgcagtacaagcaagggttccacgaaatattaagcgttatttatctgcagctataccatggcagcgacgtcgataatatcaatcttcagaatgtgctgatcatcttcaataagctaatgaaccagatcgaaccgattttttataacgaggaaaacctgatcaactgggataagacagtattcaccaagatcttcaagatatgtttgcctgatttatttaccaagatcttctaccagccggcaaaatccggcaacgggaggaagaaaggtgcaaactacttggttcattcgaacttaatctggctaatccggtggacgaggttgctattcttgagagagctgcccttaaagaaagtgctgattgtctgggaccacgtcttgacgtttaactatccattagaaattttcatcgcatgcttcgtcatcactctcttcttatccatatacgacgaactgcacgacctcgtgaaccaagacgactacgaacaagccaacaacaatgacgaattcatcgaactgattttgcatttcaagaaaaacttccaaaaggaacacgccagtacaaatgacgagagcttcttagaactctgtaaaattacgggcaatttatgcgaattgtggtacgggaaaaaccatgcggatatgcggctgatctgtgatacctttatcaatacgaatttcggcatcaaaactggcgatatcctgagcatggaaaccgcgaaattgactattgaccccaacagacaatcactagaaagtaagctgaaagaaagggtgaggcaaacactattgaaaaacaaaaaaaagtaa

SEQ ID NO: 3044 - DNA, 1032 bp, Saccharomyces pastorianus
atgaggttatgctcttcgttattgtcacagaacctcaagagccgattggtggtccgaccatccaccactatacatgcaagtgatccgttttcaaacttcattgtaactagagatactgagccactctcactagacaatcttcaaagaggtgattcagttaatcgtgcagtggtagtttctttcaagaatactgcgcttagcaaggtcacagacttacagaagaaacaagatatgaaatgggatccagtgaaatatgttgctggtagacttcgagggataatttctcccattcaagcatacatatccattagcaaaagattctcttctcattcattggtgtacgatagcagattttttcagttacattattttccagaggatcatttcatctcttgttttaggaaaagcaaaccttccattacagttaaatcaacaaaaaagttttatttgaatggtaaggtactgaatcaaaatcaccagtattacaacgaatctagaatattgaaaaccgatgaagcggaattgaccaaaattcagaccacaatggcacgattggcatctaaacataggaacaatattccttcagaatttgcatacttgaggagagatttgaaattgaaggtgaaaacgccgtttatcgaagaatggtgtagactaaatggcgataaggctattcgagaacgtgatcggtctgagtctaggaatgccgttgagagcaaagcaaagaaaagtctactggacaagtttggtagaagtactgttggcacagcaaaagatggatattatttgtacattgtaaggatatttcctgatgtagacactctgaacgagtttaacaaggaaatcaataaaagcgtccagaaggttgcagatttgaattgggataaatttttgatcccaaaaaaaggtcccaaaggcaaaacttgggtggaagcattcaacgacagtataaacgtaaacacaatcaacaggatactcaagattagtaagttcccttttgagttaagaagagagcaatctagagatcagtaa

SEQ ID NO: 3045 - DNA, 1608 bp, Saccharomyces pastorianus
atgcaagctccagtggtgtttatgaatgcttctcaagagagaacaaccggccgtcaggctcaagtttccaatatcaccgctgcaaaggcagtcgctgatgtcatccgtacttgcctaggtccaaaagctatgttgaagatgttgttagatcctatgggtggtcttgtgttgactaacgatggtcatgctattctgagggaaattgatgttgcacaccctgcagctaaatcaatgttggaactatcccgtactcaagatgaagaggttggtgatgggactacaactgttatcattttagcgggtgagatcttagctcagtgtgccccatatttgattgagaagaacattcatccagtcattatcatccaagctttgaaaaaggctttaactgatgcattagaggtcatcaagcaggtaagtaaacctgtcgatgtggaaaatgattctgctatgaaaaaattgattcaagcttccattggtaccaaatatgttatacattggtcagataaaatgtgtgaattagctctggatgctgtcaagaccgttcgtgaagatttgggtcaaaatctagaaggcgaacctaattttgaaatcgacattaaaagatatgtccgtgtagaaaagatccctggtggggatgttctagattctcgtgttttaaagggtgtgctattgaacaaagatgttgttcatccaaagatgtcccgccacatagagaatccacgtgtcgttctattggattgtccattagaatacaagaaaggtgaatctcaaaccaacattgaaattgaaaaggaagaagactggaacaggattttgcaaattgaagaagaacaagtccagatgatgtgcgaacaaattttgtcggtcaaaccaactcttgtcattactgaaaagggtgtctccgacttagcacaacattacctactaaaaggtggatgtactgctttgagaagagtgaagaaatcagacaataacagaatcgcgcgtgtaactggtgcaaccattgttaaccgtgtagaagacctaaaggaaagtgacgtgggtactagttgcggattatttgaagtagaaatgattggcgatgaatatttctcatttttggataactgtaaggaaccaaaagcctgtactataatgctgcgtggtggttccaaggatatattaaatgaaatagaccgtaatttacaagatgctatggctgttgctcgtaatgttatgttgagcccttcattgtccccaggtggcggtgctaccgaaatggcagtttccgtaaaactagcagaaaaagcaaaacaactagaaggtattcaacaatggccataccaagccgtagcagatgctatggaatgtattccacgcacactaatacaaaatgcaggtggtgatcctatcagactattatcccaattaagagccaaacatgcgcaaggtaatgtcacaatgggtattgacggtgacaagggtaaaattgtagatatggttgattatggtatttgggaacctgaagtcattaaacagcaaagtatcaaaactgctattgaaagtgcatgtttattattaagagttgatgatattgttagtggtgtaagaaaacaagaagagtaa

SEQ ID NO: 3046 - DNA, 972 bp, Saccharomyces pastorianus
atgcctagcacttttgaaacccagctctttttttctaggccttttctgtcgaaaaggcaaattcaaagggcccacaagaacacgatatcagactatcgaaattataaccagaaaaagctggctgtattcaagtttttgagcgatttgtgtgtccagttgaaatttccccggaagactttagagacagcagtatatttttatcagagatatcaccttttcaaccgcttcgaaaccgaactttgttacactgtggcgacaagttgcctaactttaagttgcaaagaagtggaaactatcaaaaaagctaacgaaatatgtacattgtcattgcatttgaggaacgtggtcaaaatcaatacggaaattctggaaaatttcaagaaaagagtttttcaaattgaacttcgaatactggagtcatgttcattcgactatagagtgaacaactacgtccatattgatgaatatgtcattaaaattggcagagaactatcctttgattataaattgtgtaagctagcctggttgattgcctatgatgccttaaagctagaaacagtcttggtcataccccaacattctatcgcattggccattttgagaatagcatatgaactactagacaacaaaaactggtcgagtaagaggtattcgttattcgaatcagacgaaaattcggtaaatgaagcttattttgatatactaaacttttacatcaatttttttgatctctgcgacctacaacatcatttacctgagggcgtaccgcccgtaagtattgataggtttatggttctgaagaaaaatgcagggccggaattcggtttacagcaagttactgatcacgagttagatgcggatccttatatcactatctctcgggagaatactgttcaagaaagaagatacgtgctttccatggacttaattaacggtgaatccaattcggtccactctacgaaacaggtatag

SEQ ID NO: 3047 - DNA, 6075 bp, Saccharomyces pastorianus
atgtcatcaaatcatgctactagtccagaaacctctggctctcatgaacaacaagatttacagaatttaccctcggaaacatatgatgtgaaagcacacgatgactcacccaagttcaagaagcattacgaacaaaataatgggaacaagtcaagaaggaatagtgcatatagttattatagccctcgttcgctttccatgactaaaagcaaagaaagcattgctccgaatagcgtagacgacgcaaatacttcaaacacaggacattcaaggcctgcagagccaagaatgaaaaggggcccacatctgctgaagaaaacattaagtagtctttcgatcaatagcaaccatgatgattctaaaaaccacgattacgctttgaactcctccaaaacccataactacctatcctcttacagccatcatgagccacatcatgaccaccatcatatgcagtttttgcccaataggaagcagtcgtttgctgaaagcttgttcaagagatttgcaggatcgagtagccacgacaataataaggcaggtaaggataatagagttgctagcttatccctgtcaacagccactcccgcgcccgcaaatagaaagccatcgaaggactccacactatcttcccacttggcagataatgtgccgaatactttaagaagaaaaatgtcctctttagttcgtggatcttctgttcatgatgtaaataatataagtgcggacaaacaaatcaaaccaaaaattgctccaccaccagagagtacgttgcattcgtcggatgttcctaatagcaaacgttcacacagaaaaagttttttactaggatctacatcctcttcaagcagtagaagaggttctaatgtgagctcaattacaaacagtgacaatgcaagtatggcgacttcagggagccatgctatccatcataatatacctaatatatcgccgactactaaaagtaaagaaagcgttgatagcgaatctgctgatcgctctaataacaaagtcgcactaaagcccaatgataacatttcagaaatccctagtattgaagatgaaagcgaagctgtagtaccgacgatggaaaagcctattgcatataagccatcccttttcaggttggatacgaaccttgaagatgtgactgatataacaaagactattccgcctacggctgccaactctacaataaattctacgtatggtactgaaacagcctcgcctaagacggtagctatgccagaaggtccaagaaaatctgtttcgatggctgatctcgctagagctgcagctgttcctaaccctaattttacctcaacttcaaatgataggtcacaatgggtagcaccacagagttgggatgtagaaactaaaaggaaaaaatcaaagcccaaaggaaggtctaaatcacgaagaacaagtatagatgccgacccgcttgatccaatgtcaccggcaccgctatccaaaaaagactctcgttaccacaaaagtcgccatcaccatcaccatcaggacctgaaagataatgcgtcgtcaattacagcggacgctagtaattcaagctttgttgatatattaaaagaaaatatttcaaacgacggaaagaactcagttgacccgaagtctgtgaaccgtctaagaagtaacttgactatgagccccccgagtatacgagatgctccatcaaatttagacggggactacgacacttcatccacttcctcatccttgccgtcttcatcgattagctcagaggattcttcctcatgtagtgattcgtcttcatataccaatgcgtatatggaagctagccaagatgaagataacaaaacaccgactttgaataaagcgaaatcgtatactaaaaaatttacatcatcctcagtaaatatgaattcgtcagatggcactcagaatggttcaggattattattacaggatgagaaagatgatgaggtcgagtgtcaactggaacattactataaagacttcagtgatctagatcccaaaaggcattatgcaattcgtattttcaacactgacgacaccttcactactctatcctgcactccagcaactaccgttgaagagataatccctgcactgaaaagaaaattcaacatcaccgcacaagggaactttcaaatttccttgaaagtggggaaattatccaagattttaagaccgacatccaagcctattttaattgaaagaaagcttttacttttaaacggctatcgaaagtcagatccgcttcatattatgggtattgaagatctaagttttgttttcaaatttctttttcatcccgtaacgccttctcactttacaccagaacaagagcaaagaataatgagaagtgaattcgttcacgtggacttgagaaacatggatctaactacacctcctataattttttaccaacatacgtcagaaatagaaagtttggatgtgtcaaataatgcaaacattttcttaccgttggaatttatagaaagttcaataaagttactcagtttaagaatggttaacatcagggcctccaaatttccttccaatattacagaggcatacaaactagtatcattagaattacagaggaatttcataagaaaagtcccaaattcaattatgaagttgggtaacctaacaatactaaatcttcaatgtaatgaacttgaaagcctacccgccggatttgttgaattaaagaatcttcaactgttggatctgtcttcaaataagttcatgcactacccagaagttatcaaccattgtaccaaccttttacaagtagatctatcatataataaaattcagagcttaccgaagtccacaaagcagctagtaaagcttgcaaaaatgaacctctctcacaataaagtgaactatataggtaacttatcggaaatgaccaacttaagaactttgaacctaaggtataacagaatatcatcaattaaaaccaacgcatctaatttgcaaaacctctttttgacagataatagaatatctaattttgaggacactttgcctaagttaagaacccttgaaatccaagaaaacccaattacttccatatcttttaaagatttttatcctacgaatatgacaagtttgacgttaaacaaagcgcagttgtctagtattcctggagaactactcaccaaattatcgttcctcgaaaaactagagttgaatcagaataatttaaccagaataccagaggaaatctcaaagttgaccaaattggtttttctttccgtagcgagaaacaaattagagtatattccaccggagttgtcgcagcttaagagtttaaggtcattagacctacattctaacaacataagagactttgttgatggtatggaaaatcttgagctaacatctctaaatatttcatcgaacgcattcggtaattcaagcttggaaaactccttttatcataatatgtcatatggttcgaaactgtcaaagagcttgatgttttttgtggccgcagataatcaatttgacgacgctatgtggccgctctttaactgctttgtcaatctaaaagtgctaaatctcgcttacaacaatttttctgatgtatcgcacatgaagcttgagagtattactgaattgtacctctctggtaacaagcttacaacattatcaggtgatacagttttgaaatggagttgtctgaaaactttgatgttgaatagtaaccaaatgttatctttacctgccgaattatcaaaactgtctcagctaagcgtatttgacgttggagctaatcaattaaagtataacatatcgaactatcactatgattggaattggagggacaataaagaattaaagtatttgaatttttcaggaaatcgtaggtttgaaataaagtcctttgcaagtcacgatattaacgctgatttgtcagatctaactgtactacctcaattaaaggtgttggggttaatggacgtaactttaaatactaccaaagttccggatgaaaatgtcaattttcgtttaagaactactgcatcgattattaacggaatgcgctatggtgttgcagatacactgggtcaaagagactatgtatcatctcgtgatgttacttttgaaagatttcgtggaaatgacgacgagtgcttactgtgtcttcatgacagcaaaaatcaaaatgccgattatggccataatatctcgagaatcgtcagagatatttatgataaaatattaattagacaactggaaagatacggagacgacacggacgacaatataagaactgctcttcgttttagttttttgcaattaaataaggagatcaacgggatgctaaattctgtcgataatggcgctgatgtcgctaacctatcatacgcggatctactaagtggtgcttgttctactgtgatatacatcagaggaaaaagactttttgcggcaaacctgggtgattgtatggcggtcttatccaagaataatggtgattaccaaacgttgactaaacaacatctcccaacaaagagagaagagtacgaaagaattcggatatctggcgggtatgtaaacaatgctaaattggatggcgttgtagacgtatctcgagctgtcgggttttttgatttgcttcctcacattcatgcctctcctgacatttctgtcgtaactctgacaaaggcagacgaaatgctaatcgtagcaacacataagttatgggaatacatggatgtagatacggtctgtgatattgctcgtgagaatagtaccgatccacttcgcgcagcagcagaattgaaggaccatgctatggcttatggttgcactgaaaacattactattttatgtcttgctctttatgaaaacgtccagcaacagaatagatttaccctgaataaaagctctttaatgacaagaagaaacacattcgaagataccacattaagaaggctacaacctgaaatttctccaccaacaggtaacctagcgatggtattcaccgatataaagagttcaacgtttttgtgggagctatttccgaacgcaatgaggaccgctataaaaactcacaacgatattatgcgtcgtcaactacggatttacggaggttacgaagtaaaaacagagggtgatgcctttatggtagcgtttccaacaccaactagtggcctaacatggtgcttaagtgtccaattgaaacttttggatgcacagtggccagaagagattacctctgttcaagacggttgccaggttacagatagaaacggcaacattatttatcaaggtttatcagttagaatgggtattcattggggttgtcccgttccagagcttgatttagtgactcaaagaatggactatttaggaccaatggtaaataaggcagcgagagtccagggtgttgctgacgggggccagatagcaatgagtagtgatttctattccgaattcaataagataatgaagtatcatgagcgtgtagtaaagggcaaggagtcgttaaaggaagtatatggtgaagaaattgtcggggaaatcctggaaagggaaattgcaatgctagaaagcatcggctgggagtttttcgattttggtgaacacaaactaaaggggctagaaaccaaagaacttgttacgatcgcatatcctaagattcttacctccaggcatgaatttgcatctgaagatgaacagtcaaaactaattaacgaatcgatgttgtttcgtctaagagtagtttcaaataaactagagtctgtgatttcggctttgagtggtggcttcattgaattagactctcgaacagagggaagttatatcaaatttaacccaaaggtagaaaatggtattatgcaatcaatctcagaaaaggatgctttgttattttttgatcatgtaatcactagaattgaatccagcgtggcactactgcatctacggcaacagagatcttcaggattggagatatgtagaaacgataaatcatatggtcagagcaatatttttagtatcgttgatgagcttttagaaatagtcaaagtagttaaggatctatcagcatga

SEQ ID NO: 3048 - DNA, 2007 bp, Saccharomyces pastorianus
atgcaatttttttttaagttagttgttttgctttgttctttggcattggcctctgcggcagatattgacaacatctcattttctaatttagaaattgccccgctgacttccaataaacaacctgatcaaggctggacagcaagctttgattttaccgtcgcagactcatcttccatcaaagagggtgatcagttcacgttatcaatgccacatgtctatagggttaagttatcagacccatatcaaatgacaaccatttctttaaatgatggtactgaggctttcaaatgctacgtttcccaacaagccgcctacctatatgaagatacaattttgacttgcactgctcaaactgatttgtcttcttataattccattgatggctctataacattttccctcaactttagcaacggtgattctaactatgagtatgagttagaaaacgctaaatatttcaagagtggacctatgctcattcaactcggtgatcaaatgtctggtgtggtaaatttcgattctgctacatttacagaaaacgttttacattctgggcgtacaactggttacgattcctttgaaagttatcacttgggtatgcgctgtccaaatgggcatttcttaggtggcactgaaaagatcaattatgataattctaatcacaatgttaatctggattgttcttcagttcaggtccattcctctaatgactttaacgattggtggttcccacagagctataatgatataaatgccgatgtcacttgttttggtaacagtttgtggattacactcgacgaagaactagataatggtgaaatggtatgggttaacgcgttacaatcccttccagttggtacgaatactatcgaccatgtcttgcaatttcaatattcatgtcttgataccatagcaaataccactcacgttacagaattttcgactactagggaatttattgtttatcagggcgagaacctcgctacagctagcgcagaaaacgcatttatccctagtacaaaacttatatcaaccaccacaactggatggacagacacatacacaagcacgtactccactgactcgacttttacagtcgggacagacactcaaaccacgccggaggtgatcatccacgtggagacccctagcacaagacttacatcaaccaccacaactggatggacaggcacatacacaagcacgtactccactgactcgacttttacagtcgggacagacactcaaaccacgccggaggtgatcattcacgtggagacttccagcgcagagcagaccttggctacggtagtaacttcaactagtactaccgcatggtctaaacctgtggaaactgacacacagcgttatacttcatctttttctgtaacaattaatagcacgtcgtcagtctttttatccacagaacttgaaacttcgcataccccggttgttagcactaaatccgggcacactacaataaccactagtggtactcctgtttcctctgaaaagtctactacgaccaccgatagaaatctttcatcatctgcgataaattcctttaataactctgccagcaactcacaaacttctagccctttcatttccagttctgctccgtatgagtcatctgtgcacctaagcaaatcatcattaagatctagtctcgtgcatacttccgagcaagtccctagttcatctattaaaacgaaaactaaagtaacctctgggtatacaactttgtcaacaacatctagagcttgctccagttgtttagatgaaacggcaagtccatctcagaacactaaaattgaaacgcccataatatcgtccatggtacactactcttctgctccaagtagccgaccatctccgttcaacttacaagtaagctcgatgtctacttcccattctttttcaatctacgagggtaaagcttctgcgtttttctcaagtgagttcagtaccatcttttttcttgttttatcgtacttcctatactag

SEQ ID NO: 3049 - DNA, 1017 bp, Saccharomyces pastorianus
atgacaatacgtccagcaacacacgccggctcatggtattccaataaaccccaagagctatctcaacaattacagacttacttgactaagagtacaaccaaagggcccattcataacgctcgaattatcatatgccctcatgccggttacaggtattgtggacatacgatggcccactcgtatgcgtcattagatttgaatagtaaaaccaaaagaatattcatattgggcccctcacatcatgtttattttaggaatcaaatactagttagtgcattcaacgggttagagacgcccttgggtagtttaaatgtggatacagatctatgtaaggcattagtaaagagagaacatcctgcaaacggcaaaaagttgtttaaattaatggatcatgacactgacatggctgagcattccttagaaatgcagttcccaatgttggtagaaactttaaaatggagaggagtttccttagaagaagttaaggtggttcctatgatggtttcacataatagcaccgatatagatcagtctattggcgaaatcctgtttgaatacatcaaggatcccaataatctatttattgtaagcagtgatttttgccattggggccgcaggttccagtacactggatatgttggaagcagagaagagttgaatgaagctattcaagaagaaacggaagtggaaatgttaactgctaggagtaaactttcacatcaccaagtgcctatttggcaatctattgaaattatggatagatatgccatgaaaacgttgagtgaaaccccaaattctgaacggtatgatgcttggaaacagtacttggaaatcacgggaaataccgtatgcggtgaaaaaccgattagtgtgatactaagtgcattatccaagattgaaggtgccagagctacaaatattaaatttcaatggcctagttattcacagagttctcacgtgacaagtattgatgatagtagcgttagttacacttcaggatatgttactttagattag

SEQ ID NO: 3050 - DNA, 3264 bp, Saccharomyces pastorianus
atggcggataaagaacagcacaccagtgtgaaactcgagaataataagtcattaagggacctgggggtcaacgtgctttcccagagcagtttggaggagaaaattgctaatgatgtgaccaatttcagcaatctgcaaacgttgcagcaagaggagacccgtttagagcgcagtgagactgctctgcaaagatatgttggcaagaaaaacttacttacaagaaagttaaacaatgccactaggatatctgttaagcaaaacctccgaaaccaaattaaagatttgcaaactgatgatattgaacgagttttgagagatattgaagatattcaggcaaggattaacgatttgaaggtgcagataaatcaaggaggtgaaaacaagactgctaaagtgggattgcaaaggcctggagaaagtgagaaggagtttttgattagaactggtaagatcactgcatttgggcataaggcgggtttcagtttggacacaacagatacagagtatggggataatgaggagcaagagggtaaagatttcgaggtggctactgaacaaatggtacagaacttaactgatgaagatgacaacctcgatgaccaagattttaggatgagtggcgaagaaagtgaggaatatgaagaagaagaaaacgacgatgaagttattgaagacttggagaatcttgagtttaaaaatcaacctggcgaggcaaaggatgacggagatgaattgtattatcaggtaagattaaaacgatggatcaaacaacgttctgcagatagaccaaagacaaaggcggcatcggagattccggaatggcggaaaccccatcccaatatcccggatgcaaaactgaacaacgagttcagaataccaggtgaaatatattcattactttttaattaccaaaagacttgcgtacagtggctttatgaactttaccaacagaactgtggcggtattatcggcgatgaaatgggtttagggaaaacaatacaaatcattgcctttatcgcagctttgcatcactcagggttattgacagggcccgtcttaattgtttgccctgccactgtgatgaaacaatggtgtaacgaattgcaccattggtggcctccattaaggacggttatattgcattctatgggttcaggaatggcgacgaatcaaaaatccaaaatggacgaaaaggatctagaaaacttgataatgaattcaaatccaactgagttttcatacgatgattggcagaatccgtcaaaaactaagaaagctatagagtcaaacttccatttggaccagctaatagataaagtcgtcactgatggccacatattgattactacttatgtcgggctgagaatacattcagacaagttgttgaaagtgaaatggcagtatgccgtattagatgaaggccataaaattagaaacccagactcagaaatttcattaacctgcaagaaattaaaaacacataatagaattattctttcgggtacacccatccaaaataatttaaccgaactctggtcactttttgatttcatctttcccggtaagttgggaactttgcctgtatttcaacagcagtttgttatacccataaatatgggtggttatgcaaatgccaccaacatacaagtacaaactggctacaaatgtgctgtggcgttgcgtgatttgatttcaccatatcttctacgtcgtgtgaaagccgacgtcgcaaaggatttaccgcaaaagaaggagatggttctcttttgtaaactcacgaagtttcaaagaagcaagtatttggagtttttacattcatcagacttgaatcaaattcaaaatggtaaaagaaacgttcttttcggtattgatattttgaggaaaatttgcaaccatcctgatatacttgatagggaaacaaaaaggcatgatccatcctatggtgaccctaaaagatcagggaaaatgcaagttgtcaaacagttgctgttactatggcataagcagggctacaaggcgctgcttttcactcaatcgcgacaaatgcttgatatcctagaagattttatagccatgaaggatcctgatttatcagagctaaaatacttacgaatggatggtacgacgaatatcaagggaagacagtcgttggtggatcgatttaataacgagccttttgatgttttcctgcttaccacaagagtcggggggttaggtatcaatctaactggtgcaaatagaattattattttcgatccagactggaacccatctacggatttgcaagctagagaaagagcgtggagaattggacagaagagagaggtttcaatatacaggttgatggtaagtggtactatagaggagaagatatatcataggcaaatattcaaacagttcttgactaatagaattttaaccgatccaaaacaaaagcgatttttcaaaattcatgaactgcaggatttgttttcacttggtggtgaaaatggacactctacagaggaattgagtgaagaagttcaaaagcacaccgataatttaaaaaattctaaatcgcaagagagtgacgattttgaacagctagttaacctatccggtgtttctaaactagagagtttttataacggtaaagaaaaaaaagaaagcaacaagtcagaggacgatagattgattgaaggtttgcttggtggggaaagtaatttagagacagttatgagtcatgattcggttgtgaactcccacgctaacagttcttcttccaatatgattacgagggaagcatctagagtagcaaccactgcggtaaatgcgctaagaaaatcgagaaagaaaattaccaagcagtatgaaatcgggacacccacttggacaggtagatttggtaaagcaggtaaaatcaagaaaaaaggtacattaagaaataaatcggctgggtcagctgccattttgggtaacattgctaagtcgcaaaaggaggcgtccaaagaagtacgccaagaaaatcatgacgatgatatcgacgtggtaaaatccgaagagtttgatcctaataccaagatactaaaagatattcaaacatatttgcaaaatcaaaacaattttttctctccaagtgttagcatcatcgataatattggggttgaccttgccgataaaaaagatgttatcaaagttagagcgttattacgaaccatagcgcaattcgataaagagcataagggatgggtactgaatgaagagtttcggaatagcatcgactga

SEQ ID NO: 3051 - DNA, 696 bp, Saccharomyces pastorianus
atggaacgattacattcactagaatccagtttgcctccagagcaaccccccacaaagcaagctattgataacctcaacctagaactctctcaagaattcaagctagccgccaatgcggtaacaagactgtatagagtagccaatgaaaagaactctttaacaaaacaccaagggtacctgacctgtttagatgatatgctgtatgcgctggactcaaatatgacgactgatgagttaaaggcatggtgttacaaacaaaaaaatgatattttgtcaaattctcaggacaagtccataaattgcgtaaaagaaaaggaaaggaaacccaaattgagcgaaaaccagcaacgtgaatctgagactcaaaaagagcattccaaaagagattacgagtctaaatataactttaacttcaatgaatcaaattcgaatctcgcagatgccaatgtaaacgtcgtacctaaatttagactctccgttcctcccttgagtgttgagcacccaccgagaaatgctaatcgtataaaatcctggaaaatacgaacaataaatcacggtcggggggatatgaattccaatgacgtaacagcgttagaaaacgagcatgaagagacccatcatgaaaaaaaaccgaaactatcctctgatttggaggcaggtaaaatggaaatccatgaggacatggagttggaatag

SEQ ID NO: 3052 - DNA, 657 bp, Saccharomyces pastorianus
atgggccgtggtaagttaatattgatagaaggcttggatagaactggtaagactacacaatgcaatatcttgtaccaaaaattgttaccggattgtaaattattaaagtttcccgaaagatcgactcgaattggaggactcatagaccaatatttgacggacgatagtttccggttatcagaccaagccattcaccttcttttttcggcaaacagatgggaaatgattaatagcatgaaagaagcattgctggaggggaagaatatcatcatggatagatatgtttactccggagtagcatattccgctgccaagggtacgaacgggatggacctaaattggtgtttacagccggacataggactactcaaaccagatctgacattgtttctaagcattcaagacgttgctagtaacgcagtaaaggatggatttggagaagaaaggtatgaaactttaaagttccaaaaaaaagtgaaacagacgttcgtaacactattggaaaatgagataaagaaaggtgatgagtcgatcaagattatcgacgtcagcggtaaggatatccaagaagtggaagcgctaatttgggaaatagtagagcccacgttgactacagaaatagatcatgataatttttcattttttcaacataaatag

SEQ ID NO: 3053 - DNA, 2811 bp, Saccharomyces pastorianus
atgttatcagttcgcaggttttctatgtacgtattaagatccttacggctacatctcaagaaaatcgttgttacacttctagccgtccaactgttgttcattactacttatgtgctgaatggccattcgttgattatggacggcagctggagatcatttaccgcaccttttttacagccgcttacacctaccaccaaaaaccatacatatcctgtatttgatttgaaatcaacggacagtataaccagactatacgaaaaaatgaatttcgacacttcaggagaatggatcgatacatacaccctgaagaacgatctcctcactatgaaaatgggccctgacaaagggcgggttttggactcggtggacgatttgaggtactataataacgatccgaggttaatatggtctgttgttctagaccacttgctagcatccgactctaatgaatacgatttttcgtggtatgattgggccagctttgaatcgttgaacaaacttatcgctttgaaggatacaaacgtctcttgccaatttgtttgcgaaaacgctttcgataaggacgtactggaaagcgtggagaaggaaatccaagaacccttatttatcactaataggaataaatatgacgaagaagtttggtataatagggaaagaaagatgctgaactctaattcggtaacgcaaattgtgcacgaccactgtaaagacaatgacgtatactataagggtgctcctttcgagcttcccttcattatcagtgaattatatgggaaaatgaggccagaagtttatgacttgcatgccaagaatcacttattatatttcggtgccacaccgttgtcgctgactgttttagatagtgataaagaagcgtacagaattaatttaaaggaaagtgattcatcccaatccaatattgtacaatccaaaatgttgcaaggctacattcaaaggcacactaatgaaatgcaaaacggcgatcttcttttcaatcacaccttaacttttgagaaattcttgcaccacaaatcgactgaaaaacggaaacttgacatcgaaggtttagataaaacaatattttctaaggaatatctagacctatctccatctgattttcacttcgatgccaagacaaaaatcggtgaattggaggccaagctaagatccgaaggtctgtcgttgcacgatacccggtatttacaaagtttaaaaacgtctattaggacagctcctgcattgcagggaaagtattttgcagaggcaagcgaggtggctgatgcaagtgctgatgggcatcatagagacaaaaggtttctgtcccttggatataatctcctgaacgatcctcaggagtttgaagctagattgagctccatgataagaactttccaaaagtttaccaaggctaatgggttgatttcttggttgtcacatggtactttgtatgggtacttgtacaatggattaaaattcccctgggatgtcgatcacgatttgcaaatgcccattaagcatttacactatttaagtcaatatttcaatcagtccttaatattggaggatccaagagaaggtaacggaagatatttgctagatgtaggaagttccattactgtgagaactcacggaaatggcgaaaacaatatcgatgcccgtttcatcgatattgactcaggtatatatattgatatcacagggctgagtgttagttctgatgcggctagaaaatacatggccaagtttgttgaagaagaggagagttcagacaaggacttctccactctcatcgaagactacaactttgatgaaaacgagaaatttgatgaagttgatgactgtgaagactttgccaaatacaccgtatatgaactaagagaatgggtcaactctcatccagacgattttgacaaatcagaaaaggacctagtgaccaaagcatacaaaaaagaacttgtaatgtcgaaaagcgattctcctgaaagagacttaactccaaagcaaaggtacttgctgaataaaaaatataatctctttaattgtaggaataaacacttttccagtctaagcatcttatcgcccttacggaatacaatgttcaatggtgtgccagcgtttattcccaataaacctataacggcgttgaacaacgagtatgtggttccaccgagatacgggtttttgacatttcaagggaaagtgtatctacctgaactgagatactggtttttgtttccagatgtaaaaaaatttgcaaatttacaatcgagagaacccaagataacacggttggaaaatcccctaaatgacttaaaattcagtgatataaacctgctattaacaaatatcataaagtgtgatttccactccgtatttgccagtctgttcaattctctcaatagcactgtctaccgacttaaagagctagaaatacaatatgatcctgacttgagtgaagaagaaaaaagaagtctattaaagaccttaaggaatggtggattgtcgaagaacatgaagtctcctgagaaagacccaataatatatatctatgaaagaaaactatggggaaaagtgaaaaaaatactgaatgctgcaaatatttataatattgcttcccaggttgaaaataaaaaaattgaagagttcgttaaagtatctaaagacctatttgaaagaaaccttgaagagttcaatattctcgatagtgacaatggtaaaacggtaattgacttgaattccaaaggcttgaaccttttcggtgataataagaaaacctcaaatgtgatatttggttctgacgaaaaatattaa

SEQ ID NO: 3054 - DNA, 423 bp, Saccharomyces pastorianus
atgtcaaacgcttgggaggatgtatggggatcagacagcgatgctgaggttgagcagtcgccggatttgctaaaattaagagatgaacacagcaaaagagggtatttggatgggattgtaagttccaaagaagacaatctgcaacaaggtttcgatgacggctttcccactggggctcaattaggaaagcaagttggcacaattatagggatcttacttggcttgcaggcgcgctttggtgatgaagatgaagatctcaggaaggcttacatcaacgctcaaaaagaattacaaatcaataaagtgctcagcaaatcaatatttgatccgaattttgatttgcatgaaaaacatccagtcataatcaagtggactgaaattgccaacgtttattgtaaaaaatatcatgtagcttctatttaa

SEQ ID NO: 3055 - DNA, 975 bp, Saccharomyces pastorianus
atgtccaccaacttcgaaaaacactttcaagaaaacgtcgatgaatgtactttagaacagctaagagacatcttggttaacaaatccggcaagaccgtcttggccaacagattcagagctctattcaacttgaagaccgttgctgaggaattcgctaccaagccggaagaagccaagaaggccattgagtacatcgccgagtccttcgttaacgacaagtctgaattgttaaagcacgaagtcgcctatgttttgggtcaaaccaagaacttggacgctgctccaactctaagacacgttatgctggaccaaaaccaagaaccaatggtcagacacgaagccgctgaagccttgggtgccctaggtgacaagggctctttggatgacttgaacagagccgctaaggaagacccacatgttgctgtaagagagacctgtgaattggccatcaacagaatcaactggacccacggtggtgccaaggacaaggaaagcttgcaacaatctctatactcgagcattgatccagccccacctctaccattggacaaggatgctaccgttccagaactacaaacactattaaacgatccaaagcaacctttgttccaaagatacagagccatgttcagactaagagacatcggtaccgacgaagccgtcttggccttggctactggtttcagcgcagaatcatctcttttcaagcatgaaatcgcttatgtctttggccaaataggtagcccagctgctgtcccaagtttgatcgaagtcttgggcagaaaggaagaagctcctatggttagacacgaagccgccgaagccttgggtgccattgcatccccagaagtcgttgatgtcttgaaatcttacctgaacgatgaagtcgatgtcgttagagaatcttgtatcgttgccttggatatgtacgattatgaaaatagcaacgaattggaatatgctccaactgcttaa

SEQ ID NO: 3056 - DNA, 1194 bp, Saccharomyces pastorianus
atgatgagcaagacaacgaaaagagtctccagcatcaggaaattggcagtgtttgcactagtagccctggtcacgttggctttggcagttcgatttttattctacaactccaatgccactgatttacagaaaatgcttcaaaacttgcccaaggagatttcgcaaagcattaatagcgccaatactattcagagcaccgatctggacctggtccaacattttgaaagtttagccaaggaaattagacatcaacaagaggtacaagcaaagcagtttgaaaaacaacgtaaagtcttggagaagaagatccaagatctgaagcaaaccccgccagaggccacattaagagaacgcattgccctgactttcccatacgattcccatgccaggttccccgccttcatttggcaaacctggtccaatgacaaaagtcccgaaaatattcaagacataaagggcatgtgggaaagcaagaatccaggctttgcacatgaagtgttgacacacgacgtgataaacgcgttagtacatcactatttctattctatacccgaaattttagagacttacgaagccttgccctccaccattttgaagattgattttttcaaatacctgatcttgttggtccatggtggtgtgtatgcagatattgacactttccccgtgcagcccattccgaactggattcctgaggagttgtcaccttccgacatcggcttgatagtaggtgttgaggaagacgctcaaagaccagattggagaaccaagttcattaggagattacagtttggtacgtggattatacaagctaaacctggtcatccgatattgagagagatcattgccaaaatcatagagaccacccttcaaagaaagaaagaggaccagctgaatgttaacctaagaaacgacctgaacatcatgagttggacgggttctggtttgtggacagacacgatcttcacatattttaatgattttatgagaagtggggttagagaaaaggtgacatggagattgtttcataatctaaaacaatcaaaactgttaagtgatgttttagtcttccccaagttctcgttcaattgtccaaatgaaatcgctaatgatgatccgtacaagaaactttattttatcacacatttggctgcgcagttttggaaaaacactccaaaagtggaacaaaaataa

SEQ ID NO: 3057 - DNA, 1272 bp, Saccharomyces pastorianus
atggatgttgatatagggaattattttaagcagaagtgctatgatgacaaattgttagatttcatccgatacgatgtcaaaacgcctaaaaggatcaaatacatattacaaaagtccatggcgatggatgaagaaagtgtacgattacaaagattttaccaattggggctagacctgaagttgaagcatttcaaaaggaaatcattaaagaagcaagggcgaatcaaaaatgctagtgaggagttgttacgattagccaatgaacaattgaaactatttaataggatagtagagagagaaaccaattggataatctacccgttatgggtaatggccaagcaattgatttgtctggcaaatgaatcaaacgaactcaatagagactctattgaagaatgtgggcgtaccatccatagaagttttaccatatgtctcaatgatagaaacccaagactgaatgaaaacaagaaaatcggatgctacatgtttgccaatttagaatttgccatctatcatcgattaaagaataaagatatgattaaaaacctggtgaaagtgctcgagagccgagtaaatgctcgggatatcccgcccttgaatcaaagtttggccatagagcacaaatctcagatagtgctgtataattactatttgggccaatactatggatgcctggaaaatgaccacgaacgcggattcttccacctaaatgaggcactcttgcaatgtccattgctctatgtggaatccacaggcaagtttgtcttacagcaccaaatggaaaagataatggcactggtggtcccgctcgggcttctaaccaaaaggctgtatcctcgttgggaccatccagtaataaaagggataatcgttggaagtaagcgtttgggccaagtttatccgaccttagtgcgcagtgtgatcacaggaaacttgccactttttgatgccactatggccaagcatgagaggttcttcctgaaccaaggcctgcacgtcacaatggcattacttcgagaagtggttttcgttcgtttggtacagcggtgttggcaatggggcaacgaccagaaaagcgtcatgcccttacatatcctgctggcaatgactttccagtccgatcccgcggacgagagcgaagaagagcaattgaattcccttgagtgccgcttagcgagtgccatatcaaacgggctagtacgtgcttacctttctcactccaaccgttgtatcgtttttagcaagaaagaacctttcccccatgggaattga

SEQ ID NO: 3058 - DNA, 3444 bp, Saccharomyces pastorianus
atggatcacgaagataataataacaatgttggcagcaataggctgtattcagagcacgcaaacctcgggcctccaacttgggtgagttccaataatattaattccaacaatagcgataataacaataatgacaacaacgatacaaacgcaagaccacaaatgcctttccgaagtagggaaatggcaattccagatagatatgcaaatgaagttaacgaccaagcactaaacaatacatccaggttcaataatgcccaacgggaaacgctatcactcaatagcactggacaacagctaaaccagcggttttcatcgacatttcaaccacagcagcaaacaactgcgctgagtgggatcgatattaacactgtaaacacaaatcttatgaacggcgttaacgttcaaatagatcaattaaaccggctattacccaatctgccagaagaagaacggaaacaaatccacgaattcaaactgatagtaggcaaaaaaatccaagagtttctggctgtcatagaaaaaagaaggaagaagatactaaatgaaatcgatctcgataacctgaaactgaaggaactgcgcatagacaactctccacaggcaattagttatttacataaattacaaagaatgagactaagggcactggagaccgaaaacatggaaattaggaatttgagattaaaaattttaacgattatagaagagtacaaaaagtcattatatgcatactgccattcgaaattaagaggccaacaagtggtaaaccccacagataatttcgttgtttggataaactccatagatactaatgaatcatctgatttgaaagaaggtttacaagatctttcccggtattcaagacaatttatcaataacgtactttcaaatccatcaaatcaaaacacatccacaagcatgacccgtaagtcacctgtgtttgccctaaacctactaccctctgaaatattacatctgatattagacaaactcaatcaaaaatatgatattgtcaagtttctcaccgtttccaaactatgggccgaaataatcgtgaaaatcctctactacagaccacacataaacaagaaaaaccaattagacttgtttttaagaactatgaaattaacgtccaatgaaactgtattcaattatcgtttgatgattaagagactaaatttctcatttgtgggcgactacatgcatgatgtggaactaaattacttcattggttgtgtgaatttggaaaggctgaccttagtgttttgtaagcatatcaccagtagcccaatatcggcagtcttaaaaggatgtaaatttctccagagtgtggatatcactggaataagagatgtgtctgacgatgtatttgacactttagcaacatattgtcccagagtgcaaggattttacgttcctcaggcaaggaatgtaactctgggttcactgcgtaatttcatagttcattccccgatgctgaaaagaataaagataacagcaaacaataacatgaacgatgaactagtggaattattagccgacaagtgccctttgcttgtagaagtcgatataacgttaagtccgaatgtcagagactctagtttattgaaactcctcactaaattgacgcaattaagagaatttaggataactcataatacaaacataacggataatctttttcaagaactttccaaagtggttgatgacatgccctctttaagactaatagatctttcagggtgtgaaaatatcacagataaaacaattgaaaggattgttgatttggcccctaaattacgtaacgtttttttaggcaagtgtagccgaattaccgatgtatcattgttccagctatccaagctaggtaagaacttacaaaccgtgcactttggccattgttttaatatcactgacaatggagtaagagcactgtttcattcatgtacaaggatacagtatgtggattttgcatgctgcacaaatttaaccaacagaactctttacgaattagcagatttgccgaaattgaagagaattggccttgttaaatgtacacaaatgactgatgagggtttattgaatatggtttccttacgcgggagaaacgacactttagaaagggtgcatttgtcttattgctctaatttgacaatttatccgatatatgaactattaatgtcgtgccccagactttcacacttgtctttgactgcagtaccatcattcttacgtccagatataacaatgtattgtagacctgcgccttccgatttcagtgaaaaccagcgccaaattttctgtgtattttcagggaaaggcgtacacaaacttcgtcattatttagtcaatttgacttcgcctgcatttggatcacatgccgatgtaaacgatgttttgacaaaatacattagatcaaaaaatttgatatttaacggtgaaacgcttgaggatgcccttcggagaatcattgtagatttaaatcaagactctgctgccattatagctgctacggggctaaaccaaattaacggacttaataacgatttcctgtttcagaatattaattttgaacgaatagatgaagtattcagctggtatctcaatacttttgaaggcattagaatgagctcggatgaagtcaactcacttttactgcaagtgaacaaaacattttgcgaggaccctttcaacgatgtcaatgacgaccaagagtatgtagttgcacctggtgtaaatcgcgagatcaataacgaaatgtgtcatattataaggaagttccatgaattgaatgatcacattgacgactttgaggtgaatgttgctagtttggtaagagttcagtttcagtttactggctttttacttcacgaaatgactcaaacctacatgcaaatggttgaattgaataggcaaatctgtttgatacaaaagacggtacaggaatcaggaaatttagactaccaaaaaggactcttgatatggcgacttttattcattgataaattcataatggttgttcaaaaatacaagctatccaccgtagttttgagattatatctaaaagacaatatcacattgttaactagacaaagagaattattaatcgcgcatcaaaggtccgcatggaataacaacaatgacaatgatattaatcgtaacggtaataccgtaggaaatatcgtgttagatactgacaccaacaatgatgaaactaatagcggaaatgatgacaatgaaacagaaaatccaaacttttggagccagtttggaaacagaatgcaaatatcacccgaccaaatgaggaatctacaaatgggacttcgaaatcagggtatggttagaaacaataataacgctaacatggaggagtcaatgcctgatactgccatagattctcaaatggatgacgcatctggaacaccagaagaagacatgttataa

SEQ ID NO: 3059 - DNA, 612 bp, Saccharomyces pastorianus
atgatggcttcattacctccagtgtattcattcccgccgctttacacacggcagcccaattctttaacgagaagacaacagctaagtacgtggatagatatcatatcacaatattgtaagagcaaaaaaatctggtacatgtcagccgatggcactgtgatcgatgacgacagatcagaaaatgggaaaacagataacgaagattcgaaaaaagtcggtaagaaccttttcaataacgaagaaattcaaagatctgtatcgcaggtatttatcgatgaaatttggtcacaaatggtgaaagaaggcaagtgtttacctattgaccaaagtggtaggaaaagtaacaataccacaactacgaggtatttcatactgtggaaaaacttggacaactgggcttcattgatattgcagtggttcgaagactccgggaagctgaaccaagtcattacgttatacgaattgagcgaaagtgatgagactttaagttgggaattccacggtatgccggaaaacttgttatattattctttgaagccattgtgtgatagaaacagggctacgatgcttaaggatgaaaatggcaaagtaattgccattaaagttgtttag

SEQ ID NO: 3060 - DNA, 2172 bp, Saccharomyces pastorianus
atggactgggcaatcaaagtggcccatccggaattactgtacggggaccctaaattgtcgatagcgtttattgtgccgagcctgttacacatcatcatagcgttcgtgttactaggcatctgcgcgtctgactttctttgccccaatgtggcccatatttcagaccccaacagtcttcgatcgaatggttcgttagtagcgaaaccagcgtcccatgcttctcatacgggggccttaatggcgattctgctgtcatggtgtaattcttcacctgacctgttctcaaacctggtgagctgggcgacctctaccagagaaacaaggtctgcttcagcatcgctatctatcggcgaagtgctaggtgcgtgcggaatcatcatgtgcatcgtggaaggttccatcttcatgattatgtccagaacccagattgaaatctcgcagatccaaaaactttctattattagggatttggtattcactttggtcgccatgtgcatgatgagttacatttcttttatgaaccaggtcactgtgctaaattgccttttaatggtttttctttacgcattttatttagtcgttaaactgacttttaaattcaatcattccccagaacccgctgctaacgttggtgctgactcggacctcagggagaactctgtctctccgtcttcagatggctcgcttatggcctcaggcctactaccgcctgtacagcccggctttgacgtgtctaattctttaacacacggcatcaagccaagtttactatctgccatggattttaatagtttcttatcaatgctcgaaaactcgtccatggaggaagatgactcaaggaatgaaatggctgaactaactaccttgcgtagcctcacaccacctaaatactggcccactattacaacagctgctgctggcgcggctgaacgaccctttagtgagccaacaaacggctttgggcaatatgctgattctgatagagccataaatagttctcctgcaatgttcgctccttaccacgataactctgacgacgaagaatctgaagaacggacatcactagaacccccaatacatgatcacttcaggacacgggagatgcgacgaatctcaaagaaatctgcaggttggatcttaaaaatatttttaccacatttgtcaaatttttctcaaaaatctacctcagatgcgatattctccattatcaccattccatttttcattgtgttcaagttatcatgcccacaaccacctacagatatgctcagttatgacgctaccctaaacaaatattctttaacaactttgcccatagttttgttatttattcagtcggttactgcgccattcctcttttgcaatacgctttctgttcttctggccgcccatctgggatatttcgtttatcttctcccttttattgtatcccttggtttaattctactattaacggtgtttatcacaaaggtaaatttgcataataaattcactctatcgttagatagctcgaatattctacaagaaaaactacaaaaaagaaagttactcgaaagactcaatacctgcatccaggtgattttcttggccgtcgggataataaatattatactatggatatcccttttagccaactgtcttattgaaatgatggaaatatatcaacaaatattgggattatcgaaagccatactgggcctaactatttttgcatggggtaattcaattggtgatctgatctccaatatttccatgtgcaggctttacaagacgcaaactcatcatcaagaaaggatacacttggcaacgaagtttttcatgatatcatgtgcatcttgtttgggtggtgtaatgctaaactccatgggcggtataggtttcagtgggctagttgcaatgctttttattggcgtttttaatgataacgactggtggtttttaagaaaagtcaaattacaagagccgagccaacttgacgatggattaaattacaaattcgtcgtttcttgcattttcattattctacagattattctcttgcttctattctttggcggaccgaaggatattaagcgatacctcgcaagagatatgaagttagtcggaatgtgtatgtgcgggttatgggcactcgccactttaattaatgtacttctagagctttttcagtag

SEQ ID NO: 3061 - DNA, 3357 bp, Saccharomyces pastorianus
atgagttcgatttatacgtctacggaacccaccaattcagccttcacaactgatgactacaaaccacaattggttgaaggtgtaaattcggtgcttgttattgggtcaggtggtctttccatcggccaagctggtgaattcgattacagtggttctcaagccatcaaagccctgaaggaggacaacaagtatacaatattagtcaaccccaacattgccactaaccaaacgtcccactctctggcggataagatctactacttgccagtcacaccggagtacatcacatacattatcgagcttgaaaggcccgatgctatactcttgacctttggtggccaaacagggctgaattgtggtgttgctctggaccagtctggtgttttggccaaatacaacgtcagagtcttgggtactcctatcaagactttaatcacttctgaggatagagatcttttcgcatctgccttgaaagacatcgatatccctatcgcggaatcgtttgcctgtgaaaccgtggacgaagccttagaagctgctgaaagagtcaactaccctgtcatcgttagatctgcattcgccctgggtggtctaggttcaggtttcgccaataatgctggtgaaatgaaagaactggccgcacaatctttatctttggctcctcagattctcgtagagaaatcattgaaaggttggaaagaagtcgaatacgaggtcgttagagatagagttggcaattgtatcacagtatgcaatatggaaaacttcgacccgctgggtgttcacactggtgattctattgtcttcgctccatcgcaaactttatcagatgaggaatttcacatgttaagatcagcagctattaagattatcagacatttgggggttattggtgaatgtaatgttcaatacgccttgcaaccagacgggttagactatagagtcattgaagttaatgcccgtctatctcgttcctctgcattggcctctaaggctaccggctacccattggcatacacagccgctaaaattgggctaggttatacattaccagagttgcctaatccaattacaaagactacagtggctaattttgaaccctctttagactatattgtggcaaagattcccaaatgggatctttccaagttccagtatgtggatagatccattggctcctctatgaaatcagtcggtgaagttatggccattggcagaaattatgaagaagctttccaaaaagcattaagacaggtggacccatcagtcttagggttccaagggtccactgaatttggcgataaactagacgaagctctaagaactccgacagatagaagagtgcttgccatcggccaggccttgatccatgaaaactatactgttgaaagagttaatgaattaagtaaaattgacaagtggttcctctacaagtgcatgaatattgttcatatatataaagagcttgaatctgtaagctctttgagtggtctaagtaaagaccttttgcaaagagctaagaaactagggttttcggataagcaaattgcagttactattaatgaatactcccacacaaatattaatgaattagaaatcagaagtttaagaaaagcttccggcataattccattcgtcaagagaattgatactttggccgcagaattcccagctcaaaccaattatttatataccacttacaatgctaccaagaatgatgtagagttcaatgaacacggtatgcttgttttgggttctggtgtttaccgtattggttcctctgtggaatttgactggtgtgctgtgaacaccgccaagactttaagagctcagggtaagaaaacgatcatgatcaactataacccagaaactgtctccacagattttgatgaggttgatagattgtattttgaagaactttcgtatgaaagagtaatggacatttatgaaatggaacattctgaaggttgtgttatttccgttggtggtcaattacctcaaaacattgctctaaaacttcacgataatggctgcaagatactgggtactgatccaaatgatattgatagagctgaaaatagacacaagttttcttcgattttggattccattaacgtcgatcaacctgagtggagtgaattaacatcagtggaggaggccaaagtatttgcatctaaagtaaactatcctgttttgatccgtccatcatacgttctttccggtgcggcaatgagtgtcgttaacaatgaagaggaactgaaggccaaattgactttggcatccgatgtttctcctgaccatccagttgtcatgtccaaatttattgaaggtgccgaagaaattgacgttgacgcagtagcttatgatggtaccgtcctggtgcatgcaatctctgagcatgtagagaatgcaggtgttcattccggtgatgcttctctaatcctaccaccacagcatctttctgatgatatcaaaattgccctgaaggatattgctgacaaggtcgctaaagcttggaaaatcactggtccattcaatatgcaaattattaaagatggagagcatactttgaaagtcattgaatgtaatattagagcttctagatccttcccatttgtttcaaaagttttgggtgtcaacttcattgaaatttctgtaaaagcgttcttgggaggtgatatcgttccggaaccagttgatttgatgctcaacaagaaatacgactatgttgccactaaagtaccccaattctcctttacaagattggctggtgccgatcctttcttaggtgttgaaatggcatctactggggaagttgcctcttttggtaaagatctgattgaaagttactggacggctattcaaagcactatgaactttcacgttcctttgcctccaagtggaatattatttggtggtgacttgtctaaagagtatctgggccaagtggcttctatagtggctactattggttacaagatttatgccaccaatgaaaataccaaaagctatctacagaagcatatcaaagagaagaatgcacaaatatctttaatcgatttcccaaagaatgacaaaagaaaattgcgtgagctattccagaaatatgatataaaggccgttttcaatctggcttccaagaaagctgaaagcactgatgatgttgattatgttatgagaagaaatgctattgattttgctattcctttattcaacgaacctcgcactgctttactatttgtcaagtgtttgaaagcaaagattgctgaaaagataaaaatcttggaatctcatgatgttattgttccatcagaagttcgttcatgggatgaatttgttggttttaagccggaataa

SEQ ID NO: 3062 - DNA, 1503 bp, Saccharomyces pastorianus
atgttcatcagtacaagatgcagaaataaaggcttcatccttaggaactttgtatgggcaaaatcatcgatttttcgttccgtttcgaatcaatcggtgcagccaaaagtggctacaaaaccagacggtattttcagctatgctctgatagacaacaaatcctacatcaagatacgaggacccgacactgtgaagtttttaaatggattaattacctcaaaactattgcctaattttatcaagaaaaaccttaccactatagaaaacagtgaggcatctccagaaaatgacaagaataaggccaccctgaatgttcctgtgcccgagttcgatgcgagcctgggaaattggggactatacaatgaaacaggtactcaagggccttatatctccagatttggtttgtattctgcctttttgaacggtaaggggaaactgataacagacacaattgtttatcctacacctgtatcagcaagtgagggaactccgaactaccctgaatatttgttggagcttcacgagaatgtcgttgataggatcctacatgtgttgcaaactcacaaattggccagtaagattaaatttgagaaaattgatcatctttccctaaaaaattggaacgttgaaatccaattccccaatttgcctgaagatatggaaaatccatggtttgacaatttgttagatcccatggctttggcaaagacatccgaagatgcaagtaatttcgctgccaatgttttacagtcccttttcaaatcggatcccaggattttgggcgtttatgtggagagaaggaccgagtcaatctcaagacacaattccacctttccacaatctttcaggctcgtgacctcacagcaagtggaggatccatctaaattatttaattttgacgtttttgagttctccttccaaacgaagaaaacgaaccctgctgaaatcagacagaggaggtttcaaaacggtcttgtagatagtactcaggattacaagcctgagacattactgcctttagaactgaatttcgatttcctacccaatactataagcacaaataaaggttgttatgtaggtcaagagttaacggctaggacgtatgctaccggtattctacggaaacgtctagtgcctgttaagttagaaaatcacagccttttgaatacggatccagagaaaaaatacgcagaaatccacctagattcaacatcgacaatcgaaaaagatcttgctcatcttgactcagcggctgttaatccgttctctaataaaacggcagcactgcccaagaggaaacaaagaccagccggttcgttgattgctaacgagggacaatacggcgtagcattattgaggattgaacatttctccgcagccttctcatctgatgaccctgtagagttttctataactacagcaaagggtgaaaacgtcaaggtcatacctcaaagaccattctggttcgaaaattggcaagaaaacaacgacctttgtaaataa

SEQ ID NO: 3063 - DNA, 1350 bp, Saccharomyces pastorianus
atgacaccagacattttggttaagttcaaaggtgcaagcaaagacattaaattgttatgggcatctgtgtttcttagactgttgtcctatggtttaacaaaccaagttttaacgttatttctcaatgcaattaatatggcagaagataaaatcggtttgttcatgtcgttgacattggctggagacgtgatttgttcctatattttaacttggtatgcagattcttggggtcggagaaaagtgctaatatatggttgcgcaatgatgctaatgagtgggttggttttcagtttcagtgaaaatttcactcttttgctaatatttgctattattggtgtgatatcaccttcaagtgatgaagttggacctttcaaatccatagaagaggccatgattgcacatttgagtcctcataatacaagacccgaaatatatgctattcatgccttggttggaacaatggggagtgcattaggtgcaatagtctgtggtgtattcgtggatctcttgaaaagaaccggtgtagcccatactgatttacaatgctataaattagttttcttattgtatgcctttttcgcattttgcaagatggtcatcatgctcttattatctgatgccacagaaatggatgggaattatgaacatattaatcaccacaatgaagagacgccagagcctctggatgtcaacgatgagaccgcaccattaatgagacaagcgacccatccagaggaaagatccaatagtttatccaaagaaacagtttcagtcttgctgaagttgttagtcatctttatggttgattcacttggatctgggtttatgacaagtggctggatggtttattactataataagcaatttctaatgggatcgctggcattgggtaccttgtttttcgttacccaattggttatggcttcttctaccattccatcatctatcattgccaggtatttcggcccagtaagagccacattactggtccagattccgtcagggatattctcgattcttatccctatggcccaagactatttacccttatctattctttttttgaatcttcattttgcaacaactgcgatggatgtgacgccaagacaaattctattgacaaatatcattaagccaagagacttaaccaaagttatgggggtggtaaacattggtaaaacatttgcacgttgcattggcccaatcttcacaggactacttgccaagaataactacttatggctatgttatatcattagtgggtccttggtaatattagcagatttgatcctagcatgcatgtttttgggagtggatgctaagatcaaaaaacaaatgaaccaccgttaa

SEQ ID NO: 3064 - DNA, 816 bp, Saccharomyces pastorianus
atgatgagaaccaccctaagaatcagaggacacgcgtcgcatgttgctcaggtttgccagatgaggacggctgcgagtagcgcaggtactgctgcagcagggacagctggaatagtaaagaaaagttacaatagtacagaaagcaaatctgcgtttgcagcaaaaccggaggctagcaatggaaacggcatgaaggaatattcgggtagtcttaacaccagactcgagggcacacctttggaatcccgcagcacgcccactaatactttgaacggtagtcataagccggtcagggaagaaattgactggtacacttcgtggtatgggctaggtatgaagccattcgaatcgcaagtgcagaaggagctggttcaacctttggaacctaaggatatcgaagtcaaaccagacgggttgatttacctgcctgagattaaataccgtaggattttgaacaaggcatttggagcaggcgggtgggggttggtcccaaggtcggaaactatagtaacgtccaaactagtgaccagggagtacgggcttatttgccacggccaattgatcagtgtggccagaggtgagcaagactatttcaacgaatctggtataccaacagccacagaaggttgtaagagtaatgccctgatgagatgttgcaaggatctaggtgtcgggtccgagttatgggatcctgttttcataaaaaagttcaaagtcgaacattgcactgagaagtttgtcgagcatgttaccaccaagaggaaaaagaagatttggttaagaaaggacagacaggtcgagtacccttataaatag

SEQ ID NO: 3065 - DNA, 915 bp, Saccharomyces pastorianus
atggttaagataactactgcagctactgccgtcgcgctagcgacaagtgccgccgctacttctgcgaccaccactttatctccatatgacgaaagagttaatttggttgaattggctgtttatgtctccgatatcagggcccatctagccgactactacgctttccaaggatcgcacccaactgaaacataccccccagaaattgccagcgctgttttcaattacggtgaattcactaccatgttgaccggtatttcaggagacgaagtcactagaatgatcactggtgtcccatggtactctaccagattaaaggctgccattgctcaagcgctttcggacgacggtatttacactgctttaccaacatctacctcaacttccgctgaaactactgcctcttctgctgaaactactgcctcttctgttgaagtcacttcatccaatgacgctgttacctcagcttcaggttccgtcgttaatcctacttctgctgcttcttccccagcttctgctgcttctgtggcttcttctaccttgatctcttcagttattactagaaatggcaatgaaacttccagtagtacttccaacagtaaaatcacatccgttgtatatggtaataatgcaactttgacagccactaaagtctcgactgatgacgctaccattactagctgcaagggtggctgcactaaagaagacaccacttcaaccaaaacccaactttccaccgttgaaaccactgtgacgagttgttcagccggtgtctgctccactttgaccgctccaatcactaccgccacttcatcagcttctcatgcaattgaaattaacacgaacggtgctcataagttcgggaatggaggcgttttgggtgctgctatcattgctggtgccgctgctttattataa

SEQ ID NO: 3066 - DNA, 1848 bp, Saccharomyces pastorianus
atgtcgtcaagaacagaagataaaatttccgatgaacaacagctgcccgctgctagaaagctatactacaactcaagcacttttgccgagccacccctggtggatgaagccggcaaccccattaactacgagccggaggtctacaacccggaccacgaaaagctgtaccacaacccatcgctgcctgtgacctctattcaggacactagagatgacgagttactagagagagtttatagtgtggaccaagaagtggaatatgaagaagacgaagcagacaaaccgaatttgagtttcgcatccatgaaaagttatgctttgacaagattcacgtctttgctgcacgtccacgaggtttctttgagaaatatcaacccggtcccggaattgaggaagatgacgctgcaaaattggaactattttttcatggggtatcttgcttggttgacggctgcctggtgtttcttttgtgtttcagtgtcagtagccccactatctgaactgtataatagacccactaaggacattacctgggggttggggctggttttattcgttcgctcagcgggcgcagttatatttggtttatggacagacaagtcttccagaaagtggccctacatcacctgtttgtttttatttgtcattgcacagctttgtactccatggtgtgacacttacgaaaaattcctgggcgtcaggtggatcactggtattgccatgggtgggatctatgggtgtgcttccgcaacggctatagaagatgctccagtgaaagcacgttctttcctatcaggtctcttgttctctgcatatgctatggggttcatcttcgcaatcattttttatagagcctttggctacttcagagaagatggctggaaaattttgttctggtttagcattttcttgccaattttactaattttctggagattgctatggccagaaacaaaatatttcaccaaagtcctgaaggctcgtagactaatactaagtgacgctgtgaaggccaacggtggggaacctctgcccaaggccaatttcaaacaaaagatggtgtctgtgaagaaaactgttcaaaagtactggctgttgtttgcgtatctagtcattatgttggtcggtccaaattacttaactcatgcttctcaagatctgctgccaaccatgttgcgtgctcaactaggactatctaaggatgcagtcaccgttattgtggtcgttactaacatcggtgctatctgtggtggtatgatatttggtcaattaatggaagtcacgggtagaagattaggcctgttgattgcgtgtgtaatgggaggttgtttcacgtatcctgcatttatgttaagaagcgagaaagctattttgggagctggattcatgctatacttttgtgtttttggtgtctggggtattctacccatccacctggctgaattggctcctgccgacgcaagggctttagtcgctggtttagcttatcaattgggtaacctggcctctgcagcagcctctacaattgagacggaattagctggaaaatatccactagaagtggattcctctggtattgttataaaggaagattacgctaaagttatggccatcttaactggggccgttttcatcttcacttttgggtgtgtctttgtagggcatgaaaaattccatcgtgatctatcttctccagttatgaagaagtacataattcaagtggaagagtacgaagctgatggtgtttcaattactgagattgtggagcaaaaaacagaatacggttctgtgaaaatggttgattctactatctcaaagacatttgaagaacacattgagaccgtttaa

SEQ ID NO: 3067 - DNA, 3873 bp, Saccharomyces pastorianus
atgaactgtcttcgagatttcaagaatggaagacgataccacatcttccagaacttaagcatacgaaatgactacaaactgctatcggtaatggtagtgagtacagtggcaacgggtctggtaccggcagttacttctgtcttgacaggcagggtgttcgacttactatcggtgtctgtacttagtggggcccatcatgatctgtacccgcaactggtgcgaagatcaatggcagtaatggcacttggagttgcctctgtaccagtaatgtggctttcattaaccgcttggatgcgtattggtgaaagacaaggctttagaatacggtcgcaactactggaggcatatttggagacgaagccgatggaatggtacgatgccaacgaaactttgctaggagatttcactcaggtaaacagatgcgtggaggaactgagatcaagctcagcagaggcatctgctgtaacgttccaaaaccttgtcgccatatgcgcccttatagggacatcgttctactattcgtggtcactgactttgattatcctttgtagttctccagtaatcaccgtatttgctgtgatattttccaaaatgatccatatgtacacacaaaaggaaaatacagagaccagcaaagcagctcagttgttcacatggtcgatgaatgccgctcaattagtgagattgtactgtactcagcctttagaaagacagaaatttcaagaaattattttgagctgcaacacgtttttcatcaagagttgtctctatgtcgctgctaatgctgggatcctgagattcctaacattgacaatgtttgtccaggggttctggtttggctctaccatgatcagaaagggaaaattaaacatcaatgatgtcatcacttgcttccattcgtgcatcatgctaggctccactttgaacaatactctacatcaaattgtcgttcttcagaaaggtgaagttgctttaaagaaaattatggctttactggagagtaattccaaacagaatgccttaaatactagaaggcatatccaaccagcattaaactatgccgctagtgatttggtttttgaaaacgtttcgtttgcatatccaagtagaccttcagaaaccgttttgcaaaaagttaatttaagatttcctgcaggtcagttcacttttatagttggaaaatcaggttccggtaaatctacaatatccaacttattattgaatttttacgataactatgatgggtcgatcttaatcaatggccgaaatactcaatcaatccaacgaaaaagcctaatcagcaatatcaccgttgtggagcaacgttgtactctatttaatgataccttaaaaaagaatatacttttaggctcaacaggttcaataagaaatgctgacaccaacatcattggaaataacagtataatcaaagacgcatgtaggatggccctcctggataggctgattctagatctccctgacggactagaaacattaatcgggagcggaggtgtatcattaagcggtgggcaacagcaaagagttgctatcgcccgtgcattcattagagatactccaatattattcctggatgaagctgtctctgcgttagatatagttcatcgcgacctattgatgaaggcaattcgacactggagaaaaggaaagaccacaattatactgacacatgatctaagtcaaatcgagtctgatgatcatttatacgtgatgcaagaaggtagagttattgaaagtggtatccaatcggaattgttggctgactccgctaccacattcagtaaatggtactgtctacaaaacgacttttctgatgcgaaaactatcatcaatacagagactgaggaagattccgtatacaccacggaaagctttaactctcaactggaaactcccaaactcggagtagacctaaacaaattagagtatagtgaaacagatcagttatctttttatgaaacaacccatcgccagagatcgaactacaagacaaaaagaataagagtcgaagacgaagaaaacgtacatactgtaaaacaagaaaatgatatcgaaagctcaaccgggccccaaatcttaagcatttctgcaatcataaaaagaatgatcaaggatattagatataagaagattttgatcttagggttactgtgctctctcattgccggtgccacaaatcccgtattttcatacacattcagtttcctgatggaaggaatcgtcccatccacagatgggaataccggttcttcattttacttggcgaaatggtcatttattgttcttggtgtggctgcagcagatggtatttttaattttttcaagggattcctgttaggtcactgtagtgaatattggattatggatcttagaagcgaaatcatggacaaactaacaagaaagaacatgaactggttttctggtgaaagtaacaaggcttctgaaatttccgccttagtcttgaatgatctaagggatttacgatctttagtctctgaatttttgagcgcaatgactagttttgttactgtatccactataggactagtctgggcattaatatcaggctggaaattaagtttagtttgtatatcgatgttcccgctgatagtgattttctcagctatttatggtggcatcttacagaattatgaaacggattacaaaacatctgtcgctcagctagaaaattgcttatatcaaataatgactagtatcaaaaccattaaatgtctacaagctgaattctattttcaattatcgtatcatgatttaaaaaaaaaaatggaacatattgcctataaacgtgccgttgctacgggctttggcatatcagtgacaaatatgattgccttatgtattcaggccattctttactattatggactaaagctggtcttggttcatgaatacacctcaaagaaaatgtttgaaacgttcaccttgctattgttcactattatgtcgtgcactagtttaataggccaaattcctgatattagcagaggccaacgtgccgccagttggatatatagaattctcgatgaagaagaggatactctagagattgaagacagcgatgcgagagcactagacataagtggtgctgagtattatagagacaagaatatacctattgtttcgatacgaaatctgacattttcctacccatccgctccaaatgtccctatttttaaaaacatgaaccttgaaatgttttgtgaacaaacaatgggaattgtaggtgagtcagggtcagggaaatctacactctctcttttactaacaaggctttataactgtgaggcaaacaacattataattgacggtacagatgtaaatgattggaatttgtcaagtttgagaaggcaaatttcagtagttgagcaaaaaccttcttttttcgatggctccattagagataacttaacttacggctgtctgggtgaaatgcttgaagttgatatttacgacgtactaaaatacgtggggatttatgatttcgtagcttcattacctcacgagctggatacacgtattgatacaaacttattgtcgggtgggcaagcacagagactttgtatagccagagcattattaagaagatctaagattttgattttggacgaatgtacctcagctttggattctgtcagttctcatattatcaacgatcttgttagaaaagggccacctggcctgctgactttggtcataacacatagtgaacagatgatgaggtgttgtaattctatcgctgttttaaaacatggtaaagtagttgaaaaaggaaactttgatgatttatataataaggaaggagaattgtttcgcattgtttctaacagaagttaa

SEQ ID NO: 3068 - DNA, 810 bp, Saccharomyces pastorianus
atggtgaactacggaacacacagtagtgaggctttgagagtgctgaaaacgcctaagtttgtatcaaagtatggcaacgtatcgagcaagcaacgttttttccttaaatggaagatacaagacaagatctgcgagagcaaataccaagagtacttgaatgagtacaacacctttgtgctttatgattgggaaggcagcaacgccgctactgccggcgacgattcttcttacaatatgccctacctgtggcaagaattcataagggagggagtgtcgacaggaaagataaacgacaggcttccgacggtcttcatgaagaagaaattgaggaactctgccatgggtcgctgcttggggcttgagttcctcactgagcccagccagtcgacgcacgaataccgatgtttgtttcagacagtacaggatatcacgtacctgtcgcaattgctcctattcaatagcacacaaaacatcccgatgaggttgaaagtgcacaccatcggcataaatatcaactctggccccaaacgttccgtggtgggcaatgccagcgacactggcatgaacgaagcggtctcgtatatccagccgctgctggaagaatcctctcagatgtaccgcagcctgaactactggaagcttctaaagatagcacgtagagacgcacataatgaacctctggacgggagcacaagcatcaagtcgcaagtcaagcttttactggaccaactggccacgaaccagatgacctcgccctcgatcaccgaccacaagggtcacaactggcttgtattcacaagaagtcagtag

SEQ ID NO: 3069 - DNA, 558 bp, Saccharomyces pastorianus
atgaacaccaacgccaacactatggtaatgaacgatgcgaaccaagcacagatagcgtccacgttcaccaagaagatattggcacatctggacgacccagaccctaacaagatggcccaattcgcacagctcttcaacccaaacaactgcagaataatactcaatgcgacgccctttgcgcaagccgcggttttcctacaaatgtggcaaaaccaggtggttcaaacacagcacgcgctaaccggcatagactaccacgttatcccgggctccgggacgttaatatgcaacgtcaactgcaaagtcaggttcgacgaaagcggcaaagacaagatgggacaagacgcgacggttcccatccaacccaacagcagcggaaacggaaaccgcctcaacgatatgaacaagccaaggcctctgtggggcccatatttcggcctttctcttcaactgatcatcgatgaccgtatattcagaaacgacttcaacggtgtgatatcggggtttaactacaacatggtttataaacccgatgactctctgctgagaattcaatga

SEQ ID NO: 3070 - DNA, 930 bp, Saccharomyces pastorianus
atggagaaaaaaccgaaatgccaaatagcaaggaccaagccgtcgattgaaaacgtcataccatacaaccaattcaagaaaacacagccgcgattcaacggcaacttttcctccttgaccaacgatgaggaatacgtaatactgtttggcggaggtcgagacttggttctaggctctttgacgccctgcgcgagctcccatttgaccaaccaagccggctctcaggaccccagcgaatacgggacagacctctttattctcaacagctgcattgtcatctggttcaatgggctgggctacgggctagaaataccatacatcagcgttctgtaccatgcatcgagacgactgccggagggaagagacgggcttcgactagagattttgctaactttggaaagagacgaagtgttggacatgctataccaaagcctcgcgccaaacaccagcgaattcggcgaggacgaagacgaggtccacaatttggccttcaccatgcagagcgtggagctgaccatcaggcccgaatactcgatatacgatcggcattacaacaacgaaatcgaaacacttttcaccttcgagaacttcggcgtgaacaggggcgatgacctggtgaacaactgtaatgaagcgctagccgtatgcatggacctgcacgggaccgacgcgggagaccaagatcaagaacaagatcaagacctcggcctggggcttgagggtgcgctcgagtccaacgccacgtacgctgggcttggagacaccctccatgtaccgccagtgttccagaacgatggcctagcagacgatctagacggggatctcgttatggacaacgtggtctctaggggcggtccagaagccagcatgtctatggagttctacgcaaatcaaaacctgactggcacgaagaacgcaagagacgaatga

SEQ ID NO: 3071 - DNA, 1413 bp, Saccharomyces pastorianus
atgtcatacaagtcagcaataataggactatgtctacttggagtgatattactcataccacctttagcgtggcattccaagaccaagaatattccggctataattttgataacgtggttgcttataatgaatataacgtgtattgtagacgcggctatatggagtggtgaagacttcctaacaagatgggatggtaaaggttggtgtgatattgttatcaaactgcaagtcggtgcgaatattggtatatcttgtgccgtcactaacataatctataacttgcatgctattttgaaggcagatagtgttctaccaaatttgtcatcgtggacaaagattgtcagagatcttctgataagtctactgacaccgataatagtcatggggttctcgtatttattacaagtgttcaggtacggtatcgctcgttataatggttgccagaacctactgtcaccaacatggattactaccgtcctatatacagtatggatgcttatatggtcactggtcggcgccgtttatgccactttggtattgtttgtgttttataaaaaacgcaaagacgtcagggatattttacattgtaccaattccggcttgaacttaacaaggtttgcaagactattgatcttttgctttatcattatattggttatgtttcccttttccatttactgcttcgttcaagacctccaacaagtgggtggacattatagcttcaaagatacacattcgagtacaatctggaatactatcattaaatttgaccctggcaggccagtttataatatttggctttacgtttcgatgtcctgtttggtgtttctaatctttggattaggctctgatgccttagagatgtattctaagttcctgcgttcaattaaattgggcttcgtactggatctatggaagaattttgttgataagaataaagaaaaacgtgttgggaaactactcaataagttatcctcaggtaaaaagcgccataatcctttctccacagactccgaaaattatattaccacaggtacagaagggtactcccctggtgcaggcacgccgatatctcaagcacatttctatgttgattatcgaattccagaagatcttggaaaatcgcaaaatagaagcaaaaagagcttgttcaatagcaataaagcagacggtatttttaatgatgtggaacttaaagagagcaggcacataccttaccttacacaaggacagaacattgatgacggaatctcactcgacggtttttcaaaagtcacattagattgctcggaaaagtcagataattgtgcaagctcttattttgaaggagaaagcctctgttactcgccgacttctaagcaagaagactttagctcaaatgaacctagttcagaagacaccgcatttcgttga

SEQ ID NO: 3072 - DNA, 1014 bp, Saccharomyces pastorianus
atgttagcagagctatcacacaaagaattgattaaactggcacaaaaaagatgtattccacctttgttggcgaagtttcataagggacaggccggtgggagagtctgtattgttggagggtgtgaagattatacgggagcaccatacttcagcgccaatgctactgctttaatgggatgtgatttgacccacgtcatctgcgaatacaatgcaggtacagttattaaatcatacactccgaatctgatggtgcatccttaccttcggatgagcaacaccaacctggatgttaatatggatgatcagagaggaaaaatcaattccatattggacaggatccatgtcgtggtcattggacccgggttgggtagggaccccctaatgttgaaatccgtcaaagatatcataaaatacatacttgaaaaacatgagggtaagattccattggtcatcgatgccgacggattatatctgataactcaagataaggaggtcaaagaaatgttgaaaagctaccccaaaggtagaatcatcttgacgcccaatgtagtagaattcaagagattaagtgatgccatggacaagaagggggactcgcatgcagagatgggcagcttgatcgctcaggagttgaactgtattgtggtagagaagggccagtcagataagatcttctcacctaatggtgggaaggatacgctgacaaacagcacagagggcagtaacaagagagtaggaggccaaggagacaccttgacgggggcaatatcatgtatgctagcgttcagccgtgccatgtatgatttcaagatctgcgaacacaaagagaaagaggaatcttccaataacgaaaacttgagaaactggatagactacgcgatgctgagctgttacgtgggcagcacaatcacacgtgaatgttctcgcctgggattcaaggctaagggacgtgcgatgcagaccacagatctaaatgaccgtgtgggcgaggtgtttgccaaactttttgattaa

SEQ ID NO: 3073 - DNA, 4584 bp, Saccharomyces pastorianus
atgactggccatgtatccaagtccaaccaaaagcccaaaagccgcccgtcgtcattggcaaggaaggctgctaaaagggctatggccaaagtaaactcaaatccgaaaaggtcatctgctcatttagaacgtgtggtgcaatctgtaaacgatgctaccaaaagattgtctcagccagaatcaaccgtcagtgtcactacaaaatcatcaaaaaggaaatcaagagatacagtgggtccctggaagctgggcaaaactctaggtaagggatcctctggtagagtacgcttagctaaaaatatggaaacaggacaattggctgctattaagattgttccaaagaaaaaatccgttgttcatcgctcgaataatggaaccgttcctaactcctattcgtcgtcgatggtcacctccaatgtatcttctccgtcaatagtgtccaaggaacatagcaaccactctcaaaccaatccatatggtatagaacgtgaaattgtcatcatgaagctgatctctcatgccaacgtgatggcgttgttcgaggtctgggagaacaaatcagaactatacttggtactagaatacgttgatggtggtgaattattcgattatttagtctcaaggggaaaactacctgaaagggaagcaatccattactttaagcaaatagtcgaaggtgtttcctattgtcactccttcaatatatgccaccgtgacctaaagcctgaaaatctgttgttagataaaaaaaatagaaagatcaaaattgcagattttggtatggcagctttagaacttccaaacaaacttttaaagacttcatgtggttctccacattacgcctctcctgaaattgtcatgggtaggccgtaccatggtggtccaagcgacgtctggtcctgcggtatcgttctatttgcattgttgactggacatctacccttcaacgatgacaacatcaaaaagctattactaaaagtccaatcaggtaaatatcaaatgcccatgaatttatctgctgaagctcgtaatttaatatccaaaattttggtgattgacccagaaaaaaggataaccactcaagagatactagaacatcctcttattaagaaatatgataatttgcccgctaataaaatgcttagaaaaatgaaaggggacagcatgacgagaggaaaatccaattcagacttacacttattggacaacgtttcgccctccattgtaactttacacacaaaaaacgaaatcgatgaatccattttaaggagtttgcaaattctttggcatggagtttcacgtgaattaattactgccaaattacttcaaaagccaatgtcagaggaaaagctattctattcactgctgttgcagtataagcagcgtcactcgatttcattgtctctggaaagcgaaaacaagaaggccgggaaagaaactagtataaatgaatcgaaaatagagagctctttggagcttccaaattctgcaaactcaagaagcgatattgacgtgaaaactttacattcttcggaagctcgctcggaaaatacaccagaattcaatcatcatgaggaaaccagtactaacgctggcacagaaatgaacgctccagtgcttgcgcaaaaatctcagtttagtatcaataccctcagccaaccaggaagtgacaaatatgaagcagaagtcccaactctaccacctgctatacctatatttagcgcctcctcatcaagagttttccgcaactctttctctactatctcttcacgttcgaggaaatcgctacgcctatcgagttccaaactgtcattatcagcttcaacttctagagaaactatgcacgaaaacacaatgcctctaccccaattgccaaaatcgccttcaagatattcactctcaaagaaggcaattcacgcgtccccatcaaataagtccttacttaagtcactttcaaggaaccatataaccctaaacaccactgtaagaagaaccttgcaaaattcggcgtcaaagagatcattgtactcattacagtcgatttcgaaacgttccttgaacttgaacgatatactggtgttcgacgaaccccttcctagcaagataccggaaactggacatacgaataaatctgaaccgcattctttggaatcggactcggacttcgaaatcttatgtgatcaaatattgtttgggaatgctttagataagattcttgaagaggaagaggataacgaaaaacagaaagatcttccaaaaccgtggagtgaaaatacaaaaatttcaacaggtattactatggacgttgaggtttctatgaataaagagaatgaagggccagaaaaaagttcaaccaagattgaaaaagacttatccaatattctacataaccagttggaagagaactcaaagatttcatcattttctgtgtttaaggaagaaagtgctccgtctaattcagttttcatggaaagtaaaaaatcagaaagagcagtcctttcagatatcacgagctcgttcaataaagctaacaatgactttttcaaaagtgaaaagttaacaatggaaaaacagaaccataaggcccagcctcggaaaaagaatgaactattttcaccaccgaaatctactcaaacccaaggacagcgtgtaaagtctttacctggtgtcaaaggtaaaccttctttatctctagaccctcgtcgtaacatttctcagccggtgaattcgaaagtcgaatcgttattgcagggactgaaatctaaaagaggtccgccttcccattggtcccaccagagcgggtccttgtttggggatggacccaacgcggatgaatactcgaataaaacgttagataacacattcgaaagttcaagtgttccttcaaccacggtagcaacagattcgacagatcctagtgttctagcagaatctagtacgatccacaagccaatgttgtcattaccttcaactcttttaaacacctctatgacgtttaaaaatcttagccaaatgcttgctgatgaagacaatgacaagcacctaagcatacctcaaaatcaatctaggagtgtagcgatatcgtatcctctgcgaaaacagtccactaagatatctttgacaccaagatctaatttaaacactaatttatcgatcaaacgtaatcaaagctcacctggatcgtatttgagcaatgacctagatgaaatctcagatatgacgtttgcgatggaaataccgacaaatactttcaccgcgcacgcaattcaagtaataaatagtggctcgagcaataatacgactggtgcatcacccaaaatatcttcttttacaaaagataaaaaaggtgaactagctggttacgtgccaaaaggagacagagcggttaatagcaaaactaataatattctagattacaatgcaccaggtacacacaatgaaggggccattaacatttttgaggatgctccctccgatgaggggtcattgaatacatcttcttcagagagcgattcacaaggaagtgtgcatagaaaggccgtatctatcgatacattggcaactacaaacgttcttacaccagcaacaaatgttagagtaagcctttattggaacaataataatgcaggcattcctcgagagaccactgaagaaatactttccaaaattcaactatcgccagaaaagccaccaaatccacatgtgcaaaagagattctcttccgcacgtggtagtcgtgatagtgatgcgttaggtatttcccaaagtttgcagtcaatgttcaaggatttggaggaagatcaagatgaacatacgtctcaggctgatatgcttgcatcaagtttaaactaccaaaattcaaagctttctgaggagaacactaacccaaagcaaagagtgacaatgttatttgatgaagatgaggaagaatccaagagaataagttcagagaaaataaaagaggaacccactaacctcgctagcaaaatagacgaggaacctgcacacgtttctttatcgcgtgatactaataaagaagggcatgttgacgccacagaaaataaccatttaaaggttccaaaacccttgcctactaaatctgctaaagagcctgctttgagatcgggttccgctgcaaatactaaaggtctagaaaatacttctaaaagtgccaataaatcagcagttgaagaagcgcccgctaatgataaaaaaaattggttcgtcaagctattacaaaatttctcatctcataatagtggaacaaagatatccaaaaatcacgtaactaaaatttcatttgacgatgcgcacatactgacattgaatgaattcaacaagaatagtatcgattatcagctgaaaaacttggatcacaaatttggcaaaaaaggtgtggaatacgattgtaaatttgtaaaagggaactttaaatttaaaatcaaaatcagcactctgcccaatgcttcaacgatcatcactgtaaagaggagaagcaaggattcaaacactacttccgatagagcttttgaaaagtttaataatgatgtggaaagagtaattagaaatgctggacgtgtatga

SEQ ID NO: 3074 - DNA, 3330 bp, Saccharomyces pastorianus
atgagttcaaacaatgaaccagcacaaagtcaaagactacatttcatattggacgaatttttgtacaacatcaagcgttataaaaacacatttgaaggtgagattcagtggtgcaatgacctttcgttgaacgattggaagacccactatctgcagattaccaagtcgggctccttaactcattcaattgatgaattaacagcagactccgccaatatccaacccatcatcaagcatttacaacagtgtgaattacagatcacaaaagacacacaatcaccttttatagatgttaaggcaaactgcaactttataatccgagtgaaagcttcaggcaaggatttcaaagtgtaccttcgagtcaagaactgggatagttttaagagattgctgacgtgtttgatttggtggagctcgatgaagacgaatggtatattcaacaagtttcagatatcggctccttatgagtatgacacaaagaaactggggcagccagaaagtttgttggtctataaattaaatgtttttggacccatggtaaaacatactactcttccaccgtccacgaatcctttagataagcctaacataagtaacaacgataataacgggaaaggctggttctcggctatgggcgtttttaaatcagacggcatactagatcttcttttacaaagtgacggatctccaatctactcaatagacattacccaacttttaaaatcagaaattagaatcttagattcttctgttctacaaaatgacaattgtttgtttttaggtgaattgccgctcttacgaaaacagttaaatgacgaaaattttcacatagaaagtattaattctagtaataataactctagtaatatctctgaagaaattattatacaattccctttaaggatagacttggaagattgtttcgtggcattacaatcatacgctaggtcggaatatttatctattaccggctcagataaatcaaacggtatgaggatatcgaatagcttcaagctttctatattggaggctaattttcaatcaataaatttaaatgataagaataatacaccgtggtcaatattcactgacataacgacttggggtcatacatgggctaggacatcaatggttccaggttcaccgaatccattttggagagaagagtttcagtttgacgaactgttgagacttgatacttcctacctggaaatcaagcagctatttcatgaccctatccactctaataacaaaaagcggttacggttggttggtaaaatcggaattacacaggagatgataaatgatgcgagatataacaaggaaacaagattgccgatcatggatgttgataatcaaaatttccagatcggtacaatctgtatcaagctctcctcaaatttgaactttattttgccatccaccaattttatgaaattagaaaagcttttggctaatttgaacttatccatgatttcaaatttaatatacaaatcttcttcatcaatggaaaatgacaataaattgatgcaaatatctgtaatttttctggatattttccaatctacatctcggatagaagattggtttaatgttcttatagacaaggaattgtccaagatagacgggacagtttcgagaataaatcaaaaaaatttagattcaaagcatatctttaacagtttattccgtggtaattctattttgactaaatcgactgagcaatattttttcagggtaggcaatgaatacctgaacgaagcgcttggcggtattttgaaggacatcatcgaatcaaatgaatcatttgaattggatcctgctagaataaaagaagaaggaaacaagaaggagaaaatattaggggataattataaaagattgtacttctgggtcacgaagatttggaaaaaactctacgcaacaagcaatgacttacccattgagattaggaacgttttaaagatttttagaaagaaattagagataatttgtaccgaagacattttacaaataattctaaacggtatatctggattgctgtttttgaggtttttctgtccggttatattgaatcctaagttatttaaatatgtttccgaaaacctaaatgaaacatcaagaagaaacctcactttaataagcaaagtcctgctaaatttatctacattaacacggtttgctaacaaagagccgtggttaatgagtatgaatcattttattgataaaaggcgtgatgagttgttggaatacatcgataagatgacacaaaagaaactagatttcaattccaaaaaactaaatctaagttccaatataacaagacctaagttgcccattgaccaagcaatcttggatgatttgcctcagctcccttgtttaattgataaaaactccagagaaactgaactcgtcaacttgatcattaatttcagtcaagaaaatgggaacaagatgctaaaagatagccagatggaagaaaacggaaagcaagacttaacagggggagatcgtctttctacgagcagtagtataaatttgtcgataaataggaaggatttagattcaccagtaggtgcgaaaccagaaattggagagttagaatttgagaggataactgaaaataatacagaagtttttggagacgatttaatgaacttactcaagagtgatgacggaggccccaagcatgatagtttggttagcagtattaataataacgtgaaccctaattcgacattcacgacacaggaggaggagagatatatgatgaaagaactagaacaagagtgctatttactctacaacaagattgaccgtatcacaaaaagattatcagattacgaatgtgcttcgagtagtctgttcgaagacagaaaatattccatatcactttcacataagatttactatgagcaattacgagagggtgatgctatcgtacttaaattgctaagcaatccttccatggatcggtcttctataaaattacgaaaatttttcagaagaggtgctagcagtaaactttacaacattggagatcattataataagtttctgattgttgaaggggttggtactgaattttttaatggtacgaacagattatcatcacgcgggacatcattgaatggcgatgataaggataaccaaacgataccttcgtcttcaagctcttcaaataaaagtggtttgggtaataggttttctcccacaaagttatcgaggatgatgagaagagctcccaatagagatgtacctaaagaacaaagtgctcataaattgacgagatggttcaagaaaaaaaaggacccgagggggcttgactga

SEQ ID NO: 3075 - DNA, 933 bp, Saccharomyces pastorianus
atgacaactagcatacttgatacttatcctcaaatctgttcgcctaacgctcttccaggtactcccggaaatttaaccaaggagcaagaggaggcccttttgcacttcaggtcgattttgctagaacaaaactacaaagaaagattggatgattccacactgttgcgatttttaagagcaaggaaattcaacgtcaatgctgccgttgaaatgtttaaggaagctgaacgatggagagaagaatatggtgccaacactattatcgaggattacgaaaacaataaagaatctgaagacagagaaagaatcaaattggctaagatgtaccctcagtactatcatcatgttgacaaggatggaaggccgttgtattttgaagagctcggaggaattaacttgaagaagatgtataagatcactactgaagagcaaatgttaagaaacttggtcaaggagtacgaactttttgccaggcacagggtcccggcatgttcgaggagggccggttacctgattgaaacctcgtgtaccgtgctggacttgaagggaatttcgttatcgaatgcgtaccatgtgctctcttacatcaaggacgttgcaagtatcagtcaaaactattatcctgagagaatgggcaaattctatatcatacatagtcccttcggtttctctacaatgtttaaaatggtcaaaccctttttagatcccgtcactgtgtcgaaaatattcatcctgggttcctcttacaaaaaggaattgttgaagcaaatccctatagagaacctacccgttaaatatggtggcaaatccactttgcgtaattctaacgataggttgtattattctgatattggtccttggagagacccaaaatatatcggaccggaaggtgaaatccccaacatttttggtaaattcactgttaccgactaa

SEQ ID NO: 3076 - DNA, 3039 bp, Saccharomyces pastorianus
atgtttggtaataatagaccaatgttcggaggtagcaatctttcctttggatcaaatacttcatccttcggagcacagcaaccgcaacaaccgagctccgttttcggggctagtaatagtaacaataataatagtaataacaatatccctaacaacaatgctcaatcagggtttggtggattcagttctaccgctgggagtaataatagcagtttgtttggaaataacaacagtacacaaagcaatggagcctttggccaatcaatgggtactgcccaaaattcaccatttggctctttaaactcttcaaatactggaaacacgaacacttttggaggatccaattcaatgagctctttcggtgggagtaataacgcatttaataataacaacaatgttaattccaatagtaacaatagcaccaattcgccgtttggcttgaacaaaccaaatacaggtggatctttgtttggttcgcagaacaataccaacacaaggaactccagtctatttggtgggcaaaacacgagtaccactggtacatttggaaacaccggggctagctttggatctggattgaacaacaactcgagtatgttcggtgcagggaacaaccagcagagcaatactactggtggtatgtttggcagccaacaaccctcggcatttggaacgaacaatcaacaaggtggtatgtttggacaacaaccccaaaacaccaacaatgcgtttggaagccaaaaccaaataggagcaagctcgttcggatcaaaacctgttggctcaggatcattgtttggtcaaagtaataacgcccttggaaacacaaacactactagcaatggattgtttggccaaaccaatgtcaataatcaaaccaacactaatggcggactttttggacaaaacactatgactaataacacacaaggaatgtttgggcaaaacaacaatcaaatgcaaatgaacagcaacaataccaacaataacaccaatagtttatttggaaaaggaaacactactactagttttggtcagcaaccaagcaacaacataggctctttattcgggaacaaaccatccggtggactattcggtcaacaaaagactaccaatgccttcccgaattctacaccaggaggtcaatttgggcaaaataaccaacagcaaggatctggtctattcggtcaaggtccccagacaaacagtaatggtgggctgtttggacagaataaccaacagcagcaacagccccccaatgcatttggtcaaaacaatacagggccaggccttcttggacagaacagtcagcagcaacagcaaccagcgggcctgtttggggccaagccagcagctccagctgggtctctctttggaggtaattcttcaaaccaaccaggctcactatttggcgctaccaacgcatctgcctcaaatacgcaagcacaacaaggaaacagtttatttggtggagccaagccagccgcaaacatgtcatttggaacaaattctagtgtcaatcaaccgggaggcgggggcagcctatttggagctaagcctgcttccaccaccggctcattattcgggaataatacagcctctacgacagcacctcccacaggtggtctcttcggaaatagcactaataatccaagcaatactgcaaatacaagccttttcggtgcgaagactgaatctcagacgaaaccaggattgggaggaggattattcggtagtttgaattctaatcctttgtcagttggccaaaataaaccagcttttggaaacacaaatcaaaacactgggcttttttcagctactaacacaaattcttccactactgctccaactggtgggctttttggggcaaataatagcacttttggtaaagatgcacaaaacggaccacctgctaacggtttctctcagaactcaactatgggcagcacaggacttccttccttacaagaatcggccacaactaatgatgaacagcttttctcgaaggtcataattcccaactcaattacgaatccggtcaaggcaactgcctcaaaactgaatgctgatatgaaaagaaataatagcctcacgagtgcttatagattagctccaaagccgctatttgctgcgtcttctggtaatagcactatgtttcaaaagtggggaaagataacagaaaaaggtagcggagacaacggaactggcaagacctttacggagcctgagtctaactattcctcttcgagtgatttgttgttttaccccgataagaggtatttgaagcatttggtaattaaaaacaacaaaagcacaagtgtcgtagattccaatgatggtgaaacaaacaaagtaaaactggtgacttttacaacagaaaaagtttctgaaaacaagcaagatgtttcaagccctacgcatctaaatacagcagacaaaactgattcttcccataccatccaaatggagaccgttaacaaaagtattcctgatgttcaatcgaaaatatcaaatggtcctgtctccgttccaactactgagagtgaaaagatcgatatcaaagtgccaggtctactaagcaatgacgtcacttttttccaaaataattactatatttcaccatcaatggaaacgcttggcaatagatcattgatcgaacttcgtaagataaacaatttaataattggccacagggagtatggtaaagtcgaattcctagaaccggttgatttgtctaatacacccttagatactttgtgtgatgatatagttgttttcggattaaaatcatgctcaatatatgagaactgttccatgaaaccgaaaaaaggcgaaggtatcaatgtacgttgcagagttactttgtactcctgcttccctattgataaggaaacaaggaaccctataaaaaacctacaacatcctcttttgaaaagaagcattgctaaactaaaagaaaatccagtttacaagttcgaaagctatgatcccgtaacaggcacttatagttatactgtggactcgccaattttgccttag

SEQ ID NO: 3077 - DNA, 2910 bp, Saccharomyces pastorianus
atgagcaccgacaattcgcaaaagaatgaaactgttccactgctttctccttactccagtagccctcaactcaggaaaaagaagcgtaatccaaaaggaaaaaagaacaagtttgttggccacttgaaatcagactcgcgtagacctacccaacttctccatgatagtgtgcaacatgaccacggtcaggttacagattttgaccagattgattcctggggcatgctgcatgaatcggactctactaataatgacttagtaagaagtggagatccctcactaaagggtgcgtatattgaccacagaccctcaatgagccaaccgagggatggatcacaaagtgcctcaagtgctgcgcggccgcaaccgattatgaagttctcaacccccaactataagaagcctacagggatttggccctctgatcctaacagatcgttagtatctgatctatctccttcggaattggaatcatggctgaaaagaagaaaatccgttcaaaaaggtgccgaagaggctttgcctgcggatagaagacagtcgaacgcaaataatgatgttgtgatcgatgtagatgcgttgatgaaccacgttcacaacagtacaagcaacagcgctgccgataacaccaagaagaagaagaagaagagttctgacgacaacagcaacaaaaactcaaaatcctcgtccagtgactcaaacgtcgaagaagacgagtacaattcgagaccatcctccagtctttcttcaaataattcctcattggatgatgtttgtttagttctcgatgatgagagcagcgaaatgtcgaaactctggccagattgtaccatcttagaagagttctccaaagaagaaactgaaagactcagaagtcaggctattcaagacgcagaagcatttcattttcaatatgacgaagacgatgacgatggtacgtcgaatgaagatgggattcttttttcaaagcccatcgtgaccaacattgatgtccctgaattaggtaacaggagagttaatgaaacagaaaacttgaaaaatggccgcttaagaccaaaaagaattacgccatggcatttgatccaacgtccaacggccctagggtcgggcccgaccaaagactcaaaatcaagaattcaaaacggactacaggacaatttactggtggggagaaatattcaatatcctccacacattatttccaataatccagaacactttagatttacttattttagagttgacttggattccaccgttcattctccaacaatatctgggcttttgcaacccggtcaaaaatttcaagatttatttgtctcttctgtgtattcccaagagagcaacgccggtcatgtcaagactcatccaaattctccgacgcctggtatgaaaggggaaagttcatctcaacttcaaggattgattaataaaaatccctctacattatcaggtatgtctgtagcaaatatggaagatattcctccattttggttagacgtcagtaatcccactgaagaggaaatgaaaatattaagtaaagcttttggaattcatcccttgaccacagaagatatcttcttgggagaagttcgtgaaaaggtggaactatttagagattattatttgatttgtttcagaagttttgatattgtagcggaaaagcatgttcgtcgcagaaaaaaagaaaagcaagaatctgctacgctggaccacgaaagtatctcacgctgtaaatcacaagcttatggtgccactatgtcgaatgattcaaatgctaacaatagcaataacaataataccagcagtgctaatagaagcaaatggcttccatcgattttacgttcccgccgtaggtcatctgcgaatagaacgacaaacacatcatcatcaagttataagcgtcgtgtcaagagtgaaaaaaagaaaatggaagaaaacgaaaaattcaaaagaaaatcaggagataggcataaaccacgtgaaggagaattggagccattaaatgtctacataattgttttcagaacaggtgtgttaacatttcattttgcacctacaccgcatcctatcaatgttcgtagaagagcaaggttattgaaagactacctgaatgttacctcagactggattgcatatgcgttaatcgatgatatcacagatgcgtttgcacctatgatagaacttatcgaggatgaagtttacgaaatcgaagacgccattttgaagatgcatcaatccgatgattctagtgacagtgactctagtgatagtgattccgattccggtggcagtgatgaagatgcattcccattcgatgtttactctaagaaaacgtcatattctagtgctaaatcaagcgcgagttcaagaagtacaagctcatctgagacatcgttcaatgcaaacttgattggttggaaaagaaaaggtgacatgttgaggcggattggtgaatgtcgtaaaagagtgatgagtatactaagactactgggttccaaagcagatgtgatcaagggatttgccaagagatataatgaacaatgggaagcttcgccacaatcggaaatcgctatgtatttgggcgatatccaagatcatatcgtaaccatggtgtcatcgctaaatcattatgaaaaacttttgagtagatcgcattcgaattatcttgcacaaatcaacatcgatatgacaaaagttaacaacgacatgaatgatgtattggggaaaattaccattttgggtactattgtcttaccaatgaatgtgataacaggtttatggggtatgaatgttatcgtgcctgggcaatatagggattcattgacatggtttatgggcattgtacttttcatgtgtatgttagcatgctctgcatttgtgtacactaggagaagatttgggttatag

SEQ ID NO: 3078 - DNA, 837 bp, Saccharomyces pastorianus
atgcaccattttccagtcgcaatggtaactggggccaccaggggcataggaaaagcaatatctcaaaaattatctcaagagggtctaagttgcattgtactggggtctacgatcgaaagtataaaacacatcaaaattggaaaagatcatttacagttgcagtcaccccaccagcggcactgtgcaatcgcaattgatttcaaggaatggcctcaatgggttgccagtgaaccttataatggaatcgaatatgttaaagataaaccgcccttggaacagaaatattccaccatgtttgaaccatgcgacaactggtcaggttatgggtatcattattacgtgaacctactgatcaattgcgctggcctaactcaagaatcattaagtataaggacgacttcttcccaaattcaagatataatgaatgttaattttatgagttctgtaacaatgacgaacctgtgtgttaagaacatgatgaggtctcaaaggaagtggccagaattttttaccaaatccgctccacccaccatcataaacatttcatcgatcttacagtccgggaaaatgaatattccaggtacatctgtttattccgcctctaaagccgcattgtcccgatacacagaggtcttagccaaggaaatggaaccaaggaatatccgctgccacacgatatctccaggtttggcaaagggtacagatatgatccgaaatctaacggtggcatccaaagaggccctaacgagtgctattggcccaaaaagtatgactacgcctgttgaggtagcacaccaagtgtggtccctatacaattttggtacctttaacaagtaa

SEQ ID NO: 3079 - DNA, 1938 bp, Saccharomyces pastorianus
atggaaatgccctctcgacagcttataccgacgctaatgccggaatggactccgtcatcccatcagtcttacaaaactgcagatgattctgctagccctccgataactcccacaagccaggtgtcttcatttgattcctcgttgtcccaaatgaaacccacatatagtacaatcatagaagaaaatatagacacgatcctagataggattcgaccatttgtgaaaaaaataactgctagtgaacaaaataaaaaaactataaaccaatatacgttaggagcctcagcaggaagtggacagtttggacatgttcgaaaagcatacagctctacgttgaataaggttgtcgctattaagattatactgaaaaaaccatggaatgcccagcaatattcaatgaatcaggtgatgaggcagatacagctttggaaaagcaaaggaaagataactaaaaatatgagcggcaatgaggcaatgaggctcatgaacatcggaaaatgtcgatgggaaatatatgcggtttcaaggcttcgagatagtgtacatgttgtgcgactgatagaatgcttagattctccttttagtgaatcaatttggatagtcagtgattggtgcaaccttggtgaactccagtggaagcgtgacaattatggagatattttaccgcagtggcagagacttgtacctttcaagtgtagtgtttctacattttcaaaaaagatcttacgagatatgacgaaagggttgcaatacctgcattctcaaggctgcattcatcgagatattaaaccatctaatatattattagatggaattgaaaacgttgcaaagatttctgactttgggtgctgtatcttcactcctcaattattaccattcaagagtgccaattttgaagaatgttttcaaagggaactaaataaaatagttggtactcccgcatttattgcaccagagttatgccatttaggcaattccaagagagactttgtgaccgatggatttaagttggatatttggtcattgggggtaactttgtactgtttattatacaacgagctgcctttttctggggacaatgaatttgacacttatcacaaaatcatggaagcaccgttaagtttaaaagtaaacggcagcactctaaatgatttaatcatcaaaaggcttttagaaaaagatgctactttacgtataggcattcaggacttgacaaaaataatactgcctgacccaatggatcaacctgaacatcctaaagatattgatcaggatattttatccaaaattaaaccaacaaggagcgagggccctgtcagaagatttttcggtaaactaataacaaagaagagcaagaaaaagacattagaaaatgtgaaagacaattctttcggatctgcaaatagcaaagcaacggctccagtatatattgatgcagattcacaggaagaagcattctccagtacagttctcaggtcttcgcctaactcgagtgactattgctcttcgttggaggaggaagcggttcaagttacagactttttaaataccttttgcgattcaaaaggaagcgcaaatattttgcatgtgaagaatgacaagcgaaatacggagatgaaggtagaaaaaagtgattcgtcttctcactcttcatttaaggttccgaccccgatcaaggccttaataagactgaagaactctcccgttgagaatcggaacaagagttatgataaccgtttctcagatggactaacttccccctcaaaaaaaagtgctaaggaaaagcatagggtttataacccagagcccaaaaagctggcacattcaggaaatatcattaatttcaaagcatatataaattccgctgataaagatcgtcaagagatggtggaagacgtgagaacatacctgaatttcgctgataatggacaagcgtag

SEQ ID NO: 3080 - DNA, 1347 bp, Saccharomyces pastorianus
atggaaaaagatgcatggaaaataatagctgctacagcgctattcactgtggcaatgactacagtcgcagactgcgcttggacacgttggcaaacacaagggaaggcagtggcgcaagtgcaacggaatgatgaaaaagacgaagaacaaacaaagtccaaaatagacagatatcaccaatatgatgaacagttcattcgccaatttttaaagaacaatattggttttcttggtgaggatacgatcgaaaagctatctaaccaatacgttgttgttgtgggtgcaggcggtgttgggtcttgggtagtcaactcattggtacgttcgggatgtcgaaagatcagagtcgtggattttgaccaagtttcattaagctcattaaatagacacagttgtgctatactaaatgacgtgggtactcccaaagtggaatgtttacgaagacatatgcacgaaattgcaccatggtgtgaaattgacccaattaatgaactgtggaccatcgaaaatggcgaaagattgacccttggaaacggcgctcctgatttcgtcgtggactgtattgataacattgaaacaaaagttgacttactagagtttgcctacaactgcggcattaaagtgatctcctccatgggtgcttctgccaagagtgatcctacaaaacttaacgtgggcgatatagcgactactgaagaagaccctcttgcgagggtagtaagaaggaaactgaagaaaagaggtatcctttctggtatccctgtggtgtttagtgccgaaaagccggatcccaaaaaggctaaattattgcctttgcctgatgaagaatacgaaagaggaaaagttgacgagctcagcgctttgaaggatttccgtgtaagaattttaccagttctaggtactatgccaagtttgtttggattgaccataaccacatggatcttgtctaatatatccgataaacctttggaacctatcgagggtaaaaacagaatcaaggtatacgacggtatatatcagtcattgactggccagatgagcagagtcggtagaccaacccaacggataccgttagctttgaaggatgttagctacctggttgaagaagtttttaggggtaaatctccaatcagcggaatttccactagactaactttatctaaatgggattcctccaaacctatttcgttgcaaaatgtaaccgttctaaccaaagacgaacaaagagaacacgaaaaccgtattttaaaaggcaacgaaagtttaagtgatgtttatgatgcggatgttctggaactggtttcacaaaggtttaaagaagaagcttactattctcagtttagatga

SEQ ID NO: 3081 - DNA, 237 bp, Saccharomyces pastorianus
atgaaccctaatcttcccctttgcaaagaattctttgaaaaaataaccacagatttgaatcatgatgactttagattgaccattatcgcaaatcagccttcaatttcttcacaatactacgtagataaaaactctcgttttatagaactaatcgtcttcaaaacgacacttttatctctttttcaagaagcgcatacctatttcaatagagttctttccaatcaaagtatgttctaa

SEQ ID NO: 3082 - DNA, 2316 bp, Saccharomyces pastorianus
atgtggagactacaaatcgttctggtaccgccaagtgcccgggatgccattctgcttctcgaggcaaatacaactattaacgatacttctcaacaggcatttcccatgcttcagcatatagaggaccatattacgaacagcaacaacaaaagcatcagcaacaacgataacgatagctcttccgtgactagctcatcttcccgtaggatggttcaatcaaatgatggtagggatattttaaactttctcccgaactgcaagaaatttctacatttcacgaacgatagtaataccctcttacaactttccagtgaaatcttaactaaagttgataaactctatcccgattttaatcaagccattgaaatcgtatctctacaagataggcatggttgcgatctggactcccaattcatgataaaagatgtattcgaaactgatggaatcgttttggtgatcttaaaggatgagttggactgcaatgaaagccaacaagtttcagttttccagataggaagacagcgaaaaagaatcaacaataattcaccggcaagaagactctcagtaactgagagaaaaaagaaaattcccaacgaagacttatcctctacaccaaataaagactctatgcacccagtagctaagaactcactcaggaaaaacttcatcaataaatcaagggtctcaactcctttgatgaacgaaattttaccggttgcaaacagtcacgaaatactgaataaagaaaaggcttttgtacgagcatctccggtaatacttgtctcaaacgcacatacagatctaccaaggaattacagcactgacggagaaactaaagtacatgaaggtgataacaataaagaaaatataccctcatataatgaaaagcaggaaaataggaacacgaaatcgctcgaggcagaaaccccagacgagcagtacaattcatcagacgatcatgattttgagccgacacttgatagttcacaacaggtttcatatgactcgatcgataccgatttccaattgagcaatacctcttctacaaattctgatatgcatatgcaacatttcaaatcacctagcatggtccgtagccccagaaagagctctttggagattaaagttcaaaataaaagaagtgagaatttgtctccgaacgataaagatgtgagtgagaattatagaagaatagagaatttttcagacgaagaagatttgaatgacatggacaacagtcatgcagattcgtttgtgaataattccaagaaggcttcaatgaattttcgcgatgttggttctgacttggagaacgtttcttttaccagtgatattaatgacgcagttcaaagtactcaaaccactaagaatgcagtttctccttcttcgtcatctaaaaataacaaccggcaaaacccaaaggaagcgaaagaagagctgtttaatttgattgaaaatgagttccctgataaatcctcagttaccatctcagccaaaccgcgtgagaaaagtataaaaatacaagaaacgattcggatactaaatagattcaaaccaattgaggacgctaagactcaaaaaaaaaagagtataacggagtcatccttcaggaaatttccctcgacgataggagataaagcgcaatccaatattccagaagatgtacacaaatctaccaaagacaacaataaaagtataaaagttggtacagtaaaagtgaaacgaatgattgttgatgccgaagcaaaagtcagagaattcaaaaaaaaaagaaatatggggaacaagtctttaaaggatatctttgctaatgcgggaagaacatcaaaggcaaactcaagcataaaggttgttaaactgacgagggatcctgttgataattcaaaggggaaaacagagacggttctcaatagtggactacaggtacaaaattcggatatggcgtcaggtcttggaccatctaaggaatcgactcctgaagaggtgataaatcgtcaaacaacaccattcagtattccaaaaacatcttcctccaatattgcaccacacttcaaaacaattaaggttacaaggtcgaatagttcttcttcttcatcctcttccatttcttctgcatcttcttcagatggctcttcagcagatgaatcccataatcgttctaatgcaagaaatatccaagttagaaaacttagcttaaaaacgtttcacgagccaattcgagattcttctgaccaacgtatgtcagatgtagaaggggactatgcaaaaaagtatcagacacctaaatatattgagagcgataaatatgatgagtaa

SEQ ID NO: 3083 - DNA, 1620 bp, Saccharomyces pastorianus
atgctgagaacgactgcttcacgacaaataggactaaggaggggcctagctagtataaatgcaggtactactgtcgcatcgaacaaagcttcacataaatttcgcaataccttatggactattgctttgtcagctacagccttctatgctggaggcgttatatattcccaaaagaatgaaaaatttgaggatttcttttctaataatattccttttgctgacgatttggtgcaaacgtatgagcattatcacgataggccatcgttgtttttagaagattcttgggacaatttgaaggcaaaatcaagcggactagtttatggattagggtctagaccaccaacaggtaaatctaaaaaggaagacattgaagtaagaaaaattttatcgctaaagacgctagatattgaagtcgataattctgatccgcagctgaaagaaatcataaactcgctaaatgatctcattaaaaatttaaacgattccggaataactgtgcctgaaacaaaattaaactcaatgaagaagtccagcgaaaatatgcttgcgaatttgtctcaacttaatgaaacactaaaggaagccctatccaaatatatgctgcagaggacatctgaagtaatcacagaactgaatacgcaatatgaaaattcgaagagggaattcgaaaaaaatcttcaaaaaaacctgttgcaagaagtggacgaatttaaagagaacttgacaagacaaaaagacaaggagttggaagaaaagctaaaggccaacgaagaattgttacaagccaaacatgcaaatgaagtgggtttattgtctatcactcaagttaaagaatttaataagattatcaaggacaaaattgagaaagaaagaaatggcagattggcccatttagaggaaattaactctgaagttagcgatttgagtaagtccattgacaggtcgagcaaaattttgagcaaaaacgaggccctagtacaattaactctccaagtagatgaaatcaaatccagaatttacaacagtaacttgcctaatgtaaatattgacaaggaattatccaacttgaagctcctttctggccttttttctacttttaacaagaaaccttgttgtgatgacggaaaatgttgttgtgacaaaaaaggtggtaaaaacgaaaacaaagagaagaaagtaccatgcaagtgtcagccaaagaaaacctctccatcactgctaagcgcagctttagatgaactggaatccacctgtaggggcaataaccttttatctaatgagcaaatctacaacagatggaacttgctagcggacgacttcaaaactgcctctttattgccaccaaattctggtattttaggacaattaagcgcaaaagtcttctctcttttcttgtttacaaagacaggtaactcatcagatgctactgattttgattctgtttatgcaagagttggtgataagttgagggtatctaacctcaatgatgctgtagaagaagttgtttccttgaagggctggcctcataaagtttgcgaaggttggatcgaagatgcaagaagaaaactggaagttcaacgcctggtagaaattctcgactgtgaaataaggacattatga

SEQ ID NO: 3084 - DNA, 2814 bp, Saccharomyces pastorianus
atgctacaacctaagacagaaaatgagactgtagctccagtgttcgccatggagcaagatataaacgctgcacctgatgccgtcccattggtgcagacaacaacattgcaggtctttgtgaaacttgccgagcccatagtgttcttgaaagggttcgagtctaatggattgtctgaaatagcccccagtatcttaagaggatctcttatcgtcagagtgttaaagccaaacaaattgaaaagtatatcgataacgttcaaagggatttccagaacagaatggccggaaggtataccccccaagagggaagagttctcagatgtagagactgttgttaatcacacttggccattttatcaggcagatgatcatatgaactctttcactttagaggatcataacttcaacaactcatccaatcgcccatctataagtgaagaagaccatatactagagatgagtggtgcttcaatatattttccaccaaccatggaaccaatcaaaggtaacagtaatctgagtctggatgcgtatgagcgcaactcactctcatcggatcatttgagcaacaagcctgtatcaagtgatatatctaacgatgacaaaagtcttttggcaacccaaaaggcctcggttccctcatatagccgtagaggatcggtgccggcgaattttcatggcaatgcgctgtcaccatccaactttatatccgatttattcacaagaacatttagtaatagtggtgccactccaagcccggaccaagaagacaatagcattaccttattcaaagacacgaaagacgtttttgtttttaaacctggtgattatatttatacttttgagcaaccaatatcacaatcctatcctgagagtattaaggcgaatttcggttccgtggagtataaactgtcaattaacatcgaacggtttggtaccttcaaatccagtgtacatgcccagttgcctattaaaatcgtaaggcttccctctgacggatccgtggaagaaaccgaagctattgcaatttccaaggattggaaggatcttctacattatgacgtggtcattttctcaaaggaaattgttttgaatgcattcttgcccattgatttccatttttctccactggataaagttactctacatcggataagaatatatctaaccgaatctgtcgaatacacgtgtagtagcaacggtaatcgtgcgaaggctcgtcgactggaaccaaccaaaaagtttttgttagctgaacacaatggcccaaaactatcacatatttctgctggttcgaatccattaaaagccaaaaataggggaaacatcctgttagatgaaaaatcaggcgatttagttaacaaggattttcaatttgaagtatttataccaagcaaattcacaaatagcatacggttacatcccgacacaaattacgataaaattaaagcacaccattggataaagatttgtttacgtctttccaagaaatacggagacaatagaaaacatttcgaaatcactattgattcgccaattcacatactgaatcaattatgctctcacgcaaataccttattaccaagctatgaaagccattttcaatatcccgaaacgaagaacgattccgccgcaccaacaatagaccaacaaagtcagttcaatagtgcgccaactcatcatgactcaaattttttcttcccaaaggaaattttatcatcacccgttctttcaccaattgtgcagaaaaccaacatcagaataccgtctgatctcccggtcgtacgtaacagagctgaaagtgcagagaaaaaggatccagataagctttccaaggagatggcccagaacggtaatgtcttcgcctccaaacaactaatggcaaacatttacaaacctaatcaaattcaaagagaattgacttcccctcaggccttaccgctgtctcccattgcttcgccaatactgaactatcaaccattttcgaattcacccccaccagattttgattttgattcagccgggcatgatattagcagtgaaaataatattcctatagaccctccaacatattccgatgtcttaaaggctgatggcattgatttaccatgttatgataccagttcatctaggattccagaacttaagctgaataaatctagagaaacattggctagcatcgaggaggactcctttaacgggtggtcacaaatcgatgacttatctgatgaagatgataatgacggcgatatagcatccgggtttaatttcaaattatcaaataatgtttcgagtgaaaatgtaagttcacacactcctattttacaatctttaaacatgagtctcgatgggagaaagaaaaatcgcaccaatctacatgcaccgtcagtgttaccaagtaccataagacaaaataatcaacattttaatgatataaatcaaatgctaggtagtgatgatgatggcgcttccctgaaatggcaatcaccaaactcaaaaagatcatcgttacaacaaaactcaaatacagtcaaagtacagagttccatcaacaagaaactacctattctcaaaataaatgataacatcattgaacggaagagtagtgacaaacttgaggatcccgaagacatcgttgattcttcagtggacatcacagcattttacgatccagggatgtcatcggattctaaattcgattgggaattagcgaagaatcacgtagacccgacgagctattccgtaaatgttgctagtgacaatcaagtaatggacgactttaaggaagcatttcgcgaaaagaaaggtaaatag

SEQ ID NO: 3085 - DNA, 957 bp, Saccharomyces pastorianus
atggcgatcaagaagagaaataaaatcagattaccaagcgatcctcctgaagagattgaaggcgatacttccgtgcataggcccatccagcaaataaagcctggattactgaatactttggaagatgatgacggtgagatttgtgaattacagccgataaggtttaaaaaagtgcctaaacgagtcattacatttggtgatgaacaggaagatgattcgcactacaatgagctttataactcgaagaaagataacaacgcatggaagaaggacaacgatgacgtggtgattttaaatatggaagatatgatggaaggacaacatcaactgttaagtgatcctctcgagaatggggatagtttaggagacaagcactcaataataccaactcgcgaagaaattatgaaattaaaggaacagaaatctatatcgagaaagaatcttagtaaaagcaatgttgtaaaagaaaaggattatgtcaaattattggacagtgaggataaacgcgaactcatggagacaataaaatctaacgggggcttaaaacgctcaaatgaaaaagagcttgagaattttagtgacgatgaattgcaaggctttcaggatgaaagactggccctcacagaaaaccagattgcaattcaaaaagatgccaaaaagaaggttattgaagaggctttaggtgtcacggcatatagagtaaatgaagaatgggaagcgcagcttctaagcaaggggaatgtactcaaacctaatgaagcggttattacaccgttaccaatactttttcctgaagatggtgaaaacggaaacaacatggaggaaataaccgatatggtcttaaatatccgcttacaaaggaagaaggttgaattaagattacaagctttacaaaaggcaaaaatggacttggaaaattcaaaagccaacctaataagtaagctcatagacaaatga

SEQ ID NO: 3086 - DNA, 423 bp, Saccharomyces pastorianus
atggacccgctaaccatgaatttttccaagatggatacctttgggttattactgggcagcgagcctccaccagttgtgagcagccgtttttttcttttaaatattttatttgggtcgttagtgtgggtgttagagttagagctggcattgttgtttagttttttcctgttcctggacttgatagtgtcagttttcaaactaatgggccttggctcgccatgcaatttcaggaaaaggccgcaagcgttacacagaacagtaccgtgttcatctcttctccagaggggggttttaacggtgaagcagttctggcacgtggggtggtcctcactatcacagtcgtccacgacagcagcagcagcagaaagagaaggcgagggcagtttcaacgaatcactaagcaccattctctcgtatatataa

SEQ ID NO: 3087 - DNA, 1776 bp, Saccharomyces pastorianus
atggtacgagacctactgacattgccctcctcactacctttgatcactgcaggtttcgctactgatcaagtgcatttgcttgttggtacgggatctaccgattcagtgagcgtgtgcaagaacagaatacattccattttgaatgccggtggtaaccccatagtggtgaatccttcgtcgccaggtcatattaaacaattgcattcagagttcggtagctttaaggaatttcaaataattgagagggagtttactttgtcagacttaaccactttggggagactccttgtgtgtaaagtcgtggatagagtattcgtggatttacccacagcccaaagcagcctttgtgatgaaattttctggcaatgccaaaaactaagaatccccataaacacatttcacaagccggagttttccacattcaacatgattcctacgtgggttgatccaaagggaagtggtttgcaaattgccgtcactacaaatggtaatggatacatcttggccaatcggatcaagagagacataatatcccatcttcctcccaatatatctgaagtggtgataaatatggggtacctaaaagaccgtattataaacgaagaccataagactttattaaaggagaagtactatcaaactgatatgtcactgcctggcttcggctacgggcttgatgaagatggttgggaaagtcataaatttaacaagttgatccgcgaatttgaaatgaatagtagggaacagagactgaaaagaacaagatggttatctcaggtaatggaatattaccccatgaacaagttgagcgatatcaagctcgaggatttcgaaacctcttcgtcttcaaacaagaaaccaaagcaagaatctgtttcagatgacatagcttctcccactggtgagaagatcgaagaggataccaaccaagtacaattatcggatagtagaaagaaagaagattctaaaacgtccgggaagatctcattagtcggaagtggtccaggttcggtgtccatgctaacaataggtgcaatgcaagagataaagactgcggatataattctagcagacaaactagtgcctcaggccatcctagatttgattccttcaaagacagaaacgttcatagccaaaaaattccccggtaacgcagaacgggcacaacaagaactactgtccaagggccttgagtcgctgaccaacggattgaaagtggtccgtctgaagcaaggtgatccatacatctttggtcgtggtggcgaagaatacaatttcttcaaaagccacgggtatatcccatccgttctaccaggtatcagctcttctctagcctgtaccgtattggctcaaatacctgccacacagcgtgacgtcgcagatcaagtgctcatatgcactgggaccggtagaaagggtgctctgccaaaaatccctgagtttgttgaaagtagaaccacagtgttcttgatggcgttgcatcgggccaacgttctaatcacagaactattgaaaaatggttgggacagtgatgttcccgctgcaatcgttgagagaggttcgtgtccggaccaacgtgtcactaggaccctcctcaaatgggttcccgaggtggtggaggagattggttcaagacctcctggcgtcttggttgtaggtaaagctgtgaatgcattagctgatcacgatctagtaaattttgatgaatcaagaaaatttgtgattgatgaaggtttcagagaatttgaaattgatatagatagtttatttaaatag

SEQ ID NO: 3088 - DNA, 2175 bp, Saccharomyces pastorianus
atgtacgactcaatttatgattctccatttccgaaaataaatccaaaagtccgctacaagacggccttagaaagagcaggatttgatactaagccgcgtaatctgttcagtagccagagaaatgcttccaccgggagcctccaggcctctgtaagttctcccccgatgtctgtccaaagaaacgtatcagctgcaccgtttgtgccggtcataacgaagagtacgtatactgtatcttccaagggtaatcagctattttctaagggtgagtctgacatttattcgccgcccgtactggacaatagcaggaaagtgagtatagcctcttcgaaaaatagcaacaagatatcttcgtcgaggcccagcaataagtctcatccgtcgcaggacgatccctttcgtttcgagcgtgggccagagcaccaccaggagcgatatactgctcccagatacgcaaatgaatcatccatcaaaatgcattcgcaagtcacagacaattctcttttcaattttgagcaaatagatgtcagtaatagtagaaaggaacaggacttgagccctattgaaaaaagtttcatgatgttgactcaaaacgacaccgcaagttttacaaactccatgagtcaaatgaataacgaaaggaccactggacaagaactcgaagaagaacaacaacaaatttcggccaaccatcaagaggtagagccagaagaagaagaagaagaagaagaaatttcggtcaactatcaaaaaatgggaccagaggaagaggaagagaaagaatacgatgtagagagtctaaattttgagcctcaacctgaactgcatgtaaatttagacgaaaatttgccgttaccagaaaacacctcgcagccacaagaagaagaggacgtggttccgagaatcccagaaataaacgttaccagagggaaaactacgccgcagttatttatcagtacgtcatacaatagcggatcaatagattccaaattattctcccaagatattgctactggctttgcgacttccaaggaaggtaaatctcccgatgttttgccatcatccccaagtgtagaaaacttggattttgatgcctcaaatgaaaagcgttactctacagcatcttcagagaaggtagaaaccccatatacagctacaaatttgcaagtcgagcaattgatcgctcaactggatgacgtttctttatctagaaatgctagactggatcagaacgagaattcgcttaacttagtggatagaaagacctctagattcaaaaaatcaagtgcatatttatccgggtacggtggtcttgacataccagcaacacagcaaacatccatcatgcgcaatatcgatgggaacgtgtccaatcaaagcttcttagtggataacgacgatgtcaatgatgatgtaccatctacctctacaactaacggtggcacaccgattttttacaagttcaaacagtccactgcacagtactccggcgatgaaggaaacctttctcaagaaactttcaaagcgaaaccccctattattgaggccctacaattgcagcataaacctagtataacaaatttgagagaggacgccgataattctagaccgactgacccacgggtctcgcccaccaacgggactgtagaatatagtcctgacgtgaattatcatgaaaacgagccgatggaattcaaatatccaccgggggaagggccttgtagagcatgtggcttggaagtcacaggaaaaaggatgttctccaaaaaagaaaacgaattatctggccaatggcaccgtgaatgtttcaaatgcattgaatgcgctattaaattcaataagcgtgtcccctgttatattttgcgtgatacgccatactgtcaaaagcattaccacgaggaaaatcatagcatttgtaaagtttgttcgaactacatagagggagaatgtttggaaaatgataaagtggaacggtttcacgtagattgtttgaattgtttcctatgcaagaccgcgattaccaacgattattatatatttaacggcgaaatcccgttgtgcggtaaacatgatatcgatgctcttctaaaagaaggaattgataacgatgcatcaggaagcgataggaataataccgtttccaaaaggagaacaagattgattaacttcaaatag

SEQ ID NO: 3089 - DNA, 1647 bp, Saccharomyces pastorianus
atgtctccatctaaaatgaatgctgtagcaggaactacttcagaagtcgaacaaaaaatcaggaaagaattggcgcttagtgatgaagttaccactatcagacgtaacgctccagctgctgtcttgtatgaggacggtttgaaagaaaacaagaccgtaatctcatcaagtggtgcactgattgcttactccggtgtgaagaccggtaggtctccaaaggacaagcgtatcgtcgaagaacccacgtcaaaagacgaaatctggtggggtcccgtcaataagccttgttctgaaagaacctggtctatcaaccgtgaaagagcagctgactatttgagaacaagagatcatatctacatagttgatgcctttgctggctgggatccaaaatacagaattaaagttcgtgttgtttgtgcaagagcttaccacgctttatttatgacaaatatgctgatcagacctactgaagaagaattggctcatttcggtgaacctgatttcaccgtttggaatgctggccaattcccagctaacttacacactcaagatatgtcttccaaaagtaccatagaaattaacttcaaggcaatggaaatgatcattttaggtactgaatatgcgggtgaaatgaaaaaaggtattttcactgtgatgttttatttgatgcctgtacaccataatattttgactttacactcttccgcaaaccaaggtatccaaaacggcgacgtcactttattctttggtttgagtggtactggtaaaaccactctatctgcagacccacatagattattgattggtgacgatgagcactgctggtctgataatggtgtcttcaatattgagggtggttgctatgccaaatgtattaacctatctgctgaaaaggagcctgaaattttcgatgctattagattcggtgccgtattggaaaatgttaagtacgatgagaaatctcatgttgttgactacgatgattcatcaattactgaaaatactagatgtgcgtacccaattgattatattccaagtgctaagattccatgtttggccgattcccatccaaaaaacatcatcctattaacttgtgacgcttctggtgttttacctcccgtttctaaactgactcctgaacaagtcatgtatcatttcatttctggttacacctctaaaatggcaggaactgagcaaggtgtcactgaacctgaaccaacattttcttcctgtttcggtcaacccttcttagctttgcaccctatcagatacgctaccatgctagccaccaagatgtctcaacacaaagctaatgcctacttaattaacaccggctggactggttcctcttatgtttctggaggtagtcgttgtgcattaaaatacacaagagcaatcctagattccattcataatggttcgctagctaaggagtcatacgaatctttaccaatttttaatctccaagttcctaccaaggtcaaaggtgttccggctgaacttttgaatccagctaaaaattggtctcaaggtgaagctaaatataaaggcgccgttaccaacttggccaatttgtttgttgaaaactttaaaatttatcaagacagagctactccagatgtattagccgctggtcctcaattttga

SEQ ID NO: 3090 - DNA, 897 bp, Saccharomyces pastorianus
atgaaagtatttgtaactggggcttcgggattcattggtaccgctgtagtatcggaactggccagtctgggtcatgaggttgttggtctagcaagatctgaagaatctgctgcaaagattaaatcattgaatcctgccgtgaagatcctccacggcgaactcaaggatttagacactttgaaaaggggtgctgcggagtctgaaggagtaattcatttaggttttgttcatgacttcaaaaaattcgatgagtgctgtgaaattgatcgccaagctactgtggctatgctagagtcactcaaaggcaccaacagaccattcatatatactagtggcacgttcgggctacgctcaggtaaggtagctcatgaaggagatgctagcgatgaaaacttcaagagcccacgtgcacttaccgaggaaactgcgttgagttacaaagataaaggtgtttcagtgaggtgtgtcaagttggcgccctcggttcatggaaagggagacaaagcgttcattccaatgttgatgaatattgcaaaaactgctggagagtctggctacgtaggacaaggccgaaatgtctggcccgctgttcatcgcttagatgcagcccatttgttcagactcgttttggagaagggaagaagcggtcgagtttaccacggtgttgccgaacaaggaataccactcaaggacattgcacaagcaattggagaggttttggatgtccctgcagtttctattccagtgaacaacgccgaagaacattttggcattatggttctttttatcgcaagagatggtccgacttcgagcgaaactactcggaaagagctaggatgggagccaaaacaacttggccttctcgaagatattcgcacaaactaccgatcagcctga

SEQ ID NO: 3091 - DNA, 897 bp, Saccharomyces pastorianus
atgagagtatttgtgactggggcttctggatttattggtaccgctgtagtatcagaactggtcggtctaggccacgaggttgttggcttggcaaggtcccaagaatcagctgcaaagattaaatcagtaaatcctgctgtgaagatccttcgtggcgaactcaaggatctagatactttgaaaaaaggtgctgcggagtctgaaggggtgattcatctaggttttgttcatgattacgaaaaatacgatgaatgctgtgaaattgatcgacaggctactgtggctatgctagagtcacttaaagggaccaacagaccatttctatataccaatgatacgtttgggctacgctcaggtaaggtagcttatgaggaagatgccaatgacgaaaatttaaaaaatcctcgtgcacttaatgaggaaactgcgttgagttacgaagataaaggtgtttcagtgagatgtgtcaggttggcgccttcggttcatggaaagggagacaaagcgttcgttcgagtgttgatgaatatagcaaaaattgctggagagtctggctatataggagaaggccaaaacgtctggtccgctgttcatcgcttagatgtggctcgtttgttcagactcgttctagaaaagggaataagcggccgagtttaccacggtatcgctgaacaaggaataccactcaagaatattgcacaagaaattggagaagttttgaacgtccctgcagtctctatttctgtgaacaacgccgaaaaacattttggccttatggtcctttttatcgcaacggatggtccgacttcgagcgaaactactcggaaagagctaggatgggagccacaacaacttggccttcttgaagatattagcacaaactatcgaccaaaatag

SEQ ID NO: 3092 - DNA, 756 bp, Saccharomyces pastorianus
atgtcgatcgaagagatagatttttataacatcaacggggcaaaaacatccactgttatcccaagcaggaagaaatttcacaaaagagctttagacgaaaaaaggtccctgtatgttggggatcttcccaaagactgccgtaaacaggatctcagggaattgtttgaaccaagttttggtaagataacagttaatatgctgaagaaaaaacaacccaagaaaccgttgagaatctttgcatttatagagttcgaagaaagtgtagatttggaaaaagcgaaagaaaaaatgaacggcaaaacattcagggataagaaaattgtaattgaaagcatcttaacgaaggaggagaagaacttcgaaaatgctaataacaagacagtcacaacgaacgcaaaaactgttccaggctccaaacctttgtccgtacatactctgtacattaaaaatattccactgaagtcaacaaatgaagaactggctgaaatttttggtgttgcccctaaaaatgttagtttcgtaagaaggcaattggtcgacttgaagaccaacaaagtcttcttttccgacgaatttcacacaggcgaagcctttatcagatttgacagcttggcctcggaatgtgacattggaaagaaatgtcaagagtttgaaggtcaaaaaacaagcaatggtagggtattattggtaaaggtagcttccgccaagaaaaacggaaaggaccaatatgcagatgataacgcggaaaaaaaataa

SEQ ID NO: 3093 - DNA, 1512 bp, Saccharomyces pastorianus
atgttctgtgccattagtgggaaagtgcctagaaagccagtgctgtcacccagctcaaaaaccgtttttgaaaaattgcttcttgaacagtatgttagagataccgggaaagacccgattacaaacgggcccttaagcctcgaagagataatagagattgtgcccagtgcccagcaggcttcgttaatcgagtctacgaactctgctaccttgaaagccaattactcgattccgaatcttttgaccagtttgcaaaacgaatgggacgctataatgttggaaaacttcaaattacgatcaactttggacagcctaaccaaaaagttgtctactgtgacttatgaaagagacgcagccaagctggttgctgcgcaagtaatgatggaaaacgacgaaatttctcgtggcttatcgaagtctccaaaacaaccggtggttgtcacgagggaagcatttttacaaggattgttgcaatcatctagagaatttgtagcgagaggtaaagcgaaggcattcaaatggccgatcttccaaaattttgagttattacctacacaacgctattcatctgcgattaaaacgtatccatataaagagcttgattcttccatgaactataacaaatggacttccatgtgtctctgtgatgcaaacagtttacacttcactgaactaaaggactccgattcaattaccacggaaaccataccaaatcctcatacggagcaaaaacagcctgttattgtttccaagggttcacataatcggttgttggtgttatattccgataatcacataaccatattagacttaacaacgaaaacagtagcaaaagaaatcgatgtaaactcagcgaaccagattgtgtatgtgtacggccacaatgagatcaacacggaatatttcatctgggcggatagcaaagggacaataggatttcaatcttacacggacgactcccattatataatcaatactggcaggtcgaatgttgagtacagcaatggggcactacacaaggactcgctgttactagcgctttactcgctggatggaatagtggacgtgtacagtttatcatcgcctgatcaagcaagctccagattccctacgggagaagacattaagatcaaagagatcaagttttcagacaatggatactggatggtggtaaagggcagtcaaacagtggcctgctttgacctgaggaaagacgtgggaactctggcgtatccaacttacactcttccagagaccgaagcaggggccgttgtgtatgacgtcgatgagtttggcaagaatacgattgtatactcaaacgaggacaggtccttgtccgtatacaaattcaacaagaagacgaaaggttggatgagagacgaggccactacgctacatttgcagagtgacgtcggagacatcacggatatagaggttgtgtgcggcgacggcagcgttgcggttgttttaaagagaaaagacactttcagtatcgtcgcattgtcatcgtga

SEQ ID NO: 3094 - DNA, 2514 bp, Saccharomyces pastorianus
atggccaaattaaagtcaaaaaagagctcattaactggatcgctagacaacaagatcgttgatcttatctaccgtctcttggaagaaaaaactttggatagaaaaagattatcgagacaggagagccaaggggaagaaggcgataataacgaggacaaggaagatgaagacgtatttgaatcaatgttttttgccaaagatttaacagcaggcgagatctttaccttttgtttaactaaggatttgtcgcttcaaagagtgaaaaaagttatcttacaaaagaccatcgatcgtatgctcaaagatgtcattgaatcagagcttgaagagttcggttcttatcccgggtacaacaaggaagaagaagacaaacctagcttcgaagaagaacttgctaagaagaacatgatgatcgatcaagatacaaacgagatgaataaacgtattactagtttatggtccaaaccagaatccatcacagagcctgtaacaggcgcagatgatgcgaaacctgaagaagttaaaaaatcaaagaaaaggtccaaagaaggtacatgcaaggtaaaacgtcaaaaggtcaaagaagatagaacccctcctaattcgtctttgaaatccctaggtggtatggatgatgttgttgcgcaacttatggaactcataggtttaccgattcttcatccagaaatatttttatcaacaggtgtggagccacctaggggtgttctgttacacggcccacctggttgcggtaaaacatccattgctaatgcattggccggagaattaaaagttccctttatttctatatctgcaccttcggttgttagtggtatgtcaggtgaaagcgagaaaaaaattagagatttgtttgatgaagcgaagagtttagcaccatgcctaattttctttgatgaaatagatgccattacacccaaacgtgatggtggcgcccaaagagaaatggaaaggagaatcgtcgctcagttgctgacctcaatggatgaacttacgatggaaaaaacaaatggaaaaccggttattattataggtgccacaaatagacccgactcattggattctgccttaagaagggctggccgatttgatagagaaatatgtttgaatgttcccaatgaggtttcaagacttcacattttgaagaagatgtcggacaaactgaaaatagatggcaccattgattttgctaagttggcaaaattaactccagggtttgtcggggctgatttgaaggctttagttactgccgctggtacatgtgccattaagagaattttccaaacttatgctaaaatacaatctccaccgagtacaacagcggtttatttagaagaagataagatggaaatcgatgacgccacgaatgaggacgaatccagcttgagaaatactgcaaacatgattgatccgttgcctctctctgtagttcaacagtttattcataactatccagaacctctaacagatgatcagttatcattattgtcgatcaagtacgaagattttttgaaagccttaccaacaattcaaccaacagcaaaaagagaagggtttgccacagtcccagatgttacttgggcaaacgttggtgcattacaaagggtaagaattgaactaaacatggctattgtccaacctatcaagaggccagaactttatgaaaaggtggggattagcgctcctggcggtgttttattgtggggaccaccaggttgtggtaaaacattattggcaaaagctgttgctaatgaatctcgtgcaaatttcatatccatcaaaggtccggaattactcaacaaatacgtcggtgaatctgaaagatctatcaggcaagttttcaccagagcaagggcctctgtaccgtgcgttattttctttgatgaattggacgcgctggtaccaagaagagacacctcattatctgaatcttcttcaagagttgtcaataccttattaaccgaattagacgggttaaacgatagaaggggtatttttgtgatcggtgcaacaaatagacctgatatgattgatcctgctatgttaagacctggtagattagacaagactttatttattgaactacctaatacggaagaaaaacttgatattatcaagacattgaccaaatcacatggaacaccgttaagtgacgatgtcgattttgacaagattatcaaggatgagaagtgtaacaactactcaggtgctgatttggctgctttagtcagggaaagttcggtcttagccctgaaaagaaatttttttaaaaatgaagaaattcaatccgtccttgataacgatttggacaaagaattcgaagatttatccgtaggaatatctaatgaagaaatcattgtgaccatgtctgatttccaaagtgcattaagaaagatcaaaccctccgtgagtgataaagatagactgaaatacgatagactaaacaagaagatgggtctaacggaggaaatgaaggatgcggaggaaaataaatga

SEQ ID NO: 3095 - DNA, 99 bp, Saccharomyces pastorianus
atgcatttgagcaccttgccgaaagtgccttggcccaacaggtccttaacgatgaagcgacccccgctaccgaagacgtcgttttcctggtacacgtag

SEQ ID NO: 3096 - DNA, 4686 bp, Saccharomyces pastorianus
atggctccatcaacagtattagatgggtgcccatatgggtatcggccatatccagatagcaccactaatgccttgaatccgtgcttcctgtccatggtgtcttcgtggcaagccgttttctttttattggtaggtacctatcaactacggaaactttataggaacaaaagagttccgcccaagtttaagaactttccaatatatccaggtgaaatcagcagcagacatacaatgcatttgactaacgtttgctttcagtccaccctcataatttgccaactggctttagtagcccagcaaagcgacgagaattacccatctatattgaaaacgtctctttacttgaatctcctcttcaatatggggatttctcttcctactcaatacttagaatactttaagagcacgtactctatgggtaaccagcttttctattacatgtttcaaatatttatgcaatttttcctaatagcgcaaagatattaccataactcaagtgaaccaagactcgccttaattagtggtcaagcagctatgatcttggaatttctcattctcggtaactctgtgacaattttcgtttatgatttatgcctatttgaaccaatcgaggaattggctgaatactataaggaaaacgattggtatcctcccgtgaatgtattgtcgtatattacgtttatttggatgaacaaattgataatgaaaacctaccgtgataagaaaattgaaaatcctgacaaactgcccctaccaccagttgatttggatattaggacaataagcaagggatttgaaggaaattgggaactggagaaatggctggatagaaactctctccagcgagctatttggaagtcttttgggaagactatttcaatagcggtgctatatgaaaccacatctgacttactgtctgttatacaaccacaatttctacgtttattcatagagggcttcaatccagagacacccgctaaataccctcctttaaacggtgtatttatcgctcttgctcttttcttgataagcgtgatctctgttttcctttcaaaccaattttatattggaatttatgaggctggtttagggatgagagggtctttggcttctttagtataccaaaaatctctaaaattgtcattggctgagcgtaataacaaatctacgggtgatatattaaatctgatgtccgtggatgtcctgagaattcagagatttttcgagaatgctcaaaccattattggtgctcccatccaaatcatcgttgttttaacttcactttattggctattagggaatgctgtcattggtggtttagtcaccatggccattatgatgcctattaatgctctattgtcgaaaaaggctaaagcattatcaaagacacagatgaaatataaggatatgaggatcaaaactataacagagcttctgaacgctataaagtctatcaaattgtacgcctgggaagaacctatgatggaaaaattaaatcatgtccgcaatgacatggaattgaaaaattttaggaaaattggtatagtgagtaacctgatatattttgcctggaactgtgttcctttaatggtaacttgctctacattcggcctgttttctttattcagtgatacgccattatctccttccattgttttcccttcactgtctttatttaatattttgaatagtgccatatattcagtcccatccatgataaattccattatagagacaagtgtttcaatgggaagactaaagtctttcctccttagtgatgaagttgacgactcatttattgaacgtactgattctccatctgatgagagtgtattacctgtcttggagatgaataacattacctttttatggaaatcaaaggaggcattagcatccagtcaacttgaaaacaattcaaggacggacgaagaatctacaataggatcgtctcaaattgcattaaggaatatcgatcatttcgaagcgaaaaggggtgatttggtttgcgttgtcggccgtgtgggtgctggtaaatcgacttttttaaaagcgatccttggccaactcccttgcatgagtggttccaaagaatcgctaccacccaagttgattattagagcatcgtccttggcatattgctcacaagaatcttggataatgaatgcctctgtgagagagaatattttattcggtcataaatttgataaggtttattatgatcttaccatcaaagcatgccaattgttacctgacttaaaaattttgccagacggcgatgaaactttggtgggtgaaaagggtatatctctatctggtggtcaaaaggcccgtctctcattagctagggctgtatactcaagggcagatatttacttactggatgatatcctatccgctgttgatgcagaagtcagtaagaatatcattgaacatgttttgattgggaaaacagctttgttgaaaaataagacaattattttgactactaatacagtatcaatcttaaaacactcgcaaatgatttatgcactcgaaagtggtgaaatcgtcgaacatggaaactacgaaagtgtaatgaagcgtgagaacaataattctaaattaaagaagctgctagaagaattcgatactcccattgataatatgaatgggagtgatacgcgaactgatcagtcacctgaatatgatgtagaggaaactttgcagcttaaagtagttgaatcagaggatgaatacgaggtcgccacaaacggcgaattggagctgatcaaagtcaactccagaagagcgtccttggctacactaagacctaggccctttataggagcgcaattaaatgccacaaagaagacagcacaacaggctgaaaagactgaggttggtagagtcaagactaaagtatatcttgcatatgttaaagcatgtggtgttctaggagttgttctatttttcttattcatgattctaacgagagttttcgatttagcagagaatttctggctaaaatattggtcagaatctaatgaaagaaacggttcgaacgaaagggtttggatgtttgttggtgtgtattccttacttggagtgggatcagccgcttttaataatctaaggagtatcataatgctgttatactgttctatcaggggctctaaaaaactgcatgaaaacatggccaaatccgtgattagaagtcctatggttttttttgagacaacgccagttggaagaattataaacagattttcatctgatatggatgcggtagacagtagtctgcagtatgttttctcatttttcttcaagtcaatacttacttatttggttaccattatactggttggttacaacatgccatggtttttggtatttaatatgtttttgttggtaatctacatttattaccaaagattttacattgtattgtccagggagcttaaaagattgattagcatatcctattcgcccattatgtcgttaatgagtgaaagtcttaacggatattctattattgacgcatataatcattatgaaaggtttatttatctaaactacgacaaaatccaatctaatattgatcttgttttcaatttcagatcaataaataggtggttatccgtgcgtttacaaaccattggtgctacaattgttttggctacggcgctgctggcgttaacaacaattaataccaaaaatcaattaagttctggtatggttggtttgttgatggcttactccttagaagtcacaagttcattaacatggattgtaagaacaactgtgatgatagaaactaacatcgtttctgtggaaagaattgttgaatactgtgagttaccaccggaagctcaatccattaatcctgaaaagaggccagatgaaaactggccatcagagggtagaattgaattcaaaaactattcaacaaaatatagagaaaatttggacccagtgctaaaggatataaacgtaagaattgagccgtgtgagaaaattggtattgttggtagaacaggcgcggggaagtctacgttgtctttggctttattcagaatattagaacctgctgaaggcaaaattattattgacgatgttaatatatccgagttaggcttatttgacttgaggagcaatttggccattattcctcaggatgcacaggcttttgaaggtacggtacggaccaatttagatcctttcaatcgttactcagaggatgagctaaaaaaggccattgaactagcacacttaaagtctcatttggagaaaatgcttgggaacgaaactggatgtagtgataataatgttgaagaacgtgaaaatgctaaggatattctggatgtgaatattaatgagaacggcagtaatttgtcggtgggacaaagacaattattatgtttggcaagagcgttattgagtcactctaagattttggttcttgacgaggctacggcttcagtggacatggaaacggataagatcatccaagatacgatcagaagagaattcaaggatcgtacaatcttaactattgcacatcgtatcgacaccgtgttggacagtgataaaatcattgttcttgataagggcaatgtaaaagaattcgactcaccttcgaaattactatctgacaagggatctattttctatagtctttgtgaaaaaggtggctatttgaaaaaatga

SEQ ID NO: 3097 - DNA, 2604 bp, Saccharomyces pastorianus
atggaaatggacatggacatggatatggaacttgcttccattgtgtcgtctttaagcgccctatccaacgggaataacaacggcggccaagccgccgctgttgtgggtggcgctgctgccggctctcagcagatcggcggcttcagaagatcgagctttaccacatcgaatgatatcgactcggacatcctgttgctacacggctccagcgaatcttcgccgatcttcaagaaaacggccctgtctgtcggaaccgctccaccattctccacgaactctaaaaagttctttggcaatagcagcaactattaccagtacagatcgaacgatactgcctccctatcgtctgcgtcctacaacaactaccaggcgaacaacggcacgggtaacctaggcaagaataacaaggttaaccatctcttggggcagtattccgcctccattgcggggccagtctactacaacggcaatggccacgataacagcaatgtaggtggaggaggattttttgagaagtttgggaagtccctgattgacggtacaagagaactggaatctcaagataagcctgaacatgccgccaaccagccccagttcataacgaaaactgtgtccaacgcgagcttggacacccagaccaccttcgagcaatctgtccagtcggagtcgaataccaacaccaacaaagtgaacactaacactacgaacagcggatcattataccattccagctcgaattctgactcttccgcctctttggagtctgaccagaatgcccactatcctcaaagaaacatctggaatgttgccaatactccagtattcagaccgagtaacaacgctgctgtggtggctcccaaccaacaagacggtcttgcaaataacaatttcccatcttacttcccaccaaaccagtttcatcagggccctcactaccagaacttccccaattatttgatcggttcgccctcaaacttcatctctcaaatgatttctgcacaaccgcccgccagtgaggacaccggggactttgatggtaaaaagaagaaaaaatcgaacaaaccttcttcttcctccacaccttcgtctccgccaaacactacccccttcccatacgcctacccaaaccaaatgatgtttatgccaccaccaccaccatcggcccctcgacagcaacagcaacaacaagagcaacaggatcaacaggaaaatccctatatatattatcactctcccgtacctgtgccttccaatgcgcccaccaaggacgaaaagaatttcaagaaaagaaacaacaagaaccataccgcaaatactgctaacaacaatggtaacacaaacaaacaagccaacccttatttagaaaattttgccaccaacaagaactcgtccaaaaagaacgcatctttcaaatccagcgagccaatggccaataaccataagtctcagtcgcattcgcactcccaaaccccgccacaacagccacaacagccaacttatcaccgctctcccttattagagcaactaagaaatagtagttccgataaaaactcgaactcaaatttgtcattaaaggacatctacggccactctttagaattctgcaaagaccaacatggttcacgttttattcagcgtgaactggccacttcaccagcctctgaaaaggaagtaatattcaacgatatccgcggtgacgccattgaactatcaaacgatgtatttggtaactacgttatacaaaaattctttgaattcggtaccaagattcaaaaagacgctttggtggaacagtttaagggccatatgaaacagctatctttacagatgtacgcatgccgtgtaatccaaaaagccttagaattcattgattctcaacaaagaattcaattagttctggaactctctgattccgttttacaaatgattaaagaccaaaacggtaatcacgttattcaaaaggccattgagacgatccccttaaagaaactaccctttgtcttagattctttgacgggccacatttaccatctatccacccattcctatgggtgtagagtgatccaaagattgttggaatttggttcaagtgaagatcagtgtaacatcttgaatgaactgaaggatttcataccttacctgattcaagaccaatacggtaactacgttattcaatacattttacaacaaaatcagttcactaataaagaaatggttgatgtgaaacaggaaatcgttgaaacagtggcagacaatgttgttgaatactctaagcataaattcgcctccaacgtagtggagaagtccattctttatggctccaaagatcagaagaaattgataatgtccaagatcttaccaaaggataaaaaccatgccttgaacctggaagacgattcccccatgattttgatgatcaaggatcaatttgccaattacgttattcaaaaactggttaacgtttctgaaggtgaaggtaaaaaattaatcgtcgttgccattagagcctatttggataagctaaacaaatcgaattctttgggaaatagacatttagccagtgttgaaaaactcgcagcattggtagaaaacgcagaagtctaa

SEQ ID NO: 3098 - DNA, 1473 bp, Saccharomyces pastorianus
atgaagatcaaaactattaaaagaagttctgatgattacgttcccgtcaaaagcacacaggaatctcaaatgcccaggaatttgaaccctgaattgcatcctttcgaaagggctcgtgaatatactaaggctttgaatgctaccaagttggaaagaatgttcgctaaaccctttgtaggtcagttgggggacggtcacagagacggtgtctatgctattgccaagaactatggtagtttgaacaaactggccactggttcggcagatggtgtcattaaatactggaacatgtccactagagaagagtttgtttctttcaaggctcattatgggctcattaccggtctttgtgtcacgcagcctcattttcatgacaagaaaccagatctcaaaaaccaaaatttcatgttatcctgtagtgatgacaagaccgtcaaactatggtcgataaatgttgacgattattccaacaagagatcaagcgataacgattccgtgatcaatgaagagggtttggtgcgtacttttgatggtgaatccgcatttcaaggtattgattcgcatagggtaaactctacatttgccacaggtggtgccaagatccaactttgggacgtcaatagagtaaaaccagtttccaatttgtcatggggggcagataacattacgagtgttaagtttaaccaaaatgaaaccgatattttggccagtactggtagcgacaattcaatcgttctttatgacttaagaaccaattcccctacacaaaagatcgttcaaaccatgagaacaaacgctatttgttggaaccccatggaagcattcaatttcgtgattgcgaatgaagatcataacgcttactactacgacatgagaaacttatcgcgttcgttgactgtgtttaaagatcatgttagtgcggtgatggatgtcgatttctccccaactggtgacgaaattgtcactggttcatacgataagagtatcagaatttataacaccaaccatggacattccagagaaatctatcacacaaggagaatgcagcatgtcttccaagtcaaatactcgatggatgctaaatatattatcagtggatctgatgacgggaatgttagattatggagaagcaaggcttgggagagatcgaatgtcaagactacacgtgaaaagaataaattagaatatgacgaaaaattgaaggagaggttcagacatatgccagaaatcaaaagaatcagtagacacagacacgtgccagaagtcattaagaaggctcaagagattaagaacattgaattgagttctataaagagaagggaagtgaacgaaagacgtaccagaaaggacatgccgtttatctctgaaagaaagaaacaaatcgtgggcacagtgcacaaatacgaagacacgggaagagaaaggaaaagaagaagggatgacaataaacgtgacgctcaagaagagcagtga

SEQ ID NO: 3099 - DNA, 1281 bp, Saccharomyces pastorianus
atggctagtaatgagaatgagttctctgaaacggactcgttaatgacttttgatgattatataatcaaagagctacctgaacatctacaaaggttaatcatggagaatttgaaaggctcgactggtgtgaatgatgtcaggccgatttcaaaccactcagaattgaatttcagtgcaaacggtagccttaaaggccttgaagatgcactccaggctttacagttgcagagtgtgttacagacaccttcactaggatccttaacgacatctcccaagttctctggatggtcgtttgctcagggattttttgtaggtcaactgagtatagttttgttgtttatcttttttttaaagtttttcatattcagtgatgaaccctctaaaagtaagaatcctacacctgcatcctccggtcataagtcgcaattcaaacagtatccctttatatctcctgaatttttttcttctcttatcaggaaaggtggtaaagagcaccacgagttcaatgaagaggtggaaagtgagcgtctccaagaattggctttgattttggaaaaaacttactataatgttgatgtacatcctgctgaatctttagactggtttaatgttttaatcgctcaaatcattcagcagttccggagtgaagcttggcataaagacaacatccttcattcctttaatgatttcattggtaggagatctcctgatttaccagattatttagatactataaagataactgaactagatacaggcgatgatttcccaattttttcaaattgtagaatacaatactcgccaaattctggcaataaaaagttggaggctaaaatcgatatagatataaatgaccatttgacgttgggggtggagacaaaactgttactcaattatccaaagcctggtattgccgcccttcctataaatttggtagtatcgattgtgaggtttcaagcatgcttgacggtctctttaactaatgcagaggaatttgcatctacttcagatggtagcagtagtggtgatgatgcggatggtgattctggttactttttgatgttttcattttctcctgaatatagaatggaatttgaaatcaaatcattgattggctcgagatcaaaactcgagaatattcccaaaattggcagcgttattgaataccaaataaaaaaatggtttgtggaaaggtgcgttgaaccgagattccaatttgttaaactaccaagcatatggcctcgtagcaaaaacacaagggaagggaaggctacagagtaa

SEQ ID NO: 3100 - DNA, 2607 bp, Saccharomyces pastorianus
atgaacgcaactaaagaactgacctttagtttattaaacagatttcaagacaaagataggtttggatctgcccaaaggcatgccggtatctcactgaaagggttcatttctggtatacttttttcttttctatactttttgttccagctctcccttttcattgtcctacggtcaagattcaagactatatatcaagcaaatgtagccctcaaaatttatccagagtctaaagctggctatgccaagggaaaaaaaagctataagttgttagtattttcttttcttaagcaaattccagataggatacttaatcctataggaagtttcaacccagatgaaagatatgggttagacaattatttgtttttgcggtttcttaaactattaatatccttttttgcaattttatccattatcaatattcctatattagttccaattcattatttttcaatgggcaacttggaagatagtcaagatgagcactaccagcagacttttactacaacaagtgaacttgacaagtggactatgtcgaatctttcacaagactcttcaaacagactcatttgccatttgtttttgagcatcttcgttgtactctggttccacctgatcctttcttcagaattgagatttgttaaccaactaggttattccgtattgacgaaaagtaaatatcagaatattttgtatttggaagggttgtcaaatgaactcattaccgaagacgtgtctttggaagctaagttcgagcggctatatcccgattgcgtggatgcaatctacttcattccaaaagatttgagaaaagttcacaatttagaaataaaattaaataaactacaaaaatcaaaagaacaagttatttttgaaatctttctggagaaatattttaaaaggatttcaatacaaagacatttaataacaaatcataaatcatttttcctctcaaagttgaaaaatcatttactatttcagtataaaagattcatctttctatctcaacatcgtattgcgtattattgggcaaagtttggtctccattgggagaaattaaaagtatttccgttatatcacccaaaatttacattgaacaaagaaaccgtattagaaaggaaatataaaatcttggataaaaaaatacggaaggaaaaactcattaagtttcgggttaactccttaaaaacagttccagacatcaagtcatcaccatctgctcatagttcaccaactacggatatatatatgaacaaagtgttcatttgcttcaaatcaacactaatatcaaatatcataggtgaaattttgtcatataaattaccaacccagaatttaaaagtgataatagggccaaacatcaaagatattatctggagaaatattcttgattcatcacctttttggaaaagcgctaaatatttctcggcaaacatacttcgtatttttgtgattattggttggattttacctgtcgcgtttcttgggttgatatcacagattccgaatatttcttcactgattccatttgcaaaaatcatttactttcaatctccatttataagagaagtagcgaagaatttaatcccaatagtgactttgataataataatagaaattgttccatacttttttcgttggctaagttgccttcgaggattgaaaactggagctcaggtagaagctgacgtccaaaattggtattttatctttgtgtacattcacctatttctagttgtcacgatatcatcagggttctctatcattattgaaagacttctcaacaaccctgtcagtattcctgctctattagctaacgacttgcccaaatgtgccaactttttctgttcttttgttttgattagaggcatggcttatgcaggtggtaacttacttagaataaaagaactactctttgaattattctattacaaatggaagacgtgtagcccacatgctcagtttaaaagattaaagacatctttatttttccagctaggatctatttatcctattttttcagttttgggttgtattggcatcatatacagtgtcgttgctcctattatattattgttatgttgcatttcattttccatggtttacttctccttcaactatctgtttaaataccaatataatatagaaaactactctgaaacgtttggtaagctgtatatacaggctttaatgcagctatatgcaggcatttacttcatggaattttgcctactgggactcttcactctttttgatcaatatacattatcaacgataatgattgttgtctttatccttactgttatggcacattccaaaatctccaaacaaatcagatcgaaacctcaacatttacctaccctagaatacttatcgagcttatcatcggaaacaaaggaccaatactaccacgaaagttacagttttgatgatattttttcagttcgaaaaggtttcgataaaatttggctaccaagggacaaactgggaatctcagaagaagagcaatcctttttggagaagtcataccgtttgaagttcgatcttaatatgtattccatggacttattcggggattgccatttagataacggccatttgccttga

SEQ ID NO: 3101 - DNA, 2829 bp, Saccharomyces pastorianus
atgggtaaatttggtttagcaaacaggtcaacggaggaccttttgcatgataaattcatacccgaaacatctcccactaatattccaactgatattctcattaaacagggacttataacagattccactgaatcgctgattcatggaagcgcagaaaggtatatcggaaatgctctaaaacctgtcgaagaaaccaattcagagcacccttgggaagacataccgttccatcttccttctccaccaccagatctggagcacgaagaagttgtaaacatatccaaaaattgcgtgcgagagaacttggatgatacatccattgaggttatagaagacttatactatcagatcgagacttttttagttcatttcaaattgtcaagaagttttttaataatttttaagaactatattaacattcttatacaagaaggcatcaatccgttacatgacgagtactttaaactactagaagatgaattgaaaggggttttcactttcaatactgttatagaagagatcctagaaatatttttgattcatccgcgtaacaagtttattgctttgtcgcttgcagaatatacttatgccagaaataaaataagaagacattttaatcgttggaaaaatacttggacactgaattacagggcgtataaatttgctgatcaaacaaaagtcaagctaaaggaagctgctttctatgtttggagtgacagaaaattaaagtactcacaaatggccaatgatgaagccgacaatttcaggaatacctggctactatttcattcgtttcaacaatggataaatttaacacaaactcttagtgaacagtctagattagcggaccaggctttcttgaataggatgttcaagaaaatcattaaggcacgtgaaaaatggaagcatttggaaaccgtcagcactgaaggtatagaacagatttcattgcggaccaatttccacaaatggaaactaaggtatagagaaagaaactttcttggttcgaaaagaaagatctttgaaggaataaggcgaaaactcatacactacgaattcgatgagaccgtttcacagaaagtaaggtctttatctctacaaaagacgtgctttggcaaatggaaagagaaaaatgccaaaaatgaagacaaacttgcagacctttacgagctggaaaataaatttatcaaacaaaaattcttggataaactgagtacaatgcttcagtacagtcaacaagaaacaatggtaaggaataaactagatcaaacacttctaaaatgcgtcttcgagaagatgtggctaaaaaggtttgaagatcatctgcatttatattccgttataagcctgcgggaagctaaactcattaagaatgtttttcattcttggaaaaaactcctatacactgatattaaggccagcgattattcaagaacaaatctgctcaaatctgcattacgggattggaaacttagtgtaaagctaaaaacattcaaacagaaacacaaagcaaagattttatcaaactcttactgtacttggaaaagaaggatacagtacggaaaaatatcgaataaccatattaggattaccttttatgcaagatattttaatgcgtggaaaaggaagatgttgcagataagatcagcaaatgaaggggcatccatcttttacaaacaaggccttacaaatgaatgcttagctatttggaaggagcgcgtgataaaaagtaaagaattggaggacaggtataatttcttaagtaaaacgcatgcaattttaactataaaacggacagtaatgcacattaataatgttcatttgctatctaataaactagaaccctacatgaatagaataaagctttctgggactttttcaaaatggagaaaagctactaattttaggatcaagcataaattgaatgatattttacacacgtatgaattggacaaaaagtatgaacttcagtatggaatactttttgcatggcagaacagatatcgcttctactcagaagaatgtgattctcaagcagtttttaagaaaaatcgacagctcgagaaaatggtcttaaagaaaagtaaggaaaaactattggaaatggaaaggtcagaagcactggcagacgaagtccgtaaggaatttatactaatcaagacattttacatctggaagactcatctagatgagatatactacatgaacacattattggaacagtctgaagctaataaacaattcgtagttacatctaaattcttgaagatgtggagtcttcgattcctaaagactaaacgtaatgacgaaacagtccaagtctttcgtcatcgctgggatagggctactgtgagaggattgctattactgtggaaaaaccgttcagacagttcaccaaagagaaagaaagaagtcgacctcaaacatgaactgaaaactcccataagatcggacgcaccaaaaacttccacgataccgggctcagaaagaataaagcagcataggatggaggccatgaaatcgcattacagcagagcaagaagagctataccaagtcccgtaaaatcctcaagtgttcttaattctacagctaagaagcagatcaaacttgagggctcaacagatttagatgggtctccaacacgagcgaaacccataagatactcccctagacgtgctaatagaaacctgccatacaaagtggaccacattgacttcggcaaaatacctgctgtaccttttagtttaagcgcggattcttctaaagccgatcagaatatggactatttaagagaacaagatagatctccacttagtcggaaacgttaa

SEQ ID NO: 3102 - DNA, 1320 bp, Saccharomyces pastorianus
atgacactgaatgatctactaagttccgtattacctgcaaaccagacattcaactttctgtcattacagactataccagaagaaacccatactgtcgtaactccggatagatatgacaaaagggtcgcagagcgcaccatcaagactcagcacttcttttctctatttcatcaggagaaagtttttttttcattagaagtgtatgtttacattacactttggggtgagatgaatgccgatcggttagtattcgtatcgaaagcagacacgaacgggtattgcgatacaaagataagtatcagggacgtaaccaaagcgctcctgaaatatgttttatcaattgacccgaattactatcttcaaagagtaaaacccatagaaagaccatacaaaaaaatgaacattaagctgatcactccagcaggtacgccggcggaatctctgaggacactggccgagagactcaagcaattcggttccacgaaactcaatgggccagcaatctcattgtatcagcaagatttctaccattccttcacatgttctcgtaagattttgaccaaaatttgtttatttactcgacctgcatctcaatacctcttcccagattcttcgaaaaatagcaaaaagcatatactaaatggagaggagctacttaaatggtggggctcaattttggatagtctactggttgattatttccagaatgatacacaggcgaaattaaggatcccaggtgaggaccctgctcgagtaaaattatacttaaggggaatgaaatacccgctgtggcaagtgggcgatatttttacgcccaatgaaaaatctcttgcggtgtatagcataccattattcccagacgatcctaaagctagatttatacaccaattggctgaggaagaccgtcttctcaaggtaagttcatcaaccttctggattgagctgcaggagcgtcaagagttcaagttgagtgtaacagtatcagtgatgggcgtatcaggatacacccttgcaaccccaaccctattaccgtctagtgcagatgtcatcgtgccaaggtcaaaaaaacaattcaaagccatcaagaaatacgtcactggagaagaatacgatactgaagaaggtgccatagaggcgtttctcaatattcgtgacttcctcatgcttagactggcaacaaatcttcaggttttgacagggaaaaaagaatatcgggcaagaagccaattgacccccacaagtaaagtcaataacatgacggtaaccatgctgaaaccccgtaaaaaatccaagacccaagccacaacccgcaataaatag

SEQ ID NO: 3103 - DNA, 2586 bp, Saccharomyces pastorianus
atgaatatccaaatatttaaatgtattctttggctactgccgatactagggcttacacaggcacttttgcaaaaccccaacgatgattctccatttagcacagtaattgatatcctctctgaaaatgttgaattctcaacttttctaagaattattcaaaaaaaaggtcacattcaatacctgaatgagctccagaattttacactttttgctccagttaattctgcctttgtaaaagaagaccagattacacgtcaatttgaagagagttttaatattgaggatttccttatgcatgataatgtgttgaaagtgaaagaactgacaaatggcacctatttagaaaagagaggtaaagtagcaccactgctgctgacaagatataaacatcgttgctgggttaacgatatcactgttgtcgaacctgacttacaaccgaatttccaaaatgcttcggtacagggtatcgctaatatcttgctccctccacctcctataaacgacttactggttcagctagacgaagaaacgcaagatttgaagatatttaacgattttatgaccagtttttcacactatgatgcatatacaaataagtccactcttttggtacctttagatgttaattttcgaaaattattcaatgcaatcgaaatcaactatttgaccgacaagtattcaaaactgaggaaatctaatgcaatttctcagggcaagtggactgcagacagaactttccttcttcaggaagtcagtatcgatgatatatatggtggtttcttgcccgacaagctgactctgagaaacaaaaacaatcgaccacttctgctcaaaagcaatatcgatggttcgtcaataggtgtgaatcattcagaatattcccgtatatccaacaagatttttgaattaggggttgtacatggattttctaaccttgaatttttacgggaacatatagagtttgacgctgaaaagtatcttcatggtttgaactgctcagagtttgtaaaggagttatatttcagagaccttgaaaagttcattcaaaatgaaaagaaaacgaccatatttgtaccacaagcttctttcaacgaggatcgtggatatacaaaaccatcgcttttgtaccatttcactgaagacaaaatcgatctagaagaggagttttcattattacctaaaaccgaagatgtttccacccaaatttatgactctgcgttctgctcttcggctaaaagacttggcgggcattgccaaaagttcaaaatttcaagatccaatgaaggctattatattaatggtcgttttaaaatcttgaataagaaaccatatgaaattggtgatacgtacatatattccatcgaggatgaccttcaattgccaggtgagctagtattgtccttaccacctcaagatcactgttctacttcgcttatgtttttgagggaccttggtctattggatttaccatcaaaccataagggatacacaatactacttccctgtatgaattcatgggacgataacgatttgactgtggattattttaagtcaaacaaaactgccttaaatttacttatgagaaacctaattttcgaggaacttatttactcgaacgactacaatgtttcaactaaagctcaaaatttatacgggaactctgtatctattgatgtagaggaggttgtggagtgctcaaatttaacaaaaataacagtgagtaatataaaggagagcattcttattgaagaaaattccgatgtatttttcaatcagggagtcatccatcctataaaccaattgaactttccagatgatctggaaatatctttgagagaactaatagacaccaccggaacgaaggagattttcgagttctttgatttattccaggacctttcttcaatcatccggaacgaagaatactctcttctagtcccaacagagtcttctattccgttaagcggcatttcagtgaactcgacaaacttgaagacatttctcgaacttcacttgattcctgctaacgaaacgcaaaatttgctagactgtaacgccgccattactactaaattgggcaaacagttgaattgtaggaaggatcacctaaataaccattttattagcgtatacgaggactggagcaaagaagttagaatactcaaaaagggttgcacttctggttctaaaagctcctgtgtattcctaatagacaaacccatatctttatcttggctagacaatgagaaataccacttgcatttgccaggaatagcagttggggttggaatgataatcggagttaccttagctgtttcattgttattctgcatagtaatcactagaggcggaaaagtcaaacgagccgatgagattgaaacgggcagacctaatgaagtcaccacgcctctaatgtcatcttcctctagaaccaaccattcttcatattcagcaactgcgcatttgtctccactttctcagccaacttttgaaggctcatattcgggaaacgctatacaaaggcccagggacatacgaagagtcacatcagagcaaaggggcgggcgaagtgtcagcacttcttaa

SEQ ID NO: 3104 - DNA, 2082 bp, Saccharomyces pastorianus
atgctcaattcagctttattatggaaggtttggctacgaatagataactcgactgacgaagtaaaccagccaatatctattcaattcgatgaaatagatactattgatgatttaaagagtaggtttttccagaaactaagttcaactcgatggcgagaagtcaacgacaacgcttccattgctataggcctatatacccccaaatttggcagtcaaactgataagacaggtaacggtggcccggataatggtagtggcagcgctagtaacctcaatgcttctatttatagtaacactaaaaattccatggttccattagcaggaacatcaagtctcccaagagacttcacaaaagacaagaacgtactccagcatccaaagcctactcagaagagaggtgcattgtacgatgtctttggcgctgtgccaacagcgccaatgaccattaatccaaatttttcccccaacgaggcaccatcaccaagcccgcaaaggccttattctaccagtccgaaacaacttccaacaacagccaagagtccattgctgcgatttgcctctgtttcaccctaccccaaatttcatccggacaatcaaatcatgacgccaacaagtctgacgtacgtctcaccacacaataaaaacaaatatgccaggcctttagtaaggaaaggtttaaactacacgacagaacctattggcgattctagctataaaatcatctttgaacctgatgaattagctattaacgtatacaaggaattattcggcaccatgggctctcagtctgcgtcacaatctttgctggtgttttcaaatgttaatttacgccaggatataccccctttagacatcttgaacgtggtagattatgttcccacaaatgaagaaatttcacagcaaacaatgcaatctgttgaaggctttggtaaccaaatttttcctggagagcaaccctccaaatcagcagataatgatgaaacagattcaaaaggtaaagacaatagtagtaatcctcaggaattcaaactaatagctgatgaagaacaattaagaagggcctcacaagaattgaaggatgaggaaaaggatactgagtcaccttggcaagctattttgctgttaccgaagggttacaagggagaggtggattttcaaaacaaaccagtgctatacacggattctgacaccatccttcattctgaacgtgcagttaatacagagtctcttttacaagaaagcggtcctctcgatgaatccagcgtaggtcttaatcaaccccttacagaatgccaaagaagaaaggacaacgttacgcccacatcacccttattgacgaatagtcaaacaccacattactcaatttataatgctccctttgcagtttcatcaccaccagatcccttaccaaatctcttcactaccacaagcgaaaaggttttcccaaaaattaatgttttaattgttgaagataacgtcataaaccaagcaattttaggttcctttttgaggaaacataagatttcatataaattggccaaaaatggccaagaagctgttaatatttggaaggaaggcggtttgcatttaattttcatggatttacaattacctgtcctatctggtatagaagctgcaaaacagattagagattttgaaaagcaaaatggcattggcattcaaaaaagcctcaataattcacatccaaatcatgaaaaattgccttgcggcaagttttctcaggctccagtgatcatcgtagcactgaccgcatccaattcccaaatggataagaggaaagctctcgtttctggttgcaacgactacctgacgaaaccggtgaacttacattggctgagcaaaaaaatcacggaatggggttgtatgcaagcactgattgattttgatggctggaaacagggagagagtaggatgacagatagcgtagtggtcaaatctccacagaaaccaaccacacattccaataatgactccaatacattcaaacaaaccacacctattacacctactaaacatagtccggcaagaaaaaactcaaatctttcgccgactcagaaataa

SEQ ID NO: 3105 - DNA, 513 bp, Saccharomyces pastorianus
atgagctcccaaggaaataccgctaactctatcgaagcaccacaactacctattcctggtcaagtcaatggttccgcaaatgtcgatcttggtgggtctggcttgaacaccagcgtccctggtagccttcaaggccagaaagctggcatggatctttattttgaccaggctatggactacatgggagaacaccctgttttaacaggtttcggggcctttttaaccctatacttcacagccggtgcatacaaatcgatatcgaaacggttaaacggtgggaagtctgctacttctttcttaaaaggcgggttcgatccaaaaatgaattctaaagaggctttacagattctaaatctaacagaaaacacattgtctaagaaaaaattgaaagaagtccataggaaaatcatgttagccaaccatccagataagggtggttcgccatttgtggctaccaagataaacgaagccaaagattttttagagaaaaggggtataagtaaagaaaaatga

SEQ ID NO: 3106 - DNA, 579 bp, Saccharomyces pastorianus
atgaaagtcgggattataatggggtccgtcaggactaagagggtgtgccccgaaatcgcagcctacgtgaaacgtacaattgaaaacgatcaaagcttatgcaatcaaaatatagaattacaaataatagatttgaaccaggttgcgctacctttatatgaagacgatgacgacttgattccggctcaagtaaaagacgtggatgggtacgtggacagcaggacccgcttgtggagccgtacagttagctcattggacgtctttatcttcgttacaccccagtacaactggggttatccagccgctttaaaaaatgccatagaccgtgtttaccatgagtggcgtggcaaaagcgccatagtggtaagctacggcggccatggtggtgataagtgcaaccgtcaattacaagaggtactacagggattgaaaatgaacgtcgtaggtggagtctctatgagtatcccagtaggtgttataccgttgccagaggggacggtccccgggtttagtgtatacaatgaagagattttgcagttagtggcttcttgcattaagaatacaaatagtagacagtag

SEQ ID NO: 3107 - DNA, 423 bp, Saccharomyces pastorianus
atgaatatcaaaactttgtgccatcaagagtacaaaagaatttcgatccaatcattgctaaacccgcttgaggaggcagtaaccggtgagagtctccactctcatgttatatccggtaataaagccactcctgggtcctcacatacacatacaaaaaatgggcctgcagctcaacaggatgtacaaaagagaagagggatcaccagaaaatgtccccagtgcgatatagtaaaaacttccccgcaatggagagaaggtcccaatggagaggtcacgttatgcaatgcctgcggtctcttctatagaaaagtatttttggtctttggcaaaagtttagcaaagcgctacttcgatgagataaaaggtgccagcgtaaaacgaaaggttcctaggagcctctatggagttatgagaacacactga

SEQ ID NO: 3108 - DNA, 1617 bp, Saccharomyces pastorianus
atgaagaacaaggcgcttgatgaggtccagcggttgtcaagcggaataatccttttttcgtttatgacggggttatttatgttgtcattgtggcataattatgtgactgttcatttccaacacaagcatgacccaagagataccagaagttcgaggacgaacattgaatcaagcgataagaagaagacacgtccagctcgtcactctcgacccctctcgatatcatctgctacccccatagatttagaacgggatcaagaaaataacattgaatatgaccgtaccgtaaccagcaagctctccatggacagcgatgcctgtgtgtcaggagaaggcaacggggatgataacatcaagatggaaactaatgtaagtcaagccccatatgctgcagagaatccatttcaaaatattgcgcttgccgaggatactaggctggtagctgacctgaagtactactacaagcaatacggtattgatattgaagaatttgaagttgagacagacgacggatttattattgatttgtggcatttcaagcccaaattaggggatgttgtagatgaggcgaaacgtgaacctattttgttattgcatggacttttacaaagttgtggggcttttgcctcttcagggagaaaatccttagcatattttctttatgaatcgggatttgacatttggttaggcaataatagatgtggcttacatgctaagtggaacatgaaaaaattaggcaatgatcattcaaaaaaatgggattgggatatggacgagatggtccagtacgatttaaaggcacttgtatgccacgtgctggatagtacaggatttgctaaactatcgcttgtggcgcattcacaaggtaccacacaaggatttatgggacttgttaatggtgagaaactgtacgcaagtgattttaaattagtggataaattagaaaattttgttgctttggctcctgcagtttatcctggacctttactggacgaaaaatcctttgtacgactaatggcaaatggtattgattccccatggttctttggtagaagatcatttgtacctttgatgatggcaatgagagatttgatggttggcaccaagattttttcgtttctttcatatgtcatgtttaattatttatttgattggaatgatgcattgtgggacagagtcttaagagatcggaattttttattctcgccagttcatatttcagtcaaattgatgcaatggtggctgtcgcctgaccaaaacaaactaagttttaaaaagggttcagagaaaatttttcctgacaagaaaacatggttccccgttgccaagaatgatgacgatagtggtaatagtttaagtagcgacaacctacatctaaatccgaaaagacaaaatagtgatgatttcccacatattataatgttcattccaaagcaagatcgactagtggacggtgaacgattaattaaccattttatcaatcatgaagctaattcggtgtacaaaatctggtatattgatgagtattctcatctggacgttttatgggcgcatgatgttattgacaggattggtaagccaatgatagaaaatatgagattccgcaatgcagagtag

SEQ ID NO: 3109 - DNA, 1629 bp, Saccharomyces pastorianus
atggactcttcaagcagaaacctaacgcagtatttaccgtcacccatggagtccttatcgaggttaaagcgtaagggtgtagacaatttccacaaagtgaagaaatccggtaaatccatctacaactataactattcgaagtttgttcctcatccattttctaccattgatgaaaccatcaagcattcagaaagtgaccacgatgaccatttggagactatagagactctaaaggggaagaaagttgaaagttctatttataaaagaactgttggtaagtcactacgtgcagagtctcaactctctctcggtgatccagatgctcttactctcgtgaattctacatctactttcaaattaaacagtgcgtccacttcgacctccttagtatcttcatcttcgacaatatgttctaaaacaaggacatcatcgcgttccttgacaagcttttccaaccaactgaaaatcagagaagaatgtggccatttttctaatgtgaaggagtactgtggcccaatgaaaaagagtatgagacaaacaaaaattctcatcgaagaacctttgaatccaaccactgatatcaaatcgtatatcagctcttacaaccattccaaagcacacaacctaggtgagaaccaacacttacattattaccaactaccatttccatggagagaaaacagatacatcatccacggctataggttttacaatacccactctaagtccctgttatccatcatcaattggtacggctggcataacgaaacttccaacatctggacccatttgttgggagccatgtacatagtctatttggcagtgtacgatttccctcagtctgaagtgtggcagaatcccaaagttccgcaacaagcaagatggatcgttttcgcgttcttggcagctgcgttgaaatgcatgttgagctctgtgttctggcacacttttaacggtacgtcttttctaggactgcgttccaaatttgcatgtgtcgattatagtggtattacaatcttgatcacagcctcgattttaaccactgaatttgtcactatgtattcatgctactgggcaatgtgtatttacatgagcatttctttagcgctgggtgtattcggtgtgtttatgaactggtcccctcgctttgatagacctgaggcaagaccactaagaattagattttttatcctattggcaaccatgggtgtcttatcttttctacatttgatttttttgacagacttacattatgctatatggttgtttagccccgtcacaaacaaatcggttgtttggtatttggttggtgtggtcttctatggttcattcatccctgaaagatttaggtctgatgtccaagttgatatgactattccaactgactacgaactatctactgatttagaaattataacaaagcagaaagagattcatttcagaaaggcaccaaccacccattccaagtgcaagtcctgtccatctcacgccaaatcattcaagtccctatggtgggtcgactatgtgggttgttcgcacactttctggcatttctttgtggttttgggtgtgatcggtcactacagagctattttagatatgtttaccaagaggtgggcactgtcatga

SEQ ID NO: 3110 - DNA, 375 bp, Saccharomyces pastorianus
atggtcaaattaacttcaatcgctgctggtgtcgccgccatcgctgctggtgtcgccgctgccccagccaccaccactttatctccatccgatgaaagagtcaacttggttgaattgggtgtctacgtttctgatatcagagctcatttggctcaatactacttgttccaagccgctcacccaactgagacatacccagttgaagttgctgaagctgttttcaactatggtgatttcactaccatgttgactggtgtcgccgcagaccaagtcaccagaatgatcactggtgtcccatggtactccaccagattgagaccagccatctctagtgctttgtccaaggacggtatctacaccgctgtcccaaaatag

SEQ ID NO: 3111 - DNA, 4251 bp, Saccharomyces pastorianus
atgtgcgatagtccgttgagcaaaagacagaagagaaagactgccgaggaaccagaattatctcttaatcatggtaatagcgaacaagaatccaaggcagaaaatcagaatgatcgcaccgaaaagacaccagatccagattcactttcgctagaatcatcatatgctaaatcccatactcccagaaaacttgttttgagttctggtgaaaaccgatacgccttttcccaacccacgaactcagcaacttcttcactacatgtaccgaacttgcaaccaccggaaacatcttctaggggccgtgactataaggcttactcccaatcgccacccaggtctccagggaggtccccgactaggaggttagaattgcttcaactatcaccagtgaagaatagtaggattgaattgcaaaaactatatgatagtcaccaaccatcgagtgaacaacaaggcaggctgtttattgacaagctcgttctcgataatttcaaatcttatgctggtaagcaagtagtggggccctttcatacaagcttctcagccgtagtgggccccaacggttctggtaaatcaaatgtcatcgactcgatgctatttgtatttgggtttagagcaaacaagatgagacaggataggctatccgacttgattcataaatctgaagcttttccgaatttacaatcatgttctgtagcagtgcattttgagtacgtcattgatgaaccttcaggaacctctagaacagataaagaaaagcccggattagttattacaagaaaggcatttaaaaacaactcctcgaagtattacataaatggaaaagaaagcagttatacggaagtgacaaagcttttaaaaaatgaaggtatcgacttagatcataaaaggttcttaatcctacaaggtgaggttgaaaacattgctcaaatgaagtcaaaagcggaaaaggagagcgatgatggattactagaatatttagaggacatcattggaacggccaactataaaccgttaatcgaggagcgactgagccaaatcgaaacattaaacgaaatatgcctcgaaaaggaaaacagatttgaaatcgtcaatcgagaaaaaaattcattggaatcaggaaaggaaactgcattggaatttttggaaaaggagaagcaattaacgcttttgaaatcaaaattgtttcaatttaaattattgcaaagtaactctaaattagttaatacgttagagaaagcttcctctttgaataaagattttgaatccgaaaagataaaatttcaggaatccttgaaaaaggttaatgaagttgaaagtcaacgtaaagaaatcaaagatcgaatatcatcttgcgcttctcaagaaaagacgctggctctggaaaagagagaactagaaagcaccagagtttctttagaagaaagaacaaagaatctggttaacaaaatggggaaagcagaaaagattttgaagtcgaccaaccaatcaatatctgaagctgaacatcttctcgaagaacttcatggggagcagaatgaacacgaaacagaggttaaagatttgaaccaatcgctggaagaggaacgtcgaatactcgataatatcaaattatctttaaaggataaaactaaggacatttctgcagaaattattcaacatgaaaaggatttagaaccttgggatctccaacttcaagagaagaaatcgcaaatacaattagcagaatcagaactatctctattagaagaaactcaagtcaagctgaaaaaaaatgttgaatctttggaagagaatatttccgcaaagaaagcacgcaagcaagggctacaagggtttattctcgatctaaaaaagaacctaaagtcactcatagatggaagatcgcaaggtgaaaaagattttaatactgccaacttaaagttaaaagagatgcaaacgattttgaacgcccatcgtcaacgtgccatggaagctcgctcttccctatcaaaagctcagaataaaagtaaagttttaacagctctatcaaggttacaaaagtccggacgtatcagtgggttccatggacgcctgggggatctcggtgttatagacgacagctttgatgtagctatttctacagcctgtccaaggttggatgatgttgttgttgatactgtggaatgtgctcagcactgcatagactatttgagaaagaataaactaggttatgcaaggtttattttattggacagactacgccaatttaatttgcaaccagttgatacaccagaaaatgtaccaaggctgtttgacctagttaaacccaaggattcaaaattttcaaacgcattttatagtgttcttagagatactttagttgctcgggacttgaaacaggctaacaatgttgcatacgggaagaggaggttcagagtggtcaccaaagatggtaagttaattgacatttcaggtacaatgagcggtggtggaaaccatgttgcgaaaggtctgatgagaataggcaagaaccaatcagacggaatggatgattacacggctgaagaagtgaacaagattgagcaagaattgtctgaaagggagaagaatttccgtgtggctaacgatacagttcacgagatggagcaagaactaaaaagagtgagagatcaagaaccggatatagaatcgcaaatatcaagggcggaaatggaagctgattctttggctagcgaattgacactagcggaacaacaggtacaggaagcgaacatggcgtacgataagtcagtcaatgacacagcgcaatcgaataaaatcatgaaaaatttggaacacttgagaggtgaatatgatgaccttcaagcagaaactaaaactaaaaaagaaaggattaaaacgttgcaagaccaaatcatgaaaattggtggtaccaacctgcaaatgcagaattcaaaagtagaatcactttgtcaaaggatagatattctagttgctaaacttaaaaaagttaagtctggaataaggaaatctataggagatatcaccaagtttcagaaacagctcaaaaatgttgaaagagatatagaactatcatccaacgagttaaaggtcatcgaagaaaaatcagaacaaattaaagtggatttagtaaaaaatggtacaaacgtgactgaggtactgaacctaaaaagcgacttagaagagcaaagtgaacaattgaaggaaaaggtgattgtaatggaggaaaacattgatgaattcaaatcattggaaatggaaatgaagaacaagttggaaaagttgaattctttactaacttatatcaaaagcgaaataaaacagcaagagaaagaattgaatgaactctcaattagagacgtgactcatacgctcctaatactagacaataaccaaatggacatcctcgatgaagcagttgaagatggacagaaagccgatcaagaagacgactccagtgaagttcaaggtgaaaatccaagagaagagggcgataatgatcatcactgttctatgaatattgacgaaacctccgatgtggtatcaagaggaataccaaggctttctgaagatgaactaaaagagttgaatatagagcttctcgaaggtgatattggagaactaacctgttatcttgatgccactaatgtagatattggaattttagaagagtacgctaggcgtttggccgagttcaaaagaagaaagcttgacttaaatcaagctgttcaaaaaagagacgaagttagagaacaattagagatactcaaaaaaaaaagatttgatgaatttatgactggcttcaatatcatttcaatgaccttaaaagaaatgtaccaaatgatcactatgggtgggaatgctgaattggaacttgtagatagtttggaccctttttcggagggtgtcacattcagtgtcatgccgcctaaaaagagttggaggaatattacaaatctttcaggtggggaaaaaactttgagttccttggctctggtgtttgctttacataagtacaaacctactcccctttacgtaatggatgaaattgatgctgctttagattttagaaacgtctcgattgtggctaactatatcaaagaaagaacaaaaaatgcacagttcattgtcatatcgttaagaaataacatgttcgaattagcacagcagttggttggtatttataaaagagataataggacaaaaagtgccacggtcaaaaacatagatatcttaaatagaaattag

SEQ ID NO: 3112 - DNA, 1782 bp, Saccharomyces pastorianus
atgatgttatcactgtccgccaaggatcacttcacagtgaataactcgataacccatatcgtcaagtcatatcatataaagactctcactacaaacgcaaagacaatgccgcatatcactacatcctttaccactactgctagcagtacaaaattaaaggctttcaggcaagttaggcctgttctgcagaggcatagctcatcatggatggcctcccaatgccaaaaaaggtcaatatctggccaatcttcactaaaagacctgcgccatttaaaccgcttcccacatcacacgttgaaaaccgccaacgatgaattttatcctgccgaacaattgactttggatgacgtaaatgaaaacgtcttgaaggctaggtacgcggttagaggtgccatccccatgagagctgaagagttaaaaactcagctcgagaaagatcctcaatctttgccattcaataaaattatcaatgccaatatcggtaaccctcaacaactacaacaaaaacctttgacttactacagacaagtcttatctcttttacaatacccagaactactaaatcataacgaacaacagctagttgactctaaactattcaaaatcgatgccattaaacgtgccaaaagcttgataaaagatatcggtggttccgttggtgcttattcttcttctcaaggtgtagaaggtataagaagaagcgttgctgacttcattactaaaagagatgacggcgaaacagcctacccagaagatatatttttaaccgctggtgcatctgcagccgtgacttacttgctatccatcttctgtagaggtccagaaacaggtgtcttgatacctattccacaatacccactatatactgccactttggccttaaacaattctcaggccctgccatactacttggatgaaaattcaggttggtctactaatccagaagaaattgaaactgtcgtcaaagaagctatacaaaacgaaatcaaacctaccgtgctagtggtcatcaatcctggcaatcctacaggtgctgttctatcacctgaatcgatagtccaaatttttgaagttgcggccaagtatggtacggtagtaatcgctgacgaagtttatcaagaaaacatcttccccggcaccgaattcaattcaatgaaaaaaattctaagacatttacaaagagaccacccaggtaaatttgataatgtccagctggcttctttgcactccacttcaaaaggtgtttccggtgaatgtggtcaaagaggtggttacatggaactcactggctttagtcatgaaatgagacaagtcattttgaaattagcctcaatctcattatgccccgtcgtcactggtcaagctttggtagatttgatggttcgtccaccagtggagggggaagaatcgtttgaatcggatcaatcagaacggaattccattcatgaaaagttaaatacaagagcaatgactttatatgagacattcaattctttagaaggtatcgaatgccaaaagccccaaggtgctatgtacttatttcccaagatagacttacctttcaaggcaattcaggaagcccatcatttggaattgacgcctgatgaattttattgtaagaaattgctagaaactactggtatttgtacagttcctggttccggatttggacaagaacccggtacttatcatctaagaacaacattcttggcacctggtgttgaatggatgaagaaatgggaaatttttcataaggaattttttgaccaatatcgtgactaa

SEQ ID NO: 3113 - DNA, 900 bp, Saccharomyces pastorianus
atgatatcacaggccaacagcctgttgctgccgttcatagactcactaccactgcatcagataactaagaccgcgctgacaacaaagcttgcggaaatacacagtgatttcaagttcaaagaaatagccgtgccgctaaccgaatcgctgcaagtgtacgaaagggcccagagagcgcaagacctgagaaccagtttgaaggcattggagagcatcgtctatcaaacgcatttccaatggaacaatccccgtccaagacatgctcgcctttttcagaagcactaccatttcctgctgagccattggccctttgaaaaccacaggtctctggttgattccattcccgcacagagcgggaaactggtatccatggcctcaaagggcaactggctgaagacagactggaccacgctgtttcaagtgagaaatccctgggtccgcacaccaccacgaccagcgtcgccatcaccttcattagcacaacacagcatggcagacctcgacgctttcaccgcagagaggacctttctggtcaattcccttggaaaccactacaagttcttgagagcgaacagtcaactaagctacaaccataagaaatacccctcccctggcgtccaaatccccattagaaatgccctgggcgagatctccccacccaagcaaatctctaaactctttgcaagacaattggctcacatttacaccagtctgtttgtggagaacccgccgttatctgctacgaacgaacttgcgttgatgaccgtctttcatgacgccaccttcgagcgacgccatacaagattctacatgcgtgcttgtgcaagggcatacacgatttcgaacgccgactctactagtgagccgttgacgtttcgttgcacccactggggcgactag

SEQ ID NO: 3114 - DNA, 2394 bp, Saccharomyces pastorianus
atgataagatcgaagaggactagaggcacaagaaacaccgaggtgagtgagcccatgggtgctgcggactcgaatggtgaagaatggcatgattacgtctctgacgatgtactggctcaattgagcaagcaccaactgccgcattcaggattgctgcacgagaaggctgcgagcttggcgcaacaatggcatttccagtacgtggtggcttggctctccaatgtctgtgaatcttacactaccacgtcatacactgtagagcaagacggtggtggttctaccaagtgcttatggaagagtataaagttcgacgaaggcgttttcgtgacggatgtcttttcgaagattgatggaaaggactcaaactattacaacgatgaagtagacgtcgatggtgcttcgcagaatttgtatgatcagattagattgcaattattacaccaattggcaggcaataagagcggacaattgagagattggaatgttattgttaatcatcatttcgaaaattccagcgcattttcagatctggttactacctccccatttctggagctggacattgcgcgtcagtttgaaattctttacggcattataaagttagttgaagtgaagaatatgttcttcaagaactatttagtgaataacttgcatttgttcacattcaacgaaattatactagatgacgacaatgaagagggggggacgcgaagtatgtttgccttgcccaatgttggtgttcttgttgagaaaactatgcacagagtcaaagaagacccctcttctcaagtctctcagactctgaatatcccgataaagctacagaactgtacaataaaagaaatggaccccaagatgccggattccgtggaactgatccatctggagtactctcacgacattgacgcatacctgcaatctatcaccgtcgattataaagtggtcagcactggttgggagtccatgttggaatactggtcacagaacagggactcgaagttaattgacgagtttataacgagtttgataccgacattcgcagagcatagattgtattcagccaagatcttgaccaaccgagaaaaagaaagagccattgctgagttgatgacaagaagaaaaagatcttcgaggctggtggccaaagaagaggagagcaagaaaaaggatttggaaagtgaatggtttgaaaaattggatgaaagagaacagtttatcagacacaggaacaagctggtgtcgaaggaaatcaagaagctcaaggacctactatggggtcagctgtggcaattatacgaccaggattacagagatgcaaaactgaccaagcgtaacgagctcacggacagaagtggctccggcactccatctctcgaaccatttttggggaaggacgaaaacaacccactgaatgaaatcgataacaaagttcttgatcacgggcccaactttcagtcgggtatcatccccctggagcaaccgactcctgaaagccttggcttgctgtccaccgccgatgttcctgagttacccaccgattattgcataaccaaggaggagttgaacgaactggccaactatgggatattcacgtcacagcaagagccggacagccaagattccgttttccaatgccccggcgaaccagagttggcgcccatggtaatcacggaggattcggagacggacttgttcaataatcacccattggtatgttgcgatcagtgttacagatggcagcactgggaatgccaaccaccaaagatcaccgagctgatatccttgaccacgaagcccccacagcacatgctgtcgcaacgcgattttggcgtcatcataatgggcaactcacatggcaacagaaggtcctcgcgccgaccccaatccacgcccgaacccagttccaagtccacgagacccaccgataagcgcaaacctctgggagaatgctccactttcatctgcggttggtgcatgaaagacctggaacttgagctgcgtaacattttcgtgcctgagttgaaaataatcagggctaagcaaagaaaacagcaagaagaccgggaaagaaggaaaaaaatgaaggaggaaaagaaaagactcgaacaactcgccaaacaaagggaactgacccagtccatgtcacctcctacattcagcaccgcgttcccccacatgacaagcggcccactgccaggcatctccgcatacggaacaccgaacctcggcaccattccaggactgaacaccaatgctgctcgccctgtaatcgcataccaacagcaaatgggggacaagactatcccacaaccacaaccactacagcaaccacaacctccgcaacaacagtcccaacaacaaaactttcacttccaatacccacccaccaactaa

SEQ ID NO: 3115 - DNA, 396 bp, Saccharomyces pastorianus
atgaagtacaacggttggagaattggagtacttctcacagtgcttttcctgggcgcatctgaagtggacgccttcttcaatttcggtaaccatcagcaacagcaacagcagcagccgcaatcatatgaagaccaagttttgaatagtccatgcgacgggtacttgtgtcccgatactttggcttgcgtggcacaacagaaggactgtccttgtcccttccctaaatctcagctgaagtgtgctctccccagtaataaatacgtttgcatatcgaaaccagccacacatgatgaaaagctaattgctatatacgatgatcctgtaaaaggtcctaaggcaaagaacaaaggccttagagactgtgggtgggtatccgaggcttacaaaagtggttaa

SEQ ID NO: 3116 - DNA, 1200 bp, Saccharomyces pastorianus
atgggtagcttgttgaggccggttgatttggtaaaccagccacttgggtttcaagaaagatataagattttgcaaaaattatttacacagttacaaaaggcgtatgcacattcaaaaagaaccaatatggatcttgaaaggctggcaactcgtttagaagttcatgtagccaaaaatagtttgtccggtcagagttataaatttaatatgagtattctcttacgggatatactcaagtacaagggagatctctcgaaggtcaaaattaatggacgtcccctcaaaggatccaaaccaagtagcaatacggggccgatctttacaaggtcacaagctatggaggctcttaaagctttgattttagatgtaaaagctttggaaaagaatggttacatcgttgaggaactgcaaaaggaaagtaatgatgaatgtgatactcaattgtatgtaccatgtctgagatgcaatacaaattttaaaaaaatagatataatggaaaacgccttatgtagattccatccgctaaagaaaatatacaacagggagactagatgtcacctttatccgtgctgtggtgagaccaccaactctgtgtcttttttgagactaggatgtaagacgtcccaccaccatgtgtacagaggagaatcatatagcgatttgtgtaaaatttccgagttttctagtagcgcacacatcgatggagttgaaaatgttctctctctcgattgtgagatggctttcacatccctaggttacgaaatgatacgtttgacgattgtggattttttcacaggagaaacactatttgatcatgttattcaaccagtgggtgaaattgttgacctaaattccgacttcagtggtgtccatgagattgatcaaactaaatgtcccacgtatagggaggcgattggtatgtttttatctgaaaatttgataaataaaaacagtatactcatcggccacggattagagaacgatctaaatgttatgagaatatttcacaacaaggtgatagacacggcagttctatattcaaaaacaaaattcaaggtatctttgaaaaatttagcatttgaatttttaagtaggaaaatccaaaatggagagcatgatagttctcaagatgcaatagctacgatggatgtcgtaaaagttaaaataggtgtttctccaagtcaaaagatttgggagtag

SEQ ID NO: 3117 - DNA, 684 bp, Saccharomyces pastorianus
atgaacggacttagaattgccgcaagggtccagccacctcgtcaaacaatcatatttttacatggactaggtgatactggttcagggtggggatttttcgctcaatacttacaacagcgggaccctacctccttccagcacacaaactttgtattccccaatgctccagaggtccatgtgacagcaaacggtggtgcattgatgcctgcttggtttgacattctagagtgggattctagtttttccaaagttgatagcgatggattcatgaattccttaaatgccattgaaaagacggttaaacaggaaattgacaagggcattaaaccggaacagatcatcattggggggttctctcaaggtgctgcattggccctggcatcatctgtcactttaccatggaaagtcgccggtatagtcgcactatcgggttttggttacattccgggaatcttgaaacaacacaagaacgatctcaacgtcaagacacccatttttcacggacatggcgatatggatccagttgtacctatagcacttggcttgagcgcaaaaaaattctaccaagacacctgcggggtacaggattatgagtttaagatttatagtggtatggcacattctacagttcctgaggaactggacgacttaactgccttccttaagaaatgcctatctttatag

SEQ ID NO: 3118 - DNA, 900 bp, Saccharomyces pastorianus
atggaattcatatctgcagattactcaagcagcagcagcagcaacagcagcaacagcagcattgataccgacagcgaaagtgaaagtggtaaccaagctgaaatacaaactggaccaaccgagaaacccagaagacaatcagaaggttgcattgatctacctgcaattccagaatctgttatatcgaagtaccatatcacgccgaacttgcaaaaatacgaacagcaagatatgaacatgactcctttttggcgctcgtttgtatattgtgagtggcgtccgaccccagaggttcgtcgagaactccagcaaatcatattcaagtataccaagacatttacggaaaaaaattccagtgatccataccaactagcggaacttagtcctctgtttctctcgaacttgggggcacccaaaccgttacacatttccctaacgcggtcactgctgttcgaatcagaagaacaacgacacatattcatccgggaaatacgacacggtttgcagaataataaatttgcgccatttaaactcgaggtcagcccacatccaaagctgtatatatcagagagggccaacgccttgtatctgggactccccatctccgagcgctcgagtaggacacgtctttcctcacttaagcccataatagaaaacgcacttcagaaatcaggcatccccaactaccagcaactcatcgtagccccgtgcagcttccacatctcaattgccatagccaggtacccctccagggccacactacaacgctatcaacaactcaacgagatcatgggggcaatcatgcttatcaacaatgacctcacataccaaccaactgtcctgatcaactcgatctactgtgatgaaaaccgtcagtcaacaaaaattccttttcaatag

SEQ ID NO: 3119 - DNA, 2283 bp, Saccharomyces pastorianus
atggagtttcaaagagcgcaacgaaacctaaaatttctacaaaatgaagactccatgaatattaacaatcacaatacaatgaacggtgagagccagagagcctcatcgatagcgatagaaacacagataccagatgttcagttttctttatcatctgatgatgattccgtgaatactcagagaagaaagagtagtgtgcaaaaatcttctgtggcaaaagagatttctataagcaatactgagagtgatacaaatgttaacactatgaatacaagcccgggtgctgtttcccaacctattttagagggtcagaaactcgatatggctgaggagaatatattcataaatactcaaattcaaagtcggcttgatgacgcagaggaggcaacaagtctaaaatcaaaactcaaacagttcaaatatgcattgaaaagcaatagtccgagtgaagtcctcactgattcaactataacagcaaaacgaaggccagccataagaaaaaccaaaccgaaactcaaatcaaaagccaaaagtaagcgagatcctaacattattaaaaatataaccgagtttaacattaataactacgaacgctcaaggactactagtttattgaggcagttatcaggcaagcacaagaaggttctggatataataaaggcacaggagtcaggaagtaagagtgcattgtcaaaagcaaagaatggaaagggtgaatgtggtacgtttgatacttatagcgaacaagagtggaagcatattttgaagttgcttttggagaagtttcctcatagtgagtcaacagacttgaatgaagttcaaaaatttttatatggaagtgaacaatcctcaagttctctaggagatccagaaactccacataaaaggctctggacagcatcacagttaccgcccgaactacccaacgagtctgctcaaccggagcaagaaacaaaaattcacaacagccaaagtgcagtaaactttttgtcgctgtctcaagtgatggacgataagagtgaaatcatgaaagatgaagaggacaaaatcatttcagggggattttccgcaagctctccagaatatggaagtaacctagagggacaagaatcttcagcgcataatactgctgaaaacactaaattaattgtagtggcacaagtaaatgaaattgcactggcggatgacacggcttgtaaacctatgctagttgaggaggattcaagaagcaaagataacggatacgaggaccacgataatatttcaattgtctcggatagtaccgacgaggcgtctacgttatttccattagatccatatcggtatgtttttattgaaaacgaggatagaccaggattggttaccgataccatgggtagcacacaatttttcactccaaacacatcacccttggatggtataattgacctcacacaagaatccttcaaagctgttcgatcattgatatcgcctttaaagatagaaaacaataagactgccgtatcacaggtatcaaatcaagttcaagttccagcaacaagaacccccacgatcattccccaaaaaaatctcactaagatattaaaaacggaagaagaagtgaatagtctagaaaatgtcatcaggattaaattaatgcatgaagaagtgagtcaatttaaccctgtaataaaatctgattgttacgaaatcgcagtgaacgattccgaagaagaggaaacagaatacgatgataaattttgcattgctgatattgagttgataaacttacctaaaggtcttgttcaggcacctccaccaaaccttacgaataatgataatattaataataaaaacggcgttactacgacaagcgttgctgattcacctgaaaaaattcacgaaatcatcacttcacaatcaatgaaggaactacgacaaagcttgaaaacagtcggactaaaacccatgaggacgaaactagaaataatcgagtctttacagactgcatcacaaatactgtcagcaaatacggtacccactccaggacatagcgacgagcagcataattgtgcgataaacttcagcaagcttgagatttttgatcacttaacggaactgatccagtcctttcccgactttctggagaggatatacacatttgaacccattccactaaatgagctgattgaaaaattactaagcgtcgagccgttcatttcacaaatagacgaaatgaccatcagagaatgggcagacattcaagggatctgtctgagaaatgataaaaaaatagtgaaataa

SEQ ID NO: 3120 - DNA, 1449 bp, Saccharomyces pastorianus
atgcaactaatgttagcttctaaaagctccctgctacttaccaagtcccgcctgccctcggcatgctaccctttgttgaagaggtcctatgtgtcaaagaccccatcgcactccaacacggccgctaacctgatggtcgacaccccggctgccggcaccaccaacggcaacagcgtgttggctccccccaactcggtcaactttctgcaaacactccccaagaaggagttgtttcagcttggatgcatcggtgttgccacattgaacagcttcttcctcaacacgatcatcaagtttttcccctacattcctatgcccataataaagctctttgtctcctctctgtactgtggtggtgaaaacttcaaagaggtcatcgagtgtggtgagcgcctacaaaagaggggcatttccaacatgatgctttcgctcaccatcgaaaactcggagggtaccaagagtttgaacagtaccccagtcgaccacatcgttgacgaaactatcaggtccgtccacaacattctactgcccaacatcgtccgccaactggactccggaaccaagtccgttaatgacatcgcccccggttacatcgctttgaaaccttctgctttggtagacaaccctcacgaagtgttgttcaatttcagcaaccctgcattcaagactcaaagagaccaactgatcgataactgttccaagattacaaaggagatcttcgacttgaaccaggctttgctaaagaagtaccctgaaagaaaggcccccttcttggtctctaccatcgatgctgagaaatatgacttacaagaaaacggggtttacgaattacaaagaatccttttccagaaattcaaccctgtttcatccagactagtctcatgcatcggtacgtggcaactgtacctaagggactccggtgatcatctattgcacgaattgaagttggcccaagaatacaactataaacttgggttgaaattggttcgtggtgcttatattcattcagaaaataaccgtaaccaaatcatttttggtgaaaaggacggtaccgacgaaaactacgaccgtattatcactcaagtcgtcaatgacttgattatcaacggcgaggattcttactatggtcacttggtcgtagcctctcacaactatcaatcccaaatgctcgtaaccaatttgctaaaatctacccaagataactcgtatgccaaatcaaacatcgtcttgggtcaactgttaggtatggccgacaacgtcacccatgacctgatcactaaccatggcgccaagaacatcatcaagtatgttccatggggtccacctttggaaaccaaggactaccttctaagaagattacaagaaaatggagatgctgtgagatctgataatggctggccattaatcaaggcaatagcaaagtcgattcccaaaagattaggcctatga

SEQ ID NO: 3121 - DNA, 2334 bp, Saccharomyces pastorianus
atgtggtacgataggaaagccattccgccacctctccctagtagaccttgtggtgctgccaacatagagccccctcctataccacctcgaagaaacgttcagcctccaaccttttcctctgaagacccctttaagtctcgagttgttaaacctgtggcagaattgctgcatttgtacaaatcccccgccaatgttcaatcgctacatggcgatttatttcagtcacctatcctccctagtttaggacctcctctctcaatcttcaagagtgttcaacatgcggttcccaggcccaatacggggaatcaggatagtggcccattagagacaaacaaattctatacaaacattttactcgaggataatacacaaccaatatggacacatccttattccctttggttttcgcgtgacccagaattatttggtttggccattaatcatactttggctccccaaagggtatttgacacaactactaatcctccaagattctttttcaatcctacaaatataaaatcctttgtgttcaaggcaagagagtttagttcggtagaagacatcaagcttgaatttcaagatatgaaacacatgtccatgcggttactattgtccctcaacgattctcagttcatagaatacccgctagttcaagggatgggcttcgttacggctatttatcatgatctagtttttgaattgagaagtgctgttggttttaggcgcctagagcttgttactacaaatgagaggagttataaataccatattcaactcgaagacaaccgagtttggccgctttacttgacctcgccaaagtgctcttttccacaagattttcagttatcactaactaaaaacaatacgataacgtcttcccataaaattgatggtcttgtttgtcaattgtcaggggattccgtccctgatatagatttggcagcaggttgttacccagtgacttgcaatttatcaggtcaaactatcaatgagcagctaacaaattataggtttgattattctgtggaaggcccatcacagtcgggcactacactaatgtatgctttgccacatcacaaagctacattctcttcagaaatgcaaaaaagtgaaatcaactctaaattggattccacggttaaaggtgcgatgactggttacctcacagacagctttgaaatggaggtacaaataccgaatgaattgggatttgagcctgtagccctctatttggatagaaaatccaattatagccatgcaacgctatctaaaatccaagaggctgcaattcaagaggtccggtccggcgatcctcaacaagaatcgaacattgattccatgtatttttctggcaaaatactagcaaaatacgcatggatcctctatgtgacacattatattcttcacgatgaaactttaactagagagttactaagtaaactgattatcgcagtagagagatttattacgaatgagcaagttttacccttaacttatgattctacatggaagggtataatttcctcaggtacttctagccaagatttcggtaattccaactataatgatcatcatttccattactcctatcacgttataactgcggccattatttctttagtcgataatgacttaaatggagatactaacaaccattcttggttaagtaccaatagagattgggtcgagtgtttagttagagattattctggtgccgacagcaatgatccatactttcctcaattcagatcatttgattggttcaatggtcattcatgggctaaaggtttatttccaagtggtgatggtaaggatgaagaatccacttctgaagatgtgaactcttgttatgcaataaaattatgggggttagcgactaaaaactccaaattgattgatatagctaacctacaacttggtatcatgaaacatgtttttcagagttacttcctgtacgaaaatagtaataccattgagcctaaaggatttatcagaaataaggttagcggtattctatttgaaaataaagttgaccatgccacatattttggtatggagccacaatatattcatatgattcatgctattcctataacatctgcatcttcatgggtcagatcgccaacttttgtcaaagaagaatgggaacaaaacatgcaaccgataattaatcaagtcaatgatggttggaaaggtataattatgttgaatatggctcttcttgatcctaagttctcgtatgactttttcagtcagccaaattttaatagaaatttcttagacaatggacagagtttaacttggtcgttggcttatgcaggtgccttcatttag

SEQ ID NO: 3122 - DNA, 300 bp, Saccharomyces pastorianus
atgagtggagtaccggtaaaactactaaatgaagcacagggacatgtcgtctccctcgagctgacaacgggggccacttaccgtggtaagctagttgaaagtgaagatagtatgaacgtccagctgagagacgtaacagctactgaaccacagggagctgtaacgcacatggatcaggtattcgtacgcgggtctcagatcaaattcatagttgttccagaccttttaaagaatgcgccgttattcaaaaagaattcatcaaggcctatgcccccaattagaggacctaaaaggaggtga

SEQ ID NO: 3123 - DNA, 762 bp, Saccharomyces pastorianus
atgtctttgaaaaagcagataccaatagccttcgagaatgcacactatttcatagttaataaaccacctggtatcctatctcaaccaccggactcgagaacttggaggagaacacaccctgaccttgactccacccccctgttagtaagattcaaaacactctattcttcagacaaggacgtcgaagcatgtcgaacagtgcataggttggaccattgtgttactggcggcacgctgatcgccaagactaaaaatgccagcatgatgttttctcgatttttacagaaaggcggtaataaaggttataaactgcgaagaaaatacgttgctattgttgagcactcgagtcactcgaaagaaccggtcagcaatgaagtcgggtatgggttaaaatataattctttaatttcgcatgaaggtaaacaaattacgaagtttaagaaagtcgatgatcggtgtattgttctgcaattggtaacaggtaaaaagcaccagatccggtaccatgtttcgcaaatcctaaatcaacccatcgtaaatgaccagaaatacggtagccctatcaagttaccaagagcattccacaaccagattgcgttgcattcagcatgtataacgacaaaaatcggcctgcaaacagaggtgcacttgattccgatggagttcaacaataatggtgagctttggccgaggaaatacgtcgatgaagagggagaattcaactcatcgatcaaaaaggtactcctagaaaactgggattga

SEQ ID NO: 3124 - DNA, 1167 bp, Saccharomyces pastorianus
atgtctacaatgtcttctacagcagcaccacgacctaaaccttgggaaacaagcgcacccttagatgaaccacgacctaaccctccatcattagaagcgatgatgacttcgccccagcaggactttagtcaaaacgataataacaacaacaacagttcaaacgaatcacctcctgaagccttaccgcggcctatggcgctaaattcttccagcacgtttggagaaccgaacacgatgccaggcatgtacggcaatagcaattacagcatgccctacgataacaacccgtatggcatgaattccgtttatggaaacagcataggtagatacggatacgggggctcttactatggtaacaactatggatccctttatggcggaggatacggtgcgggaaccggatatggaatgaataatggcaatggactaggggagtcaacaaaggccacatttcaattaatagaaagcctgataggagcggttacaggatttgcccaaatgctagaatccacatatatggctacacacaactctttcttcaccatgatatcagtagcagagcagtttggtaacttgaaggaaatgttaggttcattttttgggattttcgctataatgaagtttcttaagaaggctctctatcatgctagtaaaggtagaataggaacaccacctaaagaagccacaagccttggggaagacaaaaataaactaatcgaagatttccaaaggtttaatgaatcaggctcagcaagtcctcatggcaaagctgcaagaagaaaaatatcatggaaaccgttaatattttttttaatggccgtatttggtttcccatacttgctaaacaaatttattgctaaagtacaaaactctggagccatacaggcgtcacaaggaaatggtggtgagcctattgatccttctaagttagaatttgccagagcattatatgattttattccagagaatccgcaaatagaagttgctttgaaaaagggtgacttgatggctattctaagtaagaaggatcccttcggtaaggattccgactggtggaaagtaaggataaaaaacggtagtattggttacattccctataactacatcgaaatcataaaaaggcggaaaaaaattgagcatgttgatgacgaattgtctacatattag

SEQ ID NO: 3125 - DNA, 672 bp, Saccharomyces pastorianus
atgtcggcaggtgatatatcagctataaaaaccaaatctaccaaaaagaacagaaggagaaagaagagaagaacagctgatgtttcatcatcatcagattcatcatcagactcatcgtcattttctgaaaatgaagtagaagaagttactaaagaaactgctaaggaggccatcactgaagatagtaatacccaccagggtctttctaacagtataaatgaggacgaagataaagacgttgaaatggaagtttctgatgtcgagctatcagatgaagaaaaaggcgaagatttaaacctaaactccgaagaaataatagatgattccactaaaatctctttaagcaaactttcagaaccctcaagatctcaaaataaagacagtttcttgaatgcatcgaaaattgctgaaaacatcaaatttgcaagaagcgaatataacggattggcggaaaatttcacaccaagagggaaagaaaagagtaaactaagagaagaatatctaaacctactttttacaaactacggtgatgatatcaatcgtcttagatcggcacctgattttacgaataaatcgctatccatcttggcggatgttctggaggaaggcataggaatgtttgacattggagaactagaatcgatcctgaaaaataaagaaatggagaagtag

SEQ ID NO: 3126 - DNA, 2451 bp, Saccharomyces pastorianus
atgacatctacagacgatgagcatgctgggcaggaaagggacgctgagttgattgagattggaggtaagagagtaagcaagacttcgacgggcaaacgcaagttccacaacaagtccaagactggttgcgacaattgtaaaaggagaagagtgaaatgtgatgaaggcaagccgttttgtaagaaatgtacaaacatgaaattggaatgtgtgtatagtcccatacaaccaagaagaagaaaagattcttcgacatcaaaatttggtaccatcatcgaagatggaatggacaggaagcatttaaatggtaatacaatcctattacaccaacagcaacagaagctttaccatcaacaagagcaagagcaacttcgtcagcaacagcacgtccaactacagcagcagttattaccgcatgtaggcactgacgagcaggctaatgcgccaactaacatcgctccgtcggtatccaacaatatggaaactcttttattaccgcatctgttggcaaatctagtaaacaacagcaatagtaatactaacagtaatacaaacggtggtagcgaactacacaacaatttaacccaagccgtgtcgaatacaatgaacaacaataaccatgcaaacatgaccataccgggaaattcgcctttgaatgttccaataacgccaagttttcaatcaacagctatgaatttgtcgagcagccttaacggcttattatcaccagggaggctaaattctataacaagtggaatgcagcagtcgcagcttccacaacaacaatcgcaactaccacaacagccaggaacacaatccccattcaataatcttccctttgaccagttggcacaattaaataaaatgggattgaatttcaatatgaagagtttcaatactttatttccatccggcgctgctaacggaattgcttccgagtttcaagagttatttgggttaagcaagtttgccacatctaacaatagagccatcaaagtcagcacggcagaagaagcgttggcaaatatgcaacaagaacaagagagtaaaaacaaacaattcacaaagaatccgctggacaataccaacacaaatatcgtccactcagacaacaacccacttcgagaaaacgataataaagtaaacggttctgatacgctctccaatagcaaaaacttgatgattgacaatacaagtctttcaatgagtcccacacacacgttgacaaaagctacaatagatcaaacaattgcatccccttcgacaagaatatctaatggaacttctacgaaatcacttttgtctataacggacaatagagcttctctgaggaattctcccaccctaaaaacatcaccaatgggtgatctattgtcacactcggaaactgtatctccacgctcttcacactctcacgtacaccagcattcctcccctcattcaaacacatcatcgacttcacatctaattcctgaattagttggcttatccagaaaatcaaacctaaacttgatagatttgaaactttttcatcactactgtaccgaagtatggcacaccataactgaagctggcatttccggcccggaagtgtggagtacatatattcctgatttggctttccatttccccttcttaatgcatacgattctggcctttagtgccactcatttatcaagaactgaagctggcttggacaattatgtatctaatcaccgtttagaagcattaagattattaagggaggctgtcttggaaatttctgaagataataccgacgctttagtggcaagtgcattaatattgattttggattcattggcaaatgcctcgagtagttcacccactgcatggattttccacgtcaaaggtgctgtgactatcctaacggcagtatggcccctatcagaaacttcaaagttttataatttaatttctgtggacttgagtgatttgggagaagccgtagtcaatcaaagtaacaataccaacgataatgacagtagtaatagtggtgttaacaacagcaataacaatgcaatatcggaactggtgtgcttcgacgaaggtatagcagatctatatcctgtagaaattgattctccgtatttgataacattagcatatctagacaaattgcatcgtgaaaaaaatcaattggatttcatgttaagagtcttttcattccctgctcttttagataggacgtttctagcattattaatgacaggagatctaggcgccatgagaataatgaaatcatattataagctgctaagaggttataccacagaaataaaagataaggtatggttcttggacagcgtatcacaagtattaccacaagatgttgatgagtacagtggaggtggtggtatgcatatgatgttggatttcttagggggcggattaccttccatgaccaccacaaacttttcagcttttatgtaa

SEQ ID NO: 3127 - DNA, 987 bp, Saccharomyces pastorianus
atgtcgagatacattcagcgatcggcgtacagaacttttaatgcctataagtggcgatgctttagcacgcaatcctttgcctttaaggaaatgacacatcctataaaaccatctgcacaaatcctcagacatctacaattcacacaaagaataccctttcaagaaggtctggaaatacaggagaagctcgtcagagcaaacttagatatcaaggacatccaatccaagatcgagaggaaacttattcaattggatgaagagcacaaaggcacagcaacgataaacgacagcgaaaaaaagatactggacaatattatggcaatgaaacccaacccaataatattaacatttgagtttgaaccaacgtatactggtgggaaaagaatcaagaaaactatgacaccagatcaaatagcttgctatgaaagttttattccagaaacgcaaaagaataatccgaaaccaagattcgttcaggttgaaagaggtggacaggtaacattccatgggccaggccaaattgttatttacattattttggatttaaagacattccacaatttccctgcgaaatgcttggtttcatgtatcgaacaggcgactatcaaaacattaatggatacaaaaatgagcaatgattctggtaaatccttgaacttagatgctgtaacgactaaggaaactggggtttgggttgaaaatggcaaaaagaagattgccagcattggagtacacgtcagacgttctataacatcgcatggagtagcaataaacgtcaatactgatctatcgtacatgaacaatttcgaaatgtgtggtttgaagagcacctcaacgacttcagtcaaggagcaacaacccgatgcccatgtcgatgtacaaagtatagcaattagtttcgttaaagaaatgacaaaactgctggggataaagaccttggaaagaatgcagattgatgacatcaacacactaaaaaacaaccagtga

SEQ ID NO: 3128 - DNA, 429 bp, Saccharomyces pastorianus
atgaaaatcggcgacgtagaggacagactacttgaagagctaaaagaagcagcactcaaggcgcgtgaactctcttacagcccctactcccacttccgtgtcggttgctccatattgacgaacaacgatgtcattttcactggtgccaatgtcgagaatgcaagctacagcaattgcatatgcgcagaacgggttgccatggtacaagttctgatgtcaggataccgcacaggctggaaatgcatggtgatatgcggtgactctgaagacaagtgtgtgtcgccctgcggtgtgtgtagacagtttattaacgagtttgtaaccaaagatttccccattatcatgctcaactccaccggcgcctgttgtgtaaccaagactattggagaattgctgcccatggcctttggtccctcccatttggcctag

SEQ ID NO: 3129 - DNA, 1071 bp, Saccharomyces pastorianus
atgccgttagtctctagaaggtctactcagtcggaaagcacttcaatcacgaaggaggaccatgcaggcggagcttcccggacagtattgttctttcgatggctagttaccttagagggcgatcaagatataaatgaagggaaaggctacatatcaattccgaacatttcgaactatatcttcttctttggtggtaggttaagaacagtaaagggttgtaagcctttgtggctgtgggttctctcccttattgtatgtcctatggttctattctccatctttgagacacataaattgtggtacaccaaaaacgggtataaagtgctggtcattttcttttattatttttggatagtcacttttatatcctttataagaactgctactagtgaccctggcgtgctcccgagaaacattcatttgggacagttgcaaaacaactaccagattccgcaagagtattacaacctgataacactacctacacactcgtcggttcatggtgatataacaatcaagtattgcccatcgtgccggatatggagacctccgaggtcttctcattgctcgacatgtaacatttgcgttatggttcacgatcaccattgtatttgggtcaataattgtataggcaaaaggaactaccgtttctttttgatatttctgtcaagtgccgtgttttcgttaatcttcttgttggttaattgcgccattcatattgcacgagaatctggtgggcctcggaattatcctgtggcgatactattaatttgttatgtagggctaaccgtgtggtatccagcaatactgttcacctatcatgtatttatggcaggtactcagcaaaccacaagggaatttttgaaaagtattggatcaaagaaaaatcctgtatttcatcgtgtgattaaagaaaagaatatttttgataacggctcctttttaaagaatctaggccacttaatgttagagccgagaggcccaagttttgttagtgcgagagaacggcatgaagctggggattggagatttatgaatttatcaccagtgcacagttttgaaaaaatttag

SEQ ID NO: 3130 - DNA, 4656 bp, Saccharomyces pastorianus
atgagtgatggaggccttctttcagcagcaaagtacaacgtagttgtcgaaagctgcgatgttttcttagataaagaccagtttagttcagcggtaccactattgccggcgctaagtcagaaacaagagaatgctattcaaaagttgattaaaaccgggaaagagctgattgacgtggcctcggtaaatattgaaatttcagagagtctgagctttgctgaagataagaaatacgcatctggaattaaggtcgatgtagaaatgttaccacgtgaagacgataaaaaagtttcacttatcgtatcatcagattctgtatcattgcttcaagtcggctttgcaacgcagaacagttcaagggaagtggttgacgaccggcttcccctgatcctggatatttgtgctcataagaatcaagaaaaaaacttgaaagaacagttagcaaatcggaaatccttagagacaaggccgccaagaaagaaaaggaagaagcattctgatgccagcgacgatgaaaaattattgaaaacccgaatacatgaattgtctttgtcttataaagactttgagtgttctccaattattttgaagtacgaagaagcatcttccaaatgggtgctgtcctttactttaaaattgaaattcatgaaaaataaatttaatcggttttctcaagagactaaccaaatattggatttaacgtactccgatagagacgagaaagaatttgaaaaatatcacgcacatactcacattcatacgaaattcattcaaaagcaatttacttctcagattttggaatatagtaaaggtaagttgtcaacgatcaagccatttttagcccaatctatacctaacctaaaagtcaatcttttacctttccagcgagaaagcattgagtggatgttactaaaggaaggttacggcacctccatgagtggcatgcctgtagccgccagtgaaatcgggctcaaaaattttatgaatgaatattatgcatacggctatgaattagttgtacgcggcaatggtgaggtgggaccatctctattatggaataaattaacaggctatatactcactgttgatgacgctgcacatttgtatgaccaatatagacagatgcaaatgaacgacgacaacccaattcacgccaagggtgtgttagcagaggagatgggcctgggtaaaaccattgagattttttcactaatacttctcaacaggagaacgctaaaagatccggaggcaacgttcgttgacgacgagaacagaacaatcataaaaaccaaaacaactttgatcatatgtcccaatgctatcttaaaacaatggctcgaagaaatggaattacatacaaacggtttaaaatggtataattataaaggatacaatgaagtaatgcgccattgtaaaagtgtggatgacgcagttcaaaaattatcccaatacgatgtcatagttacctcatataatgtcatcgcggctgaggtccatcatgccgaatttaaccgcagtatcagatcaagaagattgaaaagtcctaaatacgactattcctcgccactagctttgatgcaattttatcgaattattttggatgaggttcagatgttacgtagttcatcaacatactctgcaaaatgcacaggtttacttcatagaatacacacgtggggagtttctgggactccgatacaaaacatagaaaactatagaatgatcatgtcttacttaaagcttcatccattttgcgatgatctggatctcactcatactcttcaagacgaaataaaactgcgaaatgaggccaatgattatacagataataagttggtatgtcgatttaagggtgtgagattttcaataaaggaatgtatgaatatgttttacaaatatgacctctgcataaggcattccaagtcagacgttgcgtcccaaatcaatattcctcaacagcataattatattattcccctagaatttgcacctatcgagtgggacaactacttgaatctttggaacagttttttagagttgagcggttataactcagatggtagtgggtcaccacgagtaagcaatgcctttttgaacgaatggttgtctagattacgatacatttgctgtcatgcactattcccagagattttaaatacccgacagaagcgcctccatggacactcggcaaaaatctctaatatcaatgacatattaatttccatgcgaatggacgcatttgacagtttaattggctattatagagaaaggttccatttatcaatcaagcaagcacaatacgaactagaaatatctaacgagccctcaaaagcacttcaatcattgaccaggatccgagacgatctaaagaatcacctgaatcagaaatttgaaataaaagatccattcgacatttctttagatttcagtgatgacgaatacgggcaggaaaatttagatcaaaatgaaggacggaccacaggtgacgaaagcggtaaacaatttagctctgcgaagggtcatgaaagtagcagtgacgaggaagtaatatcagaccagctaaagaagagaggactacgtgctatgatgaatctactgcatgactgctatttctttctcggctcaatctattataatttgggctcacgtaaactagaagaggttgatgataagaatcaaaaagaaaaggtgaaatattcggatgttttcccaaagttagaactagaagaaattgaacaaaataggcttttggaacaagaaaattacgccaatgcagaaattttgagaaaatcgattctttcttcggaggctcgaaaagttgatttaaccattgaatcggccagaaccaagttcgacctcgcaaacaatgtacctttacggctcataaatattgactttgatcatagaaatgattactcgtctaacttagcggtctctagatgtttcaagttgctaagcaagttaatacaagcattgaatgagcagtcgaagaattttaatgagctgctagaggaattgctcactgccatctacgaaccagtttaccaaactgaagatgaccatataagtgataaggttattggtggagaagaatactcaacatcaatcgatagtcaagataaaatattcagtctccttggttgtttggagataattttacagaatagggataacaccttgacttcagattctgaaatcaaaattcctaagaatttggtgccagaaggtacaataatttcagaataccaaaggcagctgttaaaaaacttgaaattggtttcaggaacacctttacaaactatttttgacgaattaaaaaacaacagaatagtaaggcgcatatccacgagtaatgaaaacgaaccctccattcaaaatttcgaagattacttgctacaatacgaaacagaaagtaagaagctgctcaaatataataaacagattagggaatccttgaaaactttaggctcaatatacaatgctaagacagagtattacggtcagctacaaagaatttctgactctttggtatctttacattcattgagtttgccacaactaagtcatttattaaaaactattaaaaaatcattgggtggtgtcctagatgcaaaaatcaataacaccgaatcaaggttaatatatttaaagaatttgtctaggttaaaggatacgataaacgagaatcaagttttgagttgttcgatttgtttgggtgaagttgagataggcgctattatcaaatgtggacattatttttgtaagagttgtattctcacttggttacgagcccacagcaaatgcccaatctgtaagagtttctgtagaacatcggaggtttacaattttaagttcaaaaacacaaaggaaaaaataggaaaggaaactcaggagtcacaaatggacgggagtgaattaaatcaaggtgcttctagtgttaattccacaatatctaatgtaagcgaagtggagaagctgtttgggaataagtatgaacaattccatcaaatcaacgaagtgcatcaaattcgcataaaggaaagttttggtgctaagattgattttatcgttaaactaatttcttatttgagactaaaaagcgagcaagaaagtgctgaaccgccacaagtcattttgtactcacaaaagacagaatacttgagagttattggtaaggttctaaaactttatcacgttgagtatttggcatgtctatccaatactgccagtgtcggtgaaactattaacgatttcaaacgtcagccttctattacttgcttacttttaaatgtaaagaccttaggtgcaggtttgaatttgacaaacgcaaagcatattttcctactagatcctattctcaataatagtgatgagttacaagcaatgggaaggaataatcgtataggccaagataaggaaacatttgtatggaattttatgataaaaaatacagttgaagaaaacattcttcggtataaatgtatactagaagagcgcaaaagaaaggagaagtcgagtaagaatgacggcgacgatgacagaggagctgatggtgatgaagaagataatgatgacgtaaaatttgagataagcgtaggcgaccaagaggtcagtagtgaacacttatggaattgcttcttccacagtagtcattag

SEQ ID NO: 3131 - DNA, 966 bp, Saccharomyces pastorianus
atggttgacgctaaaggtagtacaccatgtttgatcggagactctataaggaacatcaatgatcaaaacagtttagattttcaatataacaaccagttcaaagaggaagacgaatccttgaggttgctatcgccacaaacgagttccaatcatgccctgagcaaaatgcagaaggaccatgatatccgagatagatcttacacatctgtagcggaattgaaccgtgaaggtgctttattaaccgacgaagttgatctggataatgtcgatgcttcgaagattcgcagtagtagggacgatttagaagctgaggagaagagaaaaaaactgctgttattgaagagaaagcaaagaaataagtccatcgtctcagacagtttctcctccccttcattgcgtgcttccaagtcaacttcactaatcacatcgactgatccagttgaagaccacatcagtaaatattcattatcaggcacaccggttaatattacaagtaacgctggcgaagaggacgaggacataattagaaactcgtacggacaaatgatcaaaaacaactctaatagaccacatttagccaagggtgaatcgtatcaatccgcacaacatgaaacagaccatttagcgccggagaatcctgagaaaagacaagaaagaagcggtagatcttatgatagacaaacatcatcgactgaatttttaagatccttatccaggtcaataagtcgtgatcctatcaagaataaaaccgtttcacccgctaatgaagaagactctaggatgtacagcaccagcaactactctatatcgttagttgacttggaaaacaagcccaaaaccatcacggaaactctggaagaagagcaagaggatgccgaaagggaaggtgttttgttggaagacgagggcaacgaagagtaccccagggatttggaagaggcagctaacaaagttgaacaatcgtaa

SEQ ID NO: 3132 - DNA, 2526 bp, Saccharomyces pastorianus
atggagggtttaaagagaaagatatttggcgtctgcctgaaaaatgactacgcagaggccagaaacgagaccaaaggaatacactatagtctgataaatatggacgcttctgaagaattggaagagctactcagtttgcttttaaggaagggagaaataattcgaaattttgagttgttatttcacatcatcaactttgccgtcaagattacggattcaaatcttccaaatgataatatttggcgttccattttgaaattgagatattcttctgaaatcgaagtagaagaggattctaaagtactaaagtatttgatcaagacaggcatctcaatagagagtcctattagttggaaatgcttagctgtcgttagctgcatcctcgactgtgttcctcgctccaaaagggttataagcaagttgattgaaatggaatatgccaactcaatcggccagctatttgacaacatacaagatctgcaacaaggtaattttctggtagagatactttctaactgttttgtcaagagtgctccaaatggtaaaaacgtcgaaagaatacctcaattatggcctacgaggtctaagaacaaattattttttgagaacaaattttatccttttagaagtagaaatggaaattctcagacctgcctattcctttgtaataattttatgtcaagtttgtcttccacgggaattctcaagcaagtctcctacagtggatccgaagcattgaaaaaccttcgcgtattcaaaaaaagagaagaatgtggtaacagtttttatttcattcaatgcatttacaacaaactttatctttggttagatgaaaaagttcttcttgaattcgaaaggaaaagtattaaaataattaagaacttaaaaaataagattcagattaaattaaaacatcccttccatgaatgtacaaacaccaccgccgatgatatagcaattctatttaacaaggtgagaggctttcaactagagtttgaagacaataaatcaggcgaagcatttttccacaaggttaataatgtacccaaaataagtgaagtgcaaaaatttttggttttggattatattgaagaagagccagaggatgaagatgaagaagaagagaatcttggaagagctggtttacagagagaaggcgaagaggaagaatctctagacgaactatcgacttccatgtcatttccaataaagtcatccgttcctcataaccgaaacgaaaaggttcagctggccactcccgaccggtctatatctataagatcagatgaatgggatttaaagtcaaatacagaagacgaaggaaacgatgttgccattcctaatctcaaaatcaatacaagtaaagaaggaaaaaaggaagatgattttgttcaaattgattcagaggaacagtcaccaatagtatccgctcagataaggaaaatgagaagagaatccacaaagacattagagatcttgaggcaagattttgaggatagggaagtagaaaaccgcgatgattcaccagagcaactccactcgccatttgtgaacccctcctctttaattgtcggtaaatcaagcattgttgaacatagagagaagctcgattttgcacacaaagtaactgaaacaacgaagctaaaatcaaatggctccatcaagaaaagggatattaatgttttagatactatatttggactgcctccacctaagaggccaaagcaatctaacaaaaaggataacaaacaacagaaaacattaacaaatttcaagcccattattgatgttccttcccaagacaaacgaattcttagatcaaatgcgccaagtaagcctaaatctataaagaaaagcaagcttcgtgtttctaaaaaggcagtagacaaaaaatcgactgagcctgacaccgaaactggcaaacttgataagctgcctgcgagcacagaagacggtaagacggtaattgaaatagccaaaaagaaagatagcgccattaacgaggagcatgataaccctcaagaaaagggttcaccaggtataaatgaaagtaaagaaattactcaaaacgacagcaaaataactcctgaaccaagaatcaatgacacatttctcaaatcaagtgtaatagaaaatcgcaccccagaaagtaaagaatgtaacatcacaaacattttggaatctaccactgttgtcgacttattctcgcctcatgaatcatctgcttctggccagaattcgtttacaaataagctgcaagagcaaatttataagtcaattaatcacttttcgaacgaattagtaagaaaaatctccataataaatcaagagttgaatatcagaatcttgaaagagttgtctgaaaaataccaaaaattattctctgaattacaagatagtttccagaacgacaccaatgaaatgctcaaattcgtgggagaaatcaaaggcatgattaatctccccgaagaactgctaatacatgctattaggacaaggaaattcaatgataatggcaataaatag

SEQ ID NO: 3133 - DNA, 1062 bp, Saccharomyces pastorianus
atgatgagttctgagttcataaggcaacaactaaaccattcgaaatggttcgtgggaaatgtcaatgatgaggaaaatagtctagtaacgtttttacctattatatcttctgctacaattttgatggtcgtctttattcccctaaatgattttgtacctactgtattcgaactgacccaaactcaattggagaagcaatgccaaaaccaaggtttcacgggtaatgcatctttaaatcaaattaaacaaaaactaatgaacattgtacggtcacctaaaagtattaatcaattcgaaatagtagactcgcaattgagtttccatttcagtttatctgccatgattacggtttctataaagagtttaccatatcacgttaccagggatatctgctttgcaatcttgcagaatttaagcttggttttattacaactggcaagtgtttccacccaatatcaaaatatccagggagatattcttggtgaaaagcaaaaatgcatagattttcttttaaggtccgttaatgatttagatggaggaactaaaataattagccaatgggcacctgaaacctctaaaaaccacaagtttcttcagccagttacagatgatgatatagtggaaaaactactcactaaagggaacgtgcactctcaaaccccagcaaccaattcattgaaaagactgttaacttttcaagatatttgtgatataaatcaaagtacagaaccaaacgaatctactaaagcaccctttaaattctctccagtaaatgagctcgatgattatgacgatgatttcgaaccgcagtcaagagaggtagaccctttaaatagacatcgaccaaatagccactccactttaaaatctgaaggaaactacaaggagaatgccacaaaaaggagtgccactttgttgccttttacagaagatttttctaggcttgagtctacatctccagaaagaacaaggtcggagtcagctacgccttcagtttcctcttcagctgacacttaccctcgaaaaaaaagaaagtttggaaagatcaaaattaaaaactga

SEQ ID NO: 3134 - DNA, 1068 bp, Saccharomyces pastorianus
atggcgaccgaaagcaatgacatcgccgataacacaaggttattagaactactagattcgatagaagatcagtttctagtgacatataaaaaatcagaagatttgcataaaatttcctccactactaagttacaagattctactccaatcaaagaacttggtaaattagcttctgtattaaaagcacattgcacaaagatcgggattgtgtgtaagccaggtactttcgataacaatcacaaagtcgtcttcaccgaaattcaaagctttagcaggtcgttattttacttattgagtctatttcctttgttttacaacagtgaagattatccgaaatatttttcagaccagcttgatgagagcacattgcaattacttgatggtttgagaaacttcattacggagttacaaaaaagactaaaaaatgaagatgacgcttcgctagataaagaaagattaacgtctgttggtaaaattttcaatgcgtgcgatttcctttccaactgttccaaaatcgggccctgcggggtcttggcagatatccttaaaggcaacgtggatataatggatgatacactggatgaaataaaggaatggctagaggagccggatttttcagcgacctcgaacgatatgtttttagatttcgaagattctgaatctgaaacggaggtgaaagacgaggactttgaccaagaaaaggcgtatgaatgcataaagttatttttcgatgggttcacgaagaagataaagatgattaaattattggtgtcaatattcaggaaaactctagtatcaaaggacttcaagcccaagaaaaatcaagcaataactttagacaatttgcactcatcaataaaaaaagcacagctgcttctggatgaagtagtatctaccgtgcaatttgagccaaagaaatttagcgctcaagaggtgaaggaagaacaagctgagttaggaggtgtgattaaaaaaactcttgtccaaatgaacaggctctatgaaggtgatgccaaaaggaagaagtggattcaggtatgggagacaaaatttaacgaactaccatag

SEQ ID NO: 3135 - DNA, 834 bp, Saccharomyces pastorianus
atggcaccaaagtttgtagtttttgggggaaatgggttcttagggaagagaatttgtcaaaatgcggtgattgcaggctatcaagttgtttctgtgtctaggtccggcaaagctccccacagtactgaattaaatgagaaacaatggattcaggaagttcaatggactgcggctgatatttttaaaccagactcttaccattcgttactgaaagatgccgcaaacgtggttcatagtttggggattcttttggaaaacgagagctataagaaaactctttcgaaaagccccacaaataattcaaaatcgagtcttttctctcttggtgcaggaccaaatcctttacgaaaaagcagtccctactttacttatgaaatgatgaataagcaaagtgccattattttggcagatacttttaagcaggcaattataaaaagaggcaagaaggagcaggcgaaagtagacgaaagatcgtttacatatatttctgcagataaggggttcccgatcatacccagtggttatatcaattcaaagagggaggctgaaattgaaatagaaagactgcacgagtattttagacctatcattatgaggcctggtttcatgtttgatgagcatagaaacgcaattggaccgagatctttcattcacagcgctcttgagctcctttactgtggtaacagatttttgttacagaacaaactaaaatttatgaatgacctaataaggccaacggtatctactcaacaggtaagccattccatcttgacaaaagttgaagatctaaacttcacaggaatagtaacacttgaggaaatactcaaaacatga

SEQ ID NO: 3136 - DNA, 1146 bp, Saccharomyces pastorianus
atgtcctctcaagcattctcttcagcacatccaaatgcggcaacatctgatttgaatatcactattgacacctttgttgctaagttgaaaagaagacaagtacaaggttcatatgccattgccttagaaactttacagctgttgatgagatttatctcagcagctcgttggaaccatgtcaacgagcttattgaacaaatcagagatttgggcaataggttagagaaggctcatcccactgcttttagttgtggtaatgtcatcagaagaatactggctgttttaagagatgaagtggaggaagacaccatgaatacaacggtcacctctacatccgttgccgagcctttaatttcctccatgtttaatctactacagaaacccgagcaaccccatcaaaataggaaaaatagttccagtagttctaccatgaaaaccaaaactgactaccgtcaagtggccatccagggtatcaaagatcttatagatgaaatcaaaaacattgacgaaggtatccaacaaatcgctatcgacctgattcacgaccatgaaattttattaaccccaacgcctgattcaaaaaccgtgctaaagtttttaatcactgctcgcgaacgtagcaatagaacgtttacagtgctagtcacggaaggctttcctaacaatacaaaaaatgcgcatgagtttgccaaaaaattagcacaacataacatagaaaccctggtagttcccgattcagcagtttttgcgctaatgtctcgtgttggtaaggttatcattggtactaaagccgtctttgtcaacggtggtaccatctcatcaaattcaggtgtttcatctgtttgtgaatgtgctcgtgaattcagaactcctgtcttcgctgttgctggtctatataaactatctcccttatacccattcgatgtggagaagtttgtcgaattcggtgggtctcagcgtatattacctagaatggacccaagaaaaagattagatgctgttaatcaaattaccgattatgtcccacctgaaaacattgatatctacataacaaacgtcggtgggtttaatccaagtttcatatatcgtattgcatgggataattataagcaaattgatgtgcacttagataaaaagaaggtataa

SEQ ID NO: 3137 - DNA, 738 bp, Saccharomyces pastorianus
atgccagcattattcaaaagacttttatttcaagtaggccctcaacctggtgaaagaactttcactttatcttctgtttccaatgacggacactacatctccttgaggccttttgtcaagccaaagggtgacagtgaatcagcttttccatttgaatgggcctttgccggtattaatgaaaccgtcaaggtcaaaaacctgggtgacggtgttgttacccaagacttcaacttctggctggacactaatgtgtatttgaatgttccaaacactcatcgtggtgaaatcaacactacttggaaagattgggactccggctgtgttgaagaaaccggctctgtttatccattcggtgcggacaaagaaagcgtgtcattcagagaattgtggcaaccagttgacccatcgagggaagatttagtgattgtctctcctaacaatgagacattttcatcgaatgccaaatcaatcgttctcaaggtcaacgatgaaggctacgacggtttagttattattgttggtagatgggttcagggttttttgtccaaaaaaaaccaaagtaccattgacggtttgaattttatcagattacaagaaaatgattctggtaaatttgagtctttgttgagctatggtgaagaagccaagaaaatcccacaaagctacgaaaatctaaagaagggctccactatcacctctaacgggttaaactgggaggttattgagtatcacgtttga

SEQ ID NO: 3138 - DNA, 2337 bp, Saccharomyces pastorianus
atgttatctgcacgtgctgccatcaagagacccatcactcgtggtcttgcgacagtctcgaatttgacgagagggtcaaaagtcaaccaaaatttactggaagatcattctttcatcaactacaagcaaaatgtggaaacgctagacattgtaagaaaaagattaaatagaccatttacctatgcggaaaagatcttatacggtcatttggacgatcctcatggccaagaaattctgagaggtgtttcatatctaaagttaagaccggaccgtgttgcttgtcaagatgctactgctcaaatggccattttgcaatttatgtcagctggtttaccagaggttgctaagcccgtcactgttcattgtgatcatttaattcaagctcaagttggtggtgaaaaagatttaaagagggccgtagatttgaataaggaagtttacgactttttggcttctgctactgcgaaatacaatatgggtttctggaagccaggttctggtattattcatcaaattgtcttggaaaactacgctttcccaggtgctttgattattggtactgactcacacactcctaatgccggtggtttgggccaattggctattggtgtcggtggtgctgatgctgttgatgtcatggctggtcgtccatgggaattgaaggccccaaagatcttaggtgttaagttaacaggtaagatgaacggttggacttctccaaaggatatcattttgaaattggctggtattactaccgttaaaggtggtaccggtaagattgtcgaatatttcggtgatggtgttgacactttctctgctactggtatgggtactatttgtaatatgggtgccgaaattggtgctactacttctgttttcccattcaacaagtccatgatcgagtacttgaaggccaccaatcgtggtaagatcgctgactttgctacactataccaaaatgatctactatctgctgaccatggtgctgaatatgacgaagtcgttgaaattgacttgaacactttggagccatacattaacggtccatttactccagatttggctactccagtctctaagatgaaagacgttgctgttgctaacgattggccattggatgttagagttggtttgattggttcatgtactaactcttcctatgaagatatgtcccgttcagcatccatcgtcaaagacgccgctgctcatggtttgaaatctaagactattttcactgtgactccaggttcagagcaaattagagctaccatcgaacgtgatggtcaattggaaactttcaaggaatttggtggtattgtcttggcaaacgcctgtggtccatgtatcggccaatgggaccgtagagatatcaagaagggtgacaaaaatactatcgtttcctcttacaacagaaacttcacttctagaaacgatggtaacccacaaacccatgcctttgttgcgtctccagaattggtcactgcatttgccattgctggtgatttgagattcaatccgctaaccgacaaattaaaggacaaggacggtaatgaattcatgctaaagccaccacatggtgatggtttaccacaaaggggttatgatgccggtgtaaacacttaccaagctccaccccccgaccgtagtactgtcgaagtaaaagtttccccaacttcagatcgtttacagctgttgactccattcaagccttgggacggtaaagacgctaaagatatgccaatcttgattaaggccgagggtaagaccaccaccgatcatatctctatggctggtccatggttgaaatacagaggtcatttagaaaatatttctaacaactatatgatcggggctatcaatgctgaaaaccacaaggctaattgcgtcaaaaatgtatacactggtgaatacaaaggtgttccagaaactgctagagactacagggatcagggtattaaatgggttgttatcggtgacgaaaatcttggtgaaggttcttctcgtgaacatgctgcattggaaccaaggttcttgggtggctttgctatcatcacaaaatcctttgcccgtatccatgaaactaacttgaagaaacaaggtctattgccattaaacttcaagaacccagctgactatgacaagatcaaccctgatgacagagtcgatattttaggtttagctcacttggctccaggtaaatctttaatcttgagagtccatccaaagaatggaaaaccatgggactctgaattgacccacactttcaacgacgaacaaatcgaatggtttaagtatggttccgctttgaacaagattaaggctgataagaaaatttaa

SEQ ID NO: 3139 - DNA, 939 bp, Saccharomyces pastorianus
atgaagatagaaataaaacgtgtttctttgccaagtatcgttgtaatctcttgcgcaagtcgacttgttcgtggagaagcgaatctgggggatttgaaacagattgacttccaatttcctaaactagaaatagctgttacaaaaactccttttccagagtggctcactgcgtttaccgggttaaaggagtggccaggattggatcctccttatatacctttagattttattaattttgaagatattcctgattataaactatacgatcaaaacaattgccacgtcaatccaagagattcatgctctttcgattgccatcattgtgttgagcacgacgatatctacacatgctcaaaactctctcaaacatttgatgacggaccttctccttctaccaccaaactgttagaccatttgaagcataacactacatttttcaatctaggtataaatattgtacagaatcctgatatctaccatagaatgcaaagagaaggacatttgattggctcacatacttggtctcatgcatatttgccgagtatatcaaatgaaaaaataatagctcaaatagaatggtctatttgggcaatgaatgctactggcaatcatactcccaaatggttcagaccaccttatggtggtatagacaatagggtaagagcaatcacaaggcaatttggcttacaagctgttttatgggatcacgacacttttgattggagcctcctccttaacagtaccttaacgacagaagaggaaattctaaaaaatgtagcaacctggaaaaattcatctacaggattgatattagaacatgactcaacagaaaaaactgtagaccttgccatcaaaatcaatgaattgataggtaacaatcagtcatcagtttctcaatgcgtcggcggaattgattacatcaaagagtacctgccctag

SEQ ID NO: 3140 - DNA, 465 bp, Saccharomyces pastorianus
atggactccgaacaactgctgcaccactacgtctcggactcgctactgaccaccctagtcccattccacgagtttaagcagctcctgcgcccacatacgagcgatgagcagcagctgcgtcgctggtacgggctgctccaggccagagacgcacaggcggtcgccaccctgcaagcacggatcaagcagttcttcgtgggcttgcgctcaagactgctgcgggtcctggagactgaccagcaggcccactccgtcagcctcgagatgcttatcgatactctttacaagatcaacgacgtgttgctgcagcacctacaaggcctggacggcgccattcacgagaaagctctggcgctggcgcaattcgaaaaaatggtccggtcatcagcagctaaggacagcgccattccgggtttactacaaattatacagtcttatatcaatctactggaggccagacagtga

SEQ ID NO: 3141 - DNA, 2379 bp, Saccharomyces pastorianus
atggctgcggatgaatcggcttatggtgcctcgaaaattaaaagaactgcgtctagtagcagtagtatcgaaacaacagtaacaaagttgctaatgtcaactaagcatcttctccaaattctgactcaatggtccaaaggatcaacttccggtaaattggtatctgacgcatacgttcagctcggtaatgacttcaaagtcgtgtcgaaattcttcacgcacgctaaagttgatatgtcggatgtgggtgatgttccaatggctttgagacgtgttttggaggtaaccttgagggaaccaccatctgacgaaactttgaacaagcacctaccaaaaatcagagaaatcatagtcacgcttttggacaaactgaaagttaaacaagctattttaaagaatatgcaacaggagcatcggataagtataaaatcgcatcatcaacaaaatccttcatttactagcaatctttccttaggaagcgaaggtacccgcgaagggactccactaagtagtagaaaaagtagtattatacacgatcaaagacgaagcacttcaaaagtagatacgaatgaggtaaaggtaaatcactcttcgatagaggtgccatcagtctcaccagccaaggcaaatttggtccatccagtaattaagccgtcttcaaaatccaacgaatcaagcgtatcagacgacgatgatgcgctttctcaattaaagaaaggcactaatctgcaaagaagagcatcaaagagatattcagcatatcatatggctaaattgactaaccagtccactacagaggctgctgctgctgccggtcttacatcagtgccatccccttcaatgttgcatctcgaagaaactgtcagaaaatcgaaactttacggaaataccagtaatgatgataatattaatacctctgtggaaaataataataatggggctgatgatacatccgtggttaatcctgaaacatatttgaagagtccatcaatgaagagcccatcaatgaaggcagcattttctactgagaacgttaacgcctttcctcaaaggctatccagtgttgttacaacttcaccaggaaaaattgttaatggagcctgcccaattttcttaaaagtgggggacaaaataaagaagtgtcatattcaacttcccaccacaaaaaaagcactaaggctgctctttgttgagagatttacttattcccctggcgcaaatgccttccccgacatatacataatggacccccactatggaatattctatgaattggaggagcaaaaccttcatgaggttaaagcagggtttgttattgagctgaagcttgaagaagattctacgaataacatcaagaatctttttgacacaattaaggcagaaatatcaaaaagtcaaaatgatataataaggcgcataaaagaaataaatgttagttcaggaactgctaatgagcacaaaactacaccacaactaggtcttgacggtgaaaactcaaaaagtactagagcagacaaaaaggatgacaaatctgtcaaggatattcagtatgagctggggaaaataaaacaagtgcacaataacaatagatcacatatcgacgaaacgattatcaatatcttaaagaaagtcgacaaattcaaatctttatcattctccaccaagaattcttcaaacagaatatacatggaaaaatcgcaaactgaacttggcgatttatcagatactcttctaagtagagtagatgacttgcaagatgtgatcgaaatcatgaggaaagatgttgctgagcgtaggtcacagcctgctaaaaagaaactagaaactgtgtgtagagatctagataacgctcaaactgatttagcaaggctacaagagtttatcgatactgaaaaaccacattggaagaaaacttgggaagctgagctagacaaggtttgtgaagagcagcaatttcttacattgcaagaggaactgattcttgatttaaacgaggatttaggcaaagcgttggaaacttttgatcttatcaagttgtgttgtgaggagcaagaaaagaacccttcaagatcaaagaacaatcctatcttgccgattatgagacctggtaccttcagccaggttagagaacaagtcatggtggccgttcaatctttaaatcctgatcatgacggtagggttgaggctattgataaggctgaaaagatgtggcagatggaaagaaaactcaaggcaagtaacgaatttgatgaagaactggaaacctttgtaggtagttcaaacctaaaaaagtctggaggctttgaagaagtagaaaggataaggaaacaaaaggatgaggcaaatttaagagcaaattttaagcccgggtttagttga

SEQ ID NO: 3142 - DNA, 2178 bp, Saccharomyces pastorianus
atggctaaaagagttgccgatgcgcaaatacaacgggaaacgtatgattctaatgaatcagacgatgacatgaaccaatcaactaaagttgcatcgtcagatgtcatgaatagaagaaaaattgccatgcctaaacgcaggatggcatttaaaccgcttgctaccccagcatctgatgaatcaaaaattgcgagctccttcaatcctttgaaacaggcaaataacagtgaagcaaaagctgataatgatcacactactcaaaataattcgaaactaaaagcactaaatttgcaattcaaaaccaagatagacgagctagtttcaagcgagcctttggcagatttgagacctctcttaaccaaatatgaagagtatataaagagcattctaaaagcgtccgaagaatccacagaaagctcaaaaccgtctattcaagagaatggcggtaagcttgaagaagtggaagatgaccaagagagttctgattcttcatcggacgaagaagttaaagtggaagggcctaaatttacaatcaactccaaacccattacttcagattcggttttctcatttggcaccaagaaggaaaagcccaaaaaggaggaaagtgatagcgaaagtgatatagaaattaaaggccccgaattcaccttttctggagctgtttcaagcgaaatatttaagctaaatccaagcatagaaaagagtgataagagtgatgagaagagcgaagctgctcccaaaccattttcatttacttcaaccacgccaagctcaaccaccgaagaaaacgaggttaaaaaccctttttcatttacagcttctaccaagaaaaatgagagcgataatgtaaacatcaaaccttcgtttacttttggagcacaagatgttgtagatacccaaactaaaaagccaacttttatgtttggtcaaacggcggccaaaccatctcaacaaaatagttcctttacatttggtgttgcgaaaaatgaaagcacgaatgaagactttaactcaaagcccgtaaactctgacgatggcaatgagactaaatcatcttttacattttcaatgcccaataaaaatacatcagatgcaactaagccatccttttctttcggagcttcaacctcctctaatgcggcctcaaaaccggggctttcgtttggttcagtaacaatactaacaaaagaagccaatacgaacgatagtaacaataacgtcgaaaagcccatctcaaagcctgcctttggctttctatctaatactgatagtgagaaaaacgccgaaaaggaagaagggtccaaacctgttttttcatttgggaaaacaagtgaaaatgacaacgaaggctctgtcaaacctgtgatctcttctggattcggaagcgaaaataataacaaggaggcagcaaagccggcgttttcatttggaaaaagtactgcaaccgatttagacgccggtagtaagccccctgcgtttacatttggctctatagctggtgacaataaggaggtcaccaaaaccgatgccaagcaacctttctcattcggtactgcttcatcaaatggcgctccttcattttcatttggaaacacaacaaattcgcctcctaacccttcggcggctcctgctcctgctataccatcgaccggctttaaattttcattgccatttgagcaaaagggaggccagaccttctcagataataaaaatgaggaatcaacaacaaaaatgacaccagctgatccaaaaggtcccagtaatgtcgacacagcctcagaagaatcgaaaccactggatttgcagaatggtgaagaggatgagatagctttattttcacaacgagcaaaattgatgacgttcaattccgaaactaaatcctacgattctaagggtgtaggtgaaataaagcttctacagaggaaggatgacccctcaaaagttcgtctactttgtagatctgatggtatgggtaacatattactcaatgcaaccgttgtcgagtcattcaagtatgagcctttagctccagaaaatgaaaatcttatcaaaacaccaactgtagcagctgatggaaaactaacaacttacattatcaagtttaagcaaaaggcagaaggccattcattcacaaaatctatcgaagatgtcaagagagaaatgaaaaacgtataa

SEQ ID NO: 3143 - DNA, 2745 bp, Saccharomyces pastorianus
atgcagaagacagatggtattagaatcccgggcattattttggatgaattgaagactctcgattacagtcaggatgaaaggttttctgctgcagacgataaaaagagaaaaagaggaaatggtaaacatatgagtcgtaaagaaaagagaaagatacaacgtgctgaaaagaaacagaaaagcattccaactagggaaaggactcctacacttttaagaccaacgtctacgctcaaagagaggggtgcaaattcagttaagaaggatgtagttaaccaagtcagcagcagacgttccatttcttcagaagtgagcgaagatctagacgatcaagggtttcctggcgaggaattgagcgatgatgactacgatgaggcgttcggtgatgacgattttgatgaaaagctagaagtggatggtgagcaaacaatgtctgttgaagacacaatgaaagaattggaattattgaagcagaaaaaaactaatggaaaaggagctgaaaagtttggaaaacatgagggaaaatccaatgataaaaggcatattcaaagtgaaggtacaagtgaagattttataagttatccgttggcaccttcagatagagcagcttttgaaagagatgaaatggatatgcaatactatgcgaagaaacttggcttaaagggagagaagaggactatacgtgcgaaagatgaatttgatgctattggtggacttctggaaggcttggactatttcgaagattacggtaaagatgacgaagagtacggagattttgcggcagtatccaaatctgtgaaagatgatgaaggcgaacgtgagaaagcattctcctctgatgacgatctttcgacttctgattttgaaaattccgatgattttgatcaatctagcgacgacagcgttgcggaatcagacgataatgaaacaagagaaaaggaaaacccgtatgttgccccaacacagcctgaagggagttatattccaccctcgctgagaaaaaaattgattgatcatgacggtaacgctgctttgtctgaaattaggaaaagggttaattcatcgttgaacaagctttcagattccaacattgctattattattactgaattgaatggtttgtatgattcgttccctaggcagtatgtgacagaatcgttgaccaaaggaattttaattatcatcagccaaaaccaaaagttattggacggattcataatgaattacgctgctgttgcgtataccttatggaaactaagaggtattgaaatgggtgcattctttattcagaaaacagtagaaagctttttacaacactacaaagagggaatggaaaatgcgtctgaaaatcagcaggagaaattcgtttccaaaatatgtagcaatattgtgaccctgttatcgtattgttacaactttggttttgtatcatgccgcttggtttatgatattattcgtatatccgtagcagatcctaatgaattcgctactgaattgcttctaagggttatatccgtttcagggcaactaatccgtggtgatgatccctccgctttgcgagatatacgatctgaactgctaaacaatgccaagaatttagagcagcaaagtccaagactaaggtttttaatggatactatgactgacttgaaaaacaacagattgaaaccttcaattttggcggctgaccaccatcctttaaaaaagagtttgcaaagtgttttaagatcatcgtcttctcaagaacctttgcaagtttctctcgacgatatcaaacatattgatactaagggtaaatggtggctggttggtgcttcttggaaaggaaacatggaaaatgctttcgaggtttcaaatgatgataatgaaaatattggtaaatccaagaaagccaaagttctaatagaggacgatcttctcgatgatattcccgattggagtgtcattgccagacaacagcgtatgaacaccgatattcgtagggctatattcattagtattatgtcggcgcaagactatctagatgcatttggcaagcttgaaaagttaagcttaaaaaacaaacaagttcttgaaatcccgagagttattctacattgccttttggctgatagtgggtccaatggttataatcattattacgcactggtcgcaaataaaatttgtgaaagatatagtcatttatcaaaatcatttcaatttttattttgggatgtgataaagaagtttgaggagaagtcaggatccgattctgaaagtgaagcagacgaggaagatgatttggacgataacaagaaactagttagtatttcaaatcagggaagatttttcggatcattgctcgctaatgatattctaaaactggatgttttcaagcacgtttcattcatgggtgggttaaatacagagggaatgttatttatggagatattactgtttcagctattattagctgttgctaagaaaagtgaaacaaaattgaaaaaagatgaaaacggaaatagacgcacaacctattccaatgatcatttgcgtgatgttttaacaaaaaatgtcaaatcagagaatatgccttttattcttaaaggtttgaggtggttcattaacaagaagtttaagtatcataatttcctctcgggcaaaaggggtgataaggctttcgatagagatgaaagaagattggcttgggcttcaaagacagccaaatctattttagataaggagttggaacaggctgatttgtaa

SEQ ID NO: 3144 - DNA, 1668 bp, Saccharomyces pastorianus
atgaggcaggaacaaagattgtgtatagccattcaattgtttgtttgtttttttatacattttactttctgttcctcaagtcacaattatggaaatactccggagattaagatagttggaagcaagtttttcagctcactggatggagcacagttttttattaaaggcatcgcatatcaaccacagagaagtgaagaggagcttgcaaatgcaaatggcgcttttgagacaaaatatatcgacgccttggcagatccagagctatgcttgagggatataccatatcttaaaagattaggagtaaacacgttgcgtatttacgcaattgacccaacaaagtcgcacgaaaaatgtatggaagcactgtctgtcgaaggaatgtatgttctattagacctttcagaaccagatatttcaataaatagagaagaaccggcttgggatgttaacatctatgaaagatataaatctgtaattgacgcaatgtcttcttttccaaatctgcttggcttttttgcgggaaatgaggtgaccaacgatcatacaaatacgtttgcttcaccatttgtaaaggctgcaattagagatgccaaagagtacatatcgaggtccgactatagaaatattccggtcggctattctaccaatgatgatgctgtaaccagagaaaaccttgccaattactttgtttgcggagaggtcaaagctgatttctacggaataaatatgtatgaatggtgcgggtattctacatatgggactagtggatatagggaaaggacaaaagaatttgaaggttacccaatccctgtatttttctctgaattcggctgcaatatcataagaccgagaccatttactgaagtcagtgctctatatggtaacaaaatgtcctcagtttggtcgggaggtcttgcatatatgtattttgaagaagaaaatgaatacggcgttgtcaaaattaatgacaaaaatgaagtggatattcttcctgacttcaaaaatcttgagaaagagttcaaaaaagccgatccaaaaggcaccacagaggaacagtattcaattgctttgaaaaatcagcaggcacggaatgatactgaatgcccaagtatcaccgggagagtttgggaagcaaacgaaaaattacctgcaacaccggatagatctaagtgcgcctgtttggaaacggttttgccatgtgccgtggttccttttggttctgagtctgaaaaatacgagaactattttgactacttatgttcgaaagttgattgttctgatattcaggcaaatggtaaaacaggtatgtacggtatgttctctgattgttccgtagagcagaaaatgtctttacagctaagcaaactgtactacaaagtaggcgcgaaagatcaacgctgccccctcaatgatagaaacgtgtactttaatttagaaagcttggaacatctctcaaatgattcagtgtgcaatgatattctcaattctatagtgaacagtacgtgttccaatggcgattgttcaatctcaaaccaagcacgaaataaagaaaatttaaaggcgaagcatcccccaaagaatgatataaatggcagtaccgttgcatttaaaacctcagggtttataatacttttgatttctatggtgactgctggagttgttttctga

SEQ ID NO: 3145 - DNA, 654 bp, Saccharomyces pastorianus
atggatcgtcatctaaatgaaccgttgaccgtcgatgagccatcgctcaccccgaacgtgtcgtccaacctcaaaccattcccctctcagagcagtaaaatgtccactcccgtgaccgaccacaggagaagacgctcctccagtgtgatatcgcatgtggagccggagacgtttgaagacgaaaacgaccagcagatgctgcccaacatgaacgcgacgtgggtcgaccagcgcggggcctggttgattcatatcgtcgttattgtgctgttgagactcttttactccttgttccccgggtccacgcccaaatggacgtggacgttcaccaacatgacctacatcattgggttctacgtcatgttccacctcgtcaaaggtacaccctttgaattcaacggtggggcgtacgataacctgactatgtgggaacagatcaacaacgagaccttgtacacgcccaccaggaagtttttgttgatcgtgcccatcgtactgttcttgatcagcaaccagtactaccgtaacgacatcacgttgttcctctccaacttgctcgtcaccgtctttgtcggtgtcgtgcccaagctgggaatcactcacagactaagaatctccatcccaggtatcacgggacgtgcccaaattagttaa

SEQ ID NO: 3146 - DNA, 1977 bp, Saccharomyces pastorianus
atgctaaaattcagcacatacaactgtctgaaatcgtgtattaggtcgcgattactatactcaacgagcactcaagtagctaaaagggtaatcggtatcgatctgggtactacaaatagtgctgttgcatatatccgtgattcaaatgataaaaaatcagccactataatagagaacgatgaagggcaacgaactacaccatcgatagttgcctttgatactaagagctcaccacaaaatagagatcaaatgaagactcttgttgggatggcagccaaaagacaaaacgcaattaacgctgaaaacaccttctttgccacaaagaggcttattggccgtgcatatcatgacaaggaagttcaacgagatataagtgttatgccgtataagattgttaaatctgaatccaacggccaagcctacctgagtacgtccaatggccttgtccaatccccgagccaaataggatccatactactgaagtatttgaaacgagtttcagaagaatacttgggggaagaggtcaagatggcagttgttaccgtcccagcgtactttaatgattctcaaaggcaggctacaaaagacgctgggaaattggctgggctgaatgttttgagagttattaatgaaccgactgcagcagctttgagtttcgggattgatgataagagaaataatgggctgattgcggtctacgatttaggtggcgggacatttgacatatcgatcttggacattgaagatggtgtgtttgaagttcgtgctactaatggtgatacccatttgggcggagaagatttcgataatgttatcgttaactatatcatagatacttttgttaaagagaatcctgaaatcacacgtgaagaaattacaaagaatagggagaccatgcaaaggttgaaagatgtttccgagagggccaagattgatttatctcatgtgaaagaaaccgtcatagaacttccgtttgtatataagagcaaacatctaaaagtatcaatgacagaggaagagttagataatatgacttcgtcactaatcaataggaccatcccacccgtgaagcaagctttgaaagatgccgacatcgagccagaaaacatagacgaagtgatacttgttgggggaatgacgcgtatgcccaaaatcagatctgttgttaaagggttgttcggtaaatctccaaattccagcgttaatcctgacgagacggtggccctgggtgcagctatccaaggtggtgttttatcaggcgaaatcaaaaacgttttgctcttggatgtgacaccattaacattgggaattgaaacgtttggaggggctttttcgccgttgatacctagaaatacaacagttccagtgaaaaagaccgagatctttagtactggggttgatggacaaaccggggttgatattaaggtattccaaggtgaaagagggctggtgcgtaataataagctgattggtgatttgaaactcaccgggattacgcctttacccaagggtatgccccagatatatgttacatttgatattgatgccgatggtattatcaacgtttctgctgccgagaaaagtagtggtaaagaacaatctatcactgtgataccaaactctggactaagcgagcaggaaatttccgaattgattgaagaagccaacgccaataggactcaagacaatttaatcagacaaaggctagaactgatatccaaggctgacattatgataagcgatactgaaaatctattcaaaagatacgagcaactgatctccaacgaaaaagagtatcctaaggttgtagaggatatcaaatctgtaagacagtcaataagtaaattcaaagccaacgaaaacgacatgtcaatcgatgttaatgaaataaagaaagctacggatgcattacaagggaaagccttgaaattgtttcaaaacgccacgaaaaatcagcagaagcaagcgagcaagtaa

SEQ ID NO: 3147 - DNA, 729 bp, Saccharomyces pastorianus
atggaagtgttaaagaatatcagagtctaccccctgtcaaacttcattgcatcgtccaaaacctatataaatctaccaaatgaactgaaaaacctaaccactaatgagcaagaaaccaaactggggttcttgcacgtcattgaaaatgacttcaagccctcgagcatactgcagaagctggtcggcgataccgcggacggaggcaagatcctgatcatagacattgtatcgttgtggtcccaacaaaagcagaggcaaaatggcatgatctatatgaattcagtgtcttgtataaacatcaccggcttgatcacgtttctggaactgttgtatgacgcgcccatggacgcattgagaagatgccaagtggacgatttcaacttccagctccgggggataatgatcgataatttatcattcttgaatttcgaaaatgacaacaattacgatgtaataaatctatcgaaattcgaaaaactgttcaagattctaaggaaactcagagatttcttaggatgttggatcatcaccaaaagtttccccacggaattctacaacggcatcgagaatactcttattgataaatggtcgatcaagaagaaaggcggcgttgcgcaatacccgacaaaactgcctgaatcatacatgaagggcatggacctgatagtttataaagagcttgtcaacggcaaggcccggtacacacgaatatctgcagttaagacatga

SEQ ID NO: 3148 - DNA, 1047 bp, Saccharomyces pastorianus
atgccaactctaatcaacggaccaagaagagactctactgaagggtttgatacggatatcatcactcttcccaggttcatcatcgaataccaaaagcagttcaagaatgctacgggcgacttcactctggtgctgagtgcgttgcaatttgcgttcaaattcgtgtcccacaccatcagacgtgctgaactggtcaatttgattgggttagcaggtgcttccaacgctactggtgatcagcaaaagaagctggacgttctgggtgacgagatcttcatcaacgccatgagggctagcgggatcatcaaggttcttgtctctgaagagcaagaggacttgatcgtcttccccacaaacaccggctcgtacgcggtatgctgcgatcccattgacggttcgtccaacttggacgccggtgtgtctgtggggacaatcgcatcaatattcaagctgctaccggactcttcaggtaccataaacgacgtgttaagatgcggtaaggaaatggtcgccgcctgctatgccatgtacggttcctccacacatctggttctgaccatgggcgacggggtcaacgggtttactctggacacaaatctaggtgagttcatcttgacccatcccaatctaagaatcccgcctcaaaaaaccatttactccatcaacgaaggtaacacctttttctggaacaacatcatcaagtcattcgtcgaaaagttgaagcagcctcaaccagacaacaaggagcagccattttcggccaggtatgtcgggtccatggtggctgacgtgcataggaccttcctctacggtggtctttttgcgtatccatgcgacaagaagagtcctaatgggaaactaagattactttatgaggccttccccatggctttcctgatggagcaagcgggggggaaagccgtcaacgatcgcggtgaaagaatcctggacttggtgccaaagcatatacacgacaaatcttccatctggttgggttcctctggcgaaatcgataagttcctagaccacattggcaaaccacattag

SEQ ID NO: 3149 - DNA, 2217 bp, Saccharomyces pastorianus
atgagtctggtactagacgacatcgtccgctcgctgacaaattctaacgaaagaacacctctacagaccctcaagaccaccttacacctgctgtacgaaaaatcaaaacaatatggtctctcatcaccacaactacaagagctcgtacggttcatttgcgagacctctgtgatagacaccgtgacaaaagtgtacatcgtggaaaactgcttcctgccgaacgagtacctgaccaaggaccccatcttggaggtcattaaccatctcggtacgccaaccgtgttctctcggtatcgcatacaaacccccccggtcttacaatcagcactgtgcaaatggctggtgcacgtttacttcctgtttcctgcaccttcggaatggggccgtaacatatcgggctccatctggttgcatttatggcagttttcctttctgcaaaaatggataacttacctcattatttggcaaacctccacgccaaatgacgtcaagccctggaaagtgtccatcatcaggaaatgcgccatgaatcccggttaccgagacgctcccgccactgcgacgttgatcttgcaacgctaccagggcctcgtgggtgcctccaaccaactcatcgaattgattataaatattaattgtaataagaaaaccctgaaaaatcacaaaaatctgaaactaaatccacatttcctatccgctttacaacgaatattgtctagagctcatcccgccagttttcccgtggaggttgttcagaatacagtcgatatgtttttaaatgaaatccatcaactaggtaccgcctccacacgcccactccggcttcaatcattaccaggacattcatcctcaaatggtatggtctccctactggatatcacttcattggatcaactagcccaaaactggacgcaactgtatattcccaatgacgtggattctatgctggctccgtcctcaaatatcaattcttcactacagccaagagtcctatctagagaatcgctcaggcatttatacccctgtatcactctaatcaaaaatggtcgccagacatcatcatcatcgtcatcgtcatcaccacgtgagtggtgcatttggcaattaaaacgatgttttgcacatcaggcagaggctcctcgagatctgttatataccatcgtttcaatctcctcaatggacagcgaattgtcttatcagatcattcaaacattttgcaatttgaaatacctaaagcacgacgaatataccttgaagaacatatgcggcggtatcttgccattatggaaaccccaattaattagcggtacaagagaatttttcgttaaatttatagctggtgtcctcatgtggagtactcacgatggctacgataacaatcgaaccttccctgagatatgtttttatattttacaaatgattacaaattggcttctcgatgataagctaatgacgcttggactgacactactgcacgacatacaaagcttgctcactttagaccaaattttcaacaattccacctcaaatcgattttccaccatggcaataatcacttcattgaacgttttgactcagttatctacacagagcaattcagactacgcgattcaatatttgatattgggtccggacatcatgaacaaaatcttcacctctgatgaccctttacttttatcaaccgcatgccaatatttaatcgcaacaaaaaataaattaatgcagtacccaccaacaaacaaatatgttcaaacacaaaatcagtatatcatggatttaacaaattatctatatagaaataaagtgttctcatccaaaagtctatttggtatcccaatagactttttcaaaatgactctagaaaacgtttatgttccaaccgtggatttcaaaaatttgaaattttttacaataactggtatcccagcatatgcgtatacttgtgtcattattctcaagcaattagaatcaacccaaaataccagaataaaatttaccagcggtattataaatgaagagacgttcaaggatttcgttcgaataaaccacagcgagttcacccagcaaggttggattaagggtatatctaatatcaacgatttaagagtcgaaatattaaaacacacaagtacaacagccaacccgtatagcggaattgccgtattcttatttacctatttgaaaagtctctccaagtataatccacagaacccgtaa

SEQ ID NO: 3150 - DNA, 399 bp, Saccharomyces pastorianus
atggattgtcctttaaacatcgtactattgctactgcaaatcattttacagcgccagcaagcgctcagtcatcgggataagtcactcaacttggaagagttgttaaaggagcctatcattgacaatgaaatccttacagaattcaagacacacaagctggtccaattgtacggcccccagtactaccgcgacatatccctaagaggtctcaagacaatggtaacggatatcttcgcaaacggaatccaggaaacagcacaaccatcagatacagacgagccaataactgtggtctcgctagccaaccactactatgcgcaaaggattgatgaactacagggaagagaactgcctcaactaaaagagcagttgctcaataagctggagcacatgacctag

SEQ ID NO: 3151 - DNA, 2820 bp, Saccharomyces pastorianus
atgccggtcgacttgaagaaaagaaaagttgaagaacttgttaggagtgtggggaaaagctctaaggtcttttctccattcagaatcatcggtaatgttagtaacggtattccatttgctactggtacgttaggttctaccttttacattgtaacaagtgtagggaaggcattccaaatatacgatgcaaatagtttgcatttgctatttgtttcagagaaagagacctcatcctcaattgtagcactaagtacacatttccactatgtctacgcagcatatgaaaacaaggttggtatttacaaaagaggtatcgaggaatatttgattgagctagacaccagtgcgcatgtacagcagctgtgtgtttttggcgattacctttgtgtttccactgacgataattccatttttatttacaagaaatctgatccgcaagataaatatccgtcgaaattttacaccaaacttacaatcacaaatattcagggcggtgagattgtttctttgcaacatttggcgacgtatttgaacaaattggttgtggttaccaaatccaatattttgctttttaacatcagaactgggaaacttgtttacacatccaacgaatttcctgaccaaatcactacttctgaaccagcaccagttttagatattattgcattgggaacagtgactggggaagtcatcatgtttaacatgagaaaaggtaagaaggttcgtacaatcaaaattccgcagtcaagaatttcatcattaagttttagaactgacggatcttctcacctaagtgtaggaacgagtaatggtgatctgattttctatgatttggaccgtcgttcaagaatccatgttttgaaaaacgtccatagagaatcatacggtggtgtcactaaggccacctttttaaatgggcaaccaatcatcgtcacttcaggtggtgacaattccttaaaggaatacgtttttgatccatcactttctcaaggaaatggtgacgtagttgttcaaccaccaagacatctgcgttccagaggtggtcattctcaaccaccttcgtgtattgcatttgctgattcccagtcacatttcatgctatccgcctctaaagataaatcactttggggattttctctgcgtaaggatgcgcaatcgcaagaaatgtcacaaaggttacacaagaaacaagacggtggcagaatcggtggtagtacaattaaatccaaatttcctgaaattatagcgcttgctattgaaaatgccagaatgggcgaatgggaaaacgttattactgcgcataaagacgaaaaatttgcaagaacttgggatatgcgaaataaaagagtcggtagatggactttcaacactactgatgacggatttgttaaatctgtagctatctctcaatgtggcaactttgggtttgttggttcttctaatggtgccattaccatttataatatgcaaagtggtatacttcgtaaaaaatataaattgcataaaagagcagttacggggatatccttagacggtatgaaccgtaagatggtatcgtgcgggctagacggtattgttgggttttatgacttcaacaaatcaactttgttaggcaagttacaactggatgctcctatcacctcaatggtttaccatcgttcttccgatctgtttgcgttagccttagacgatttatcgattgtggttattgatgctgtgactcaaagggttgttcgtcaactatggggtcacagtaacagaatcaccgcattcgacttttcccctgaaggtcgctggattgtgtccgcttctttagattccaccatcagaacatgggaccttccaaccggaggatgtatcgatggtatcatagtagacaatgttgccactaatataaagttttctcctaatggtgatttacttgccacgacacatgttacaggcaacggtatatgtatctggaccaacagagcgcagttcaaggctgtctcaacaagaactatcgacgaggctgaattcgcgaggatggcactacccaatgcgtccgtgaaagggaacgattccatgttgtctggagctttgggaggcgatgatgcggatgagcaaaatgacattgatttcaatacctatacctcactagcacaagttgataaggatttgttgacattatctataggaccaagaagtaagatgaacacattgcttcatttagatgtcatcagacaacgttccaagccaaaagaagctccaaagaagtcggaaaagcttccatttttcttacagttatctggtgaaaaagttggtgatgatgcgtctgccagagaaggtatagcacatgaaacacctgaagaaattcatcgtagagatgaagagacacaaaagaaaattgatgcagaagaacaaataagcaaattcaaagccacaggaagattaggatttgagtcccatttcacgaagcaattaagagaaggttcggaatcaaaggactattcatcattattagccacactaatagacctctcacccgctgcagtggatttggagattagatcattaaactcttttgatccctttgacgaaattgtatggtttattgatgctttgacacaaggcttgaagagcaacatgaattttgaactttatgaaacctttatgagtttgttgttcaaggcacatggtgacgttattcatgctaataacaagaacaaagatattgctggtgctcttaaaaactgggagaatgtgcataaagaagaagacagattggacgatcttgtcaagttctgtatgggggtagtgagttttgtgacaaccacgtaa

SEQ ID NO: 3152 - DNA, 1191 bp, Saccharomyces pastorianus
atggaaaactcactagagagactgagagagcacttgaaaaatggctataaaattattttgaaggatagtgaaggacaggatactgatgatatcgcgaaagctatagaggtgcaaactgaatctagtaatggcagctctaaaggcactttcctgctgaatgaagaaacagaaatcgagattgatggctcaccagtacagttgcgagtaatcattcattgttggatgaacaaagactctagtgccgctaactatttagctgactgtaaaaataagcaattgacaaatgtgtcctttctgcaaagaacggatttaattaactggttgtctggcaaaactgaatcatcccaatatttgaaagcaatcggtcataatggtcaaacatccgataaagcaaacacatccaacgatgaaagtgcacctttaacggatggatcacctgacgcaaaactagccacttcaggatctgctggaaatggtcttgtaccatcagatccggtgctagcagaaacgatgaaaaatgaacgtgtagtgcaggaccataactctgcattacgcggtgctagaccaattaattttggctatctaataaaggatgctgaactaaagttagtgcagtccattaagggatctttgcgtggctctaaactgcctcccggccataaaggtgctcacggtcgtgtctccaagacaaatggttcgtccagcggccctcgcaaggatcctatcattttaattccttcagctgcatcgtcaatgttgactattgcaaatataaaacagtttctacatgattcaaaatatatgaatcctcgcgatttaccgtcaacgccaaatgggttagtcaatatagaaaaaaattttgaacgtatatctagaccgattaggttcattatagttgataatacaaggatgttcaccaagccggaatattgggatagagttgttgccgttttcaccacaggccacacatggcaattcaacaattatcaatggaatacgccacaagaattattccaacattgcaaaggttactatttccattttgctggtgactctgtgccacaacacgttcagcagtggaatgtagaaaaagtcgaacttgacaagaataaaagattcaaagacgtggaagtggtccgttatttctggcatagtttggaaaaggagcttatttcgagggggtatcattga

SEQ ID NO: 3153 - DNA, 1095 bp, Saccharomyces pastorianus
atggtgcaagaaatagatttgggcgtaacatgcgatatgcacgtgcacgtaagagaaggtgcgatgtgtgaattagtcactcccaaaattagagatggcggtgtttcagtagcttacatcatgccaaatttacagcctcccatcacaacattggacagagtagtcgaatacaaaaagactctgcaaaaattggctcctaagacaacatttctcatgagtctttacctttctaaagaattgactccagacctaattcatgaagcagcccaaaaaggtgcaatttatggagtcaaatgttatccagcgggcgtaacaacaaattcttctgctggggtggatccaaatgattttagtgtcttttacccaattttcaaggccatggaagaagaaaatctggtcttgaacttacatggtgagaaaccttcagtactggaaggagacgaagaagccattcatgtattaaacgcagaagaagcttttttgccggctttgagaaagctgcataccgacttcccaaacctgaaagtgattttggagcattgcaccagtgaggctgccataaacaccattgaggatataaataaagacgtggtgaatgcttcagatgtaaaagtcgcagctacgttgaccgctcatcacttgttcttgacaattgatgattgggctgggaatccagtaaatttttgcaaaccggttgcgaaacttccaaatgataagaaagctttagtcaaggctgctgtatcagggaaaccatatttcttttttggttccgactcagctcctcatcccgtacagaataaggccaggtatatgggcgtttgcgcgggggtttactcacagtcctttgcgattccatatatcgctcaaatcttcgaagagcaagaggctctagataacttgaaaggatttgtttcagatttcggaatttccttttatggcatcgaagatagtaaattagcctctgccgacaaagtggtgctattcaaaagcgaacagacagttcctcagtctataagtgacgggaaggaagtaagcgttatcccattcaaagcgggtgataaactaagctggtctgtgagatgggagtcttgttga

SEQ ID NO: 3154 - DNA, 468 bp, Saccharomyces pastorianus
atgagttcgactgtcattaaattcagagctggtgtcagtgaatataacgaagaaactcgtctatgtacaccaattccggttcagggtgagatcgagattaaaccaaatgaagaagaagaactggggttctgggactttgaatggcgtcccactgaaaagccgataggaagggaactggatgctatttctttgattttgattcctggagagacaatgtggattccaataaaatctagtaagagtggtagagtgtttgctttggtcttctcttctaatgaaagatacttcttctggctgcaagaaaagagtccaggaaacctgcctttaaatgaattgagcgctaaagacaaagaaatttacgataagatgatcactgtgctcaataatggaggtgaaagtgataatgaagaagaaattcatgacgaaaagcagaaagcacaagatgcagatgttgatatgcaagactag

SEQ ID NO: 3155 - DNA, 1653 bp, Saccharomyces pastorianus
atgtcaaaagactttaattcttcacgtattaaaatcatcaaatccaatgattcttacgcaaaggtcaatgaaaagaaagacctaacaaaatacgctctggaaaatggtaagatcatttctacaagagagcggcccatagcctctgtccctgctataagggggaggataccaagtgatgaggaagtattcgactccaaaactggattacccaatcatacctttttaagagaacatttcttccatgaaggtcgactttccaaagagcaagccataaagattttaaatatgtcaactgaagcattagggaaagaacccaatttactgaagctgaaagccccaattacaatttgtggtgatatccatggccaatactacgatttattgaaactctttgaagtaggtggtgatcctgccgaaatcgattatttattcttaggggactacgtcgacagaggcgcattttccttcgaatgtttgatttatttgtattccttaaaactgaataacttgggaagattttggatgcttagaggtaaccatgaatgtaggcatttgacctcgtattttactttcaaaaatgagatgctacacaaatacgacatggacgtttacgatgcgtgctgcagatcatttaatgccttgccgttagcagcgttaatgaatggccaatatttttgtgtacatggtggtatctctccagagttgaaatcggtagaggatgtcaatagagttaatagattcagagaaattccatctcgcggtctcatgtgtgacttactgtgggccgatcctattgaagagtatgatgacgcaagggatggcagtgaatttgatccgagggaagatgagtttgtacctaatagtttgagaggctgttcctttgctttcaccttcaaggcatcctgcaagtttttgaaagcaaacggtctattatctattatcagggcacacgaagcacaagatgcaggatataggatgtataaaaacaacaaggtgaccggcttccctagcttgataaccatgtttagtgctccgaactatttggacaactatcacaacaaagccgctgtattgaagtatgaagaaaacgtcatgaacattagacaatttcacatgtctccgcacccttactggttaccagattttatggatgttttcacctggtcactaccatttgtcggcgagaaagttactagcatgctagtatcaatattaaacatatgtagtgatgaagaactagacccagaatcagagccacaggctgcggaaactaatgaaaagataatcacagacaccactaaggatgcttgcactgatgatagcaaaaagacatcatctgcgatattagaagacgagactagaagaaaagctttgagaaacaagatcttggccatcgctaaagtttcaaggatgttttcagttctaagggaagagagtgataaagttgagtatttgaagacgatgaatgctggtgttctaccccgcggtgctttagctcgtgggtctgaaggacttgatgaaacactaagtacctttcaaaaagctagaaaggaagatcttatcaatgaaaaactaccaccttctttatcagaagttgaacgcgaaaagattaaacactatgaagaaatattaaagagagcagatgataaataa

SEQ ID NO: 3156 - DNA, 3090 bp, Saccharomyces pastorianus
atggctgaaactctaaaggacttggagggatggcaagttatcattaaagatgataaggggaggatcatcgaggaaaacaatagaagaagatcaagaaagagaggtgtagaaaatgtgtatttacaaagaatttccgatggcctgagctttgggaaaggagagagtgtgatattcaacgatagtatcaccgagacgtattctgtctacttgatccatgagattagacttaacacattaaataatctcgtggagatttgggtcttctcatacctaagatggttcgaactgaaaccgaaattgtattatgaacaatttagaccagatttgattaaggaaaaccaaacgatggagttttacaacgataaatttcttaaagaagtgaataagagcgaattatatttgacggctgaactatcagaagtttggcttaaggatttcattggagttggacagatacttccagtttctaaatgggatgataatacgaccagaaaagtagaggataaagatttcttagtgcgctatgcgtgcgaacctacagcggaaaggtttgttccaattgatattttccagattatcaggagagtcaaagaaatggagcctaaacaatctgacgaatatctaaaaagaatatctgtcccagcagcggttaataagataagcaaacaggtactgcataagacagcacctgaaaactcggcacctgaaaactcagcacctgaaaactcagcaaagagacaacaaagactaacaaaaaaatctccaatgaaggaaattaaagtagagatccccccaaattatagcttaggaaaagtcagtttgccattcaatcgaaaaatctcaacaccaaatggcacacttcctttgaaaaataactccattcatttcaagtcttcttcgggatctcctgcaaccccacggccacgtgaagatgctgcgagaattgtacaaaggagacctatttcaaaagaattagtattctcggaggaaataccaatatattcatcagagcaagagtctgaaaacgaatacccacaagacctaaatagtgagattcagcaagcacaggctccagcttcagttaaaccgagatcaacggcaagaaatagagttgaagaagatgatgatgaccgccatgaggattttgtagacgcagataattcaatgaaagtggatggagacagcgaaattgaagaggaaatcgatgaatctacttctgaaagttcaggtgaggcgatatccttaataaaaaaaagacgtggggcttatgatggcaacatgaacagaaagtctcggaaaattcacagagcagaaactcaagaactttcccaaaatgatgagattgaaagttccagaagccgactaactggagaagatgaatctctcaagacccgagatattctcaaacaaaatgtcacaatagtatcttctaaggcaggaaaaaagacgaatgtggatgagaaaactaacgcaactgagggtagtactaaaggcaagggtattcaaccgttacatacgaaagatagagcaaaggtgattgattttgctgctttggcagagttgaagaaaaagtatcagacaattctggaccggtttactccttccaaccaaatcatggatctttctcagttgaaaaaagttagagaaacacaatcaatcctggacgttgcagaacttgaaaataagttcagaagaacaaatcatacaccccaaaaagatactattttgtctaaactcgatcgtaagagtgatttgaaggagttgatcagagattcattacaaaagagggaaccactaaattcacaaattgaggattttattaaagtattccttccaatatatgaaagtttaacgtcttcccaaaacaagctattttatatagttgatgaagacgagtccacgaaatctgtacttgtcaaagaggtgatggaggagttggtcacctcttcgaagcaaaacgaactgcccattttcgattacatttacatcgatgcgctggaatacaatgacaataaaagatttttcgagaaaatatggactgctatatccaaagatgcgctttctggtgacatatcactagaagctctgaatttctatttcacaagcgttccaaaggcaaaaaagagaaagactttgatattaatacaaaatttcgacaacatatcaagtaaggagacttcggaatacttcgagaagtggatttcttcagagaactctaaactatccatcattggcgttggtaggggtaatgaggcgatgaagaggcaaatgaacgagacacccgcatttgaatcatattttactacaattacactcaacaagataacaaaagacgatttgcaacgaatgatcgtaaagcatctccagtccttattgaagccattttatataagagtgaatggcaaaaaggaaatcgctctttataatgatatttccgaaggggagaaacaaaagttacctaaaaacgtatcagcgatagatcatatcatcaacaccaaaatcatagaacttattgcgaaaaatatagcgaatatgagtgataccactgggaaagctttcaagatatgtgacatggctgtggaaatctctaaaaaggactttgtcgcaagaggtggtttacaaaagggcaaacctgtattatttcaggagatattaccacgttatttttcagaggctattagcatgttcaaagatgacatagtatcaaagagaattacggggatgtccctattggcgaggatattactgtatacactggcatgtgaaacggagggcaccagtagccatacacttgggctggatttcctcttgaccaagatgacacagatgttacaggataactcaggttacaaagcctccagagatattaaagaggtgatttgcggtgtctgggagccccagataaccatagagaaactcaagcaattctcctggataagcgtaatcaacgaactaataaaagaaaagctagttgcgttgctaccgaaagagtcacatgcaaatattatggtggagttaaagctccctcatctagaaataaattacgcattttggatggacgaggcgttcaagaatatggaccatgtgtga

SEQ ID NO: 3157 - DNA, 1341 bp, Saccharomyces pastorianus
atgtcaagaatacgagatataatagctagaccgtttcaaaacctcactgctcttgaaaaagtggtacaatggttacgactgggtacaacgttgcttataatatcgttcgggttggcactaacagttgggcccctttcttcgcctaggacaatatacatgtcgcgactggatacttattctgctgatatcacaacgggcttatttaccgtgttgaaagagtccatggaaaaatcaacatctacagaggcaaataatggcgtgggcctaacgacatccgaactatacatcctaactgcgtacacagagagccagatcaagaatgtccctcaatatatcacagtttcactttatgggagatgtgattcttcgtattctatggtggaagcgtttgattcacaaggaaatatgtatagtgaaaagaattcatctaccaagagcacttgcattaaagcaggaacaaactatctttttgactatcgtgaagttttacaaaacttgggtctagatattgttttagattacgcctataataaagtgagctcgcaacaggctgaaacttctgcgtatacgagctatatgaagggattaaaaaacaagaaggccaatgtgctacatttactttatgctgtcattagtttccaagtgtgtatgctattttttatgatatggtactactatatcaagggaaggtttttgaacgcgctgaaagaaagggcactggttcatcttaattccttgctttcactggtcgttttcattggtggattgacaagtacaataagtcttgcctggataaactataccatccaatctagaatcaactccgaattagaggcctttgggttttcctaccatctgggagtcacatggtttgctctcctgtggtgcttcgcaggtttaatttccgtatcatgcttagcatggtctggcttagaatggtgtatttccgataatggcatggcctatggaggtggaatagatgacaaatttttgggctaccaagccggagtattcaccaatgcggatacagacgaagacttagcttacggtcaacgtaacccacaacgacagtctacttcaggtgaagctgaactgatgagaaatagcgataccatgccaacgataagcaagacagccaacagtggtgtaaacaggtcggacgaccttaactgcaattcagataatcaagaaggcacagcggatataggcgataatgatgggaagagtccatttgctagtagagaggaattcgaattgcaggacataagattccgttccagtagcgatagtgaagagagtgtgcaaaggattatcaagccttcatctgcattacagttttaa

SEQ ID NO: 3158 - DNA, 1299 bp, Saccharomyces pastorianus
atgacaattgaagggtctatagttcgagaactaacgacgttgcttgtaccctctaatcccattgcgcatgttgtggacctatttcaagaggaattgttatcacgactacaaacgagtgaaacttcaatgctgccacaatgcctggtcccggatgagcgatcacgatgggatcccaaggacaggatcttggcgattgattttgggggaacaaggttgaaatttgcaataatctcgctgccccaaattgttattgaattcaacgatgcctttgaacttacctataacgtcgtagattcgatgttctttaatgaaattatctataaaatatgtaccaaattggctgaaaatggttatataaaaagcaaaaatgaaacttctgaggcgactaaattttttgtttccgtgacattcagtttccctttaaattcaaaaggccaagtagtcgctatggggaagggttttgtaatgactcatgacctccaagcgttaaccgtgaaagaagtgattcagttgtcctttcaacaaataatatcagagaatattgatgagtttttttgtgtaataaaagtgtgtgatgtaataaacgactcgattgcagtttcattaacgagcaaatttatatgtgagcatgattcaatctcactaatagtagggacaggtacaaacgcatctttcgaagtaccctacgggtacttaccgccttgtaagagagactctttaagagaaacgctgccaccaaactacatcaaagaaactttgaattttaaacatgttctggtgaactcagagattggtttcatcggtaaagatgtcattgcattgcaatcgttcgacattcacggggcgatctcgtatgaaatgcctttagaatgtatcacttctggcaagtggcttccattatcgttgaagatcattctattacagtataatttaataccgaaaaattttccgagaatgtttgatggtgaattggtgtgtcagttaacagaaaactctaccaacaattggttcaataaccagcattatcctttgatttgtcaaatcgcgcgccttttggtcaaaagggctgcattttacattgctgctattatacaggctattgatatcatcacaggctgcagaaactataacttcattcacgtaggctatgtcggatcgttccttcagcattcgaggttttatcaagagcaaataaagtattattccgacattaatgttgagctccaatttttaaatcatagtaatctactaggagctgccattgccacctacttgaacaagtcagataagcaagtttga

SEQ ID NO: 3159 - DNA, 1188 bp, Saccharomyces pastorianus
atggaacatctcgagtccgattttgcacctataagaaagtcgcaaaaggttgtagacagcgacaaaatcgtcagggcaataaacgacgacctggagcaaaaaaatttcacgattttgcaaaaattaagtctggtaccaattaaagagagcttgaaaggcacaaaggtttccaagccaaggtcagttaagaggcaggtggatcttactgtctaccgggactttaaatcgaaggctttggatgaattgagcgccaattattcctcagtcggttatattccaggtttggatagtttcctgacgaatgatcttggagaaatgagagatcacgttgttttttttaatcagattaaaaatatacatcaatatgccggcattgatcgtgaagtttctggaatactgtcatcaatcggttcgaacgtcgtgattgttgagatgaacgactatttaaccaaaggaatctttccgttagataaattgaaagtctacatcaggacgaacggaaagcgtcaattgaaagctcatttcgacttcaaaatcaatggtaacaccctcgatgacacttttgaccttatgatgatactactgagaaaaataggccaaaatctggacataggccacattgtttacttcagatttgaacaattagatgaatcatctccttcaaatacgataattccttcgaagcttatggaattcataaaaatattatcatcacttcaaaaaattgagaatattgcgttcaagtttctattttattcgaataacagcagcgtttcatctctcttgtctactgctctcaaaaaaaaccttagtacaaaacctatcatatttcaatgtcccgttttaactcctacccaagtacaagaacatttgaaaaaaatgattaagttcacttcttatccaaaaaacgagttacagcagtcgtacaatttattcatcataggccaattaaatactaaaaattccaatttggcaaagttccttgagtttttaaaaaatttcccgcatccttttacttatttatttggtgttttcaccgaaatcctggtacaaagtaaaacttttgatgaactactagacatgatcactaatagactgacaacaagaaattacccacatcgttcttataactttaagaaaaaccagcgccttccacttaaggtgactcgagacgtgcatcaaacataa

SEQ ID NO: 3160 - DNA, 7884 bp, Saccharomyces pastorianus
atgtctgaaattaaaactctactctgcaaatgggttattattgcagtaactctcttatggagctgtaaaatttttgtaaggatattttttggcgtgaatgtaacatgggttaatttgtttaagctagaaatttgtggtttatccctggaaaacggttcagtatcgataagatccatccggttcgtcgtttatgaaaagaaacttattatcaaaggtttacggatcgactccagcgacaacgcacgtaatggtaagtcaaatacagaatctccaagtgaggatgagagatcaactccaagatcttcaaaagctatcagtggctttttcacttctaagtttctttcattttcgcagcactggctcagtgggatctccgtcatacttgatgacacaagactagttaatcttgatatcggtattgaaaagcttggctttgttttttcaattgacggttccaaaaaaagtggctcactgcgattcgattcctatttaagaaagctttgttggaatgatcaaatcattattgctgataccattttcattgtgaataccaatttatcaatcgacgaaataatgtatccattaaaagatgattttcaaattagcttagacttgaaattaggtgacctaaacgtccccatgagcttactaaatctattcatcaataaagaaaacgttgatttaatgtccaatgaagaacttttacaaaaattaaaagatacaacaagtgctgaccaagatataaaagacgaagatattatcagagctagaaacgacctaatgcatacaatgggcaaattcgtggaccaaataaagcctttgaaagagtttaacgttactatcgacaaacttcaaatcaaggatttccctttaaccattcatccagacttaatcggaatgaccaaatatattagttatgacattttcatttccaacataaattttaatgcaattagatttaaaaatgagatgcccgggtatacgttaatttttgaagaacgtgacactccattcaaatttagcatcgtcatggcaaggttcaatatctgtttgaatataaatcgaaagcaccaaaagctgacaaaattgctaaagattgttgaaatcccaaacgtttcaatttttggtgaaacgaatttattctctcaaaattttagttattctgatgatttgaaaccaaagcacctggagaatgctacctttaacatcaaggggaacatttcttctttaacaattgacatggatccggttaatatttcatttatcaaatgtttcctgtctaatattaaagttttcacatcctcttgtcccaagaataaaattctgaaggagaactcccacattaagttcttaagaaggcgaagaattctgttcgattatttcaagtgttttttgcccttaattaatatgaaattcacccttgacgatcccaaatttgtcatcaaaaacaaagataatttgataataagtaagttttccgtcttcatgataagtcatcgctctcagaggtatatattaggaaatggtttgagcgaggaaaaagaaaaaacgcaacaaattttctatgagagtctttggactattgaacttctagacatgaaactgcaacatattattaagcaccaaaattatgaacatacaatactgagagtagatagcattgctatagagcaaaacgttcgacttctacctgaaattctgtatgctgcagatggtgacattgacacattaatgctagacttatctgaattaccaacgatggttatgttgagcgatttggtacataatttagacggccaattagcaaatgttgaagaaaattattttaaggagttttatgaaaagtttgcatccaatcttcaaaacattaaaactgaatgctctaatatggccaaatgtctaagacaaaaggacattctgcccagcgatttcatgttcgaacaattacctagtttttttgattatatcaaaattaacattagggacatatcctctaccttaggtgcaagatcggttttcatgccaagagatgttttttcttctatcgatccccaaagttcaaaggatctaattaatggcaagctaagaaaatattgcaatacaatcgaaaagttgcaaatcgccttttttggcgataagacacagtggcataacaaaattggttctaaccatgctaccatggttaggtcgggccagcttacgaacttcgacaatgcaagtaaagaaaagcccaagcacaaatcaagtattgctgatttagatgacatatcaaccagcgatgcaacggaagtacatcatctttggaaccttaacttgttggtaaatgatataactactgaaataattggggaaacgcctgaatcgagcgaagagttgtctaccaaaaccgtttccaaagtttctaacttatcaattaaactattcccagatacagactcttttagtggggaagaaaacagttcaaagatcgttttacaaatcaatcacacaagaggaatgtcggtagtatcactaatgagcatttttttggctgtttcaggaatacacacattaaatcaaatatttggacactgtgtatgccaaaagacacatcaatctaaaaccaaacaatatttcattgcactatccgagtcgaaaaaaaaatcgtgtctaaaaagtgtaaagtggggccaactaaaagaaatgatagaagtagatttttcttccgaatttatgagtcaaatagttgcactgcctaacggtcttagaacgaagtttgaaccaacttccacatttatcactatgaaaaacctcaacgaaatttccatttcaggtcaatattttagaatgctggtggaatccccaacgaatccaaatttctgggaacgcatgattagcatcgatagatttaaagtgcagatacatattgacttactaagagaacaaatgaaaaaattagactctctgcaagactgggaaactttacagtccgctataactctagagaacgaatcatcgcacttttctataccgcatcaatttgaaatgttcaaaattatcgatagtgtgcctagcgttttcaaaagtattaagcagatgctatattctttgaagacatctaagagtgatttgattattttcccgcacaaaattgaaacccctctttcactgcctaagatcaagctaaaatctaaaaggtggttatttagcattggcgatgatccgctagaggctgaattgaacactatctttcagattggtttgcaagaacaaagagaaagacttacgaagttacaggaattcaacaagcgtatttcggagaatttgattaaaagtcaaaagaatgtcaaagaagtaaaggatgatttcgaggccgttgataatgaaatattaaaatgtcgtacgggcttatggacaaatgatggaagaagagttttacgtaaatctgccacagattccgaagtacccctcattccaacacctttcaatgttgatggaaaagacaatcacaatcctgacataccccaacttatcactcccgaggttgaaaaagcttataatgctttactagaaaacttttccgattcgtggatcagaagagtaaaagaatacaaagtcaaggaacgccgtgagtttgataaaaatttttcttttctatggggactaattgactataacaaactgcctaaagatattaacaagaaggttttgccatttgccactaacccatttttgatgaatttaattgttgaaaatattgatatcgatatattaagacctttctgtggtatcgaaaatattccaaactttatttatgatgttggaaagggcgttccaaaggacacagaatattcaattatgataccaatgcacttggatgctaaatttagtgaagtgagatggcatttaagagattacccattgccgtttgtctgtatacccccattaagttctacacaaagtaaagaaacaatcgctacaagaattcatggggatttcatgataactgaggatatgcttcaatcggaaaaggaattaagaacgttatttgtacctttgatcccttcggtcactgtcgagaatacagacaagtattactctttatttgtaccaagaacgatgactagtgcgaagatattcacgaatttaaattttgaaatcaactctaaacacacaacgcgagtaacctggggcggctcttatcagccagccattcaacaaactatgcaatgtttagataacttttcaaagcccccgttagacccttcgataaaattaggattctgggataaaacaagatatcttttccatggtaaaattaatgtactttggaaaaataaagggaagtttgaagtctctttaaaaggtgcaaagagcccttacatgcttggcggcgattctgccgggtttatagttggatttgatggcaatgttaatttaaaatgtaatgaggataacgatcccaaaaaatttctatcatgcagtgcagataaggttcatttcagcattccaaattattttgcgaaaccattgctagtatggtctagacctagcagtaacacaatgttcataccaaatcaagaggaaactaatctgcagcgatacgcttcattttattacctattgaatacgacatctagccgaaatgaaaaggcggaaaaggaatccatgagaaagtcgtttatcgaaaagacgggtatcaaattatcaggaggtatgaccttggatatgggcattctttttgaacggttggggtctagtttagatgagagaacttttgattcaaaggaacattacttgactcgtctatgtaatccaatatatgttcaagaccgttcaaaacatgattcctatgctggctttagaagcgactttatccatatgtctttcgggttatcatccaattcaaattctgcgtacaacgctatgcagctaagtcctaatggattcaaagcgttctttacttggtggaaatcattttcaggaaactttcctgtgaggagagggcctttatttggtcttcagagcataagccctaagtttggtgaacatttgtataccatctcttatcacgctgacgtctcaccactcttcattacttacatgtatcacaatgttgacgctgaccaaattttacgtaaaaactacctagagattgctgagttcgttggtttaaaggctaaagcttctcattttgtaatggatttacaccaaagaaaagaggttttgacggaataccaagctggattaaatatcaggaagagagttatgaaactaaagtttttagccggtgatgtagtatgccaagacgtggatattcgggctgttagtggtgagttcaacaaattgaactatatagaagaaaaagaggatgccgaatatgaaatatttgacaatgatatgacatggcttgatataaccgacttccaggacgcatttttcattaaccctgagaattatttaccgaaaatcaagatcatgccctttgctttctctcctcaatttgcttatcagaagagggcgagttatggtgacaagtaccaagttgatccaaaaacttacaagccaataacgccctttgataatcgtatctcacataactgtactctagggcataatgtttctctacgtactgatctagttgaaaagagggttaatgttttgaaaaagtttcaacaaagattggaagaagaatcagaagaaattaaaacggcgggaatgtcaaaggaatatttaaaggacttactctcaaaagcaaagtttagtgtgaagaacgtcgaaatactactaaaagactttgaagcaatatgcgagcaacgggaaactggggaaaccggacatccttttcatttcgattctttgaatctattgaaggctactaaaaaaacaatgaaactgtttgaaaacagatttttcattttcaacgtgcttttgaaatggaatgaagatacaaggaatgctatctttaaatttctttactatgcagacctagccaatgaatttgcatcattagcaagtgggaagggcttgagagaatttgaggatgcaataaagaaaagagagaccgttgaggaaacagcaagcttggaaggaatatcggaaagagaggggaaaagaaacactggcaaacagtttgggagttgcaatgatgaggaatttaccaatgaaaatcttttgaagatgtttgagaagaatatcacagaattgtcctgtaatattgagcatatgatacatcataagttctttgtacagttcgtaactccacaaatccagttaacgtctcttgaaaatccagaaacgtgtgttatagtgtcctcaccattctttatgttaaagacgcttgagtttgatgcaaataccaccacaaacacgtatatgcaagatattttcttaaaaaggtatggtattttatttggaaatgcgaatgccttcttattcaataagaaggattacaaagaattttttgagttgtactttggatcaagctcttatggccagcataaaaacgaacaatggccgccgtggctgggtttggagctaggatttgaaccttctgcattggaaaagaatgcagtggttaagaatatctctgccttgctgcaatatcaaaagctgtcacagttctccgctaggtacgattccttaaaagataaaatagaggatagcatttgcggatacgttccccaaataaatgtagagttaaattcacaagagtatctaatgcttacaaagatggtattgaaactgtttgtttatgttgaacccgaagatggtgaattgaggaagtatattgaaaaattgataattggttacgacatctatgatacgagtcaaattaaaacattagtaaataatttccacaataacgaacaaattctagctgttgttgaaaaggagttcttatttaagaggagcttattggatgatgtcggcaaaattgatttatccaatgttcacaacgaaagaatgcatcaacttttgaggctgtatatactaatgaaggttttcacttcaaacggaaacaactgcattaaccggacgttggtatggaatattaaagtgaatgaaattattttacatctcttagagaaagacgataaaccatttgtggatattgcagtggcgaagctgaactttaatagagtccgacatgcaatgggactgagaaaaaatattgtcaccgttaagatgatgcaaatattcgacttggaggaaaatgtaaattaccactgtttactcgggcctttagcatctaacaccaatgatttggctagttcaaaggatgacgtgccattggtacaagtaagctgggacatcgataaacccgtaggtggtatcaaggttatcaagaatgttgagactacattgtcgggcttgacagtaaaattggatgaagacaggttaattaaactattggaatggctgtcactaaaagagctgatgtctgatgagaatggagcagacgaagatagcgaatccagtattttagatatgatatcgtcatcatcagaagaaggaaatattaaattttcggaagatacaagtcctgattttaacgaaatgttaaaaagatcgagcgattacatgattgttgaaaatttgaaattaaacagcttcaaactttgcatcagttataaaggtaaaggcacaatgagattggccaatgtgacaaactttgtcttcgatttcccaaccttaagattagccaatcaaactttgaggcttgcagatctattacttgcccttaagaaggtactgataaaggttctaataaaacacaccggaagatttattagtaataaactgaaaagaaactctaaaaataataagatggttgacgatactgctccactaaaacagctcaccacttacaagtcatacaccgaacctgaagagctttgttag

SEQ ID NO: 3161 - DNA, 363 bp, Saccharomyces pastorianus
atggtcaaattaacttcaatcgctgctggtgtcgccgccatcgccgccggtgcctccgcaactaccactctagctcaatctgacgaaagagtcaacttggttgaactgggtgtctacgtttccgatattagagcacatttggcccaatactacctgttccaagccgcccacccaactgaaacatacccagtcgaagttgctgaagccgttttcaactacggtgacttcaccaccatgttgaccggtatcgctccagaccaagtcactagaatgatcactggtgtcccatggtactccaccaggttgagaccagccatctccaaggccctatccaaggacggtatttacactgtcgccaaatag

SEQ ID NO: 3162 - DNA, 1755 bp, Saccharomyces pastorianus
atgagttccgttgctaaagatactattagtgttgctgaaagaagtcttcacaaggaaaacttaactgaaggtggtaacctggccttccacaatcatttgaatgattttgcccacattgaagatcctttggaaagaaggagattggctttggaatccattgataacgaggctttcgggtggcaacaaatcaagaccatctccattgctggtgttggtttcttgacagattcgtacgatatctttgccattaacttgggtatctcgatgatgtcctatgtttactggcacggtgatatgccctcctccagtcagaccttgttgaaggtttccacttctgttgggactgtcattggtcaagtcgggttcggtactttggccgatattgttggtcgtaagaagatttatggtttagaacttattatcatgatcgtctgcaccattttgcaaaccactgtcgctcactctcctgctatcaattttgttgccgtcttgacattctaccgtatcatcatgggtatcggtatcggtggtgactaccctctttcttcgattattacttctgaattttctactaccaaatggagaggtgccatcatgggtgctgtcttcgccaaccaagcctggggtcaaatctccggtggtatcatcgcccttattttggttgccgcttacaagaatgacttaaactatgctgattccggtgctgaatgtgactacagatgtcaaaaagcctgtgaccaaatgtggagaatccttgttgggttgggtactgtgcccggtctactttgtctgtacttcagattgaccattccagaatccccaagatatcaattagacgtcaatgctgaattgttgcgtaacgaaaagaaggaactggatgctgaaaagaaggtccacgacaccagcgatgacgacattgctattcatggtttggaaagagctcctaccgctgtcgaatcccttgacatgcatcctccaaaggcctcattcagagatttctgcaagcatttcggtcaatggaaatatggtaagattttattgggtactgctggttcatggttcatgttggatgttgcgttctacggtttgagtttgaacagtgccattatcctgcaaactatcggttatgctggttctaaaaacgtttacaagaaattgtacgactccgctgttggtaatttgattttgatctgtgctggttccttgccaggttactggatgagtgttttcactgtcgacattattggtagaaaaccaattcaattggccggtttcatcattttgactattttgttctgtgtcattgggtttgcataccataagattggtgaccatggtcttttggctctttacgtcatctgtcaattcttccaaaatttcggtccaaacactactacctttatcgttcctggtgagtgtttccctactcgttacagatctactgctcatggtatttctgctgcatccggtaaaattggtgccatcattgcacaaactgctttgggtactttgatcaaccacaactgtgctaaggatggtaaggccactaactgttggttgcctcatgtcatggagatctttgccttgtttatgttgttgggtattttcaccactttgttgattccagaaaccaagagaaagacgctggaagaaattaacgaacaataccacgatgaagttgatcctggtactcttaactacaggaacaaaatgaatgatgtcgaatcttcctcgccatctcaaatccaacattga

SEQ ID NO: 3163 - DNA, 1542 bp, Saccharomyces pastorianus
atgaatagccaagcagaagacgcatcaccaacattacgtgacgtgggttcatcttcttccacgccacttttcagctcctctagtgaagaagatcttacacataaaaaaatccctagacatcaattaactgaaaatcaagttaaaagaatccgagaggaacgagcaaaaaaaagacagagccacaggaactcattaatatcccaaggcaaggatcccgattttcccacccctgatttgcagttcattaagaggccctttctgcacttgcaccatgaaatgactcatgactccgctgaattgacactagattccaccacatctagtgcacaaaccacgccgaactcattggacgttaaaataatgacctataatactttagcacaaactttgattaggaggaatttcttcccacaaagtggctctgcactaaagtggcacaagaggtcaaaagtcctggtccacgaattaaaaacctataatcccgatattgtatcattacaagaagtcgattataacgaactgaaattctggcaagataatttccgtaagctgggctttgatttaagtttcaaaaggcatgaagggaaaacacatggactattgattgcgtggaaaactgagaaatttcagctagaaaacgagtggatgttagactacgatactatcttggccgggaatgttattcctgcaagaacaagaacaaaaaatattgcgtttatagcatcgctacgtctaaagaatataccaggtccatccaccgatggaattattgtggcaaatacgcatttattttggcacccttttggagtttttgagaggctgagacaatcttacttagtattggcaaaaattcaagaaatcaaagcttgtccaaagtataatgaatggtacagtgtattgatgggggacttcaacactgaacctgaagaaccaccgtacttggctataacaagaaagccagtgacgctcagaggtccagcaagggccatggctgagtgctcattagcgtatcgatattccaagaaaagaaatggagagggaagcagccaagatgatgaggaatgtgatgaacaatctaggggagaaggccgctttaaccagccacaaaaccctaaacctaagtcttttccagcaacaagtgaacagaaaggtctagtaaatcaactagtcgcgctacacaactccttgcacgtgaaaggagtatcattgtatgggcttggatacggtaaggtacaacctgagaactctcacgaaagtaatggtgaaccagaactatcgaactgggccaactcgtggtgtggattactagattatatattttatattgagcccagtgacgaacagagtacacacgaagagaaccccttggacgactttgaaaacaaaaacaatttaagagtcattgggtacctaaaaatgcctcgcgcaaaagaaatgccaaaacattctcaacctttcgaaggagaatacgctagcgaccacgtttccctaatgtgccagctacgttttctttcagaagagaaattaaatagcataaactaa

SEQ ID NO: 3164 - DNA, 1593 bp, Saccharomyces pastorianus
atgggcttgtttcttaatctgaggtcaaatataaaagaaaaatccatggacaatggactaagcttgcccatttcaaggaacggtagctcgaataaaagcagggacaaacgttcacatcatgactccaagtcattgaaggggaaatacatgtaccagccgcggtctacatcgtccaaatttcagcttacagtgaacgtcatatctcttattattatcactgttttgtcattgtatctggtgattttatttctttcagaaatgagattgggtttatctatacaaaacgggaacacactattgggttcagagaattacaagacgatagatctggaagatgaagaatattataactacgattttgaggatattgacccaaaggtggtttcgaaatttgatgatggtgtgcagcattatctaatatcccaattcggttcagagactttgacccccgaggatggcgaaaagtaccaagaggaaatgagcatgcttttggattctaccgtggagaaatacgacttaacaaatttcgaaggtgcaccaaacggtctggaaacacgtgaccatattcttttatgcatcccattaaggaacgcagcagatgtcttacctttaatgttcaagcatctgatgaacttgacttacccacacgaattgatcgatttgacctttctagtcagtgattgttccgaaggtgacactacattggacgcattaatagcatattcgagacaattacaaaacggtaccctgtctcaaatttttcaagaaattgatgctgttattgactcgcaaactaaaggtaccgataaactatacctcaaatacatggacgaagattacatcaatcgtgttcatcaggcattttcaccacctttccatgaaaattatgataagccattcagatcagttcaggtctttcaaaaggatttcggtcaagtaattggccaaggctttagcgatagacatgctgtgaaagttcaaggtataagaagaaaattaatgggaagagcaagaaactggttgactgctaatgctttgaaaccataccattcttgggtttattggagagatgctgatgtagagctatgccctgggtctgttattcaagacttgatgagtaaagattatgatgtcattgtccccaatgtttggagaccgctacctacatttttaaatagtgagcaaccatacgatttaaattcttggatggaatctggagaagcactagatttggcaaaaacacttgacgaagacgatgtcattgtggaaggttatgcagaatatccaacatggagagttcatttggcttacatcagagatgcaggaggtgatccaaatgaagtggtcgatttggacggtgtcgggggtgtttcaatcctagcgaaggctaaaatattcagaaatggtgtacagttccccgcattcacctttgaaaatcacgctgaaacagaagcatttggtaaaatggcaaaaaaaatggggtatagagtcggtggcttaccgcattatactatctggcatatttatgaaccaagtgacgacgatttgaaggaaatcgccacaagggaaagggagaagagaagacaatcatag

SEQ ID NO: 3165 - DNA, 1551 bp, Saccharomyces pastorianus
atgacaatgacttctgcaacgtcgaatagcggttctggtgccaggcagaccatggttcagttgacgaacctgccggatttgacggaagttagtcacttggaaatagatgcgcccgtactggaaatcctgaagaaatcggtcctgtttcaattgaactcgttgaacatctgcatttcgaactttgctctagatgagatggtcaatctcgtggccgttcagatggacgggatgtttcggaacttacacaatttggcactgttgcaaagaaggtcgcaagtttctcaggcggatttgaaactattgtttagagagttcaatctggactctggttccctttttcaagaatttcaagtttcagaacatatcaaatcgagaaattctgctgaatatcaaaaactggttaaatcatcatcatttatctttccttcgcatatcgacgacgatgaagaggacgaaactaataatattgaagaacaacaaaatgagatcaacgtcttgctgcctccctccaatccattggagaaactgataccgagctggctgcctaacttcccgccagatcatacctacaagtttacacccgaattcaaccatccaattacggatctaaaaactatcaaaagagaaatagtcaaagaaagtggggagtcggaaagagctctactaaatctaaataaacgtctcttccacatatcttcagcttctcacactccatcgccccgccttcctgatgcttctgatgctagcgagcgattagagatttggggcaacactcttcatgaaaggaaaacggcaataacaacgaaatctttcgatgagaaaaacatcgagcagtacgccaagtataggatcgaactggctagagagcgtgtctcaaagttcgagatcaaccaattgaaaagaacgaaaaacccatttttgaaaatttcagaatctctctactctttcaagaacccgcaccagtctcataaagttgtacaaaggtccatagatttgcaactacgcaagtcggtgacattgtttatgcataacctacccaaaatccagaaactaaagaaggaaaaaatacaactgtccaaagaagaaagacaaaaatcactaaaacgtcgacaagaagggcttatttcgcaacgaaagaaaaaggaacaagatgaaggccacgatctagaactcctgttgaacaacgagcacgtaagggaatctactgacaacgataatagcctcaacgcattaaacgcttccaccatagacataaacgcgaatgcgaatggcgacgaagacgaagacgatgatatgaatctatttggtatactgggcagtagcgaagatgaaaacgagttgtcaagcatacaggtggaaactgtggtcggggaatcagaacctcccacggcgtcagcacgagacactacaaataccacgccagtagcacaaaacacaaccaatatcgacaccactgcaaacctctccatcctatccatcccttataaaaatgcaccaacgtcccctcccacagccacagccacagccacggataatgatataaatatataa

SEQ ID NO: 3166 - DNA, 318 bp, Saccharomyces pastorianus
atgtcaaaaaacaatatgtaccgtatgctcgtcttactagaggacgataccaaaataactaaagaagatgaaaaattcatcaaaggtaagccagggaaaatgcatgaatttgtcgatgagttaatgttaccatttcaggttgatgaactagacgaactaaacgtttggtttgataaatttgacgctgaaatttgtataccgaacgaaggtcatattaaatatgaaattagcagtgatggtttaattgtacttatgctagataaagaaattgaggatgttgtcgaaaaggtaaagaaattcgtcgaagaaaatgtctga

SEQ ID NO: 3167 - DNA, 1416 bp, Saccharomyces pastorianus
atggaggcttcacatttgcagatatactggcacgactcgcagcccgtgtacacgctgacgttccagcggaacggctcgaacgacaggctgttcaccgccggtggtgataacaaggtccggatatggaagctgaacagggaggagaaggaggagcaggcccgcggcgtgcgcaagatcgagagcatggatttcctcgggtcgctgacgcaccacgagcaggccatcaacgtgatccggttcaactcgcacggcgacgtgctggcctctgccggcgacgatggccaggttctgctgtggaagcaggaggacccggatgcgcagcaagaggccgtgccaaggccctttggggcggaccctgaggcgggcgacgcagacgagaacaaagagaagtgggtggtatggaagcggctgcgcggcgggagcggagccactgccgcggcagagatatacgacctggcctggtcaccggacaacagatacattgtggtggcatgcatggacaactcgatacggctgtttgatgtcggggccgggacgctggtgtgcggccaggcggaccacggccattacgtgcagggcgtggcgtgggaccctctgaaccagtttatcgtgtcgcagtcggcggaccggtcgctgcacgtgtacgagatcgtgcagtccgcggcggggatggtgacgggtctgaagttgaagaacaagatcgtcaaggcggagctgcccgttctgggcagcgacgtggcccggacgaactacctgttccataacgagacgctgccttcgttcttccggcgctgcagcatctcgccctgtggcgggctggtggtggtgcccagtggagtgcacaaggtgggcgatgacgaggcggccaattgcgtctacgtgtacactaggtccggggtgttgaacggcggcggcggcgtgaagaacaggcccgcgctgaggatcccgttcttgaagaagcccgcgctgatggtggagttctcgcccgtgttctatgcgacgcgtcagcagagcgtgttgcgactgccttacaagttggtgtttgccatcgcgacgaccaacgaggttctggtgttcgacacggacgcgtgggagccactgtgcgtggtgggcaacatacactactcgccgatcacggacctggcgtggtccggagacggctcgacgctgctggtctcgtccacggacgggttctgctcgtacgtgtcgatcgacgcccaagcgcagtttggtgcgaggatcgagccgccggcgctgcgtgcggcgcaaccgggcgacgacgtagccgccaagaacccgcccaccgtttcgcgtggggtcgtgaacatgttgcccgtgagaaaggcagacaacgcggccggcaacaacaacgataacaaaaagaggcggatccagcctacaccggtagacccgtga

SEQ ID NO: 3168 - DNA, 510 bp, Saccharomyces pastorianus
atgtcgaggaagctgaagagaaccaacttgttcaacaaggacgtgagctccttactgtacgcttacggcgatgtgcctcaaccactgcattccacggtacagtgcttagatgaactggtatcggggtatttggtagatgtgtgcaataatgcattccatacagctcaaaactcccagagaaacaaactccgattggaggatttcaagtttgctctgcggaacgactctgttaaacttggaagagctgaagaactgatagctactaataagttgatcacggaagctaagaagcagtttaatgagacagacaatcaaaactcattgaaaaggtacagagcagaagacgaggaaggtgacgagatagaggaagatgaagatgagcaactggtaacagacgatgacgaagtagccgaccgcaccagtagtaagcaacactcagaatcaaagccagcaaaggctaagaagcaagggaccaagaattccaagaaaacaacaaaaaaaatgatatag

SEQ ID NO: 3169 - DNA, 3780 bp, Saccharomyces pastorianus
atgccatcggaagagttcaaaggactacccatcaaaagggatctttctgccaccgatcatgctgataggcctccggctctgtctgctcctccatgcgttatttctgtcgcaagcgacgagtcgcaagtgctgccgattcctaagaaatccaggactatcaagaccgataaaccaagaccttttctgtgccatatctgtacaagggggttcgtgagacaggagcatctgaaacgacatcaaagagcacatacaaacgagaaacctttcctttgcgtgttttgcggaaggtgctttgcgagacgagaccttgtgttgcggcatcaacacaagctgcattcggcattggtttccaaagaatctgtggattctagaggcaagaatgaaatagatgccatgaacgataaaaacataattcaaattcaaggcaacaaacaaactattcttccgacaccaagcaatccattagccaaaacggctgctcagttgaaaaaagcagcgaaagagaaaaaaggcgggaagcaggacgaattggatttgagcccttcgtacagtatgaatggccacagtgcgggcattctgcctttagtgggtaactcttccacacctgcaataattcaggtacctgagtcgtcttcgcgttcccctcctccgccagatatgagtattccgacaaaatataaaagacatgcatcattttcagcttccagtgcattcacgtatagttctgacaaatttcaaaaactgcatcaacaaaccaaatccgattttgacgaattgcaggaaagcgtccctcatcaggtgggattctccacacctcaattaacagcgcaacaacttatagaaaatgctatcgaatctggtgtggtggacttggaaactttggacttgccaccatttttatcattagacggtcagccgcctccaacgtcaactgcggctgcttcaggtcctgaacatatagatttgtatccttcttccacggcggacaccgccacaggtagtactgccactccgcatcaggctgcgacagctcctccctctcaactacctataccaagagaaagcagttctttatttttggcgcatactccctatttatcggattttttaacaatgggctcctcatatggtggttcgggtgggtttgtaagatccattactgcagatcctagtttagattatttcaattacaaaagccatgcacattcagacaccaagcataacagtattgcaaactgtaataatacgaacaaggataatattactggtaataatgttaatgtgactgaaagaactcgaagcaacggcaacggcaacataaatggagaacctattaatcataccgggtttgttcaaagttatcgtgcaagtggtcatgatgattcattcatagaaagtgaggaatggctatccaagttcatcatggattctcaaattgaaaatgatctgaaacttaatatcagtcattttaacgatattgggttcaacaacttacattctcaacatcccacaactcgctcagaaccaacaaatatgcataatgaagataacaacgcacatgatccttccaatcaattccagtccgtgtcagcaaacatatctccaccaggacagttcgctttgtttaaaactaagccaaataaagccatttcaagatttctgtcagacgagaaaataccttcgactgcatcaccttcctcttctgcctctccaatgcaattcggtaagaaaaatgaagatatcaacgagtttttattagatgaatctgtttctaatttattcacttctagacaaatcgatttattcaagaaaaacgtgaatctatattcaccactctttcaaaatcaaaaaagtgcagtttcttcttcaagttcaacaccaccattaactactccaaccggagtgacactaccaattccacgaaaaaaggaaaaacaccctaaaaaacttaaatttttcacagaacagttgcgaaactcaattattgaggaacataaattaggatctaatctattccccactgttgaggaattaaaccattacgtcaatctgtaccaggtggaatttcacaaatacttcccctttatccacctatactcgattctacctgtaaatgaaaactatccattagtaatctctatcagcatgattggtgccctctacggcttccactccacgcatgcgttattattgtcaaagatagcaagaacaaaagtaagggttttcctagaaagtaccaaaaacagtcacgataagacccccatctggttaattcagtctttggttttattgacgtttactagtattttctccaatgatattaatgtattcagaacggtgaatacacaaatagttattttggttcaattaatcaaaatcacaaaattaaacttcccactagaaaattttataaaaccgccaatcgagagcgatcatgtgctagaattccaagataaccctgctgtcctaaatcagtttaaagcacaatataacacattggaacaaattaacaggaacttcaaatacttcattttagctcaatcgagaataagaatatgtcacatagttttgttgatttccaacttattcaaatctttagtagatttcgattgctgctttcattcgattgatttgaagtgcggtgttccgtgctacaacgaagtattgttcttttgtgaagatttcaaagtctggaatgagaatttgacaaggttcaatatcgttttggattctaaattttccttaattgaagtatctaacggtgaatccaattacgaaaaatgcttaatgtacctatcaaatggcaatccttacctttacgacaacgctaaagtctcgtttaggaccttattatctttactgatctctatccatgaaaagataaacattgaaagagacgctttgagagataattataaaggagattttcatatgaaagacgtgcaatggaggatgcattcaaggcccctagttgctaccatgctaaaacactgggaactgttatatatcaagaatggaggaatactggctctcaataatgaaaacttaccaataatcaatacgaatccgtcatttagattgatcatccctctgtatttttttgcaaaattaagaaaatgtctagatgtggctccaacactgagattcatttggaaccaggattggaattcgatgaatagttccttagaaaaagtttgctacgaatgggaatcattacgcgaagccacggaatacgctgtttctgttgtcacattttggattgacacagtatctataatgaaaggaagatcaacgcaaactccgattttcaccattacttgtatctttgtttcaatcttggtcatagccgggtacatgaggaaattggaagattttgcgcaaaaccaaaagggcgataccatgatcggtggtttgaagatcactgatagaattctgtggctgaaggcatttaaaactttgaaaaggattgaatcgcacttatctgaaagagagtataaactgcaaacatttgcagaatttttaagacttccagataatggtggtttagatatcgagagtttggattcttctttgatagaaagggctttgaacccagaggttgttagtgatagagcgctagatataatcatgagaacaaggctatcttcaagaacattatactgtggtgctagaatcctcggcgatacacccgtctggcctgtgtccctgctgtttgctcatgctttacaatccagggctatttataatattaatcacggtaaagctctaaacaaaagatag

SEQ ID NO: 3170 - DNA, 606 bp, Saccharomyces pastorianus
atgtcagctaatatacaagaagctgctgatgcagccattgagcctgtaagctttgttaaagtccctgcgcttgagcctccaactagtttgcaacaaatgattcatgattggcaactgatcaagcacagagaaggtgggtacttcaaagagacagacaggtctcccttgaccatgggcttagaaaagccacaagacggagactctaccgatagtgttacagtgacaaggaaccagtctacgctgatttattacttgctgactcccgacagcccaattgggaaatttcacaagaatattaatagaattacgcatattttgcaaagaggtaaaggtcaatacgtactagtgtaccctgatggccaagtaaaatcatttagggttggatttgactataagaagggagaagtctcccaatgggttgtccccggaggtgtttttaaagcaagtttccttgtaccaaacgaagaattcgacaacgggttgttgattagtgaagtagtggtacctgggtttgatttcgaagatcacacctttatgaaaggtgaagatgagttgaagagccttgttggtcctgaaagggcagccgagttggcattcttagtttag

SEQ ID NO: 3171 - DNA, 2841 bp, Saccharomyces pastorianus
atgaacgcacaattttcagtagccggacttgccgctggaaaagagagtaacggcaactcgaaggccagcagtaaaatgacgtcgccaaggtccgatgacccactcatagatatgactacgcagacaattatagagggatgccttgacgacgatactagactaatgttccccaccaaactggagactactgaaaatggtaagataaaaagaaattcatttgcatgcgtatgttgtcattctttgaagcagaaatgtgtgccttccgatgctaatgatatctataggaaaccatgccaaagatgtctaaaacataagaaagtttgcaaattcgaccttgctaaaaggactaggaagagaaaacacaggtcgagatcctctgcatctctcgaatcgccgatacagaatgtctctacaaaaggcgaatttcccgctgattttaaggaatcgagcttaaagaataacgcatcctttcccatcgctttccctcccgatccgaatacgaaacaggttccgaactctcgtacagttttacctggacttcagcaaagtttgtctgatctctggtcaacgctaagccagccaccttcggaaagagtaagggacaccgaaccaacacctagtgaggacagaattgtcaataaatctacgcaagctaacagtgaaaactctgtatcgacaaatatatccttattggcatccactgatgagcgtacaaagaatggcggtgctccggtaatatacagctcttataactcgccaataccgatgccttctatccccaccagtactaatagcgaagcatctttcaagcgtaggccaagtgttgtgggaaataaggaaacttgcaatggcaaaatgaaaagaaaaaagaattcatattccaaacacatgacacgatcatttaggaagcagctacaatcactaattatatctcaaaagggtaagattagagacatttcaatgaagttggatacgtggtcgaagcaatggaacgatctcgttgaaaggagcatgtttttaccgacaatatcggatcccgtatccgtaggaatcatatctcatgaagaagccaccttgaggctgcatctttacaagacaaaaatttcatatctgtcaaaattaccgtttataaaagtcgaggaaaaagtcagcgtcgatgagctgagaaaaaggaaaccaatattattttctgtcatcatgtcttgtgtttccatcgtattagctcccaaacaaacaaccagaggaacgataatgaagcttgatagttttgtattaaacttaatcacaaatcagattttcaaggccaacaacaaatccattgaaataattgaatcactatctacattgtgtctatggtacaatttctttgaatggtccagcaagacaagataccatatattcaattacatttgttgctgcttaacaagggatttggggcctacttatgtcaatagatcctttggcatgtttagtgatgaggatcccgataggttcaaatcacctttggaactctacagcagcggttccagattaatcttattggtgtatgtttcggcactaaacatttcaatttttctacgtcagtcgatacaggctcgctggagtcacgtcactgaaaaggcgtgccaggatttgatcaaggaaaaaaaggaatcaaaccagaatgacaatgataagtcattacttgatataactgatgatcctatcctagtacaatttgctaaaatgaaccatgtcctagaaaacatccatactcacttacacgaacgagatttcaatgaagatgaatttgatgattgtgattttacgaggaactatatcagcaaactgattgaaaaattccatagacagttaaaagaaatttttattaatctcgatagaaataggccaagagtaattgcattttattattctgtggaggcttacctatatcaatataaacttgcggtatttattggagaaaagtcccatgccttaaatgaaaaaattgaattacccaaagaaataacggaagattttgttaagtgctatcagtgctgcaaatgtgccctcgaggaattttcaaaattagagccaattttaataacctctctgcctttattccatacgtctaggatcatttacactgtaggtatgcttttgttaaaattaaggtactctgttgttgccattccttcctttcatgatctgatgccattgacagatgatgccattgccttggtgataggggtgaacaatcttttggaaaagacatccgaattatacccgttcaacaattctctttacaaatttaggtatgttatcgcattattttgtcagacatatgcaaacaaagttatcaatgtcgctgatcgctacaatgcaaaaagagaagaacaaacgcaaaggcaaactgtaaatgaaacgtgccatgatgacaaggacgtgcgaccaacagatacgtatgaaacggaaccacaaaacatggagaaagaacaggatcctatcgtcgaaaataatatccgccaaagtgtatccactgttccagatgagatgttaccagtatattcaagagttcgtgacgatactgctgccgtgagcctgagtatcaatagcacttcctactttaatgggtccttacgccaacctcaagagagcctggcaggatcaacgctattgcccccaccattcatttcgaatactaacatttccattaacactgacataagtaatataaagccatcacccagttcgtcggttgataatttgaacgattatctgaccgatattaattccttagcatggggtgtgaactcactaaatgacgagttttggacagatcttttcatgaatgacaattaa

SEQ ID NO: 3172 - DNA, 5022 bp, Saccharomyces pastorianus
atgaactgctccacgaattctagcatcggtaaccgcgctaccaatcagaatctaaacagcagcctcgcttctagcattaattccagtaattccacgtcctacagattccagacgtgtcttgccgaccagatcgtctcggaggcgcagacgtggtcgctgtcgtcgctgtacaacttctcctgggtcgtgtcttacttcgtcacgggcacttcccgcatggtcttcagatacagctggtacctgctgacattatcgcttttaaggtttccgaaatggatcttcctcaggttccaccacgtccgcttcacgctctccttttggctgatcctgtttgctctggccatcatcttgtatgtgacctactccatcttgaaggaaagaatcctttcgcagtacaagaaactgaccccggagtttctgccgctggatgatactggcaaagccgcctccggcgccagtgccacagcagcagccactccatcaaacgacccgtcctctattacaggctcacccatcacggatccaagctcaaacgacaactcgaaaaagcagtctttgaaagacggcaacgaaaacgaaacgtttctttcatcgtacctagaccagtttctaagcgccatcaaaatatttggctacttggaaaaaccggtgttccatgaattgaccaagaatatgaaaacgcaaaaactggacgagggcgagatcttgctgttggacagcaccatcgggtttgccatcgttgtagagggcactttgcaattgtaccatgaagtggaccattcggaaaaggaccaggacgatggagccgaccaaagtgacacggattactctgacgacgacgacgacgaagacgaagacgacgacggagacaccaggtcttgttcttccggccccattggtgaagaagacgaatccgtgggttacatccggttgaaaaacggactagggaagttccaactactgaacactgtcaagtcagggaacccactgacttctcttgtgagcattttaaacctattcacgcactccatgccctcggaaaactccgggttctcttcggacttgtcttctccagtagataccactgtcaccggcagcaatttgttttattcatcagagcacaacttctccgccacggattccatggcgcattccagcagtggctctcgaactttcccctcttccatgcctaagctagtcgcccgggcggctacggactgtaccatagggatcatcccgccgcaatcgtttgccaaattgactgcgaagtacccgcgatctgcatctcacatcatccagatggtgcttacgaaactgtaccatgttactttccaaactgctcacgactatttggggctaacgaaggagattatggatatcgaggtcctgttgaataagtccatcgtttacgagttgccgtattatttaaaggaggccgttatccgcaagttcaaaaatgcagataagactagtggatcgagtgactcaaatctcgatgctaacaagaataaagcaacttccgagttgaaaaaacaatctaaatccaagcccgcagaagacattataaactcgctcaagatagccaacgccaacgcgagttcaagctcaaactcccttttgatcaaaccggaatttatccatcatccaagttcaagacacgtcgtactgggttcaagagaccagttcaaccctggtgatcttttgtcgaatgttccattgtcaagaacaatggatatcttgtcgcccagcccggtccatgtcaacaaccgtcccaaactaaacggcctcaacactgctgctccggcccattacaaaagatcttctagaagtagcagcaacaatgcttccatccactccaaaagattgtcttctttgtctccagagtttcacaacccccaactcaacacgtcacctttgcttttggaaaacacttctacgtatgaccataggcactcaagcccaacctttttgaagaaagggcgtgcctctccaagacccaatctacttcctacaacgtctttttctgcagctcaagaggagaccgaggaatcttctctaagaatggctctagtcgaggcaatgctaacgtatttgggagttaataaaagcaatatgtccatttcaccttcttcgtcagcaaacaagtccacctcaaaatcttcattgtatgatgatatttataaccgtcatccgagtaatgcaagtttcttaatgaactctaactatccaccgtctgacgtttctgtagcttcgtcacttacctcctctcaaacccaacagacgatgttaagaatcttacccaaggaatacactatttcctctactaaaaggcatagcaacaatagaaacctgaataagataaaagctaaaatttacaaggaggaattaaccccaaacttggatttcgaaaatgtcaaaaacgactttgcccaaggtatccaactgaagttttacaaacgtggtaccactatcgtggaacaaaactctcgtggtaagggccttttctatatcatttccggtaagattaacgtaacaacaaattcttcagcatccttcgcaacgtcaatgcctaaacccgaaaagggtcctcctcagacctcacgcatgggcgagaaatctcaccattctcataatctgttatatactgtgggttccggtggtattgtgggttatctatcctcgttaattggttacaagtcttttgttaacctagttgccaaaacagacgtttacgttggatttttgtccagtgaaatcttggaaagactattcgataaatatttcctaatatatttgcggatttccgactcactaaccaaattgttatccacaagattgttgaagctagaccacgctttagagtgggtccatttaagagcttctgaaacgctgttctcgcagggcgactcggcaaatggtatctatgttgttttaaatggtagattaaggcagctacaacaacagttgttatctaactctgatacaaagtccggagaagctgaaactcaaaatattattttaggtgaattagcgcagggtgagagttttggtgaggttgaagttctcactgccatgaatagatattctaccatagtgtctgtgagagattctgaactagcgagaattccaagaacgttgtttgagttactagctcttgagcatccatccatcatgattagagtttcaagattggtcgctaagaagatcgtcggagatagaactgtccccacattgacgggagacccattgtctacgaagcaaaacgacttcagcactttaattcctccaacaaaggcatcttactctagttcattaagtcataaacctcaaaatatcacttctggaacaatcaccttcagaactataaccattttaccgattactagtggcttacctgtagaagcttttgctatgaaattagttcaagcttttaaacaagttggaaggactaccattggtttgaatcaaagaaccaccttaacacatttgggtcgccatgcatttgatagattgtccaaattaaaacaaagtggctatttcgctgaattagaagaaatgtatcagactgttgtttatatctcagacacgcctgttaaatccaactggacaagaacctgtatcgcacaaggtgattgtatcctcttattggcagacgctggatctccatctgctaacattggagaatatgagaagctattgttgaattcaaagactactgcaagaaccgagttaattcttctacatccagaaagatacgtggaaccaggattaacccataaatggttacgctacagaccgtgggttcattcgcatcatcatattcagtttagtttagcaggaacaactttaatgaacgagggcaaaatgcacacgctaaataacggtgcgttagcattaatggacaagttgatccaaacagaattcagtaggaagacccaacaaaacatttcgaaactacttcccaactctatcagaaacacggtggaaaacttttcctcgagatttatgaaaagtaaaaggcaatactataccccagttcataggcataaaaatgatttcctaaggctggctagaattctttctggccaagccatcgggcttgtccttggtggtggtggtgctagaggtattagtcacttgggggttattcaggctatcgaagagcaaggtatccctattgatgttattggaggaacctctattggttcttttgtcggaggtttgtatgcaaaagactatgatttggttccaatttatggccgtgtgaagaagtttgctggtcgaatttcttctatatggagaatgttaacagacctaacctggcctgttacttcatatactactggtcacgagtttaatagaggtatttggaaaacattcggtgatacaaggattgaagacttttggatccagtattattgtaattctactaatatcaccgattcggttcaagagatacattcctttggttatgcgtggagatacattagagcttcgatgtcgcttgctggccttttacctccattagaagagaacggttcaatgctgctcgacggtgggtatgtcgataatttacctgttactgaaatgagagcacgtggatgccaaactatattcgccgttgatgttggttctgtagatgatagaacgcctatggaatatggtgattccctaaatggattttggatcatcttcaatagatggaatccattttcatcccacccaaatatacccaacatggctgaaatccaggtaagattgggttacgttgcatcagtgaatgccttagagaaggccaaaaatacgccaggtgtcgtttacgtcaggccacctattgaagattacgctaccttagattttagtaagtttgaagagatataccatgtgggtgttgattacggtcgcgtgtttttacagggtttaatcgacgacgataagatgccatacattccaggttctcaagaaactgctttgaagtctcaagttcctgagtttttgttacatagaagaaacagtgtttga

SEQ ID NO: 3173 - DNA, 216 bp, Saccharomyces pastorianus
atgaccatggaccaaggccttaacccaaagcaattcttcctcgacgacgtcatcctacaagacaccctatgctcgatgagcaaccgtgtcaacaccagcgtcaagaccggctatcttctacccaagggccacgttccctccgccaacatcattgctgtcgagcgtcgcggtgggctttccgacattggcaagaccccagcctcctctgccaactga

SEQ ID NO: 3174 - DNA, 537 bp, Saccharomyces pastorianus
atgagtactgctaaacctattaacgtgtattccatcccagagctgaaccaaactttggacgaggctttaccttctattttcgcgaggttgaactatgagcgatcatacgctttgctcgataccaaattgtacatagggtattccattgctgttgtagcagggttgagtttcttcctggataaaaaattcgagagatctgaaatcattctgtaccagaagcttttggtgggcgcatatgttgtcttatcgttgatgttctggtacttcactcgtttcgttgaaaaggggaccgtttatacggggaagaacagagacacaaaggaggagatatacgttaagaccaaatttgaaaagaacgaacctctgtaccttgttgggctcatccagaagaagaaggggaacagttcgaggaaagatctgaagactaaattagaagttaacaaggtcttcaatgaaagtggctatttacaaaatgaggtgctcttcaaatggttttctgaacagctcaacgttctggctaccaagaaaaacatataa

SEQ ID NO: 3175 - DNA, 1059 bp, Saccharomyces pastorianus
atgggactaacttcacaaaaattgagatttcaagacattgatatgagtctaattcctgcagcaaaatggtctacaaagttacagtacttattatacagttggtgtcagacaatattacatttggcgatgttttcatcagatgtatatacatgcattaaattgctggcattcaatacatggtcaaacaatattatccaacctttcttggcgttccgaatttccaagtggttgtttagtgggtgcatactgtgctctacagttatactaatcatagagctgataattgggttgaaagtgtataaaagaaaagagattacatcaaattatatgaatggaattagcaggttaataaattgtcttttcaatttcaaaaagtaccaaatttttgagatgatagtgttgagtgatgaaaaaaaattcagtaaatggttatttttttcatattttgaaatcagtggatgcttgaagctagtatttggtgattctccgagacaaataataaatggattaactttatggtcagttttactgacagtttccaatgaaaacaacagtaatactaacggcacacaaagtttgagtaatttagacaacctgaatggtataataaacaagataaaacacattgccaagacaaattatgaagaaagtgtgattttgtctttcatgctattttcctttatcatatgggtgattttaataagtaaactaattataagtgtgataatattcgttatatctatacatccaagattcttacctaacgaaatgaaagccaaagggtatgagttaaaactaaagaaatatgtgtccaaggtcatcgatgagaatttgagtaagacggttcgtaaattggggatactgagagatgatgaggaagacagaaccatatatggggacgacgagatgaaaaaagtagtcgattacgacagcaccgattatggtgacgaaaatacaataccgagttattactgttactcagatggagaggtgttcgaaagagtgtatacgcctacaaaagtatatttcccacaaaattataaatacaagtgtatgtga

SEQ ID NO: 3176 - DNA, 1020 bp, Saccharomyces pastorianus
atggacgaggataaattagttgaccagttattgagcaaagaagatagctctcgggacgatcactgtaaaccaaaaaatgaagatgtgtcgctatatgggttactagatgaggtttccaacggtaggaggttgatgaactgcttgttccattcatctatgcaggtcggaactagattgagtaccaacaaactggatcagaaatgtcgacaaattctgagagattggaccgatgaggaaaaaactatggctatggattctggtggtttacaactagatgcaccagttctgttttcttggagccataatgcagcatccacgtctgtgcaaggcaatacaaatacaaacttgaagggttctacacacggtgggaagaaaaggactaaaattaccactagcagccaattatttgataaggcttccgcagaaattagcagatgtataagccagactacaaatagttggatggtggatgagagcactaacgcgagtgagacaaatggcatcgacaacgacaaaccgtcctctccatgggctagttccagcttcaaagtggatcctctccagaaatttgttgtcaagcaattgccaaaaccaaagaagaaacctgaaagtgatcaagcaaagaaaaacaagacgaaaaggaagagcttttttggattctggggccattctagttccaaatcgagctcaaaaaagaaacccgagaagcctatcgaaattgaagccgatgttcacgaagaatcgggaactcctagcccgccactggatgaagatgctagctccaacaatgtatgtactacacaatcaaatcaagaaagcatgaatagccaacaagttgagcccgtagaaagtgaagtttcagtcgaaaacacccacagcgaccatggtgagttcgaagaattcaaacaagcaactgtacacgccaacgatcttctttctagcgagcccagtatagccaaccccctttcgttgaacttgggctcatttgtgccattgcaaccaaaaaagaaaacctcatag

SEQ ID NO: 3177 - DNA, 2430 bp, Saccharomyces pastorianus
atggataatcaagctacacaaaagctcaacgacctatcgctagagcctgctccttcgcacgacgagctagatggctcaggcctgatcatcgacatcgatcagagaaaaattggtgatgaacaggcgggtgccgtcctggatgacgagacaaaccccttggaacagcaggactcgcacgatagtttggttgctgattcccggaatgccaacttctcgtaccatgaaaaccagcagttgttggagaatggcactaaacagttggccctggatgagcatgattgtcactctgccatcttagaacagccttcgcacacaaccaactgtagctcttctaatatagcggcgatgaacaagggctacgactccgcggatcatccttcggcaagtaccggggccaagccaaggaccctctctgctagtgcccagcacatcttgccagagacactgaagtctgtggctggcaccccggccgtggttaaaccggcacataactcggcctcatacaagatggggatgctggctgatgatgcctcgcagcagtttcttgatgacccctcgtcggaactgatcgacttgtactcgaaagtggccgagtgtagagacctaagagctaagtaccagaccttgtctgtgcaaaacgatgatcaaaatccgaaaaacaaaccagattgggtggtttacccacccccacctaaaccttcatacaattccgacaccaaaaccgtcgtccccgtggccaacaagccggatgcggacgtgtttgatttcgccaagtgtgagattccgggtgaagacccggactgggacttcgccatcaattccgatgactcgtatgtagttcacaaggccaataacaccgatgagttgattgctcagatccccactctgcgcgactactatctggacttggaaaaaatggtctccatatcctccgacggtcctgctaagtcgttcgcttatagaaggctacaatacttggaagcacgctggaatctgtactatctcttaaacgagtatcaagaaactagtgtttctaaaagaaacccacacagggatttctataatgttagaaaagtggacactcacgtccatcattctgcctgcatgaatcaaaagcatttattacgtttcattaagcacaaattgagacattccaaagatgaaaaagtcattttcagagatgggaaacttttaactttggacgaagtgttccgttccttgaatttgaccggctacgatttatccatcgacactttggatatgcatgcgcataaggatacgttccacagattcgataagttcaatttaaaatataatcctattggtgaatcccgtttaagagaaatctttttaaagactaacaattacataaaaggtacttacctggccgacatcactaagcaagtcatatttgatttagagaattcgaaataccaaaactgcgagtacagaatctccgtttatggtagatctcttgatgaatgggataaattagctagctgggtcatcgacaacaaagtcatttcccataatgttcgttggttaattcaaattccgaggttatatgatatttataaaaaaacaggcattgtgcaatgtttccaagatacttgtaaaaatttgttccaaccattatttgaagtgaccaaaaaccctcaatctcatccaaaactgcacattttcttacgtagagtcattgggtttgattctgttgatgacgagtctaaagttgatcgtcgcttccataggaaataccccaagccatcgctttgggaggccccacaaaaccctccttattcctactacctatattatctatattcaaacgttgcatctttgaatcaatggagagctaagagagggtttaacactttggttttgagacctcattgtggtgaagcgggtgatcctgaacatctggtttcggcatacttattggctcacggtatttcccatggtatcttattgaggaaggtgccatttgttcaatacttgtactatttggatcaggttggtattgcaatgtcaccattatctaataatgcattatttttgacttatgacaagaatccattcccaagatactttaaaagaggtttaaacgtttctttatctactgatgatcctttacagttttcctacaccagagaaccattaattgaagaatattcagttgcggcgcaaatctataaactgtctaatgtggatatgtgtgagttggcaagaaactctgtcttgcaaagtggatgggaagcacaaattaagaaacattggatagggaaagattttgccaagattggtattgacggcaacgatgtggtcagaacaaatgttcctgatataagaattaactacaggcatgatacactatcaaccgaactggaactggttaaccattttgccaattttatgaaaaccattgaagaatag

SEQ ID NO: 3178 - DNA, 1980 bp, Saccharomyces pastorianus
atgatacagacgcctagggagttgctgaatccacggtacacgtaccacgctatcttcagcgacgtgtgcaagacccggttcaaccatttggtaacgagactgttttttatatgctcaatcatccagagtgtgtgtatctcactgctggctttgcctcacttgcccttttgggagctggcgttggcattcattcccaacctgctgattcttaatctggtttccctattgattattgtgacgaggaaaaattacatgcacgtgaagaattttgggtttgccaattcatttactttcgcgctgggccaattgttgtcgatgaagtttcttgtataccaagttgtttacactttcggtagttttcttttgtcgttggttttgagcacagtctttggacgtggaggctctggctctaggccatactacaggctgtttatctggataattatacccacgatttataatctgcaacatcaattcactgatgctgacaagttatctttcaactgtgaaaacttctttcaagctccgcaagactacgtattggagcgactcaagaaaatttttgggaagtcactaatcctaagtgtagccagtttgttcgtactgccgatctccaccacaattgttttctctagcacgacaccagggttatttgtttcatttacgagtggcgtggcatctatcataaggctgctgatgatctcctgcattatcttcatcactttcgagttcatcaatatagcatttgacgcacatatgtccattggttgtttgcataagggcaaactaatttcgaatctatcgtccacccccatgggaactctgttaagcggactttcttcggataagccgtttaccaagttgactgcttaccaagagttagcatatagagcaacatcgctagatccatccttgcgagcaccaatatatagttccaaattcagaaacaataatggtaacacgtggtcgttgattcttaaggaatgcctgaaggtcatccaggaaaataacgagacagtaatgctgtacctaagatccatacaggatcttagcgactccacaagcgctatgcatcacaaaaaagtggacaacctagattatatgtatgagaatgggaagttgactagtgccaacgaaaggctttttggtaaccgaccttcaatgatggctccattgaaaaatagtgatccgttgaatgaatcaccaaataagttaagagttagaacagatgacagtgtgctacttaaccgcggaaacaaaaaaaggcccacttctacgtatttgcaaaatgacatagatgaagctagacagactttcaatggttctatattcacccacgagacgacattaatgactgctgtacgtcttatatgcaagaaattaaagaactcgataatgtcatttgttttcccctcatacgcagaaaggcaatcttatgacgaagataataactacaaaacattgccagataagaaacacaactccaacaggggccagatttcagtaattgatatatggtccatttccaagaaaagacaggctgaaaagctgattccactacccatatgccacgccaatagtgtggtagcactcacaggactgctgatcaaatcaagaacagaggacccgaagggtggcatcattgcatctgtcggtgatatcctcaagactttagaaaggtctatttgtgcgttgggtgagttcgccgattgggacccagaatccatggcgtacaacgctgctatccaggcacaaaaaactgctcaagacagagtccaacaggacagcgaggacgaagatggcatgaaggacacggcggacatgataagcgttctctaccaactgtccacgagcgcgtttatggagatagtgctcgagtacaacgtcgcattgaatgatgtctacttagatgcagatgtggctaaactagccaactggtttctagaagtgtacaccactggcgcacccgcagctatataa

SEQ ID NO: 3179 - DNA, 2550 bp, Saccharomyces pastorianus
atgtccgaatatctagctcagacgccctgtaaactcactatttggtcaagggagatcgaacttatcagaacgaacctcttggtcaacgctcatcccttgagtacggtcggcaggctgctccaatatatccattatcaaatacacaaacaattaggggctatccatcagtcagatgaacagtatttgactccagcagcagacacacccttaaatagtattaatgtgtatttcttaagttacgaaggtcaagagttatctccaacatgtttattgaaggacatcacatcacctgcccatctggactcaaaccattttgttagattacagttagaaaagcgtgcttcaccttcgggttcttcattcaatttggattacgatatggacactgagtttgactcgatgaatatacaatttgagatcaatacattatcctctcaacgtatattcaattccatggagccaaacctgcccatcggaaccacattggttaggttagagaaattagcattggaacgtataaagaattttgagaactcaatgggaaatctctgtggtattcaggaaaagcattcagtgcatgattttcaaggattcataataaaggggaaacaaacgcctatgtttctaaactacgggagcgattctgattactataaagatttgaatttagtagatttgttgggcattgatttcacaccggcacatgagtcatttttcacatttttgttcaagatgattcatgaacaaggttcacaaataacaagcgatgaggaggggtttatattggaattcgtatctgacgctacgctctccataacgcatatgactgtccagcccgaaaccacagtaaagcaagtgaaggactttatctgttcagtttatacacattcattaaacctgagaagaaatgatatcaagttgatctacaaggggcaattgcttcatgagagtaattttgcaggcaactcgtccaagatcagtgaatgcattaaagagccacacgaagtaaaaattcatgtgcaaattaatcaggaatatacagagtctggacccggattttggaatgaagtgttcaataacccaaatattttccaatttatgcccccagacacaagatcacagtctcctgttaattttgtccccgcggaaaaacaatcgcctgctgccatggctgacgatgataaaggcgtgcaatatgtgactgaatctgccaatgacttcattgttccgactgatgaactttatagaaaatgcatcattaatgggaatgaagtggtcttcattcccgtcaacgaactaaacccgcaatgctgttacttatccgttaccagaagagattatgacgaaacgagaatccctctatctcgcggtgactacaagatcaatggagataatatcctgctttcatcctttgcgattgagcaactagaagctgctttgaacttcaagattgaaaagatacaggcgccaatggacatgggacagaatgcgtacctcggtgaacgagtccgagtcgcagataatggggcgtctgcgaccgataatggcgcaaacgagatcaacgaatcagcatgggataggatagtcttgcgtcctttgagaaatagctttcctttgctactggtgttggtaagaacgttttacttaatcggctacaattcattggtcccctttttcattattttagagtttggaagctttcttccctggaaatatatcatcttactaagtttattgtttgttttccgaacgatttggaatacgcaagaagtgtggaatttatggagggattactttcacttgaacgatatcgatgaagccaagtttgtccagatcaaaaacttcgtgaactccaattcattgacgttggctttctacaagaaatgcaaggatactcagtccattattgatttactgatgatcccgaatttacacgaacaaagactatccgtatattccgaatacgatatcgagtacgacgccaacaccccagacgttggtcaacttaggttgctattcatcaaggtgttgtcgggcgaaatctccaagaaagctctagacgagttattcagaggatttttcgaattgtacgaagccacaagaaacatgaacccactgtaccctcaggactctttgaacgaactactattgatgatcttgaaggagtccaacaagaaagacatcaacacgctgcccaaatacagaaggtggttccaaaccgtgtgcttgcaaataagcgcaattgcagagcacagcgtcttggacttcatgctcggccacataatcccggacccggcgaacgacagggtgctaaccgccgtggtaaagaactttgtgctcttctgggtcactctactcccctacgtaagggagaagctggatgaaattgtggcgcaacgagccagggatcgtgagcaacctgtttcatccgtccaagaccaagaccaagaccaagaacacgacgagcaagaagcggtagtgatccctgaccaagaccctaccgctacgggtgcgcaagcccacatctacgtctctgacgaggaccggtaa

SEQ ID NO: 3180 - DNA, 1071 bp, Saccharomyces pastorianus
atgaggagatcgtggacgtatttggctatgacggtgaatcaaaagaggaaacagaccaccattgaggatttctttggtgccaaaaagactgctactgggacacccagtaagaaagctaagacgagcgccacttttacgagcgtgacaaaagatgcagttacgaagattgaaacaaaggacgtcgtaaaggaggccactgctagcaaagatcttgtgaattcagatgttaaaggtgatttttcaggacatttaagcacgaatttgcgtgacttactatcattagagatcaacacaatcgatgattcgtggttcccacacttgatggatgaattcaaaaagccatactttgtgaagttaaaacagtttgtcactaaagaacagactgatcacaccgtatttccgccacctaatgacatttactcgtggagccggctgacaccattcaataaggttaaagtcgtggttatcggccaggacccatatcataaccataaccaggcacatggtttggcgtttagcgtcaaaccccccacgccagccccaccttctttgaagaacatatataaagaactgaagcaagagtatcctgattttgttcaggataataaagtcggagatttaacgcactgggcttcacaaggtgttctattgcttaacacgtcattgagtgtgagggcgcacaatgcaaactcacattctaagcatggatgggaaacgttcacgaaaagagttgtccaactgttgctccgggacagagaagctgacgggaaaagtttggtgtttctcttatgggggaataatgccattaagctagtagagtctttgttgggttccacttccgtgggagctagtagtaagtatccgaatatcatggtgttgaagtcggtacatccatctccactaagtgcaagtaggggtttttttggtactaatcattttaaaaagatcaacgattggctatataatgctcgaggagaaaaaatgatagattggagcgtagttcctggaacgtctctaaaggaagttgaagaggcaaatgcgcgactggagccaaactcagaagagctttaa

SEQ ID NO: 3181 - DNA, 2109 bp, Saccharomyces pastorianus
atgggtaactcaagctcaaaatcctctaagaaggattcacgttcaagcacctcctcgagaaacccccggcctccagtctctaggactgacacgtctcattctgtgaagtcttcgaaatcaaacaaatcttcgaaatcaaaacgatcccttccctcatcgtccactacaaatgctacttcaaacgttgccgatcccccaactccatccaagtcaaaccttgaagctaatcatcagcgacatagctcacacacgagtcaccactacctctcccctcgttcatattcgcattcgaattctcaaagtgagttgctaactacgccttcgtcttcttccacaaagagaccctctacttcaagaaggtcgagctataatacaaaggccgctgccgatctaccgccttcgatgatccaaatggcacccaagtcgcccatattaaaaacaaataacagcagcatgcatgtatctaagcataaacctccatattcctccacatattatgaaaacgctttgacagatgatgataatgatgataaagacaacgaaacaacacatacaaaaaagttttccaaatcttcaaattctcgtccctccagtataagaagcggttcaatgtcaagaaggaaatcagatgtaactcacgacgatagtaacaacaacaacaacgggtcctcatcttctaacaatcaggaaagttacttggtacaggcactgaccaggtcaaactcacacgcatcctcactacacagtaggaaatcttcctttggctcggatggtaacactgcttacagcactccattaaattcgccaggattatccaaacaactggaccactccggcgaatacttcacatctaatccaacgtcctctttgggccaccattcaagccgtgacgtttacccaagtcaattactcaatcaggacgctgatatcgaaaattcatcccaattgaacgacgtcgatacgtccatggaaaatactaatgacaactataataataccacaaacaacaaaaacggaccgagtgccctgctgaatgaagattttgatgacataatgcattcttccgcaaataagaatgccaccaaaaaattcaaaaaacctatcgatattgatgaaaccattcaaaaattactagacgcaggttatgcggctaagagaaccaagaatgtctgcctgaaaaataatgaaatcttacaaatttgcatcaaagcccgcgaaattttcctctctcaaccttcgttattagagctatcacctcctgtaaaaattgtgggcgacgttcacgggcaatatggtgatcttttaagacttttcactaaatgcggatttccgccatcttcaaactacctattcctaggtgattatgtagaccgtggtaaacagtcgctcgaaacaatactactactgttttgttacaaaataaaatacccagaaaatttctttttgctaagaggcaaccacgaatgtgccaatgtcacaagagtctatggattttacgatgagtgtaagcgtcgttgtaatatcaagatttggaaaactttcatcgacacttttaatacgttgccgttagctgccattgttgcagggaaaattttttgtgttcatggtggattatcgcctgttttaaactcaatggatgaaattagacatgtcgttaggcccactgacgtacccgattttggtttaattaatgatcttttatggtcagatccaacagattcacccaatgaatgggaagataatgaacgtggtgtaagttactgttataataaagtagctattaacaaatttttgaacaaattcgggtttgatttagtttgtagagctcacatggttgtagaggatggttacgaatttttcaatgatagaagtttggtcacagtattttctgcaccaaactattgtggggaattcgataattggggggctgtaatgagcgtcagtgaaggtttattatgctcttttgaattgttggacccgctagatagtaccgccttgaaacaagttatgaaaaagggtaggcaagaaagaaaactggctaatcaacaacaacagttcatggaaacgaacatctccaatgataacgaatctcaacaacaagtttactaa

SEQ ID NO: 3182 - DNA, 1224 bp, Saccharomyces pastorianus
atgtcagcaacaacaggtacgctaaccgctaccttggcaaaggacgtcgcagtcgccactgctactaaagtgtcgtctgacgtgggtgatactttgtattcatacctgcccaaagtcgatcagttttatattccagaatggcttacgatgcagtttattgccaataacctcattagttttacccctctattctcctatggtaccacaattatcagcattgagaaatgtaagaccgctttgggattctccatagatatttgtgccacaatgttgattgccagtatcttaaggatatcttactatttgattacaccatacgaaatcacgttgctgagacaatcattagtgatgattttcattcaattaatcctattgaaaacaagtttaaaatatagacccgacgaatacaaatatcaaaatttgaccgatgttgaaccattgtcgcatttgattcatgacatatggttcgagtttttcagttgcattaacagaccgaaatttttaagtgaagattggaagaacctgatcaagtcactatcattcacaaacttgttgaaatttacatttaaaatttttttggccttcttatacaaaatcctaaagttcttcgacccgaattttaaaagaattggagcattttggcaatgggacaacgataggaatttttggaggtttttggcgctatttgcaaccttacaaatactagtcacattttgtatctcgaacattttaaactgggactcattggatcaaggtcttggctccattatagggtcgctgggtttgctagtagaatctcttctccctctaccacaaattgccattctttacaaactaaaatccgtccagggtttcaaactaatcctattggtaagttggctttgtggtgataccctaaagatcacttacctaatttttggtgcaaaaaatatttccgcattattcgttgtttttgcgttattccagatgtcgttagatttttacatcggcggtcaatacatttactatagatactactatccgaaactaagacatatccaccatcccaataacagcaatccaccatcagatgaagagggtgaaagcgaaatgtacgaattggaccttttcaatactttacaaaaagatgtcgaaaaggccttgaaacacgatagtcatgatacatcagattcacctcaatatgatcaagtaggtaaatctcagccacatacggttacagtataa

SEQ ID NO: 3183 - DNA, 2376 bp, Saccharomyces pastorianus
atgcctactagtaaccaaatcaacattaatgatattcagcccaatcgaatgctttcagaatcaaatatgagggttataaacaataatgaacatacgatcggccagtcggcccagcagcaacaacaacaaccgcagcagcagcagcagcagcagcagcaatatctcagccagggtgttcaacctctggtgcctgtatcataccaatatgtagttcctgaacaatggccgtatccacaatactaccagcaatcacaaccgcaaccgcaatctcaacagcaacagcaaccacaaatgtgtcaagttcaagaaccttgccagaggaatagttctgattcgaacggctctaacccgtcgtccacatcagtagctatttcctccgccgtcagtggtgctgctttgtccaacgcttctggtcctgccatcggtggcaatagcaacagcaataacagtaacagtaacagcagtagcaacgtgccatactattattacttcccacagatgcaagcccctcaatcaatggcttattcgtaccctcaagcgtattattattatcctgcaaatagtgatgggactactaatcctaacggcatagcatcatctgtaactaatattcaaaatcaaaactctgacacggagaaaaattactcggcgtttgagttacagcagcaacaacaattacaagctcaatcttatccatcgcaagcaccaaaaatcagtaatgtattttcaaagtcgcacaaatccggacctccttcagatacttccactggttcaatatctcctagttccaaccgtaccagtcgcaacagcaatggagctgtatcactaacacaacaacttccgatgccaaactatccaaaaccttccacatatcaatttcctggattccataagacttcctcgatctcaaactcacattcacccatccctcccaggcctttaacgacgcctacccaagtcccagtaatttctcaaaaggatacagtaaattacaatcacccccagatgggcttactacctcaacaacaagtaagtccattatatgatgggaactccataacaccacccgtcaaaaccatgacggatcaagaagcttatttgactgtaaacagacaagggaaaactgaccaacaatatgatccaatggctaaagccatgaattcctttcaaacaaccaccataagacatccaatgcccgtaatagccgccgccaacgatccgagcggtagcaatactgggtctgcaaatataataagaccaagagtaacgacaactatgtgggaggatgaaaagacgctttgctatcaagtcgaagctaacgggatttcggtggtaagaagagcagataacgatatgattaatggtaccaagttacttaacgtaactaaaatgacaagaggtagaagagacggtattttaaaggcagaaaaaattaggcatgtggtgaaaattggctctatgcatttaaagggtgtttggataccgtttgagcgtgccttggcaatagcacaaagagagaaaattgccgactatctatatcctttattcatcaaggatatccagagtgtactaaagcaaaacaatattagcaatgacagcactagcagcagtagcagtgctgctggtataaaatcaattagcccgcgaacctattatcaacccattgataattatcagggtgctaatgccccaacaactgcatctgctgcccaattggcttactcctcgatgaacttgaataataaaagtgtacacaataatcccatttcaactgtaactgcaattgcggcgggtcaacgaccaatgagtcagtatccaattcccaatatgaatcaaactgacgtcttcacaatggccaatgcacagaatctttctacaacgatgccgatgaaacagcaggacagtaggatagtttcgccattatcataccctcggaataccgtgataagtcccgtgagtagattaggcaacacatctagtgcttcaagggtcttcacactctctccacacacaacaagcacaaaccaagcatctgaaacaaacgttgggagccttcatacaggaattactcttccgagagtgggatctgagtcggaatcgcgttcggagggttcagaggaaactgacggtaacgacaaggttgcggataatgaaaacacaaaagagtcacggtcgagccaactgccgatctctgcattgacatcaacacacacaggtacaggaacaacaagcactagccaagacatcgcgcattcaaatgagcctacggaaatagaaccagtcaaggaacaagcctctttcaaatcgcaagctggtaaccccgaaggcgttttcaaaaaggtaacaaccactaatgatataaagaaacaagagtga

SEQ ID NO: 3184 - DNA, 1224 bp, Saccharomyces pastorianus
atggtgttccaaaagatacttgctagcaaatcacatcacagtcgtcaccatcataattctctccaccaccaccatcatcttagcctcaagtggccaaaacgccgtcatacactcatttcaaacgttaccggatccaatgaaacaaaatatctatcgccatttagaaatagtacagatacgggaagtagaaaacgtgatagattgaacgtaaaaataaagtcgctgagaaataagattcatatgcggttccatcccacatacataattgatgacacggctacagtaaccagtggtgaaaagtatgatgcttacggagaaactaaaagagacgagctcaccacaatgtcgttagaagaacttttccccaggtctaatcggtatcgaatccctgaggataatgaagaagaaacgaatagcgttattcacagggaattgggcaaaagtgaaaatgaaaatgaagatgaaaatgattaccccagatggggaaacgcggaacaacgctacagttttgaaaacgaccagttcaatgaggacgaaattgtgaacagaataaggtctgaaatcaggactacaaaattgaactccgtaaaaaccagtaacagaacactggcaaaagctacagaggcccaactaattggaaaaagggttctccagcagttaagttgccaaagtaatcaactaaccaagatcgaggataattgcgacattcttaaaatccaatctaatgtggctgacaaaaaaatcgacgaacttgttcatgaaaatagaagtttgtttgcattgacatcacccaacccgtttaggaagaaaagagaaagagaaaaacaaaaccaaatcaatgacttgaagatgaaacagtatcatctacagcaggaaaccgtgaaacgggcccaagaatctgggagaaacttagccgtacgcctaacttctaactatgagcgatatgataaagaggaagaacgacaatatattctcaaaaacgcccaaaaatatcagtttgaacctgatgaagaagataataggatggaaattgaattgtacgaaaactttgaacaaataaaagcagcgagtggcaacttgaaagaaatggctcaagcatttggcagggagtttgaagcacaaaattccagaatgtttgatatcgaaaacaacgtacaacaggtggacggcgccttacaagccaaaagatttagattagacagggtgataggaagaaaagagtaa

SEQ ID NO: 3185 - DNA, 1566 bp, Saccharomyces pastorianus
atgaacgaagccaattgttccgtaaccaatggcaaccccattcacaggcttaataatgagttaaggccaaaacgaagtaatctgagtagatcttccggttctcaaaataacggatgcaccacgctaagtgccacaacaatagagcgcatttttactaattctcaaagaggcaacattgccaataaaattgattttcagaatgcatcaccggtcgctcaggttcaagcagaggcttactatggcggcgatggcggtgaaggaaaattgtcaaggcccgagaaccaatggtcaaaggaattctcttgctcttacaagaataaaagtattgatgtcgtaatgcctggtcgaatgaaaaatgaaaaatactctattggtttccacgacaaggttttcacaccgtatcgtaatgaagcataccgtctaaaccatttatatccttacgggaaaacttatggtggatgctcgtctgcttctaacggccattgggagactcaattcgagctaattgaagaccagttaataagcgaactgaaaatagcaaaaaaagtagagcaaacacccattggttacgactatttggccgaatatgaagaaacaatagattttaaatacacctcactacccgtacctgagacgtaccagtttttgaataacaacgattactcatgccagccggacccctataaaataggctgtatactaatggaaaacggttcaaacttgaacgaggtagtaaaggcttttgaagccgctatttctcaagatccgtcgcacgtgaatgcatggctaaagctaggcatagttagtattgaaaatgaaaacgaaaataacggcgagctcgctttgcaaaattgtttgaatttggatccaaataatacatctgcaatggaaagcttagcgattcactatacgaaccaacaaaatgaatcagaagcaatgaaactctttcaaagatggattctttcaaaattttctgaatatttataccccactgtaggacaaaataataaatttatggatacaactcttggaaagtctaatttgatgtctattttggagtctttgctgaagatgcgtgtaacaaaaaaagaccaacgtaagattcattccgtattatcagttttatactattcagatcagaaaattcgacaatctctggagagcttggaatttttattatctgaaaaacccaatgatgaaataatctggaataggtatggcgctatattagccaataccaagtcgtatcactctgcaataaacgcatataataaatctaagctactcagacccaattttacaagggcccgctacaatttggctattgctttcttgagcaatggtgactacatcaaagcaagcaaaactttaatagaaattatattattacaaagcaaaggaattgaaaatatcaagacgaagatgcacaacaagttcatgcaaaatctaaaaaatgctctgattgctttgaagaagtttgaccttttagatgatttagtaaacaattctgatgaagcagaattattgatatcaaccttgaaaattatttacaataagataggttag

SEQ ID NO: 3186 - DNA, 1518 bp, Saccharomyces pastorianus
atgagtacggttttaccaattaagaagactgtcgtcatcatcggtgcggggatcgcagggctcaaatctgcatctacattgcaccaaaacggcgttcaaaattgtgtcattctcgaagccagagatagaataggtggcagactacataccgttacaggctaccaaggacggaaatatgatataggtgctagctggcaccacgacacattgacaaatcctttatttttagaagaagctcaactaacttctagagacgggaagcagaggtttgttttcgatgacgacaacttcatttatatcgacgaagaacgtggaagagttgatcatgatgaaaaactgctattggagattgtggacaatgaaatgagtaaattcgcagaattggaatttcaccaacaactagacgttccagactgctccttttttcaattggtgatgaaatacttagtccaaagacgccaatttcttactaatgatcaaattaggtattttccgcaactatgtcgatatttggaattgtggcatggattagactggaaacttttaagtgcaaaggatacatacttcggtcatcaaggaagaaacgcctttgctttaagttatgactctgtggttaaacgaattggtgaaagctttcctcaagaatggatgaggttgaattgtgaagtcaattcgattaagcgcgaaccttcaggaaatgtgacagtgacctgtggtaatggcaccgtataccatactgactacgttattgtcactattcctcaaagcgtattgaacttatccataaagcccgataaggatcttcaagggagaatagaattccagcctgcgttgaaaccagtgattcaagaagctttcgaaaaaattcactttggtgctctcggtaaagttgtttttgagtttgaagaatgttgttggtcgaaggaaagttccaaaattgcgactttggccaactcatctgatgactttgtcaaacaagttcgtgatgccaaagatttagatgacttgaattctatgctagaaaaaaatgccctgaaaggacacacaaatgttagctgttgggatcaacctttgctttttgtaaatctgtcaaaaactacaggggtagcaagttttatgatgctgatgcaagcgccgctatctaattatatagaatccatcagagatgataaagagtccatttttaaattcttccaacccgttttaaacaagatcatgaaatgtctaaattctgtagacgttattaatggcatgaattcagctgaaaagcatattgataaaccaactctgaaaaatattattgtcagtaattggacacgcgagccttactcccgtggtgcttattcagcctgttttccaggggatgatcctgttgatatggtcgttgctatgtctaatggtcaagattctcgtataagatttgcaggcgaacacactgttatggatggtgccgggtgtgcttatggtgcctgggaaagtggtaagcgagaggcaaatcacatctctaatttgatgtag

SEQ ID NO: 3187 - DNA, 936 bp, Saccharomyces pastorianus
atgaatatagaccatttggggttaagccccttagccatttcagaagttaactttctgcatgagtcatcttccagttcgaaagaccattcttggttcttatttttaggcttcaaacaggaccaaactagcgaggtttacgtaccaataaatgaaaatgaaactgattccgggtggtacgttgaaaaggttataccaatcccggtacatccaaatcttcaaatcgatcaagaaagtttgcaaagaaagatatctttggtgaaagtcactcaaaaggacatctgcgtacttggtataatagatttatatcgatctgatcatgatgaagacattgaaaatgaagtgatggaaaaaatactaacccaattgactcccctatcactgatgtatttaatcaggtacaacgcgtcatatcctcctgcatcatccgaagaatttatcaataacttgaaaggctttcgaattgaaaaccagatccaagtaggcatgagaataatccttgaattcctacaagaaaaggtacaaatacatgatatgaacgacaaataccaaatcctcataccagataaagacgtggatttgcaccgcgacgaaatcctcatatcagataacaacatgggtctgcatcgcgacgaatttaagctgattgatatgaatgatcaagaaattaacattcaggaatataacaatagtgccattagaaaactaatcgaaagaataaatcgaatgataaagttcttggagaattatgacattcatgataactccttctccagtggtcgagatgttatactccgaaagatatcgatgttaataacgcaactacaaaggggtgggactaatgatatgaattacttattagacaataaggtcaatgaaataagactattggaaatttcgtgtaagcaatgggaaatttcaaacgcattaaaaaaatag

SEQ ID NO: 3188 - DNA, 1998 bp, Saccharomyces pastorianus
atgaactatagttatgaaggctgcttttgggacccgaacgagaatggggtgaacattgttctgagccacatcgcccaaggaatcaagtcgtgtgattcgatgatacactttttcaaacagcgtagtgagctggagaaggattatgcaagacggctgggagccatcactgggaaactagacaaggacatgggaacgaacctggagtatgggaagctgaacgatgcgttcagtgtggtgctcagtgctgagaagtctagggcccaatcgcattccaagcaaagtgaagttcttttcaggcagatttacacggacacgaaggcattcgctgctaacctgcaagcaaggtacactactctaagtggtaagatcgaaaggttacggatggacaagtttagcaaaaagaaaggctgtgaagtgctgcagaagaagttacaggatgcccagatcagggccagagacttacaattgaatgaaaacaacatgattggggccaagagggccgaacacaacaagagagaactgttgaaatgggagtcgaattcccaagaatacaagatccaactggatgtcctgaaacaggaattcaaggcttcgcaaaaattttggatacacgagtgggcacaactatcttgcgaactacaagagatggagaatgccagaatctccttcttgcaatcgaaattacaacagttcgccacttcatccatggaaacgtgcattttagaacaaacaaagatggacatgttaaccacacacctgaattcatttacagctgcagacgatatatcaacgttctcgaaagaaaatgggaccggtagattgaaacataaaaactccaaggacgatatggcttccagtgccaactgggctcaaatgagcaacctgtccacaacaagtaagaagggtgagtcatatatggataatataaggaaactttcgtctcaactaaaggaaacggaaaataaaagaaaactagcttccataagcaaaccgttgccatctccagaagtgacaatggcaagacagttcagaaactccactcctgtcatacgcagtgagagcaaagctgtggcggaccccacactattcttacagtcttcgcctattcgaatacaaagcaccgtggaagaacccacaagaagaagtgagcctgtgatatcaacagcggttgaccatactgagcaattgaaaagggatgacaacacaagaccttctggagatgactgtccaaaggcacaccaaagagatagatcgataacgtcaccatcagaatcaagttcctctaatccaacagattttagtcacatcaaaaagagacaaagtatggaatccatgaccacatcagtgagttccatggctaatagcattgatgactcgcaaaggtttgccaagtcctggaactcaactaataggaagaggaaatcaatgagccatttgcaagtgcccacatacacttcgaggtccgacagtgaagaaagaacgtctagtttcgaaaataatcgtgacggacctgattacaacataacaagagacgccagtgcaagtacgattcttttcaaaccccccgtatcacagagaggaatgtctaagggacatacccatagaaaatccatgatattgcaaggctcaagtaatccgatcgaagatgcattatacgaaatggaaaggatccaaagtagctctaagccgggcgggaaaacaggaaacgttatgaccgaaagaggcatggtaagagataacggcatcactgttacattgcctatcgttactagtgaaggcttcccagttattgaatatgccaaggccatgtatccgttagttggaaacgaggcaccagggctggccaatttccacaaaggcgattacatattaatcactgagatcgttaataaagactggtttaagggtgaggtctacaataatgaccgaattgaaagagatcacagagtagggttgattccttacaacttcatacaactgctacatcagggaccttaa

SEQ ID NO: 3189 - DNA, 480 bp, Saccharomyces pastorianus
atgggtgtttatttaggcgcgctcttttcgttattggtcattgaaatggccatactgtttgttttggtgctgccactgccacagcgtgtgaggaagtggttatacctacgctatcatgctgtaatttccaataagaaatccaggacatatataatggtagtcacgatattggtggggctcttgttcatcgattcgtggaagagagcacagataaaagtttctacgtaccataatccgagaaacccttacgtaacaaatagtgtcaccccggtgaatgcactggctgcaagggcatacaaccaaagaaatgtttacatttcagggttcatcatttatttctttatatgtatactcaccgtgatgagtatactacgcagaatagtagagtggaatgacaaagtgagaagtagagatgtcatcttaaaggcccagctgaagcaaaagcaaaaatacttgaatgatctgaagaagaaaatgtag

SEQ ID NO: 3190 - DNA, 3300 bp, Saccharomyces pastorianus
atgtttggagttagccgtggtgcatttcctagcgcaacgacacagccattcggctcaacagcgtcatcatttggtgctcaacagcagcagcaacaacaaccagctgcaaccacttccacctttgccttgggccagcaggcaaatacatcccaggcccctgcattcggtaattttggtaaccaaacttccaactccccctttggaatgtctggatccacagctgccaattccgctccttttggtcagactcaattgggttcaagcagtaacgctccaggttcgatgtttaccggaatgggcaataacacctcactttctgttggttcggcatccgctgtgcccaattccaacgcaggtacgagtgtcaaaccttttactacgtatgaggagaaagatccaacaacgggcgtgaccaatgtttaccaaagtatcacctgtatgcctgaatacagaaacttctcttttgaagaattgagatttcaagactatcaagctggaagaaagtttggcacggggcaaagtggctctagtactacttttaacaacccacaagctactacaagtacagggtttggaatgatggggaataataatcccagcacttctaccacgggtggactatttggccagaagccggcaaacggcatctatggagctggttcaggcgggggcttcggttccggtgctgctaatactgcaggaatgttcggaagttcaactagccttgcaggtaattcgtcgttcggagcaaacaaaactgccacttctggagggctttttggtggcacggccaatccaacgaataacaacaacagcacaggcctatttggacaacagaatgcaaacgcaaacgcaagtccatttggccaacagaattcatttgtggcaaataatatgaataacgaaggtgcttttggtcaggttagtcgtggcgccttccccccacaacaagcacaacagagcactggtggtctatttggtcaatcaaacaacaccacaaatggcggtgcctttggtcaacaacaaaacgctagtagcggtttgtttggagcaaaacctgcttctagtggcctatttggacaatcaggtaataccaacacgtatggagtaaacaataatacgaatagtgctgtatccggtggcttattcggccagagtaaccagcaacaaggcggaggaggactattcggtcagaataaccaaccccaaaaccagacaggaatgtttggacagcaaaactcgtcaaattcatttggtcaaccacagcaacaacaaggtggcctattcggaagtaagccagcaggcggactattcggacaacaacagggagcatccacttttggggctaacaacactcaaggaaattcttcattcgggcaaagcaaccaacagcagcaaacaacggggggattgttcggacaacagaacaatcaaccacaaccgcaatctggcgggttgtttggacaatctaaccaaggccagaccaacaaccaaccatttggccaaaacggtttacaacaaccacaacaaagctctagtcttttcggtgcaaaacccactggtttaggtactacaggattattttctaacagcgcagcaaaccaaaatggtggcctggctggaaataattttcaacagtcatcaggaggtctattccaaaacaaacaaccggcctcaggaggcctgtttggcgcgaaaccagcaggctctgtcggaggcggattgtttggaaatagtcaaagtgccaatcaaaacaataccgctccaacagggtctctgttcggcaacaagcctgctacaaactctctattcggtggtgcaaataccacagccccaagtgccacttcaggcggattatttggacagaataatgcctctagtacagccgctacttcaaattctaccggcttgtttggaaataaaccagccggcgttggagcatctacacttggtggaggactgtttggaaacaataacagttcatcaatgaacaacgccattggttcaacaggtttgtttggtaacaacaattcatctcaacctacgaatggtgggggtctatttcaaaacagcaccggcacgaatatttcaggtggaggattgttttctcaatcttctcagccaaccacgcaaccgcaaaacatgctccaacagcaacaacagcagcgacttcaacaacagaatagtaatccatatggtaccaatgaactattttctaaggccactgtcgctaacatagtatctggcccaattcaaccaaatgctacaaagatcaaagctgatgagcgcaaaaaagcaagtttgtctagcgcttatagaatggtgcccaaaacattatttgcaactaaactgaactcgaataatgttgtaattgataaaaccaagactaatgccgatgcaaaattttatatttcacttggtaaaaagaataaccaaactacaatttccaaccaacaagaagaaactttagacgaaagcatctcgaaggctaatttattattcaaccccgataaaagatcatttaagaacctgatcaacaataaaaagttgctaacggcaactgaggaaaagaaaaaaggactatcgagcagcagcagcagtaaaaatagtaacagcgaacagagaatgataccagcaatgctacaggtagatgaaaaacaaactacgagcagcggtaacccctcaactctgccttcaaaatccatagaagatcaaaacagtaccaagagtcaactaaggagtattgatgaagaaaataaggagaatattattaattcaaaaaccaaaaaatattcagaagacaataaaaaggtaattgacgttggagttactgagaaggatgcttccttcataaatgaagattattatatctccccatccatagacactctttcctcttactctttgctacaattacgcaaggtcccacatttagtagtaggccatgagaactatggtaaaatagagtttcttgaacctgttgaccttactgaagtgcctctaacttcattaggaggaatcattatcactttcgagcctaaatcctgtataatatatgcgaactcatcaagcagaccgaagagaggcgaaggtattaacgttcgagctaaaattacctgcttcaattgttatcctgtagataaatctacaaggaaacctataaaggatccaaagcatcaattggtcaagaggcatattgaacgcttgaagaggaatccaaactctaaattcgaaagttatgatgccactagtggtacatacgtattcattgtaaaccatgctgcggaatacatgttttga

SEQ ID NO: 3191 - DNA, 2412 bp, Saccharomyces pastorianus
atggtaaagaacaataagatttccgagacgaagatctccaagaagagagcagccaatgaagaatccgatgttgagcaggatgaggacaacttcttatccgtcgatggattaattgatgccgagacaagcgagagtgacgaagagtatgaatccgctgtcgaagagaaggagtcgtcttctgatgaagaagccagtggagatgccgatgatgattcggacgctgaattaaacaaattgctagccgaagaagaaggcgaagaagaagagggttatgacagctctgaattttctgacgacacaacttccttaactgacaaattatccggcgtaaagttacataccattgctgatccaaatatctactcaaaatacgtagatggtagagacagagtcatcaaaccagagattaatcccgtttacgacagtgatgacagtgacggtgaaacgcaaaatactattggtaacattccactgtctgcttacgatgaaatgccacacattggttacgatatcaatggtaaaagaattatgagacctgccaagggttccgctttagaccaactgttagaatctatagaattacctgaaggttggaccgggttgttggacaaaaattccggatccagtttgaatctaaccaaagaggaattggaactcatttctaaaattcaaaggaatgaacaaactgacgatagtataaacccatatgaacctttgatcgattggttcactagacacgaagaggttatgccgttgaccgctgttccagaacctaagagaagattcgtcccatccaagaatgaagctaagagggttatgaagatagttagagctatcagagaaggtcgtattattcctccaaagaaattaaaagaattgaaagaacaggaaaagactgaaaactaccaattcgatttgtggggtgattctactgaaactgatgatcatgtgatgcatttaagagccccaaaagtacccccaccaactaatgaagaaagttataacccacccgaagagtatcttttgtcaccaaaagaaaaagaagcttgggaaaataccgaatacagtgaaagagaaagaaattttctacctcaaaagtatgctgccctaagaaaagttcctggttacggtgaatccgtcagagaaagatttgaaagatctttggatttgtatctagctcctcgtgtccgtaagaacaaattgaacatcgatccagattctttgattccagaacttccctctccaaaggatttgagacctttccctatccgttgctccacaatatacgctgggcacaagcgtaaagtacgtacactatccattgatccatctgggttatggctagcaacaggttctgatgatggtacggtcagagtatgggaaattttaaccggtagggaagtttacaaaacgactctggtcgatagtgaagaaaacccagatgaccatattgaatgtattgaatggaaccctgacgctaataacggtattcttgccgttgctgttggtgaaaatattcatctaatagtaccaccaatatttggttacgatattgaaaataatggtaaaactaaaattgaagatggtttcggttacgacacttttggtactgttaaaaagtccaacctagaagtaaacggagatgacgatgataacgaagaaggtaaaaatgatacttccaagaatgctgtgaaaaagcaagtagcccaatggaacaaaccttctcaagagcagctggaaaaagatatctgtatcaccattacctgtaagaaaactgtcaagaaactttcatggcatagaaagggtgactattttgtcactgtccaacctgactctggtaatacttccgttttgattcatcaagtctccaagcatttgactcaatcgcccttcagaaaatctaagggtatcattatggatgccaagttccatcctttcaaacctcaactatttgtctgttctcaaagatacgtcaggatttatgatctatctcaacaggtgttggtcaagaaattgttgcctggtgcccgttggttatccaagattgatattcatccaagaggtgacaacttaattgcgtcatccttcgataagagagtgttatggcacgatttggatttggctagtacaccatacaagacactaagataccatgataaggccgtcagaagtgtgaacttccacaaaaaactgcctctattcagttccgccgctgacgatggtactatacatatttttcatgccactgtttatgatgacatgatgaaaaatccaatgattgttccattgaaaaaattaaccggccataaagtaatcaacagtcttggtgttcttgatgctatctggcatccaagagaagcttggttgttctctgctggtgctgataatacagctcgtttgtggaccacttag

SEQ ID NO: 3192 - DNA, 1506 bp, Saccharomyces pastorianus
atgcgccacatctttttgttagtagtttgcattagatttgtttcaagttccgaaatagggaaaatcaataatcaactacaggaaagactggtatacgcagacaatttggttgcgacaaacgttttagagtccaaattcccatttttaaaatctacatgtgtcaaagatgcgctaaaaaggtatttaccacaatgcatggcaaacggatttgagtccattgatacagaaactagagtagaaacggccataaaactttccatatgcgagtttcaggcatctggccttggtgaagtgcctgccaattgcatggtcggcaatctagattcaatgatggattgtatgttcgaactggaatcatcttcacagtggtggacgacctatagtggaaattaccagcggctgtcaagtatctgttacgaaaacgttcttccgtttgaaaaggaacaaatcttaaaattgtttttgaatatcactgaactatatgactcattcggagatgatatcaatattaaattacatgatttgatgtttcaaatggagcgagaatctgaaaatcatttaaacgatttggctacgatgttccatgattatgacagtgaactgcgaaatatgacagacaagaatcgaataatcctagaaaatgacctccatctttttagaaacaaagtcagtgatatcttttatgatacttcagaacaattagaagttcaaattacagaaaaaaacgaccagctgttgaatgaagttagtactatccatcatatcatgagcgatctagtagatgagctgaataaaaacgatatcaaactgaagattaaagatttgaaagacgaaaacataaataatttacaagacctggtggaaatgtcacacgatatgagacaatactattctagaaataacgagctggttaatactgagttagagaattttttgatgggtttaaagacgcaattgggcggcatgtcgagagatctttctgaatcacaaatggaagctatagacctattgcaaggatttaactccatccttcatgattcattgttaccttccatgacgaacgaaatagtacccgagatgataaactttaaaaacagtgtactgcaagaatggacagtaataacgtctacgctgaacgaagattttgccctttggaatgaagagatcttcggcactttcaatgaaatatcggaaaagctaaatggaacaaaagagaaattggatgatattgatgtcaggatctcgcatattcataagaatattatagcactaatgaagatctttgatgtagtatggaaagctgggagaacagctatgaagtacggatgcgcttcgcttaaaaacaaatacagctggttagtgtgctgtgccgtttggagttggtcaagatattccgtatcatggactaacatcaagaagttcccccccaagcgtttttaccaatggggggccgtgctcctatcgatttacctaggagccaggaccggatcattaataagtttttga

SEQ ID NO: 3193 - DNA, 552 bp, Saccharomyces pastorianus
atgaacacttacagtctactgaccaggtccttccaccaatctacaaagcctctcttcaacttgaccagcaccttgttgaaagcctccaagagaacgcaaattagaaatgagttaataaaacaggggcccaagaggcctacctctgcttatttcttgtatttgcaagactacaggggccaattagccaaggaaaacccaaccttgcgccctgccgaactaagcaagatcgccggtgaaaaatggcaaactttggaggcaagtttaaaagataagtacataacccaaagaaagcaattgttttctgaataccaaaaggccaagaagatcttcaacgataaactgcccccaaagaaacctgctggtcccttcatcaaatacgctaacgacgtccgtactgaagtccttagccaacaccctgagacttctcaactggacttgatgaaaattatcggagataaatggcaaaatttggatcaaggtaccaaagataaatatactcaagaatataaaaaagctcttcaggagtataacgctagcttcccgctcgaatga

SEQ ID NO: 3194 - DNA, 3837 bp, Saccharomyces pastorianus
atggtaaaaggagccgtgagtaagctgaagttcaagtcacctataatatccacttcggagcatctgatatcaacaaatgaacttctagatcgtttgaaggctctacacgaagaactggctgctttggatcaggataatgccgacttaactggactggacaaatatcgagacgccttggtcaatagaaaacttctaaaacataaagatgtggggattcgtgcctttactgcctgctgcctgagcgatattctaagactatatgctccagatgcgccttatacggatgctcaactaacagacattttcaaattggtgctctcccaattcgaacaactgggtgaccaagaaaatggctatcatattcaacaaacttatctaattaccaagctactagaatatagatcaattgtattaatagccgacttgcccagttcaagtaatttattaatcgaacttttccaaatattttacgattctaataggtgtttcccttcaaggctttacaacgttattggcggtattcttggtgaagttgtctctgaatttgattctgttccactagaggtattgaaattgattttcaataaatttctaacctataatccaaacgaaatccccgaaggtttgaacgttcgttccgattgtggctacgaggttagcttaattttatgcgatgcttattccaatagaatgagtagacatctgaccaaatactactccgagattattcatcagggagccagcgataataatgattctagaacactcactgtgatagcaaaactacacaaactggttttaagactttgggaaactgttccagaattaatttctgcaataatcggatttatttatcatgagctatcttcggataacgaactattcagaaaagaagctactaaactaatcggtcaaatacttacctcatattcggatctgaatttcgtttccacacacactgatacgtttaagacttggatttctaaaattgctgatattagtcctgaagttagggtccagtggacagaatcaattcccaatattttaactacaagagatgatatatccaaggaactcaatcaggctttggcaaaaacatttatcgattctgatcctcgtgtgcgtagggcttccgttatgatctttaacaaggtccctactattgaaatatggaaaagcattaccaataaagccatttatacatcattgctacatttagcccgagaaaaacataaagaagttagagatttgtgtataaacactatggccaagttttattcaagctcattgaacgaagtcgaaagaacttatcaaaataaagaaatctgggaaataatcgataccataccatccaccttatataatctttattacatcaatgattcgaacattaatgaacaagttgataatgtaatttttgagtatctactgccctttgagtcagataaccataaaagagtccatagaatattaacggtattatcgcattttgataagaaagcatttacttcgttttatgcatttaatgcaagacaaatcaaagtgtcatttgccatgtccaaatacattgaattcagcgaatatttgaacgatcaagagaatgcaaactcatctcaaggaccattgatattgagcaaatacaaccaaactatccaatggctagcgtctggtctgcctgattctataaaggccattgattctctagaaactataaaacaatttaatgataagaggattttctatttgataaacacctgtatcactaacgatattccatttgccactttaaaaaactgttttaatgaattaattaataaattacaaacacccggattattcaagaaatataatatatctaccggggcttctataatgccgcgcgatattgccaaggtgattcaaattttgctgtttagagcttcaccaataatctacaacgtgtctaatataagcgtcttgttgaagcttcccaataattcctatccaaagcatttaaatttaaagaggaaaattttggatgatatttcaaaagtcaatcctaccttattcaaagatcaaatcaggacgttgaagacaattatcaataatttggatgatacagatgcggaaaaacatgataccttgacactagaagaagccctaaagacgttatacaaaacttccaaaaccctaaaggatcaggtcgactttgaagatacgttttttttcactaaactatacgactttgccgttgaaggtgaaccagaaattgctaaatactctacaaaactaattgctctatcaccgaaagcggaagaaacgctaaagagaataaaaactcggatcctgcctttagatttgaaaaaggacaaacatttcacatctcatattatagtccttatggaagctttcaaaagcttcccccatattttaaatgatgattcaactgatatcatatcatacttaatcaaagaagttttattgtcaaatcaagtcgtgggtgattcgaagaaggaagtcgattggatagaagattctttattagatgaatcgaaatattctgcaattggtaacaaagtttttactttaaaactgtttactaacaagctgagatcaattgcacctgatgttcttcgagatgaattagcagaaagttttactgagaaaactatgaagttgttcttttatttaattgcaagtggtggtgaattaatatctgaatttaataaagaattctatcccactccaagtaattatcaaacgaaattgagatgtgtggcaggaatccaagttctaaaattagccaaaatttccaacttaaataactttattaaaccttcagaaattattaagcttgtgaatttagtggaagatgaatcattgccagtaaggaaggcatttttagagcaattgaaggattatgttgctaatgaactaatttcaattaagtttctacccttaattttctttactgcatatgaaccagatatagaattaaaaacaacaacaaagatatggataaattttacgtttggcctaaaatcatttagaaaaggaacaatttttgaaagagtactgccaagattaatacatgcaatttctcatcatcctgatatagtagagggtttaaaattcgaaggtgacgcatatctgaatgctttgacaactgcaattgattatttgctgttttactttgattctatcgctgctcaagagaactttagtttattgtattacttatcagaaagggtaaaaaattatcaagataaactaattgaggacggggaagataatgaagatgacgaggaacaggaacaaaaagcaccaaacaagggcgaatctcgtggtgagaagatgtacataattggggaactctcgcaaatgattctattgactttgaaggaaaaaaggaattggcaacattcagcgtatcctggtaaattaaacttaccatccgatttattcaaaccttttgctaccgttcaggatgcacaattatcatttaaaacatatctaccagagaacttaactgagaaaatacaaaataacataagagccaaaataggacgcatccttcatacatcacaaactcaaagacaaaggttgcagaaaaggctattagcccatgagaacaatgaatcacagaagaaaaagaaaagagttcaccatgtgagaccaaagcatcacgatgatgaaagtgacgaagacgaaaaatcaggcagtgacaatgatagttattcgccttctaacaaaaacgaaaacagaagagtatacgagaatgttgtaaagaagaaattaagagtcagaaaggaaatagattacaaagatgatgaagatgatgatatagaaatggtttag

SEQ ID NO: 3195 - DNA, 2913 bp, Saccharomyces pastorianus
atggtcgccggctctcacactccttatgatttatcaaattctccatctgatgtaaatatccaacctgccacacaattaacctccaccttggttgaggatgacgatgtggatagtcaaatgcttgaggagacccaagtcgccgacacagggttccgctctgcatcagcctctgacaactcgtgcgcatactgtggtatagattctgcgaaatgtgtcatcaaatgtaattcatgtaagaaatggttttgtaacactaagaatggtacaagcagttcccacattatcaaccatttggttctgtctcatcataacgttgtgtcgttgcatccagattcagatttgggggatactgtgttggagtgttataactgtggtcgtaaaaacgtgtttttattgggatttgtctctgccaaaagcgaagccgtcgtggtactgctctgtagaataccttgtgcccaaactaaaaatgcgaattgggacactgaccaatggcagcctttgattgaagacagacagcttttatcatgggttgctgaacaacccactgaagaagaaaaattaaaggctcgtctcataactcctagccaaatatccaaactagaagccaaatggagatccaacaaagacgctacgattaacgatatcgatgccccagaggaacaagaagcaattccacctttgttattgagataccaagacgcttatgaataccaaagatcttacgggcccttgatcaaactagaggctgattacgataagcaactcaaagaatctcaagcgttggaacacatttccgtctcatggtccctagcactaaacaacagacatttggcttccttcactttatctacctttgaatcaaatgaactaaaagtggctattggtgatgagatgatactttggtactctggcatgcaacaccctgactgggaaggtcgtggttacattgttcgtttacctaacagcttccaggatactttcacattagagttaaaaccaagtaagattccaccaccaactcacttgaccactggttttactgccgagtttatctggaaaggtacttcttatgatagaatgcaagatgcattgaaaaaatttgccattgacaagaaatctatttccggatttttgtattataaaatcttaggacatcaagtcgttgatatttctttcgacgttccattacccaaagagttctcaatcgcaaatttcgcccaattaaattcatcccaatcgaatgcagttagtcacgttttgcaacgcccattgtctttgattcaaggccctccaggtacaggtaagactgttacttctgcgacgattgtgtatcacctttccaaaattcataaggatcggatattagtctgtgccccatccaatgtcgctgttgatcatttggccgctaaattgcgtgacttgggtttaaaagttgttagacttactgccaagagtagagaagatgtagaaagttcagtctctaacctagccttacacaatttggttggacgtggagccaaaggtgaattgaaaaatttactgaagctgaaggatgaagtcggtgaattatctgcctctgatacaaaaagatttgtcaaattagtaagaaaaacagaagcggagattctaaataaggcagatgtcgtctgttgtacatgtgttggtgctggcgataaacgtttagataccaaattcagaactgtattaatcgatgaaagtactcaagcctcagagccagaatgtttaatcccaattgtcaagggtgctaaacaagttattttagttggtgatcaccaacaattaggcccagtcatattagaacgtaaggctgcagacgccgggttgaagcagtctcttttcgaaagactgatctctttaggtcacgtgcctatccgtttagaggtgcaataccgtatgaacccttgcttaagtgagtttccaagtaacatgttttatgaaggtagtttacaaaacggtgtcacaattgaacaaaggactgttccaaatagtaaatttccatggcctattcgtggtatcccgatgatgttctgggccaactatggtagagaagaaatctctgctaacggtacctctttcttaaacagaatcgaagcaatgaactgtgaacgtattattacaaaacttttcagagatggtgttaaacctgaacaaatcggtgttattacgccctatgagggtcaaagagcatatattttacaatatatgcaaatgaatggttcattggataaagatttatatataaaagtcgaagtcgcctctgttgatgcattccaaggacgtgaaaaagattatattatcttatcatgtgtccgtgccaatgaacaacaggctatcggtttcttacgcgatcctcgccgtttaaacgtcggactaactcgtgccaaatacgggttagttattcttggaaacccaagatccctagcaaggaatacactatggaaccatttgttgatacatttcagagaaaagggctgtttagtcgaaggtacattagacaacttacaactatgtactgtgcaactagttcgccctcaaccaagaaagactgaacaaccgataaatccccaatttaacatggaatcagagatgggtgacttcccaaaattccaagatttcgacactcagagtatgatgtcatttagtgggcaaatgggtaatttcagtagtgcatttgtcaataattctgagctttcatcttacattaataatgattattggaattttgaaaattttaaaagcgctttttctcaaaagcaaaaccataatgaaatgaacgatggaaatctctaccaggaggaaggcccccgtttggattcgaattttgcaagagaattacaaagagaagaacagaagcatgaactttcaaaagactttagtaatttggggatttaa

SEQ ID NO: 3196 - DNA, 1686 bp, Saccharomyces pastorianus
atggaaccgttagacgagacagcaaatctgcttcccgctcctgaggaagcagaagtcctccccctggagcaaaaatatcacgagtacaatttggccttaccaaagtttcccattctgttttcgttatggctgggtagcttcctgagctccttggatagtactattgtcgcaaatattatgaatagggtggctgaggaattctctgaatccagtaaaaaacaatggattgcgacaagcttcctcctaacgaataccgctttccaaccattgtatggtaaactttccgatataataggtagaaggcctgcgctattaaccgctcagtttttctttggcctgggatgcctgttgacatgttttgccagaaatgttacgggattctcaatagctagagccatatgtggtattggtgcaggtgggttgaatgccataagtagcattgcagttagtgatatatgcacggcaagagaaagaggtgtttatcaaggatatgcaaatattgtttttgggtttggtcaattgttgggtgctccgttgggtggtgtattcattgagactattggatggagagcccttttcggtgttcaagtacccatgataattctgtgctcgatattagcaatcaagaacattaacattaagctatttcatgtgcctcctatgaaggaaaggtatacattaaagaacttatcacgcatagatatatttggttctttaagtttagtggccaccatcagcggcgtgctatttttgtgctctagtcacatgaataagatttacttagcactgtttaccattggcagtttcattgtatttgtacttgttgaacggtattacgcaacagaaagaattttgcccttcgaattattgacttggtcattctgtttaagttcggcggtaacagttatatcttcgtttgttgtatttggtgagattttcaggtcaccaatttatctacaactactccaaaatattagcgttacaaagactggtttgtttttgattttcccctctatatcagttgcggtaggatcattggtaacaggatgggttttgcggaatacgaaaatgaacctagctcactgtgcataccagatcatttttggcggcatggttacgcagttattgggtttgggtttgggttatttgttgctgggacacctgtatcccgactatactgtttacgatatgcttgagtctatcacattcaaatcgcattccatatggtggaaattgatctacgtgtttgcgtcagtgttagtgtcatttggctatgcatgtttattggtggccacattagtaagcattgttttcactgttgaaaaatctcaacaagggactatgaccggtgttttttacttatggaggtccattggtaacgtccttggtgcgtccttgactttagtgtcctatgaaaatagcttgtcgtccatgttatggagctatatgtttgagagagagcgtgacgacggataccatttcactaaaaagcagtactactctctcattaatgattcaagctacttgagaaagcccaatttcccaacggatgtttttatccgaatcttagatgtctacaagaaagcatttttgatttcctatctcccaaatatagcccttgcagtagtgggaattgttttatcactatatttggtaaaacatacgtttaaacgtactagtacttga

SEQ ID NO: 3197 - DNA, 2484 bp, Saccharomyces pastorianus
atgtcaatgctaatacattcttggtcgaggatcgcggtcaagatggctgtaaggcctatttacatccggccctattacggtttgacccaaattaagagtttgcatacccactaccggctaagcaataggctgcaggataataaaagtaacagaaaaggtagaaggagcaacagagacgctgagttcaacagaggaattcccacagacgaagaagtcgaggcgataagaaaagaagtagaaaaatatatcgaggaggccaaaaataatacaataccggctaattggaaagaccaaaaacgcaaaattgacgaaagcatcaaacgtctagaagatgccgtattgaaacaagaatccagccaaaaggaaaaagaggaaaaagaagaagaagacggagggggaaaggaacctctgaaagcaaaaccaagcaaaactagcgaacaagggtatttcgaaggtaataatagcaagaattttccacctcctccacctcctcctaaaccacctctaaatgaccctagtaatccagtctcgaaaaatgtcaatctatttcaaatagggttaactttcttcttactttcatttttattggatcttttgaatagttccgaagaacaaagtgagataacgtggcaagactttagagaaaaactgctgacaaagggttatgttgccaaattaattgtcgttaataaatccatggtgaaagtgatcttaaatgacaatggcaaaaaccaacccgataattacggccgtaattactattatttctcaattggatccattgatagctttgaacacaaacttcagaaagcacaggacgaactagacattgataaggactttcggatccctgtattatacgttcaagaaggcaactgggctaaagctatgttccaaatcttgccaactgttttgatgattgcaggcattatttggttaacaagaagatctgcgcaagctgcaggcggtagtcgtggggggatatttggtttaagtcgttctaaggccaaaaaatttaacactgaaacagacgtcaagatcaaatttaaagacgttgcagggtgcgatgaagccaaggaagagatcatggagttcgttagctttctgaaagaaccttcccgttatgagaaaatgggggccaagattccaagaggtgcaatattatctggtccaccaggtaccggtaaaaccttgcttgcgaaggcaactgcaggtgaggccggcgtcccattctattttgtttccggttcagagtttgttgaaatgtttgtaggtgtcggtgctgcaagggtaagagatttgttcaaaactgcaagagaaaacgctccttcgatcgtgtttattgacgaaattgatgctatcgggaaagctagacaaaaaggtaatttttcaggcgctaatgatgaaagagaaaacacattaaatcaaatgttggtggaaatggatggctttactccagctgatcatgttgttgtcttggctggtactaataggcctgacatccttgataaagctttattaaggcctggcagattcgataggcacattaatattgataagccagaactggaaggcagaaaggctattttcgctgttcatttgcatcacataaagcttgctggagaaattttcgacctgaaaaatagattagcagctctgactcccggattttctggtgctgatattgctaacgtttgtaacgaagccgcattgattgctgcaagaagtgacgaagattcagtgaaactgaaaaattttgaacaagccatcgaaagagtcattggtggagtggaaaggaaatccaagctactgtctcctgaggagaaaaaagtggttgcttatcacgaagctgggcacgctgtatgtggatggtacttgaaatatgcagaccctctcttgaaagtcagcattattccacgtggtcagggtgctctgggttatgcccaatacctgccaggtgatattttcttgttgacggagcaacagctaaaggacagaatgacaatgtctctgggtgggagagtttctgaagaattacacttcccctcagtaactagtggcgcctctgatgatttcaaaaaagtgactagcatggccactgcaatggtcacggagttagggatgagcgacaaaatcggttggatcaattatcaaaagagagatgatagcgatttgacaaagccattttcagacgagacaggtgatattattgactccgaagtgtacagaattattcaggaatgtcatgacaggtgcacaaagttgctcaaggaaaagacggaagatgtagagaagattgcccaacttctgctgaagaaagaagttttgacaagagaagatatgatcaatttacttggtaagcgtcctttcccagaaagaaacgatgcctttgacaaatacttgaacgattacgaaacggaaaaaatcaggaaagatgagcagagaaaccaaaaagacaacgagcttaagccatctacagactga

SEQ ID NO: 3198 - DNA, 1302 bp, Saccharomyces pastorianus
atgtcagattcggataccagtttggcttctgaagttgaacaggagaagcggtcaagatctaccagtaacagacccaattatgcaattgacacagaagatttaaatatcgatgaaaatgatgagagtgaggatgatgattacaaggaagaggacttcaatgaaggaggacatgaggaagaaattagtgatgatgaggaacatataagtaaaagtggaagaagcaagagaaagcgcatagatgaagaggaggatctatccgatgaaaaagacggaactagatctaggagtcgttccacttccaaaagacccctgtttccagggattgatgacattgacgaaagcttaaaccctttaccggtagtcaatgaggaatatgttgtacccgatgatccagaaggcgaaactaagataactgcagatggtgatctgttgggaggtagagaatttttagtgcgtactttcacactaaccgaaaagggcaaccgtaagtttatgctagccacagaaccagctagaatagtgggatttagagattcatatttatttttccaaacccatcctaatctttacaagttcattttaaatcaaactcagaaaaacgacctaatagatcgtggcgtcttaccatattcatatagaaatagacaaattgctctagtcacggctaggggtgtgtttaaagagtttggtgccaaaattattcgcggaggtaaaaatataaccgatgattactatgcttccgaattaaggactaaggggaatgtaattgaagggacgcttgttggcgatcccgttgaaaaatctgctagagacctagagactatattgtatccggttttagaaaatggtataaatccggcaaaaaaccaagtggaattttttgaacacagacctcatggacatatgagtaattctaatattattgcgtcaggtagtaagttgagttcgacaaattggttatatcagcattctgcagcctgtagtaggtttaacagtgatctgttttatgatagagtgaaggttctccttgtagatcaacaaggtctaagagacgcatatacaaatacgttacatataccagaatccacacaatcgactactattctagggtggaagagatcgaagaacgttaacgctggcgacaccagcattacatatgaaaccatcatacacgatagtgatttgaataggcccaagaccggactatcggggattccaaaggagatctatgaagatgttgttgacgaagacgtactgaaggctatcggtgaacaacaggatttcgaaaagtccaataaataa

SEQ ID NO: 3199 - DNA, 1836 bp, Saccharomyces pastorianus
atgaaaagattctttctaccgtctttccctgttcgaagaatatatagaattaatatacccaccggtataatctttaagcaaaggcctttagttcttcagagtcgtggcgcaataagtcactattcaacacaaaggcataacgacaaagccaaggaaagtgatgaaagctactccgctacttccacccctctagaaacaccttggtatctaaaaattgttagtgatgaaaaagcatcgatagaaagtaaaaaaaatgcagacgatccagcccaaaagacggtcgaaataccagatgactccccacactcactaaaacaaattacagattttttatccagtaaactaggtttgactgattttctggtttttgatttacgaaacaatgacccaaatcatatctctgccgttaataaattgggaaacttcatgctcatatgcacagcaagatctaccaaacattgtcataagagtttcttagaactgaacaagtttttaaagcgggaattatctagtaatgcttacgttgaagggaactttaatgaacgacaagaaagcagaaggaaaagaaggctggcaaggaaatcaaacctgagtaaattgtggggtagaagctccgaaggctccccaaaagatgtaaatagtgaggcgtggtatatgattgactgccacgttgacggtgtcttcgtcaacattctgacacagaaaagacgtgatgaactaaacttggaagagttatatgcacctgaagacgagaaatgcaagtttcgaaaaaaagaacaaaatgacgtttcctttaactcgaggaaggacgaaagtttagaagacaacaatatactttcaggattgagaaggctagcccagcaaagaagaggttattcaacttgtagttcaagcgaatggcatgacttacggaaatccctacagaagcaagatttccaagaggccactaagataatcagcggcattcgtgccaacgaaaagcataacatacgcattttattgttcgttaaagattgttttaaagatgccttagcccaagagagggatgtagatgttactcaatggaaatcactatttgatgttcattccactttgccaaccgtaaatcaagcggccttatactggccaatacggttgaattttgccatacttttaaacaaagcaaatccacaaatttattctgatcgtgtatttctcaaagactatctacttctgaagaaatcactagggcaggaattaactaggaacgatcttattgcccttttaaaaatagttttaaaaaccaagcattcgaatcactcatattttaatcttgtaaagcagaatagggtgctaatgagtgggttggccttatttaaaggagtaaaatcagagacagatacttctgttgtgtatgatgaacaagtagtttctcttcttttggatactatggtaacagatgaacaagtgaaactaagatccttttatgaggcgatagatcacatttgtcagacttatggagacaatttaacaactagcatgattgtttcaatattacaggcgctagctaaaaccaaggattggataaaaatacttcaagtttgggaggctaagatacccgttgccgtgaacggtcgggatacaaggccgtggaatgaatttataaatattcttattcaaagtggcgacagtcatgttatatcaaagatcgtgaatgatggtcatctactgtggataagacgcctcaaggttgaaataactccggaattgcgtaattctattaaggagttattaaagactgctggattggagaattcttcgttagaagaatatttaatccgtgaaacaacgcactaa

SEQ ID NO: 3200 - DNA, 2535 bp, Saccharomyces pastorianus
atgagtatgacaaatatgccggaagttaaaacaagtacaagcaaggtgcgctctgagtttagtaactcctctaatgccaacggatctgaagaggagaggagatcgcatggtagcctagacgatcagtcttctaatgggttagatggttccagttcaaatgaaagtagaagtaaactcaaccttgaatactctgcagatattgaaccattgaagttcagaatgatgaaaacgaacaataccggtgacaagggtaataatgcggacaatggtacagattcctttatgaagctaaaagaacatttacaaagaggcaacactctaacttccaaccttagggctaatgacttttaccctttcaatgctattgacactgaacagtttgaaagctatttgagggagcctaaatatataaaaatgctaaagaggcgaaaaaacctcaaacagtttagaaggttatttctggcccaagaactaacggcatacgagggtgatacggccaccgccaccaccaaatcatcggaacccacttctaaagccatatggactacaaaattcagcctcgacgggaaattcatggccacgggcagtaaagacggtaaaatacgagtgtggaaagttattggctcgccggtggaaagagccgaattggactcaactgcagaatctaacaaagaagcacgagccaagtctatgcgtataaaacaacaggttagttcatttagcagtccaaaggaaaaacaattcctagatgctgctacggagaaatatgaagaaaaggaaaaactgctaaatctgtatgccccagttttccacccaacgccattccggctcttcaaagaacacacacaagatgttctggatttgaattggtccaaaaataattttatattgtcagcttcgatggacagaacggtaaagctctggcacccagacaggaaaagttcattgaagacgtttgttcatcctgattttgttacttgtgtagaatttcaccccacggacgatagattttttattagcggttgcttggatcataaatgtaggttgtggtccatcttggatgatgaggttagcttcgagtatgattgccaagatttaatcacctccgtcacattatccccggaggaggggaaatatacaatattagggacttttaacggatatgttcacattttattgacgaaaggtcttacgccgatttcttcattccatgtagcagatagacaaactcaggagcagaacgcacatgtcatgatcaccgagactgacccaaaagttcgccacggtccacgtgtaacaggtttgcagtcctttagatctcaactggatcattccttccgtttagtagccacatccaatgattccagaataagaatcttcaatttagaacagaggaaacttttagaagtactgaaggggttccacagtggctcctctcaacacaaggcacaattgtctatctggcatggtcagccgatcgttgtgaatagcagcgatgaccattgggtttacggctggaggttaaagtcttcagatagaggagccgaccaagacgaatccaagaagaaatcaaagggattggccaggtctggcagtttgagaagcatatttagtaaatccatgagtagatcgtccagtcagaacgccgaagaaaaaccacaccatttgcttcataataatcacttaaaacttagtaacctacttcccttgccgcaccacaacaatgataattgcatcaaaaatacagattacatttccttccatgctcataaggcacctatcacgtccgtcagcattgcacctccagaaacctcaaaaacattgtccttatctaatgatgttatctgtgaattgtctttagagttttttcagagttcggatagtttcgatgttctgagtctaactaacgatgattcttcaatctcggatacagaatcttctttgccttataactctaaaccaagctcggtgcctaataattcggtggctagcgcaatccctaacgtggttgatgcaattgggaccatactgatcagtaccgataacgtagggaacattcgtgtgtttagagcagatatgccatctgctataagaaagcgtgtgttgctcaaactacaagacttcaatagagaggtcaagaaacggttcaatagctccgattcgctacattcactaagtagaagcttcagttcaagaaccaaatctaacttaccgggccaatcttcgacagccacttacaacattggtgggaaagtctgtccaacaggccgtagctactctaatgtacgtccaaaaagtagtacttcattaaagaccctaggaagcagtctgcagccaaaaacaccaagacaaagcatgtcatctgttttctccaatggacacggacctactaccccgaaaagtgcgatgaatttagcaatacgttgcaatgtttgtaacggttcaagatttgaagcgttttctggtgctaatggtcagcaagatagaaactactattgtgtagattgcgggacagtggtcaacaacttcagataa

SEQ ID NO: 3201 - DNA, 2037 bp, Saccharomyces pastorianus
atgcatacgtggcgaatacctaaattcaaattggggaaatccaaagatgagagtgaaaacaatgtagatgaaaacaacgacaaatcgtggggtaatggtttatttcatttccatttgggggaaaagcatcacgacagtagttccatcagcaacgataatcaacaggaacacaacataagaaagactagtacaaatgaaacattgccaagtactttaaattctccaaagtttcgtgataatgcgtcctttaagaacttgtcgggagcagaaaccgtcaattcagcggctctagaaagtaaatcttgtcaatctaccgtagaaaaaaaagcatcacattcgggatctgggctgatgacagtgaaaatatattccggtaaggattttgctcttcccttcccaatcacttctaatgctgctattttgcaaaaattattgagctccggagtcttgagttcatcacctaatgacgactcggaagtagcggccatgatacaggaattgcctcgatacgaaacagtagagcaaggttcaatgggtgaaagtttgataaaggggacttgtgctaccaagtttataccttcaactatattgttaccaggatcagaaaatccaagcccactgctttattttacgcttgagtttgataattccattactactatcggacctgatatgggcacgatggaacaccctatatttaataaaatttccacatttgatataacaagaaagctgcaatttttgaaaatagacgtctttgccagaataccatctttacttttaccatccaaaaactggcagcaggagatcaatgaacaagacgaagcgttaagtgatattttgaagaagataaacacgaaccaggatattcttttggattccttccatttgccgttgaatttagaagttcattctgtacctcaagtaagactctataaccatcattggatttcgttggagaggggttttggtaaattgaatataaccgtagactaccagccttccaaaaacaacccactttctattgacgatttcgatctcttgaaagttattgggagaggttcatttggtaaagtgatgcaagtcaggaaaaaggatacgcagaagatatatgctttgaaggcattgagaaaggcatacattgtatcgaaatgtgaagtaacgcatacgcttgcagaaagaacagtcttggcaagagtagagtgcccctttattgttcctttgaagttttcgttccaatctccagagaaactgtatctagtgctagcattcattaatggtggcgaactattctaccacttacagcacgaaggacaatttagtctagctcgctcccgattctacattgcggaacttctgtgtgccctagattcattacataaacttgacgttatttatcgtgatttgaagccggaaaatatcctactggattaccagggtcatatcgcattgtgtgacttcggactttgtaaactgaatatgaaggataatgacaaaacggacactttctgtggtactccggaatatttagcgccggagattttattgggacagggctataacaaaacagtagattggtggacattgggcatattgttatacgagatgatgacgggattaccaccatactatgacgaaaacgttcccgtaatgtacaaaaaaatactacaacagccattacttttccctgacggattcgaccccgtagctaaagatctattaatcggtctcttgagcagggatcctaacagaagattaggcgtcaacggcaccagtgaaattcgcaatcaccctttcttcaaagacatttcctggaaaaaactactgatgaagggctacattccgccatacaagccgcacgtcaagagcgaaatagacacggcaaatttcgaccaagaatttaccagtgagaacccgatcgacagtgtagtggacgaatacttgagcgctagcattcaaaagcagtttggcggatggacgtatataggtgacgaacaattgggagactcgatttcacaacggaaaagctttcgttaa

SEQ ID NO: 3202 - DNA, 1605 bp, Saccharomyces pastorianus
atgtccaacactgattgcaaaattttgcgttacacggacctatctgaaatagatcaaaaaatccaagcctccaaggattgcttcttcgacaaacaactaaaactgtcccatgaaagtgacccaagaaagaaagatctacagtttaggcagctccaattgaaaaagctctattatgccgtgaaagaccacgaagaggaactgattgatgccatgtatcaagactttcaccggactaagctagaatcggttgcaaatgaaacaacaaaacttttgaacgatatacttcatctaatagaaattttgcctaaaatgatgaagcccagaaaggtgtctgactgttcgcctccattcatgttcggcaaaataattgtggaaaagatctcgaggggtagtgtcttggttattgctccatttaatttccctgtacttttagcgttatctcccttagctgctgctctttctgcaggtaatgccatcgttttgaaacccagtgaattaacaccacgcactgccattaccatggaaaaattgttaacaactgcaggttttccacgcggattaattgaggtagttcagggtggtaaagacgaaactacgaggttgctagattgtggaaaatttgacatgatcttttatacaggttctccccgtgtcggttcaatagtcgctgaaaaagctggaaaaagcttaactccttgtgtactcgaattgggcggtaaatcaccgacctttattaccgaaaatttcaaagccagtaacataaagactgctataaagaggattttctgcggtgcctttggaaattctgggcaaatttgcgtttccccagattatttgttagttcacaaatctatgtatctagaagtcgttaaggagtgcgagtctgtattgaatgaattctatccagatttcagtactgagacagatttcactcgcatgattcacaaagacgcttatgaaaatactatggagaaattgaactcaacaagaggaaccaagatttcaccagtgaaaagttctattggctcagatgccgcaagcttacatgttgtaccacctactgtagtttacgacattgattggaatgaccctttgatgaaacaggaaaattttgcacctgttctacctattatcgagtacgacaatcttgatgagacaattaacgagatattgaaaaagcatgacactccattagttcaatacatattctctgataatcaaacggaaatcaaccatatcttgacacgcttgaggtctggtggttgtgttatcggtgataccgtagttcatgtagctattactgacgctccgtttggtggaataggtaattccggttatggtaagtatggtggatttcatggatttgatgcttttagccacgaaagaacaatttttaaccagccatattggaatgactttactctctctatgagatatcctccaaacaatgaaagaaaagagaaattacttcgttttgccttggaaagaaaaccttggtttgatagaaatggtgacaacaaatgggggcttcgccaatatctctctctgtcagccctagtagtgctaattagtggcatttgcgcttgctgctcttcactattttga

SEQ ID NO: 3203 - DNA, 1401 bp, Saccharomyces pastorianus
atgcccgctcgagaatataattatgaagaaaattttggtggatatagctcattagatgaggatgattcagacagggactctgaacgtagacatcatgatccaaggcaccaggctgcagcaacaagtccagcaggtgcatcaagacatgctgtgctaaatagatacatggttccaggccgaaacatcaatccccttttcagaccgacaggccccgttcaaccttcagtaacacatacatcagcatcagcatcggcaacagattccacaactagatcagattctggaaggccgaaggagcctcctgaaaccaatttcaacgcatttcttatatcgcagctgaccaggatggaagagcagaattcgaacctaaaggaagaaatctgtttaatgaaaaaggaacaagagctttttttcctagaaaaccaaaaaaaattagaaaagggattcaaagacatcaacaagtatgtcgaggatgtttctgcgttgaaagaggtcttcaaagaggtagtggggattatgaccggggaaagaatacgatttatagatcacactggagaaaatgttactcctcaggaagctgctcgtattggaaatccgtcaactagcacgcaatctcatcaggctcactcaagactaacgaattggcaagaatacagcatgcacgcaagcatactggccggtgatcctcgtgtaaaacctgaaccaggactagctgactttgaagctggagaatacgatgaaggtcaaagtgatggtagcgttaatgatgagggcgttgctctcaataacccgagtatcatttataacaccaacgataacaacagtcaacaggaccatgacattgaaaacgggaatgaaggtaggaacagcgacagaaacgtcggaacgtcttatagactaaatcgtgcaattcaaaatgtcacagatgcagctcgtgaatatttcgaaggcttgcctggacaaccatcagtactttcccttgaaagaaggtacggttccacttggagacgatcagccaaagaaagaactctttttaccaagaggatgaccatcatcaaaagaataatagatataaaagaagatccaagcaaatatggtttgtcattgcctggtaataaaataaataggaaccaagctataaaagtggtagagaatattcgattaggcaataatacattcaagggtcaccattgtcgattatcgatgtctcaattatacgagtatttttccaaaagaatggacaaacttgaagattattcgttgactctaaaaagaagaggtaagccaagaaggatatttttattggaagaaagagaagctagactatcgctacaacaactaaacggagtaccaaataccagtactagtaccccagaaaacgaccatgtcactgaacgctaa

SEQ ID NO: 3204 - DNA, 1284 bp, Saccharomyces pastorianus
atggctatcgagttaggactttcccgtattaccaggctattagagcatttgggcaatcctcaaaagtcactgagagtgttgcacgtagcaggaacgaacggcaaagggtcggtttgtagttatctatcctctatattgcaacagaaaccgtaccaaattggaaaatttaccaccccgcacttggttcatgttactgattccattacgatcaataacaagccgatcccgctggatcaatatcgagatattaggctgcaactagaagctttaaacaatacacactctttgaaatgcacggaattcgaattgctaacgtgtaccgcattcaaatatttttatgatgtcaaatgtcaatggtgtgttatagaagtaggccttggcggtagactggatgcgaccaatgctattcctggttcaaataaagcatgctgtggtatcacaaaaatcggtttagaccatgagagctttttaggaaatacgttggctgaaatttccaaagaaaaggctggtataattacagagggagtgccctttactgtagttgatggaaccaatgataaaagtgtcataagtgtcgtggaagacaagtgtaaagttttggggtcgagactttacgttaccgatcccaaacttaatggaaatatcattgacacgaaggcatggggtgtcttcaacttatctgagctgcccctaaacggagaataccagatcttcaaccttagagtggctataggtatgttggattacttgcagataaacgggcttattgatattagtaaagacgaagtggctgcgagactaacggaagtggactggccaggtaggttacatcgtatggattactgttatgacccattgagtaagaagacattgcccatactaatggatggcgctcataacggctccgcagcaatagaattggccaaatacctaagaaaagaatacggagaccaagctttgacctttgtcatggctgtaaccgccggcaaaaacttagagccactgtgccagcctttgttgcgaccaatagatcgacttatccttacacagtttaataacgtggaaggcatgccctggattcatgccaccgaacctgacgagattaaagattttatcttgactaaaggatatacagagaacgtgacaattgaaggtaatttgcatcaggtactaccttctctggctcttacaacagaggatcaaagacgaccaattgttgtatgcgggtcattgtatttatgtggagaattgttacgtatccataaaaatcattcgaaagagtaa

SEQ ID NO: 3205 - DNA, 1503 bp, Saccharomyces pastorianus
atgcttctacgaaaaatgcatttgtcgcaaaggttaaacaagagacaattatttgccttgaacctttcagcgtggccaacgaaaccttctcatatacgcctcctacatgacataagaccgcaaacatcgaaattcaatgcgcaacagccggactcggtacctgggttcccagctggcacacctcctcgaccaccaataacaccccaatctagccccgccaagaataatcgtggcttgatgtattctttcattggcatttctatggtaggtttgatgctctggtacaaaagtaaatctaagaaacagaagataccgatcttagcgcaaagtgtctggaaagaagccatatggcaagaaagtgacagaatggactataactataatgaatcgttaaggcgatatatcgaaactttggaggcgtgtgatcgctttcatatggatccgttatcggacgattatacaagaatagagctaaagatcgctgaaatgtacgaaaagctaaatatccttgacgaggcacaaagcatatatcaagaattattaggccggtttttcgaagcactgaacgttcctggtaaaattgatgaaagtgagagaggcgaagttttaagaaaagacttgagaattttgatcaaatcgttagaaatcaataaggatatagaaagtggcaagaaaagattgctgcagcatttgctgttagctcaggaagagattctaagcaaatcccctgagctaaaggaattttttgagaaaaggaaaaagaagctctctatgataaaggatatcaatagagaccccaatgacgattttaaaacatatgtcagtgaagaaaacatcaagtttgatgaccaaggttatatgattttggacctggaaaagaatagcagcgcttgggaacccttcaaggaagaatttttcaccgctagagatttatacacagcttactgtttgtcatcaaaggacataactgcagctctaagttgtaagataacaagtgtggaatggatggttatggcagatatgccgccaggacaaatattactgtcgcaagcaaacttggggtcactattctatcttcaggcagaaaagctggaagctgatttaaatcatctagaacaaaagagaaagacagagcctgatcaggaattagatatgggaacatacatcaaagccttgcgatttgtacgcaaaaatcgggacttgtgtttagagagagcacataaatgttacgatagcgtcattagctttgctaaaagaaacaggaagattagattccacgtcaaggaccaactcgatccgtcggtcgcgcaatcaattgctttatctacctacggaatgggcgttttgagtttacatgaaggtgttttggctaaggcagaaaaactgtttaaagattcaatcacgatggccaaagaaactgattttaatgaactcttggctgaagcggaaagagagttacaaaagacaagcgtattgaaagcggccaagaaagaagaatcttaa

SEQ ID NO: 3206 - DNA, 1008 bp, Saccharomyces pastorianus
atgaaagaaaataagcttggcggagacaaaccgattcaactgacttcctggtcggaaaaaatggtgtcttcggaaaacagtggcagtgatgtacaggtcgttattcagaaagcttcgaagctaatccaacacttgaataatatcgggttgatgagtccaagagaagacgagcattcacagtctgcgtcttcgcaagagacactaagtattgataatgagcctcgtgaacaagacgattcgggtcttcttcaagcaaacaaaaatggcttaaaaaaaggagtcgacgtacattctggattagaggattccacgtatgttgaggaaaacatgttgaacgttttacagtcattagtttcgcacataaatcaagctatcaaccaaatacaacaattaaagttcaaaaatatgattcttgcttcgaatgagaataacctgcaatcaaggcatgaagtggaagataatcttcagaaacaacaatttgaaagaatgaagtgccaattcctattagaacataaaagcctgaaagatcaattacgaaagcgagacaataaaattgtcaaatacaaacagaaaatcattgagaaaaacaagaagctaaacaacctagctaaggtcctcaatcaacatgctatatcagacacatcgcaaatagatagttttagtagctcgataaagaaaacgccctcagtcacaaccacgccacaagaaatgaaaccggatatgttaaacactttaggaatattggccacacatgtcttgaaagacgaaatcgatgatgattctggaaatcaaacgattttacaactagcagcaggaagtataagtaatgattgtaacactacggaattggaaattacgtgcagccctgaggcgaggaaaactatcgtacacaatcggccaagtattaaagttgggctggttcaggattctcatgaaaataagactcttcgattgcctaagatgaaaagtttcagtaccattgatggtactataaaggatattaactga

SEQ ID NO: 3207 - DNA, 723 bp, Saccharomyces pastorianus
atgtctcacaaatcaacaattttaccatgcttgattaaattcatgcctatttccccactgcccctatccaaggatgatccttgttttaatgtctatgccttcgatttggatcatacgatcataaagccaaaatcgccaaattcaaagttcagcagaaatgcagatgattggcagtttatgagttttaattccaaaaaatcaaccctggactatctttttgacattattgaaaaagacccgatagctattatagtcgtattctcaaaccaaggtggtgtcgttgcggtcccaagaacctccaaaagttgtactaaatataccaataaaatttcactcgtgttaaaagctattaaatgcgacaaaaggggagattcactgttaagtagactgtggttatatgcggcacccaaaaggtcaaaggctctggtaacaaataagaataagtttacatttccaaggacaagtaaaaatgatatcgatgatcccaaaatttatgaaaaggttcgaaaaccaatgacaggaatggcagatttctttgaaagagatatacataatgcttacggagtttcagaatcaccgccaattactactaggctgaattggatatactactgtggtgatgccgccggtaggaaaaaagacttcagtgattcagataaaaagtttgctgagaatttaaacgtcgtatttaagtaccctgaagaagtgtttcaaggatgttga

SEQ ID NO: 3208 - DNA, 678 bp, Saccharomyces pastorianus
atgtctttcactgaggatcaagaaaaaattgcactagaaatattgtcaaaggacaagcatgagttttatcaaattttgagagtggataagaaggctacagatggcgaaattaaaaaggcatacagaaaattagccataaaactacatcctgacaagaatcctcatcctaaggcgagtgaagcattcaaaattattaatagagcgtttgaagtgctaagtaatgaggagaaacgtagtctttacgacaggataggaagagaccctgacgatagacaaatgccatcttctagaggcgccgcttcaggatttcagggaaacgctggtggttctccaatgggtggcggatttgaagacatgtttttcaattcacgtttcggtggccaaagagctggcccaccggaagacatatttgactttttgttcaacggaggtggcagtcccttcggtggttctccatttgggccttctgcttctactttttcatttggtggtccaggtggtttcagagtttatactaataatcgtggaggctcgccgttcatgcgccaacaacctcgctcaagacaacgtcaacagcaaacagaagaaaatgcggctaattcacagctgaagaatctgcttgttctttttattatcttcatcgttctccctatgattaaagattatttgtttggttga

SEQ ID NO: 3209 - DNA, 1548 bp, Saccharomyces pastorianus
atgctaagagtttgcgtgggaaggtcatgtgtaagagtcactcttccaagagtgtgtccagtgctgctgacaagaaaagcgatgattcatctaagcgccgggctaaatgtagagaccagtagtatagacaaaagtaactcaactaaaatacacgtcgatgtaaatgagctacaaaaacaagcagagattgaaaaagctgcaataaaggaattagaaaaaaatccccattaccaaaacctggccgaggcattcaatagccatgatcacgttcatttaagagaatcagagacagaacagaacgactctgtttcaatgggttcgatacgagactacaaaagcaaccataaagtggaacatgcatatgagccttcgccttcgccttcacatttgcattcacattcacattcccatggacatacacattcccatgctacgcataatccattattggtactcagcacagagcaaattagaaaaaacgcaggtgtaaggatcacatgggttggcttaggtgtaaacgttggtatcgctatagggaaatttctcggtggtattgtattccattcacaagcattgttcgcagacgctatccatgcaataagtgacatggtttctgatttattgactctactttcagtaggactagcagccaacaaaccaacctccgactatccatacgggtatgggaaaattgagaccgtaggttccttggcagtgtcgacaatattggccatggctggcatatcaattggttggagttctctgtgcgcgcttgttggacccgtaattccgcataccattattgaggccttaggaagcatgggtcatgcgcatacctattccgaagacattattgaagacgttactgatatcaacgctgcctggattgccgccgcctccattgcagctaaagaatggatattcagagccacaaggaaaattgccatcgatactaattcaaacgtacttatggcaaatgcctggcatcatcgtgttgattcattgacttctcttgttgctctggtggcaatcagcactggatatttagtcaatatacaatcattagacacaattggtggtttgattgtctcaggtttgattatcaaagctggtggtgagggtatgtgtattgcaatgaaggagttgattgatcaatcaatctcccatgatgatccacgttatttagagatagagacattagtcaaagacacgctgggcaaactgatctctaacaataattccaagaagccctacgggatgaaagaactgacattattatcctcggggcccaatctacgtggtcatttaactttggaagttcctttgcaaagatggggaaatactttaggtattaatgagtttgaaattgtatctcatcatttacgcgatgtattaactagtgatatatcaaatctaagaaggctagatattgaatacgtggaggaaaaggaaagtgaaggaaacgaagaaagcaagcaagttacaaaatcacaggattacagagaaatcattcttcccgaacataaccatgggcacactcatagttga

SEQ ID NO: 3210 - DNA, 825 bp, Saccharomyces pastorianus
atggctaaagtaaccgcggcttgtataattattggtgatgaagtgctgaacggaaaggttgttgatacaaactccacttttttcgctaaattctgctttgaccatggaatccaattgaaggagatagtaactataggtgacgatgaagctcaaattgtagatactgtgagaaggttagtcaactgtcatgactttattattagtacaggtggaattggccctactcatgatgatatcacttatgagtgcatggctagaagtttcaatctgccttgtgagttagatgaagaatgtaaagaacgaatgaggcgaaagtccgaccccgaagcaagattagatgctgatgctttgaaggcacattatcaaatggctaccatgccgaaggggcccaacgttcgaaactattatgtatgtgatgatttatgggtccccatctgttccatttcacacaaagtttacatactgcctggtatcccacaattgttttcaaaaatgcttaagggttttacgcccacgttgaagaaaatttataatctggaagaagatccacgtgaatatgtgcgttactttgttaaaacacggctaaccgagtcacaaatatctaaagagctaaaactgattcaagatgaatcaacggaagtctcggatgcaatcaaaatcggttcatacccgcattttggcatgggtttcaacacagttagtattttaggtgaaaagaaagacgatgcatacttaaagacagttgttagtagagttgtaaagaacctcgcgggggaagagatctctcctgaactagaggacaaattttccaatcaagagaggtga

SEQ ID NO: 3211 - DNA, 636 bp, Saccharomyces pastorianus
atgcgaggaaaacagccgaaaaggaagaaagaaaccacttctgccaatagaaactatagatgcatgggataccccgattgcaacatgagtttcaacagagccgagcatctggctaggcacatcagaaaacacacgggggaaaaacctttccaatgtaacatctgccttaaattttttagtagaattgacaacttaagacagcatcaatcttctgttcattcggacattgacctgatgtccctacgtagactgcagcaatcggcaatcaacattgcgaatgaacaaaactccacggcaagaatgttcccgcaactccgcccgtacggcatcgttgtccagcctgctacacatcctcacactattccaatagcgagccccgccagcgcacagaataccattgccctttacacttcaccgtacttcccgcatgccgttccctctgctccgatgacgttaccacaactccccccacccccaatatacggttacatccaaccactgttcctgaaccagctgccaatccagaaccgcaatatcgttgagctacccccagatatgagcgatacctcgacatctccgtcgagggtgcgaggtttcgatcatgtaaacgacgcttcgccagatgcaaagagctaa

SEQ ID NO: 3212 - DNA, 714 bp, Saccharomyces pastorianus
atggcccgtcaaaactttttaggcctggtcgtctcccaaggtaagatgcaaaagacggttaaagtgcgtgtagagacaaaagtgtttaataaaaaaattaataaagaattgttccatagaagagactacttggttcacgatgagggcgggatatcaagggaaggtgacctggtaagaatagaagcgaccagaccactttcaaagaggaagttctttgccattgctgagattatcagaaataaaggtcaacagtttgcgctatatgaatctgaagctcaattaagtgttgctaaggaggaaacacagaaggcaaaagaatttttggacaaaagatcagcaagggagagcaaatcggatgagaaaaccactctattacaagacattaaaataattcaagatgcgttatccaagggatctacgccgaaagagttatcagaaattaaagaaaggtacggtatcaaagagttttccccggaaaccgtaagagagctcctaaagctggatatatctgaactagaggtcaatctggagaaacaaaggggtgtgattgattctattcaatctcaaacgtctgagctattatcggatgatctgaaatgtaatcagtttctaaaagatcacggtgttgacgatcctttatcactaaagaagaatataaagaagaacctgctaagaaagcatgtcatgttggatctacaacaatcaagcctataa

SEQ ID NO: 3213 - DNA, 1758 bp, Saccharomyces pastorianus
atggctcccgtaccaatatatgtgaagggtggtgtatggacgaatgtggaggaccagattttgaaagcagctgtgcaaaaatatgggactcatcagtggagtaaagtagcatcccttttacagaaaaagactgccagacaaagtgaattaagatggaacgagtttttaaacccgaatttaaactttgctgagttttccaagcaggaggatgccaaacttttggaccttgcgagggaattacctaaccagtggaggaccattgctgatatgatgggcaggcctgcgcaagtatgcatcgaaaggtataatcgactcctggaaggtgcagacagtgatttgttgggatccacggacttgaaagtcggggacattaatcccaatgcggagacgcaaatggcccgtccagatattggtgacttagaggatgaggagaaggagatgcttgctgaagcaagggctcgtctgttgaatacacaaggtaagaaggctacgaggaaaatccgtgagcgcatgctcgaagaatcgaaacggattgctgagctgcagaaaagaagagaattgaagcaggctggcataaatgttgccataaagaaaccaaagaggaaatatggcacggacatcgattacaacgaggacatagtgtatgagcagtcccccataccggggatgtacgacacctccaacgaagaccgtcagatagagaagaaatttgagcagtttgaaaggaaggtcaaccggaggggtttgaatgacgatgaaggcaaatctaagaagaagtccaaggacaagaaaagaaaacgcgacgagagcgaatacctcgagaaggcggcacttaacgagtccaatatcttgactgacgagtacaagaaacccaagcttgtactgtctgcgccggggacaaaacaagggaagctgacgtacaagaacgaactggaaagcaaaagacagaaactcatccactcacaggcaacaggtactgtgctggtaccgaaggcacaatcccaccgcgagcctattcaagaagacgatgggaggagcaacataaaaagagaaaagcaggcgagatcccgtataagaaagttcctggtgcaaatgtttgcgtccttacccacaccaaagaacgatttcgagatcgtgttgagcgaggacgaggaagatgaggataaagagttagctgactaccaaaaggaaatggaaagcgagggggatatgaatgaacccaacacggccctagaacaaatgccagaggagcacatacagcccgtgtcactggtcgcggtagcattgtccggcacggcgctgcccataccagaatttaagagcacgccgcactcagcgatcgacgagaagtataatttgctggtggcgaacgccataaataaggagccacacatggaaccacaatctacagccgatttcctgaaccaggtggaatcacgcatgcagcaggtacctctggtacggtcgctccctcaaacacgtcggacgctgacgatgcctccaggtgagaccgtcctggcatcgatccagtccaaagtggagtccatcgaacaactacagcgcaggttagatcgtgtgcagcccctagcgctccagaacaacgagttgtgcgagcgcctctgccaccacgacctgccagccttggctgaggcgcaacgccagtactacaccgactactacgtctaccagcaggaactgcgtaccctcgaggcccgtagcaaacgtctccaggacacgtcggaccgtgtttccgtatag

SEQ ID NO: 3214 - DNA, 672 bp, Saccharomyces pastorianus
atggcgaaaaaatttttgatgctacatgggcttgcccagtctggggcctattttgcctctaagacgaaggggttccgaacagaaatggaaaggttgggttatgaactatactacccaacggcaccaaacgaattccctccagcagatgttcctgattttttaggcgaagtgattgctgatgcgcccactgatggcgacaacaatggagtgcttgcatggctagaggacgatcctgccaccgatggctattttataccacaaacaacaatcgactatctgcatgactacgtgttggagaaaggacccttcgcaggcattgtgggttttagccaaggcgccggtgttgctgggtatttagcaacagactttaatggcttgttggggcttaccgcggaggagcaacctcccctagagttcttcatggctttcagtggcttcagattccggccacaacagtaccaggagcagtacgacaggcatccaatatctgtcccgtctctacatgtacagggtgaactcgacactatcacagagccgataaaagtgcaaggcttgtaccaatcatgctcggaggactctcggactttactaatgcattctggaggccacttcgtgcctaacacgagaggtttcctgaagaaagttggccaatggcttcaggatgtggcctga

SEQ ID NO: 3215 - DNA, 3093 bp, Saccharomyces pastorianus
atgtccttaagctcttggaggcaatttcaactctttgagaatatccctattaaggatcctaattttggcggaaattctctattatactcagatccaaccctttgtgcagctgcaatagtggatcctcaaaccttgatcatagctgtaaactcaaacgttataaaagttgttaaactagaccagtcgcaggtaatacacgcgtttcaagcatttcctcatgagttccaaattactttccttaaagttgttaacggtgaattcttagtcgcattaggtgaatccatcggcaaaccttccttaataagaatatacaagttagacaaattgccgatcaaggaacaggcatatcattcgcaagtggaactgaaaaatggtaataacacataccctatctctgtcgtttccatatccaatgacctttcgtgcataatggtgggattcattaatggaaagatcattcttattaggggtgacatctctagagatagaggatctcaacaaagaattatttatgaggacccgagcaaagaaccagtaacagctctattccttaataacgattcgacggcctgttttgtagctacgacttcaagaattcttttattcaacacaactggtagaaatagaggtcgcccaagtttagttttgaactccaaaaacggattggatttgaactgtggagcctttaattcagctgccgacgaatttatttgctgcttgagcagcttcattgaatttttcagtgctactgggaagaagcatcaatttgcatttgatttatcatcgagaaagaaaatattttgtgtagacaaagaccacattttagttgtcactgaggaaacagccggtccatctacatcaattaatgttaatgaactatctcccacaataataaaccgagtatttatcattgatactaaaaataaaataatttcgctcaattttgttgtttctagtgcaattattgacatcttctctgcagcccaaagtggcaaaaacatcacatatctattgacatctgaaggagtgatgcacagaataactttaaagcctttagaaaatcagattggtattatcattcaaaaagagctctatccgtttgctttgcaactagcgaaacaatattcgctgccatcgttggacgttcaaaaaattcacaaaaaatacggtgattacctattcaaaaagggccttaaaaaggaggcaacggatcaatatatccagtgcttggatgttgtggaaaccagcgaagtcatatcaaaatttggtgtaaaagaagttcccgatccagagagtatgaaaaatttggccgattatctgtggtctttaatcaaaaactctatttctcaatgcgatcacataactttgttgcttattgtcttaataaaactgaaagatgtagaaggaattgaaacattcattcagcattttgatagaaatggcaattggaatgaagagattgtaaaagacgatatggatgatgtaacgtttttttattcggataacgagttttttgatttggatttgatattagaacttctaaaggagtccgatttcaaacgcctttcttatcaacttgcaaagaggtattcaaaggattcattgattatagtggatatcttattgaatttgttaaataatcctctaaaggccataaaatatattaaaagtttacccattgatgaaactcttagatgcctcgtgatatattcgaaaaaattattagaggagtcgcctaatgaaaccaatgctttactaatcaaagtgtttactggtaagtttagaccaacgaattttgaagtagaactagaccgtagagacaccacaagtgatttttctgaaaacatcaggacagtattttacagttacaagacctttttcaattatatgaactctaatggaaaatccgacgtgatgagcgagtcttcagacacatcaaacgaaaatgaagagcctacctaccatccaccaaaaccatccattgttttcagctcatttgtttccaagccttttgaatttgttgtgtttttagaagcctgcttggcatgttaccagcagtatgaggggtttgatgaagatagacaagtcattttaactactctatacgacttgtatttaaatttggcacaagaggatgttcctgaacgtattaatgattggcgttcaagagccactggtgttttaaacgaaagtaacaaattggtgaatttcagtattgcttcgactggaaaaaatgtcgataactcgctaatgttactgatttctcacatggataaaagtagctcttcatcaaaaaacaatactaatgacattaatatagcatcgtgtgctcatgataactccgagatggatttactaagtacatttagggctatgacactaaatgacgaaccaaatacgtgcctaaattttcttcaaagatacggagcggaagaaccgaagatcctacaagtggcgttgaattactttgtttctaataagtatatcttcaaggaaatgggtggtaacgaagcactgaaggaaaatgtcttgagacctattatagaaggagaattgatgtcattgcttgatataattaaagtactttctcgtacaagtgtggctcacttcgggctgatacaagatgtcattattaactatgtaaaaaacgaggacgtagaaattaagagaaatgaaaaattgattgattcttatgacaaggagctaaacgagaaaaaggagaaactaaagagtttgatcaactcagatcaacctatccacgtacccctgaagaaccaaacatgtttcatgtgcaatttgacattagatattcctgttgtctttttcaaatgtggacacacctaccatcaacattgtctcaatgaagaagaagacactttagagggcgaaagaaagctgttcaaatgtcctaaatgcttagtagaattggaaacgtccaacaaactttatgaagctcaacacgaagtaatccagaagaacgatcttttggactttgccttgaacagtgaagaaggaagtaaagaccgcttcaaagttgtaacagaatttttggggagaggtgccatcagctattctgacatcactatcgaatga

SEQ ID NO: 3216 - DNA, 474 bp, Saccharomyces pastorianus
atgaatagtggaggtaagaccgttatgaacaagaactcggcaggctcggtatctgaaactggcgcgggcccagcacaggaagacacccctagagacgtgcgtcttctgcatttactgctagcatcgcagtcgatccatcaatatgaagaccaggtgccgctgcaactgatggactttgcacataggtacacacagggcgtgctcaaggacgccctggtctacaatgattacgccggcagcggcaattctgctggtagcagcctaggtgtggaggacatacggctggccattgctgccaggacccagtaccagttcaagcccacagcacccaaggagctcatgctgcagttggcagccgagaggaacaagaaagccctaccgcaggtcatgggcacatggggtgttaggctgcctccagagaagtactgtctcacagcgaaggagtgggacatcgaggacccgaagtctgcataa

SEQ ID NO: 3217 - DNA, 1041 bp, Saccharomyces pastorianus
atgatgttttgcaaattactgacaccttactcggtgctatcgattttgaatgccggcgtgctcaaggcgacgacagcggcgccatcgcccggcatccaaatgacggaaaatggagacgaaaatcatcatgagcacgtcaagcgtggcggaacatgtgattttccaaactacgacgggatggtcgcagtgcagaaaggcggcagcaatgccgggtgggccataagtcccgaccaagagtgttcgcacgggacatggtgcccctacgcgtgccaaccgggccaactaatgggacagtgggacccatcggccaccacatacgcttatccgaagtgccaaaacggcggactatactgcgattccaacgggaacctgcaaaagcccaacagcggcaacgactactgctatgacgggaaggggaccgtggtggcgaagaacaccgccggcggcggagacgtggcgttttgccagaccgtgctgcccggcaacgaagccatgctgatcccgacgctggtcgggtccggctcacagcagacgctggccgtgcccgggacggactactgggcctccaccgcatcgcactactacataaacgcgcccggcgtgagcgtggcggacgggtgccagtgggggagctcttccagcccgcagggcaactgggctccgtacgtggcgggcgccaatatggacgagaaccaaaacacgttcgtcaagatcgggtggaacccggtgtacctggagtcgtcgtgccccttcaaggacgtgaagccgtcgttcggaatcaagattacgtgcgacgacgagtcgcagtgcgaggggctgccctgctcgattgacccgagctctaacggcgtcaacgaggtgtcgagctctggcggcggtaacttctgtgtcgtgacggccaagaacggcgccaaggccaacatcgaagtgttcgacagcggctcgtcgtcgtccaagaagaagagagaggtgggcgcgcccaacgtcagcaccacaacggtcacccagatcgagtacagaaccgttacggttattgcctag

SEQ ID NO: 3218 - DNA, 1104 bp, Saccharomyces pastorianus
atgccaggtaaatcgctttgtaataaaaagggcgagttcaagggactaccatcaatcttccgagagacgatttctcttgaacacccgatctacaagcccgctaaggggagatattggttatacgtggcgctcacatgtccctgggcgcacagaactttgatcacaagagccttgaaagggctgacttctgtgatcgggtgcagcgtcctgcactggcatctggatgacagaggctggaggttcgttgaagcgggagatggaaagaaaaccgatgagaggaactggttcgacgtcgcaggcggtatcacctcaacgggactaaacaatatcacgcccgcagcgggcgtctccaatggcgcgcacaggctcttgacggacggcacggacgaacctcactacgggtacaagaggctaagcgacctgtacttcaagagcaagccggactacgatgcgaggttcagcgtgcccgttctgtgggacctgaaaacacgcacgatcgtcaacaacgaaagcagcgatatcatcaggatcctgaactcgtctgcgtttgacgagttcgtcgaagacgaaccccgtcacctcaacctgctgccccagtccctacagccacagatcgaagagttcaactcatgggtgtacgaaaatatcaacaccggcgtctacaaggccgggttcgcagagagcgcagaggcctacgaaaaggaagtggccaaccttttccattaccttgacaaactggaaaccctgcttcgcgagaaatacgcacgactagaggcggagtacggccaaagcaacaaggacaagatcctggctcggtatttcgtcgtcggtgaccgcctaaccgaggcggacgtgcggttgtacccaacgatagtaagattcgacgtggtctaccaccagcacttcaagtgcaatttcgccaccatcagaggcgggtatccccatatccataagtggctcagaaacatgtactggcgccacactgccttccaacgcaccacggactttaaccacataaagctcggatatacccggtcgcagctacggattaacccactaggcatcaccccgctaggacccaagcctgacatcatacctctataa

SEQ ID NO: 3219 - DNA, 612 bp, Saccharomyces pastorianus
atggagaattcgaaattgcttatcactttggttctagtgtttggaggtatatttctcaggaaattcttccaaagtaatcagcatccctcagcgcaacgtttatcctctacgggagtaaacgcacatgggcgcactcaaggccctacccatggtgctctgagaagggcggggaggactaatggtggccaccccgtgaccactcagatggttgaaacagtgcagaacctcgcacctaacttacaccccgagcaaattagatatagtttggaaaatacgggttcggtggaggaaacagtggaaaagtacctgcatggcgacgagttcagcttcccacccgggtttgagccttctagggcgccaatgggcgctgccggtggtaataacaataacggtactggtggcggcgaattcaacgacccaagaaagaagaatatgatctgtgctgagaatctactggacaaattccatgtggaccccaatgaagacatgggccaggtgagtttcaaagacctggatatcgaagagagaaagaagttgctggtttggcaggccagaaaaaatatggaaacgaaactgcaaaacgacaaagatttgcagagcttgttgaattga

SEQ ID NO: 3220 - DNA, 1098 bp, Saccharomyces pastorianus
atgagtgattccgacgaagaaggtcaaattgaaactcagatcgatgttccgatcgaagatatcatagagggttctgaaattgctatcacgacagctgataaggagactttaaaaatggcaaacgaactactggactctttagagcactcacatagagtcgatctttccttgcatttatactctgcgtaccttttgaaaagactattatacagggcaaatgagagaaagcacttttacgaagtaaaccaatttgtgaagacccaaattaaggataattggacaagttggcccaatcccaacacgatcattgaccctcacgtggataaattgtacgaagatataccggaaggtattgaaaacgtaaacatacagcctggagaggtttcagacagagctttggttcatgcttctgatatgatgagagtggaattggatgctcagtggcaaaaatgtctttccaaatcagctttcgagcatggtgtaacggtagatgtagatgaactgaacataccgaacgaaatatcccgaaatattctagttaaactggatagtctattcgagggactgcatgataaaatagcaaaggagaacgaatttgacgtaaggcaggacatgcaatctaacaatataaggatatgtcagatagacgacgagcccatccaggccaatcgacgaatcaaattcacataccacgacataatatcgagaggttgcgaaatgaatgaagatatgacagatatatatatgaaatcgttggaattatacaacgatattccagaaaagttcaaaaaaggaaagtttaaattacctaagcagacgttaaaaaagtataaccagcccaagaagactaattcatgtttgaaagagttgttaagcaagacaagagaaaactacatacctgtggaaaagttgctaaaggacaaaaggttgacatcaaaagataaatccaaactacaacaattaaatcgtaaagaaactgaagatgctttaaacaagaggacctttttccaagtcaaaggctattcaatggatgaggatgagctctctgattacgacttggatgactgtctcataaaactgcccaatgacaaagcctga

SEQ ID NO: 3221 - DNA, 2931 bp, Saccharomyces pastorianus
atggttaaggattctaatgagcccgggttttcgccgaaaaagaggcctctgttgcgtcctcaacggtcggattccacttcaaacactacggcaactggaaattccggtgcaggcacaagaggtcgtggcaggcagaaacagaacgctgtcaaaggtagttcgaggtcaccatcgctgcattctccaaaatcgtggatcagaagcgcgtctgcgacggggattctcggattgagacgtccggagctggcgcactcgcactcgcactcgcaggctaatcctgctgctgctactgttggtatgaaccattctccgctgagaagggctactgcgaacgcgacgcccgttgacactgggaggtcctggacggatggagacattaacaacgtcgtggacgttcttccctcctttgagatgtacaacgccttgcatagacacatcccgcaggggaacgtcgacccggacagacacgacttcccgccttcataccaggaggccagcaatacgcctacaactggcggtgcggcctcgagcactgatctctcgcatcaactgttgtccactaacgcattgggtgccacgccttcatcatccacatcgaatttggaaaacttggttcccctccgaacagaacatcacagcatcgcggcacagcagcccactatcgttgatgaagatctgttggacgcggctcccatactcgacgatctgaatgaggcagacagcattttcatcgataaactgtacactttaccgaagatgtccacgcctatcgaaatctgcataaagacgacgaagcatgcgcctatgccgcacgtgaagccggaagaagaatcgatcttgaaagagtatacgtcaggcgatttgattcacggtttcatcaccattgaaaacaagtcgcaaacgagcttgaagttcgagatgttctatgtcactttggagtcatacatttccatcattgacaaggtcaaggggaaaagaaccatcaagagatttttacgtatggtcgacctgagtgcttcttggtcatactcaaagatcgcgttggggtccggtgtagacttcattccggcagacgtagactacgatgattccgtgtttggcctaaacaatagtcgggtcttggaaccaggagtcaaatacaagaaattctttatcttcaaactaccactgcaactactagatgtcacttgtaaacaggagcatttctcccattgtttgttgcctcccagcttcggtattgataaatatagaaataattgtaagtactctggggtcaaggtcaatggtgtcctcgggtgtgggcatttgggtaccaagggctccccaatcttgactaacgatatgtctgacgataatctttccatcaactacactatcgatgcaaggatcgtcggcaaggaccaaaagacctctaaactatacatcatgaaggagagagaatacaatctaagggtcattccctttgggtttgacggtaatgtcgtcggggaaagaaccaccatgaatcagttgaacgatctcactaggctggtgcaagagagattggacgccctgaaaaaagtatttgaaaggttagagaagaaggaacctataacaaaccatgatatacacggtgcagatttgagtggcagcattgatgaatttatagaattaaattctcaagaaatattgcaaaggaaattggaccaactgcatattaagaatagaaatgactacttggtcaattacaacaatttgaaactaggccacagcgccgaaaataaccgtactggaaatagtagctatccctctgatccttccagaaattgggtttcctttgttgaaagtgaactgaagtataaactgaaaaacaaatccaactccacatcgtttttaaatttctcacattttttgaatggcagttccagctcaaattccacttcttcgagtactacaaagaataaacatgacctgacaagtaacaacgaaaggacggggttgatactggtaaaggccaaggttcctagacaaggtttgccatactggtcaccttcgctacttagaaagacgaatgtttttgaatccaaaagtaagcaagaccaagaaaactgggaaagattgtccgagttgatccctgatgatgttaaaaaaccactggagaagattgatttacaactaacttgtatcgaatctgataatagtttacctcacgacccaccggaaattcattcaatcaccacagaactgatatgcataacagccaaatctgataattctattccgatcaaatttaactctgaattattgatgaacaaagaaaaactcgctgggatcaaagcgctgtatgacgatttccattcaaaaatttgtgaatatgaaaccaaattcaataaaaattttcttaaattaaacgagttatacaacacggaaagagggaaccgcaggctcaaggaattgaaatttaccgattttgttacgtcacagctgcttaatgatattgaaagtatttgtaacttgaatgttaacgttcataatttatcaaatattttcaaaaaacaaattaacactttgaagcaacatccgaaacgcgtatcatctgaggactcaatatcgcatacaggtaacggtaattcgtcgtcacccaattcagcatctttaactccggtaacgtcttcatctaagagtagtttattcttgccaagcggcaactcgtccacttctttgaaatttaccgaccaaatcatccataggtgggtcaaaattgctcctttgcaatataaaagagacattaatgtaaacctggaatttaataaagatatcaaagaaactttaattccaagttttgagagctgcttatgctgtaggttctattgtgttcgagtaatgattaaatttgaaaatcatcttggtgtagccgtgattgatattcctatttctgttaggcaagtgtga

SEQ ID NO: 3222 - DNA, 2199 bp, Saccharomyces pastorianus
atgaccacgcagataaggtctcccgaaggcttgccgtatcctattcagatcgataaactcatccctagcgtaggctcatttcttcaagaaggggacagattgctcgtttacaagttttggtatctggtcgaaaggccctctgataccagcgatgatgataacgaccacgactcttctcctggcggcggcggcggtggtagtgtgtctccgccaaccaaacaactacgtgaatcgatagagttcttcgaaagcccctacgagggcgatttgataagttggaacgtagacgtgggcgacgaaatagccactgctaaccaagttatctgtgaaatcaaaagaccttgcaaccacgatatcgtatatggtggtctgtgcactcaatgtgggaaagaagtctccgcggatgcgttcgacggtatgccattggacgtcgtgggggacatggacttacagattagcgaaaccgaggccatcagaacagggagagccttaaaggagcatttacgacgggacaggaagttgatcttggtcgtggatctagatcaaaccatcatccactgtggtgtagatcccaccatcgcagagtggaaaaacgaccctaataatccaaattttgaaacgttaagggacgtcaagagttttactttggacgaggaactggtattaccactcatgtacatgaccgaagacggctctgtacccaaaccacctccagtaagaaaatgttggtactatgtcaaagtaaggcctggtttgaaagaatttttcaccaaagtggcccctcttttcgaaatgcatatctacacaatggctacacgggcttatgccttacaaattgccaagatcgtggaccccacgggtgaactgttcggtgatagaattctatcgcgtgacgaaaatgggtcgctaaccacaaaatctttagctaaactgttccctaccgaccagtcaatggtagtggttattgatgacagaggtgatgtctggaattggtgtccgaacctgattaaagttgtcccttataatttcttcgttggtgtgggtgatatcaattctaatttcttacccaagcagtccgctggaatgttgcaactaggaaggaaaacgagacaaaagagtcaagaatctcaggaattgataacagacattatggataacgaaaaacaattacaagaaaaaatagataaagaagtcaaacgccaagaagaacaactgaaccatcaattggctactgcagaggaaccttctgcaaatgaatccaaggaagaattgaccaagaaactagaatactcagcatccttagaagtccaacaacaaaaccgacccctggctaaactacaaaaacatttgcatgaccaaaaactactagtcgacgacgatgacgaactacactacctgatgagtacattatcaaacattcacaacacgtactatcaaatgttatcacaaccaagtgaaccagagccaaacctaatggaaatcataccaagtttaaagcaaaaagtctttcaaaattgctattttgtcttttcaggtttaatacccctaggaaccgacatacaaaggtcggatatcgtgatatggacaagcacgtttggcgcgacttccacctctgatttaaattacctaacaacacatttgatcactaagaatcccggtacttacaaggcacgtctggcgaaaaaattcaacccagatatcaaagttgtccatccagattggatattcgaatgtctggtgaactggaagaaagtggatgaaaagccttacaccttaatcgtggatagccccatttctgacgaagaattacaaagtttccaaaaacaattacaaaagagacaagaatatctggatcagcatcaagaacagcagcatatgttaatgccgcaagaaaatacaaatttattcgctaccggtacatcgtggctgaacgacgacgacgacgaagatattccggatacagccagcgatgacgacgacgataatgaccacaacagtgaaactgatgatgaaaaggactcaggagacattgacagaaagagaggtatcgaggacggtcttgatgaagcaccacagaagaagaccaaggcagaacattcacaggaagacggtcctgcacaacatgaagaagagggagaaaataatgaagatagcgactcacagttggaggaagagttaatggatatgctggatggctag

SEQ ID NO: 3223 - DNA, 4245 bp, Saccharomyces pastorianus
atggcaaatagttctgatcggcagggcttggagcccaggattattagaactctgggttcacaaacgctaggtggccccaatgctcctcataaatcctcaaatacagaggcaaatcctacgttttccgaaaattcaaatgaagcgttgatcaagacaacttccccgacccctttatccacacctatttataggatagcccaagcttgtgataggtgtcgatctaaaaagacaagatgtgacggaaaaaggccacagtgttcacaatgtgctgctgtcgggtttgaatgcagaataagcgacaaactgctaaggaaggcgtatccaaaaggatatacagaaagtctagaagaaagagtgcgtgaactagaggcagaaaataagagattgttagcaatatgtgatatcaaagaacagcaaataaacctcgtttcacagtcacggccaccaacatctttggataatactgttaacgataattttaagcaagagttgaaagacgcgccattgaatttgtcttctgcaaacatttatctattaaaccagactgctaataagcaactccaaaatggtaaagttgacaataatcgtagtgattcgactatgggtttactggcaacgtctcctccactgtcacacaaagaccatgtttgtgatggtgtttcatgtacaaacaatctgcatgctaagcctacttccacgagtttgaacgatccaaccgtcatttcattcgaacagaatgaagctccaggcctccccgctgtaaaggctttaaaatctatgacaactcaccaacgtagcactcagttggcaactttggtttctttatccattccaagatcaactgaagagattttattcattccccaactcctaaccagaatcaggcaaatctttggcttcaactcaaagcaatgcctatatacggtatcgttgttgtcttcattaaagaataggttgccagcgccaaaacttttgttgtcctcaacttcaacaaaactaaaagaaaacgatgattcagcatttttgaataccttcgaaacaacaagtcttgctgagtttgatgatttaaaggagtttttaatctctttgaagtttgacattaattcattttcaaaccaacaaccaggaacactgaatggcaatcccaataatgacttactttcgttgaacgagatcaaagagcttctacatctgtttttcaagttttggtcaaaccaagtaccaattttaaacaatgaccatttcctattatatttcaataattttgttgaagttatcaaagatttacctttggaaattaaaaaagctaatagcggcactaacactcacgcaaccaccaaccatcaaatatttgccttgaagctcatagtaatgttacaaatggggttgctaatcaagattaaaaaagagaaaataaaagataccgtgccaaggaacctgaatgcaaagtttgccaaattattagtgtattatcatgagatctcctcaatcattccaaaaaatccgtacttcttaaacatgtccacaacttcccttccatctttacaattgttatccttgacgtcgttttatttcctaaacgttggtgatattccggcaatttacggattgagaggccgtatagtttctatgtcacaacaattaaggctccacaggtgtcccagtgcagtattaagtgtacattctaatccagttctacaaaaatttgaacaaagtgaaagaagattactattttgggcggtttattatattgacgtttttgcatctttacaattgggtgttcctcgtttacttaaggattttgatattgaatgtgcgttaccaatatctgatgttgaatttgaggaccagttagcctcggaaaatgaaaaaacaaagaacaaaactaagaagattcaattgcaaggtcaggtttcgagtttttcgttgcagataattagatttgctaaaattttggggaacattctggattcaatctttaagaggggtatgatggatgaacgcgtcacctctgaaatagcattagtacacgaaaatgcactggataattggagaaatcaattacctgaaatgtattatttccaaataaccgtaaatggaactgtgaatttagacgatataagagcaaacaactcaagaaacaccgaaacaaaatttgacaggaaggacataatttgttttgagaaaaaagtattattattgttttatttcttagcgaaatccatgattcatttgcctgttatcgcaactaagcctttgcccaaaaatgttgacaactcaaccaaaaagaagcactcgatgttcaataatgataataaaagtattaatagccaagatcactcagtagtggatgtcgatatgacatcccctgccataagaacatcatcttcatacatcattttgcaacaagcgacaaatgcgacgcttacacttttccaatccattaattcaacttacttaccgctacctttgaacgtttcgagaactttgattagattctcgttattatgtgctagaggatctttagaatatactaaaggtggcgcgttatttttggataacaagaacctccttttggatactattaaagacattgaaaatgacaggcttcttggtttgcccggagtcgcctcttggcatacactgaagttgtttgacatgaccatcaatttacttctaaaagcacctaatgtaaaagtggaaagattagataagtttctggaaaagaaactaaattactataatagattgatgggattgccgccaactacaactacatcgtcggaaccacttttctgctctcaatctaagaatagtccagatagtggatcaagaaactctatcgtgaaaagagaaaatcctgaaaatgagtatctctatggggatgacacagacatggataagccatcaacggagaatgcacacaacgtgaacaagaggctaaagcatgaaaaagttattagccaaaccataggtgatgacaatatgtctaaaaaccaaaccgtatcaaagtttcagcaggatagcaagaaaaatatgtctactagcaatttgtttcctttttcatttagtaataccgaccttactgcattgtttacaaatcccgaggggttgaattttgcggacactaatgattatgacagaaatgatggtagtaaaacttctatggatgcggtagataccaatattggaaacttgagttttttgaatatggctccgtttttacaagcaggcaacgcaaaccaaaacgtagatgataacaaggtcgcggacaaaaatgcaatatttagctttccaagtaacttggatctaatgaaagatagcttggactctaaactagaaatttcaagttccactactaaacaaaattctgagtttctagacaatgatcagctaccaccgacaggtagagatgttagtatggaaaagagcaatccgattttcaataacaaaagcaattatagtctgacaaagttgatgagactgctaaacaatgataattccttttccaatattagtatcaacaactttctttatcaaaatgagtcttcaaggaatgatccagctaacaaagcagccaccaaagttagttcaaacttcaacccagcttctactgctagcaatacgagtcgaagcagtatcacaggaaacaaaaaaaatggcatggataattgtgatatcaacgattttggcaacttcaataatttcatgacaaatgttaattattctggggtggactatgattacatagtagacgcatcacttgggctggctcctttactagtggatacgccggatatttcaaatactaacacaacatctacaacatcaaatcggagtaaaaacagcataatattggatccaacgtttaaagatgacccggatcgattgcgttcaaatgcaagggaagtattgaaccccacagattcaattttaagccaaggaattatgtcttcaataagccccagaaccaccagcaaccagagatccctatcatctggtaattattcaaaaagcaatggtaattctcggaagaattcaaagaatgcgaagagtgaccaatcagatacaccttccacgcttttcaaaatgaaaagaacgtcgtcaagctcttccacatcccaccgtggcccaagacgccctccgaagcatcgttacggtacagatcaatcaaaaagtcccagtgacgtaggtcccagtgcggataatctaccagacttattccaatggcaaaacgccaggtag

SEQ ID NO: 3224 - DNA, 909 bp, Saccharomyces pastorianus
atgtcgaggcgtgtaaaagtatgtttctcaaagctgcttttcaaaatcaccaaattagcaatagttttaaccgtactatacatttattttacgcccaaaattctttcccggaatacagattcgttgcagcatatttttccccacaggagtagcaactctcaaatcaacttggtcatagcacaccctgatgacgaagtaatgtttttctcacccgttatctctcagctacatgcgtacttcccggacaccgtcccatttaacatactgtgcttgtctaagggtgacgctgagggtcttggggacacaagagcaaaggagttaaacgattcggccgttttgttgctacgaaatgaaagacctgtctcggtacaagtcatgaattttgaagacggtatggacgaagaatgggatatcgattctataacctctactctttcgagaactatagaggtaaacaacgaggagctgtaccaaattatcgtgacttttgattcatatggtgtatccaaccatatcaatcataaaagttgccatatcgcggttgagacattcatgaatgattacgttcggtccaaggctaaggaaaatggaaaaaacgctcatatcgcagcgctatacttgagaagctacaagaacaatatctttttgaagtacaactcttttatttgggaaatcttgaaaatgctttacagcacagtttccccatttggtaaatccattcagccgctcccgccctcaacggcaaccgaaaaagatagtctattgctgatgaatacacattcacagtatattttggcgtatgcagccatgttgaatgcccataaatctcaggttgtttggtttaggtatggatggtggattttatcaagattcgtttttgttaatgaatttgacgtttttacatattaa

SEQ ID NO: 3225 - DNA, 261 bp, Saccharomyces pastorianus
atggtgttttacaaaatcacattaagcaggtcactcattggcatgccgcatacgacaaagagcgttgtcaaaagtttaggtctgggtaagaggggatcaatagtatataaaacagtgaacccagccatagcgggatcattagctaaagtgaaagagttggtcacagtagaggttacagagcataaactaacaccacatcaacaacgagagttgagaaagtccaaccccgggtttgtggtagagaaaagagccattatttaa

SEQ ID NO: 3226 - DNA, 1755 bp, Saccharomyces pastorianus
atgactaccagcgcttctgcctcccagttacaaaagcgtctgccagaagaaaaaccttggccccaactaagcggctgcaacgaagatgctcaagccttcaaatgcaaatacgtcaccaaccataactccttgggtgatgggaatttcagtgtcgtcaaggagtgtatgaacgttcaaacaaaggatttgtatgcgatgaaactgattaagaagcaaaccgttagaaacaaaatccagcttatccaaagggaatttgacctgttaaggtcgataagcgaaaaaatcagagatatggagaagaaaaacgagcactccctggacatttttgaaggacaccaccatatattacagcttttcgactactttgaaacagcggataacatcgtactgattacccagctgtgtcagaagggcgacctgtatgaaaaaattgtcgaaaaccaagctctagacctccagactcaggtcacgtcatactgtgcctgtatagtaagcattttggagtttttgcattcgcaaggtattgttcacagagacttgaaagcggaaaatgttttatttagattaagagtaaacgaaaacgaaaaaaacctgcagggtgaacatcatggggactttaagtacgatcttttggcccatgacctggtccttgccgatttcggccttgctgctgaatacaacaccacaaagatcaactcgctgaaggagtttgtcggtacaatctcgtacattgctccggaaatcgttaaatgcaaaggtgtcggtgatatgtctactgaccaagtgggtgaactagagaaatatggctgtcccgttgacatatgggccctcggtgtcttgacatacttcatggctttcggctacactcccttcgactgcactacagatgatgagacattggagtgtatttccaaatgcgattattacgtcgacgagcaaacgatgcacgaccccaaatatgaacagttttggaacttcgttcaatgttgtttcaccgtcgatcccgccgttaggcgctccgccacaaacttaaaacaccatcctttcatcaaggattattttgctacttcaaactctttacacaagaaggataccacgaatttcgtattcaacccgacgataagaagagtatcttctacggcgtccatgcacactttaagatcgccatcgaaatcgagaaaaaccaccacactggcttatttaaacatggacggcgggtcctcagaaacttccactgcttttaacagcaagatggacttgcctgacctttacgttgatagaaccatcaattcccgtgaacgatcactaaacagaattagagacactttgaagaagacattatccatgacttctttgaagcccgctgcgacccatgaatttctccacgctaacaagagtggcacttcatcctcatcaaagtctgggctcgtgaaaaagaattctacgtttgttctggaccctaagccaccaaaaaatagcttgatgaacggctgttttagtaccacaccggaatcccgttcaaacttcaatacccccaaaagcttatctagacaaggctcatcaaccagtgtgaagaagtttgttaatgaaatggatctgcttttgaccccacgtaccgcttcgatgagcagccacgataccacagctataaacgataatgattttataaacgataagaattcttcaagaaaacacgcagcctcattccaggtgaatgttgatgactctgacggtgatgaaactatgttaatatag

SEQ ID NO: 3227 - DNA, 1242 bp, Saccharomyces pastorianus
atggtgaattttgatctgggccaggttggagaagtattccgtaggaaggacaaggggcctgcgatttctggtgacaacccagaagaagaagatgtcgatgcctctgaatttgaagaggatgaaattaagcctgtgcagacaaagaacagaaggcccaaagaggatgcgtttacacaacagagactggctgctttcaacccggtgttgacgccgagaacggtcctgcctgtttacttgttcattgctgtgatatttgttattgtaggagggtgcatattagcgcaaaactccaaagtggacgaggtaaaaatatactaccaggattgcatgaacaacgcaacctcttcgtggagcgacatgccttctgatcaatgggaattgaccttccataaaaacaaaacatataatgtagcaccacaatggaagtttgtggatgatgaatcggacgatttcacggaacaaagaggtacctgtcaaatcaggttccatacaccgagtgacattaagaagaatgtatatttgaattacattttggagaagtttgctgctaaccataggagatacgtactatcttttagtgaagaccaaatacgtggagaagatgcctcttacgagacggtgcatgatgccacaggtataaattgtaagccgctatccaagagtcctgacgggaaaatatattatccgtgtggactgatcgcgaactcgatgttcaatgatacgttccccttgcagcttatcaatgtagacgatgcctcgaagaattactcactaacaaataagggaatcaactgggggtctgataagaaacggttcaagaagaccaagtacaattacacccaaattacgccgcctccatactggaagaatttgtaccctgatgggtataacgagacaaatgttccggacattcaggagtgggaagaattccagaactggatgaggccaggtgcgtttcataagatcaccaaactaatcagaatcaacaagaacgagagtcttccagcgggccaataccagttggacattgggctacattggcctgtactggagttcaacggtaagaaagggatctatttgacccacggctctcaccttggcggtagaaatccatttttaggtataatctatttgatcggtggctgtgtttgcgctgccatggcgctcatattgctaacattttggttatttggcggtagaaagattgctgatgcatcgagtctttcatggaatatgaattaa

SEQ ID NO: 3228 - DNA, 1818 bp, Saccharomyces pastorianus
atgccaagaaagaagtccgccaccaagagagctagagaacaagaaaagaaggaatccggtgtaactggctccgatgctgccatcgtaaagagttctgaacacactaccgctgtggccaaagccgctgttgagccaaaagagccatatgtttccagtgaagacgaggaagaggatgaggaggatgaggaagaagaagacgactacggtgaactgatcaccgacgaagtggaaaaaggtattaaccaagtcttggatgctattaagaataataagactgataagttactagatcccaaagttaaatttttcgaagatcctgaatctgctgcctccaaactagcaaaccgtgagggaaaacacaaacctatctatttaaaggattatcatcgtatgaatatactttccggtgatgctttaaaggacgatgaagaagacaatgaacagggaactgttgatgggaaacaatcgtttgtgtcgaaacaacgcgaagaaaaatcgcagctcttggacgaaatcaagaatgcgtttagcgacgaggacaatgaaaacgacgatgtaaatgaagatgaagatgacggatttttaaagagaaagacaccttctaccaagaaagaggaaagaaatttacccgatcctactgtcaatgaagaaaatttcttagaagagtttgtcagccaacaagcctggattcctaaaaagggcgataaggtcatttccctagatttaaacaatgacgaagaggaggatgaagaattcgaagatgccgtggaaaaatttgaaaatgcttataattttagatacgaggatccaaacgcagcagaaattgtatcatatgcacgtactcaagccacactgagaagatctgataacacctctcgtaggagaaagagagatgatgaaaagaagactaaagagcacgtaaaagcagaaaaagaaacagctattcagaagaagaaaactaaaaaattaaataaattaactgacatcttggagcaattaactaaggaatacggtgctgaaatcaatgccgatatggtgaagaagatcaccgataatttgatgaaaaatgactttaaagaagaagaatgggataatgtggtagcagaattatttaatgaagaattttatgagcaggaggggaaacctacctgggatgaaaacgatgaaataatgggcgagttctatgccgatggcgatgccaaggaccaagtagaagaagaagataaagaggaagacaagggacaagaagaaccagaagaaccaaaagaagagaaagaagagaaggaagaagaaggccctaaaaaaaagaaaagcaaaaaagaggaaaaattgcaaaagaaaagagaaaagagaaagcttaacgaactagtagaaaatgctctagaacaaaacaaattagctctgatagaagaagttgagaaagaagaagaagaaagaaggagtagaagtcacacgaaggaggaacaagatttaaaattccgctaccgtgaagtttctcctgaaagttttggtctaaccacgagagaaatctttgccgcagatgacacagatctaaatgaatttattggcctgaagaagtttgctccttaccgtgctaaggaattaagagccaaggataagaggaaggtgacaaaggcaaggagattaagagattggagaaagaagactttcaaaaacgaaaacgggttagccccagttaatggtggacaagacgccaatggaaaagaagacgacgctattttgatacctgtagagaaggaccacaagggcaaacacaagcaaaaacacaatcacaaacataaaagtcaccacaagtag

SEQ ID NO: 3229 - DNA, 2808 bp, Saccharomyces pastorianus
atgtctgcacatacgtacaaaaagttcgaaaactcgagctctggcgatttgccggataaaatgaccatttatcaggattgtatgaacacgtttaatgaatcacctgtaaattctaagagatgtcgtttgctgatttcacgtttactaagactgttggctcaaggcgaaaccttcccccaaaatgaagctaccgcactgtttttctccatctccaaattgtttcaacaccaaaacgattctttgaggcaagctgtttacttggcaattaaggaattgagtggaatttcagaggacgttttgatggccacttcttcgatcatgaaggacgttcagaatggttcggatttgatcaaacctgatgctatcagatcattgacttatgtcttggatgagtctaccgctttttcagccgaaagattactgaaaagtgccgtggttagtagacacccttcaatttcttcggcagcactatgtacttcttaccatctgttaccgatttcagaagtcactgtcaagagatttacgaacgaaactcaagaagctgtcctggatttgaagcagttcccaaatcaacatgctggcaacgaatattacccaaactctacttatatctcccagtatcatgcccttgggttactttaccaattgaagaaaactgataagatggcattactgaaattggttagacacttctctgaaaacaactccatgaagaatcagctggccaaagtagaactagtcaagattgttaacgatttgatttgtagagatcctcaattattcaatcaatttagaccactgttatctgactggctctccaacaaattcgaatctgttcagttggaaacagcaaaatcaatcacctcatttgctatccgcaattcgcgcttagtcgctccagaactatatgcagctgccatcactgctttgcaatctttattgtctgtccctcgcgtctcttctagatttgctgcattgagagttttaaatagaatctctatggtttcacctgaaaagattgtcgtttgtaaccctgaattagaatctttaatcaacgatcctaatagaaacatttcgacctatgcaattaccactttattgaaaacgggtacttccaagaatatatcttctttgatttccaccattactaatttcattcacgatgttagtgatgactttaagatcattatcattgacgctgttcgcaccttatcgctaaacttcccacaagaatggaaatctgtcttaaatttcttaatcgacgttttaaaaaatagtgaaggtggattcaaattcaaaaacagtatcgttgaagcattgattgatattgtttcatttgttccacaatctaaagaagttgccttagaaaacttgtgtgacttcattgaagattgtgagttcaacgaaatacttgtaagaatattacatctattgggtaaagaaggtccatcagctccaaatccatcgttatatgttagacatatttataacagagtagtattggagaattctatcattagatccgctgctgtggtagctttatccaaatttgctctaacaaagaacgatcctactttatatgaatcaatcataagtttattgaagagaatcgctaatgataaagatgatgaagttagggacagagctactattgctctcgaattcatcgattctgctagaaataaacaagatgttgtggcacaaaatctaattgaatccaaatattattacgatattccatcattagaaaacaaactgaacgcttatatttcctccaataatgattcgtttgctactgcgtttgacgttaagcaagttcgtaagtttaccgaggacgaaatgaaggcaataaatttgaaaagaaagcaagaacaaatcttcaaccaaaaatcagaaacaacctcggatgatataccagaagccgacggtgctgcttcggaaaaaagagcagatgccaagtccttcactggtccaaacttggatgaccaccaggaagatttattagctacgaagtatgctgacgaattgttatccattgaacaaattaaaccattcggtcaattagtaaatagttccagggctatctcattgactgagccagaagctgaattcgtggtaagtggtatcaaacacctattcaaagataacgttgttttccaattcaatatcaaaaacactttaacagatattgccctggataatgttgctgtggtttgctctccagaaaattctgatgaagctgtactagaagaattatttactttacaagtagacaggctactaccatccgaagaagcagcatgctacgttgcatttaataaatctgatgaaattgtaatggagggtttcctaaacaacctaacattcacaacgaaggaaataaattctgatactaatgaaccatttgaaggtgatgaaggtttccaggatgagtacgaaatcgattctattttcttgagtgctggtgattatgttaagagttctttcacaggtaatttctctgctacatttgatgaattaccggctgaagaaattgctgtttttaatatccaagaagacttgtccatacaagaagttgttgacaagattatcctaaacagtagctgcttgccagtggaaagtactcaatttgctccaagcgactcaaattcccatgtcttaaaattatatggtaagagtgctttaactggctccaaagtggcactacaaatcaagatgattaagagctcgaaaggccttgctttgaaagttcatggtaagggtgaagacagcttgttgtgttctgatctagtaaatagcttgatgtag

SEQ ID NO: 3230 - DNA, 3273 bp, Saccharomyces pastorianus
atgaaacgaatcttttccggcgatagcaaggcaacagattcgccaactaccaacccaggcttaatgagcccatcgaactttggtgcgagctttggttcgcatttaaaagtgaatacgactgtaaaaaagaaacttagcgactcctcaccatcttctcctattgagaactcacccgtatcaccagagttagtgccgatcctaacactgctgaacgcgcattcacatagaaggtatcatgaaggtgtatttttgattttacaagatttgaaaaacgatgggactcacgcagccaggaaatggaaagacgtatacggggtgttgttgggtactcaacttgctctttgggatgctaaggaactggctgagttcaccgacccatccagtcctgtatctgaaaggaaactgaaagaagttgcctctaaaccgacttatataaatttgacagatgctacgttaagaactttggatagctctgataatattgtcatggaaagtggaaaaagtctcaccaatgcattagtcgtttccaccacactgaagaatcgatacttcttgcagttcggtaacaaagaatccttccataaatggaatgctaccatacggttgtgtttgtatgaatgctcctctttacaaggggcttatacaggcgcgtttatttcaagtagaggggcgaagctaggtgatatcaggattctgcttacaaacagaaagtatgattacaaggactgggttagtgttagatttggagcaggcatgccttggaagcgttgctatgcggtaatctcacaatccaacagtaggaaaaagaataattttggcgaaataaatctttacgaaaatgataagaaagtaaaaaaaaatcatgcgatggctaccattgtagaggcaaaggcgcttagtgctgtctatccatcttccccaaaactaatagactcctccacaataatcaaaattgaaggttcagtaaaatttgaaaaaaaggaagctgctcaggagaaggatgtttttatcatgcctgagaagcaccaagccgttccaagttacgacaccataattagatttctaatccctgccatggatacgttcaaattatatggtagacccgagaaactactatcaagcaagaatgatccacattcgttgttgtttgggttgccggttttaccacatatatattatcttgaagtggaagatttgttcccactaactaattccatgtcaagtttgcactggtccaaaaacgaatggagagaacacatcagcgatattttacaaaaaaagttaagtcaaggttattctggatgtggttctgtttctagcataacctccccactaccttccccattccttggttctgctgagttgttcgaaagaactgatggggtgttgtcacctaaagtatcctacgggtctaaatcttcttcaaataatagctcaaagaatagatcaaagaatagtttaccgaagagagaacgtggcaggatgccttcttcggctgatcgtgacttcgatagtcctgattttccgattatgaaaaataacagtccatcttccacgatgtctggaagtccacaaaagaccaccacacccactgctgcatcttctagaacgagggtaatagaagcttcaccatatgggaagccaagacaacccaaaccattcatgtcatctaaaaacgattcaccatcggacagggctaaatcaaggacgcatccctatgttgataatggaatggataaaactgcttatgagccagccgagagtagaggcatggcttcgaacggtgcttttgacgacaacgatgttgattcaagtttgaaaaaagttcggaatatgaaactggatatccccgagtctaattttgacaagtttaaaaccgataagaatttgttatccgtggattctaatctttccaacgaaaagaaactttccgtggcatcggatttatcatcgatctatgaaaaatattctaatggtccctttggtcacaccgaagcacccaagggttcttctgacgaggcttacttacgtttccaacgggcatcagtacatccggaggaggcctatgactcgagagactctttttcaaaaagcgatttctccaataatgatgaagatgatcacgccgttttacaagaattgaacagtttaacccaaagaatcaacgagcttggtatggaaagcataaactcgaactcagattccgacaagatgaacggatcttactcgcaaatggaattaggaaactataacaacgaagatgatacgaacttatttgatcctgactttatggcccaagatcaactacacgctgaagaaagagactataataaggatgacgatagatctcccttagtcactacgcctgcggacatcgaaccagctgggctgggcatagttcccaataataacatcgaaagacaacacataagggaacaaagaccaccgcgtgaggttcaaagacggtctcccgagaaagctttcaacccaccgcaaatggacaacccatacgccaagcccggtgcaacggtgaggacgagccctgttagaaccaatcgtaggagcccacaaaagaatcaaccaatgatgccagcccagcaaacttcgtattacccccagccaaccgctaacaacgaccccaatggaatgtacgctacaaacaatcaaccgatggtttcgcctaggaacgggaagccgagagtaccagcaggtccacacaatcaaggctggaacaaccgcccttccccttcaaatccttatcagcatccttcccctgccccgcaaccacagccacaacgtcctcttggaaacccgtacgcaacagccaacaacagaccaaatatgcccatgcaatatcctcctcaaatgactgcccagtatcctccaccgaacacgaactttacaccggcaccacaacatatgcatctacctattcttccaccccagcagaccaaccgctcgcatcagccttatgcgatgaatacacatatgggctctcctagcggatacaatggagcagcgccactatcaccccttcaagcaggaaatatctacagcaacaatagatctcagccgccatggccgactcccaactcgccctacaacaaccatcgcccaccgcccaatatgaaccagcgccaaggaaacggcaatgctggtccttattatcctccagcaccacagtcgaaccatcatcgagcccgcccacaagaaaaggagggattctcacaattcatgccatccgctactacaaagaacccgtacgctcagtag

SEQ ID NO: 3231 - DNA, 1728 bp, Saccharomyces pastorianus
atgtctgaggagaactcacagttcaccattagtggcaattcaacgaccttcagggccaatgcgcatacgtgcaaaggaacgaatggtgctgtagacacggaatcatctctatcagaaagtaggagcgatgaagagaacccagagaaaacacctcgacgccgatttgcgaagctgggcattggtatatggcttgatttgaaagataggataccgttttacaagtcagactgggtagatgcctttgattacagagtcataccttctgtcgtggacacatactttaataacttactacctgcgatcgcttttgcacaggatatgtttgatagaacggataactcgtatggtgtgaacgaggtgcttttatccagtgccatggctggtatagtgtttggtgttctggctgggcaacccttgtgtatcgtaggtgtcactggtcccatctctatctttaactatacagtctatgaaatcatcaagcctctaaataccaattattttgggttcatgttctggatttgtatgtggtctatgatattccacttctttttggcattcacaaatgccgtctgtctcttacagtacgtgactacgttcccctgtgatatatttgggttatttattaacgtggtctacattcaaaagggaattcagatcttaacaagacagttccatactgaatcgggagaaaaatctatacaagatgggtttgctagtattgtagtggcgttggttatgaccgtttttggacttttcttcaaattattccagaactaccccttatttactcatcaaattagaactttcatatcagattattcaaccgcactttcagtgttattctggtcatccttcactcattttggtggttatttacaagacgtgcacttcaaaaaattaccaataacgaaatcttttttccccacatctaaaatcaatagacctcaagacacctggttagcttacgaaccgattcccgtcaaagacgtatttattgctttaccttttggcataatactgactattttattttattttgatcacaacgtgtcatcattgatggcgcagagacatcaatatagattgaaaaaaccttcctcgtttcattatgattttgctttattggggattactacttgcatcagtggagttctggggattcctgcgcccaatggcctcatcccccaggcaccattgcataccgagacactgttagtccatggttcaaaccaagaagtgatcaggtgtgtagaacaaaggttcacaaatactatccagggtcttatgatcctagggacgatgacaagaccattattggtatgtttgggagaaatacctcaggcagtgctttccggattgtttttcatcatgggaattaatggcttaatgacgaatgttataatacgtcgactgattttcctattctcagatcccaagaggagggataatgactcgcccttagtgaacgtatccaaaagatcaaccgcgatatttctttgcttcagtatagcagggtttgcaggggagtttgccattacgaatacaatagcggccattggtttcccactggtgttacttctaagcgtactagtgtgtttctcgttcactcatatcttccccagtgacgaattaaagattcttgataccaatgtggcacaaaaatttactattaaaaacttattactggaaaacatacgcgatgcaaatttcagggacacgcacatgtaa

SEQ ID NO: 3232 - DNA, 3771 bp, Saccharomyces pastorianus
atgtcggcggttttgcaatacggcgccacaaatggtacggatttctctttgacggtgcttaaagcaagaattgctttattagcaactgccatcggcggacctgattatacttccgagatcgagccgcctccttataagcttggcgatgactgtttagcatgcctgaaagatttaaaaaggtggtttaaactggtggatgatcaacagaaacgatgggatgtggcaatggcagtggccgaatatcgcatcttaacagatgacctgttgcccatcctgatagactgggaaaacaaatgttctctcgccagcaaactagccaagaataatccagagcatgaggagtttagaaacaaggcttactacgacaagattgccatgaattgtctgcaactgttagtccttatgacatggcccttaatcattacggaacaatcatcatcgaatcaaatcactctttacagtgaagtgaaaaagcatcaactgatatataaaaaagcaattttgtccatggaaaatgggaaagtactgagagccgccattcgcctggcactgggcgtcatcaagatcgaccgactatctagaactcccagggataatatggttctcaaattggttctgaactttttcagaaacgtcatcgctatagaaccaggtgaatttacaataaataccaagagaagcattcctagcaagggtatcagttccattgacactttaccgccaaatgtcttcatggatgatatttctttaaatacagtcaccttttccttccataaaaacaaagtattcggcctactcttgacgctggctaattcattgtccaaagagttcgaccaggactttattaatattccgctgctagaaatcatgttttttcttaccaaagatgttaatcaatcattgttattccctcaacggcctgggcgtaaaccccatccaggtcaagcaaatgctaacggaaatatctccactaataatgttgtgactagtgcagggtttgaactatccaaactgctacaaaaggagcaccaaatgaaaaaaaacgttattaaacatacctcggcaagacattcaagatttggtggtcttttatccatacaaactccagacaaaaataggctaactgtttctggaagtcaagctcttgtagatgaaaatatagcattgcagaaattggatgacagtaaaaaatggaataaaagaataactcaaaaacgtgaatcagtcgcaaccgagggcttaccaaatagtttattgaactctcaaactggtaaagctatctttttcactgaatcaaatggtaaacattttaaaacattcattaacaattttattgattctggttttaacattctattacatagtgtaacaaactcttttacaacagagcaagatagaatggttactctagagcaagtagaatatttacttttcttcgcatggttcatcaactatcaattgttgaggtgcaaaatggactcctctacaaaattaaaccaagtttcagaagcattaagggaggtttcattcattttagtatcttctctattaagaaatgcatatgatctgaaaaattggatagtgacccacgcaggcatgattgcatttaacgaattattaaatctagtcacctacacaaaaggaagcgaagaagactctgatgatatagaatttattgtaagcaggcttttcagcgacgaaagaatacaattactatccaacttgccaaaaattggttccaagcattcacttcaatttatgaaaagctgtattgaactaacacattcggtgttgaaagtattggaacagtattctgatgacaagacgctggtggtagaagggaaatcaagacgccgaaagaatattaatatttctgaagatgatatttctaaattgatagaagaggaaaatgtcgacagagatgaagcactggatatcctgacctctaattttagaggtgtagaggtcaattttcagaaagtacagagtaactacatgacagaacttgtggtggaaacttacatcaattttcttaaaagattccgtgagcttgacgacgattcaattaaaaaggtgttttctttttttcacagagtattcgttcaggttaaagagcagtcattattatttaggtttgatttaataatattattgagagaaatgctttcatctgatggattaagtaggatgtctcgttcaagaaaatatgtgagtcagttttcagattattttcttaccaggttgaagaaaagactgaaaaaatcaccagcttggtttgttggactactttttccaccactacacaatagtgaggttggcttttatcaaaaatatggtgaatacaatgtgctcaataatgaatcactttatgcctcatcaatatcacaatttaaaccaattcctgacgaagaggcattaccaccttcgattttacaggatatgaaatatggtatcctagtatctacactattggacgatggaaaagtcgagttactagaccaattactcaaacacattgctcacactttggatattttcaagtcatggctgagtatcaatgtaaatactggtagagaaacaacgaatccgccgaacgaatttttcacattgacaggaacgctcagtaatgatcctctatttagagataaagactatagagctttgctgtctttggtaggttacaccatccctgataaaatcaaccaaccttgctttttgggaggggctattgaaatacctgacttgactacgtcatatgagttgataaagaagtatttgtcaacaccttttgaaacaccaaacgggctgccttcttcttcatatcttgtcaggattcgttcaagaaaggaaaaccttttgaatggtgagcaagatggatgggaaggaaatgataattatgactatactgatccccacattattcccgatgatcaaaatgtatcagaaggcgatgaaacatacttcaaggacttggacaataatgtttcagaaaagctaaaaggcgtcaagctcagtaaaggtattgcaagatctaaaaagaaggaaaaaaagagagggaagaagcgagcatataggaacaacttgtcgactttcgataatgaagatggccaacaaccacattccactaaagagcgccatagtgtatttagtaaagaattcattagtgactcagaagatgatgaagatttgatgaaccctatcttctttgagaatgaaacgtacatgaggtggctattagataaaaataatggccaattgaccgaagataggtatgcacaatttgcaaaatttgctgcagaaagaatggccaatggaggtgttacgacgggagactatacgaacttgttcggtggatctgtaccaagcattagtgatataagagcagcagaaaccagttcttttgcaccagataaaagtcttatttccttggcaagccatgttgcatctgaaatgtatgctgctgatgctgaaaataatactgagctctctgatgatgatatcaacacagaaccaaaggacactttgggctcaccacaattatccgattcaaccaatgacccccaatctgatgacgataacagaaaagttctaaaaaggcgcaagctagaagaaagtgaggttgacaaagaggatgaagacgaagatgaagacgaaggtgaagacgaagatgaagacgaagatgaagacgaagatgaagacgaagaggctttcctttttcccgtcaagaaatccaaagttattttaggcgaaagtgatggtgacgatgaatag

SEQ ID NO: 3233 - DNA, 1056 bp, Saccharomyces pastorianus
atgggtcttttctcaagaaaacgagaccatacacctgctgtgcccaaggagaaacttattccatgcgataaaatattcttagaccctcccgcaaagtacggtagtgcaactccattggagccaatttccgaggatcaaaatgaaaaatatagagctgttttactgcatttccaagacgacaatttaaaattgccggaaaatattaacgagcttgacaacgggatccacaccaatgcaagacccttgagtgattgggaaaaattttggctttctagagaatgcttcttgagatatttaagagccaataaatgggataccgcaaacgctataaagggggtgaccaagactttggtctggaggagagaaatcggtcttacacatggtaaagaggataaagatcctttaaatgcagaaaaggttgccattgagaatgaaacaggtaaggaagttcttttaggtttcgataatgccaagagaccgctatattacatgagaaatggtcgtcaaaacacagagtcttcgtttagacaagtccaacaactgatttacatgatggaatcggcagtcaccgtagctcctcaaggcgtagagaagatcacagtcttagtagattttaagagttataaagaaccaggtattatcacagataaagcgcccccaatttctattgctagaatgtgtctgaacgttatgcaagaccactatcctgagagattagccaaatgtgtcttgattaatattccgtggtttgcatgggcttttctgaaaatgatgtatccatttctggaccctgccactaaatcgaaggctatattcgatgaaccattcgaaaaccatatagagccttctcaattggatgcactctacaatggtctattagattttaaatacaaacatgaggtttattggcccgacatggtcaagaaagttgacgatttacgattgaagcgttttgaaagatttgtgaagttcggcggcgttattggactaagtgaatatgataccaagggccaacatgacgagttgaaatatcctgttgacatggtcatttcataa

SEQ ID NO: 3234 - DNA, 6663 bp, Saccharomyces pastorianus
atgtttggcaaggccaagaacagaggcggattttccactgcaagatactcatccaacaataaatacaactcgctatcgaacaactatgcgcttagcgcgcaacaactgctaagagccagtaagatcgatgagatcgactcgatgatgggttttgagaggtacgtgccgccccaatataacgggaagtttgacgttaaggacatagatcagattcctgggcgcgtagggtggctgacgaacatgcatgcgacgctggtgtcgcaagaaacgctatccggtggcggcaataccggcggcaatacaaaggatggagaacacgcaacctctaatcagggtgtttccggagttgatttctactttttagacgaggaaggtgggagtttcaagtcgacggttatatacgatccgtacttcttcattgcatgtaacgatgaatcaagagttaacgatgtggaagaactggtgaaaaagtatttagaatcatgtctcaagagcttacaaatcattaggaaagaagacctttctttggataatcatcttttagggctgcagaaaaccctcatcaagttatcgttcgtcaattccaaccaattattcgaggcgagaaagctgctaaggcctatattgcaagataactcccataataaagtgcaaagaaatatatacagcgcagccacgaatacagagaaaatcgaggccaagcatttgattgaagacatcagagaatacgatgtgccttaccatgtccgagtatccatagataaagacatcagggtcggtaaatggtacaaagtcactcaacaagggttcattgaagataccaaaaaaattgcatttgccgacccagtggtcatggcattcgatattgagaccacgaagccgcctttgaagttcccagattccgcggtagatcagatcatgatgatttcttatatgattgatggggaagggtttctaataacaaatagagagatcatttctgaagatattgaagatttcgagtatacaccaaagccagaatatcccgggtgcttcaccatattcaacgagaacgacgaagtagcgctgttacagagattttttaaacatatcagagacgtacgacccaccgttatctccacatttaacggtgatttcttcgattggcccttcatacacaatagatgtaaaattcacggcttggacatgtacgatgaaattggatttgccccggatgcggaaggtgagtacaagtcatcatactgttctcatatggattgttttcgttgggtaaagcgtgactcttatttgcctcaaggttctcaaggtttaaaagccgttactcaagctaaattgggttacaatccgattgaattagatcccgaattaatgactccatatgcatttgaaaaaccgcaacatctctctgaatattccgtttctgatgctgttgctacttactatctttacatgaaatatgtccatccttttatcttttccctttgtacgattattcctttgaacccagatgaaactttaagaaagggtactggtactttatgtgaaatgttgttaatggttcaggcttatcaacataacattcttctcccgaataagcatacagatccgatcgaaaggttttatgatggtcatcttttagaatcagagacttatgtcggtggtcatgtggaatccttagaagctggtgtctttagaagtgacttaaaaaatgaattcaaaatcgatcctactgccattgatgaactattacaagaattaccacaagcattgaagttcagcatcgaagtcgaaaataaatccagtattgataaagtgacaaattttgatgaaattaaagaacagataacgcaaaaactattagagttaaaggagaacaatataagaaatgaattacctttgatttaccatgttgacgtcgcttccatgtatccaaatatcatgactactaatagattgcaaccagacagtatcaaaacggaacgtgattgtgctagttgtgacttcaataggcctggtaaatcttgtgcaaggaatctgaaatgggcctggaggggtgaattcttcccagccaagatggatgagtataatatgattaagcgtgccttacaaaatgaaactttccccaataaaaacaagttttctaaaaagaaggtcctcacatttgatgaattgagttatacagatcaggttgttcatataaagcaacgtcttaccgagtattcaagaaaggtttatcataaggttaaagtttctgaaattgttgaaagagaagccattgtttgtcaaagagaaaatccattttatgtcaacaccgtcatgtcttttcgtgatcgacgttatgagttcaaaggtttagcgaaaacctggaaaggaaatttatccaaacttgattcatctgataagcacgcgagagatgaagctaaaaaaatgattattctatatgattctttgcaattagcgcacaaagttattttaaattcgttttatgggtacgttatgagaaaaggttcacgatggtattctatggaaatggcaggcatcacatgtctaactggtgctacgattattcaaatggcgagagccttggttgagagagtaggaagacctttggaattggataccgatggtatctggtgtattttgccgaagtctttcccagaaacatatttctttactttagacaatggcaaaaaactctacttgtcctacccatgttctatgttgaattacagagttcaccaaaaattcactaataatcaatatcaagaattaaaggacccactcaactacatctacgagactcataacgaaaacacaattttttttgaagtcgatggtccatataaagcaatgattttgccaagctccaaggaagaaggaaagggtatcaagaaaagatacgccgttttcaacgaagatggttcgcttgcggaattgaagggtttcgaactgaaaagacgtggtgaattacagttaatcaaaaattttcagagtgatattttcaaagtatttttagaaggtgatacattagaagattgttatggagctgtagcaaaagtgtgcaatcgttggctagacgttctcgattcacacggtctcatgctggaggacgaagatttagtcagtttgatttgtgaaaatagaagtatgtcgaaagcattaaaggaatacgaagggcaaaaatctacctccattacaacggctaaaagattaggtgactttttgggtgaagacatggttaaagacaaaggtttacaatgtaaatatattatcagttcaaaaccttttaatgctcccgttaccgaacgtgctattccagttgcaatcttttcagcagaggtttcaatcaagaggtctttcttgagaaggtggactttagacccatctttggaagatcttgatatcaggaccattatcgattggggctattatagagagaggcttggatctgctattcaaaagatcatcaccattccagcagctttacaaggtgtttccaaccccgttcccagagtagaacacccagattggttgaagaaaaaaattgcaactagtgaggataagttcaagcaaacctcattgagtaaatttttttccaagactaaagatgtacctaaaatgggtaagataaaagacatcgaggatttatttaaaacaacttcagaagaccaaagtacaataattaaggttgcaagatccactaaaaagaaaggcgggtctaaaagaaggagaaaccaacaggaaaatgaggaagaatcactggttttgccctcagagattccttcaatggaggaagattatgtgagatggttaaattaccaaaaaattaaatggaagattcaagcaagggataaaaagcgcagagatcagttatttggcaacacaaacagtgcacacgaaagaagtgcactaggtagtatgattagaaagcaagcggaatcgtatgccaactctacttgggaggttctacaatataaagagtctgttgagccaggtgatttggatgtctttgtagccattaatgggaaagtgcaaaatataacattccacataccgaaaactatttatataaagttcaaaagccacacaataccattacagaagattaaaaactgcctggttgaaaggtcttctgcattaataccaaacaatcccaaaatttctaatcctacgactggtcagctatttaaagtgacactaccagaatctgtctttctcgaagagaaacaaaattgtacaagcatcttaaatgatgcaaatgctcttggcacatttgaaagcacaataacgcctcatcaaagagcaattatggatttgggtgcgtcagtgacatttcgctcaaaagcaatgggagcgttaggtaaggggattcaacaaggttttgaaatgaaggatctttcaatgactgagaacgagaggtacttgagtggattcttgatggatgttagttatttgttacattttccaacatcaattggatatgaatttttttcgttattcaaatcttggaaggacacaatcactgtattggttttgaaaccatccagctcggcgcaagaaataaacttctcctctttagaacagatatacacacaaatatttgagaaaaagaaaagtaaagtagaaaagttttcttacttggttgatattaaagaaaaggtcaatttcgagtttgcatattttacagatatctcaaagctgtatagaagactttctcaagaaactactaaactaaaagaagaaaaaggtttgcaattcttattgttattacaatctccattcatcacgaagcttctaagcgcaatacgtctcttaaaccaaataccagttgtcaagctttctctcaatgaaatttctcttccacagttgaattggcagtcaacgctattgaaaaaattggttaatcacattatatcgagtggctcttggatttttcatttaattaaattatcccagtacagtaatattccgatttgtaatttgagactggacaatatggattatgttatcgatgttctttatgcgagaaggctaaggcatgagaacatcgtgctttggtggaatgagaaaaacccattgccggatcatggtggtactcagaatgatttcgacttgaatacatcgtggattatgaacgacttggaattccctgaaattaataatccagacatctatgataatgtagtactagatgttagtgttgataatctaacagtaaacacaatattggcatctgcattgatcaatgacgcggagggtagtgatttggttaatagtagtatgggtatggacgataaaaattccaacagcaactctacgcctgattttgtgcaggatgccttttccaatgatgctttaaatgttctaaggagtatgctaaaggaatggtgggatgaagctttgaaggataatgcaactgcggatttattggtcaactctctagcaagttgggttcaaaatcctaatgcaaaattatttgatggtttgttgagatatcatgtccataacttaaccaaaaagtcattacttcaattagtgaatgaatttagcactcttggctcaactatcgtctatgcagataggaaccaaattttaatcaaaacaaacaagtactcacccgaaaattgttatgcttacagtcaatatatgatgaaagcggttaggacaaatccaatgtttagttatttggatttgaatattaaacgttattgggatctgttaatatggatggataaattcaactttagtggtttagcttgtgggaagatagaggaaaaggaaaagcaagattataacgcattttcggaatggcaattaaagaaatttctgtcgcctatatatcaacccgaatttgaggattggatgatgatcatcttagacagtatgcttaaaaccaagcagaactatttacaatcaaattcaggcacacaaagacctactcaaatactgaacacgaagaaacaagacaaagaagatggcattgacaactcactgaatgggttctcgcacattttctctaagccgttaatgaaaagaactaaaaagcttctaagaaatcagcaagaatttatattagatccacaatacgaaggagactacgctatacctatacttcctgggtctcatttgaatataaagaatcctcttttagaactcgtcaaatcactctgccatgtgatgctgctatcgcacagtacaactttggaaataaggactttgagaaaagaattgctgaagatatttgagatacgtgagtttgctaaggtagcagaattcaagaatccaagtacaagcttagtggctccagattttctctgtgaacactgtttctttatctctgacattgacttttgtaagacagatcctgattctattttctcttgtgccaggtgtcataagggttttaacagagtgttgttacaagagcacttaattcaaaagctgcgttccgatattgaatcttatttgattcaagatctgagatgctctagatgtcataaagtgaaacgtgactatatgagtgcacactgtccctgtgcgggggcttgggagggaaccgtacctagggactctattgtccacaaacttcacatatttaagcaagtggccaagttctacgactttgatctactattcaactccatatctgatctgagtatttga

SEQ ID NO: 3235 - DNA, 2304 bp, Saccharomyces pastorianus
atgaatatcttcaccagacctctgagaagatacgcagcgatgtctacacccaaggttgtccaacccaaatggaacgttcctgcgccacaagctgagaaagctgtgttgaaattgtacaacagtttaacaagatccaaagtagaatttattcctcaatcaggtaacagaggggtcacttggtactcctgtggacctactgtttatgacgcctcgcatatgggacatgccagaaattacgtttccattgatatcaacagaaggatcattcaagattacttcggttacaatgtgcaatttgtgcaaaatgttactgatattgatgacaagatcattttgagggcaagacaaaactatctattcgacaacttcgtcagagaaaacaacaccgagttgaacgctgaggttgttgataaggtcaaaacagcacttttccaatacattagtaaaaacttcaccattgaaggtagtgaaatcaaaaccattgaagaatttcaagtgtggctatcgaaggctgatactgaaactttgaaatcagaaaatcctaagttccctatgcacgttactgcagtccaaaatgccattgaagcaatcactaagggtgattccatgggcccaaaacttgcctttgaaaaagtcaaagatgtcacagttcctttactagacgaagaattgggctctacactcagcgatccagagattttccgtcaacttccagcctactgggagcaaaaattcaacgatgacatgttatcattgaacgtgcttcctcccactgttactactcgtgtttctgaatatgtcccggagattattgaatttgtacaaaaaatcattgacaatggatacgcatatgccacttccgacggttccgtctattttgatactttgaagtttgacagatcaccaaaccatgactatgccaagtgccaaccatggaataaaggccaactagacttgattaatgatgctgaaggctctttgagtaacttcgccgataacggcaaaaaatcaaacaacgattttgccctatggaaagcttctaaggctggtgaaccagaatgggaatcaccttggggtaaaggtagaccagggtggcacattgaatgttctgtcatggccagtgatattttgggccctaacattgatattcattctggtggtgtcgacttagccttccctcaccatgataacgagttggctcaatctgaagcatgttttgacaataagcaatggattaactacttcttgcatacgggccatttacatattgaaggccaaaagatgtctaagtccttaaaaaatttcatcaccattcaggaagctttggaaaaattctctccacgccaattgagactagcctttgcctcggtgcaatggaacaatcaattagatttcaaagaatctttgattcatgaagtgaagtcatttgaaaactcaatgaataatttttttaagaccgttagagcgttgagaaacgatgcaacctcttcaggtcacattcctaaaaaattcggttctttggagaaggaattattggccgactttaccgaaaatgagtccaaagtccatttggcattctgcgataatttgtccacacccgtagttttaaagactctgagtgagttggtgaccaagtcaaacacatatatttccaccgctggatctgcgttaaaaattgagcctttgattgctatttgtaattacgtcacgaggatcttgagaataattgggttcccatcccgttctgataatttaggttggattgcacaatcagactctaatgagcaatcatctggttcattggaggacactgtgatgccatatgtcaagtgtctgtccacctttagagatgaagtacgttctttagctatcaagaaagctgaaccaaaggaatttcttcaactaacagacaagattagaaatgaagacctattgaatctaaacattgcattagacgatagaaatggacaatctgcattgatcaagttcttaactaacgatgaaaaattagaaatcgttaaactaaatgaagagaaactggccaatgaagaggccaaaagacaaaaaaaattggaacagcagaagttgagagagcagaaggaaaacgaaaggaagcttaaggcccaaaccaagccacaagacatgtttaaagatgttggtttgtacagtgcctgggatgaacaaggccttccaacaaaggataaagatggtaacgacgttaccaaaagtatgacaaagaagttgaagaagcaatgggaacaacagaggaagctacatgaagagtattttggtaaaaaaaactaa

SEQ ID NO: 3236 - DNA, 4764 bp, Saccharomyces pastorianus
atggcattttggttacctcaaaatatacaaaagcggctgttgctatatgtcctccagcaaatatcgctattttccaatatagatctatccaacctggatgtctctataggctccaagtctcatttctctttccatgatgtgaatctctcactcgatgatctaaatatcccgaatgtgcaaataaacgagggcatagttgacgagcttgtactaaagctaactgtctctggcggagtggaaatcgatgggtctggtttgagatttgtcataacacctttatattccacaggttcgcaagaactcccttctgactttttagctaaaagcattcatgatcttacaaattccatgctacagtttaccgatcccttgagctcgcaaaataacaggtataatgaagatgacattagttcttcagatagtagtggtgatcttggttctactacagaaacgtcgaagacgagtggaaatagttcttattcacttcaaaatatgcgaaataaagcccttaatgttgccctagctaaattgaaaatagcattgaaggatatcacgatatgttttataatgaatgaaacggatccctctcaaagtattgttgaagttcatctagaaagcatacaactcacgacaacgaatggaaacttacggcatataaatatcggaaacttaacagtttcattggtacagaaacaaaccgtatctagcgcttcctctcactcttccaataatgatgatctctcacaaagtgtttgttactctaagacggaggcaacgtcactctatatgagtgccatggaagagcaattaaatgacgacgacgaatctgaaaccacacagacacaacaaaatgatgataagtccaaggaaaccctaatggaaataaacgatttaaatatagcatttaagggtctatcttctatcaatgatctcaaaatgtatgacatcgctatagacatacaggatgtccatctaacgatatataaaatcattaaaacaaacaaccccattttgaaaagtatcatggagatcattgtcactcatttggataatagtgatgaagaacccacagaagatttacatgaagtgcaaaaaacttcttttctctcctctgtggaagtcaaatgcatacacttgaacgtttctgagggtatcacagcaatcttgaaaacttttgaaatggaacaaaaactaaatagcgttctagccatttctctaggctctttttattccaattcagcttcattgacaattaaccataaaaccaagccattattcaccggtgaactaactcctctaaatgtcagcttaaatattgccgatgaattagagattgccattgacaagactggcatgactaaactactcgacattcatcagtttttttcacaatgcatgaccatttatcaaagtaaatcaaaaaagctggcgcctaaaataacctcaaatattgcaagaaatacaaaattaactttcaaagcactgaatttctcgattaaattcccatactcttcattatgtttccaggcctcaccttttacttacgattctgaaacgtgtgaattccacatcgaactggtagaagtatacaagaatttcccttctcgatctccaaaagtgttaacaatgtcaaatattacaatttccaatccgcaatcccgtttgcagctgggatcatatgacgatacgttaaaagaggcactaatatatagttctattcatgccagcatcgaagaggtaacagcacaagatgaatatttgggaatagtgcaattagtgacagatatctctgagattgcagaactttttacggatttaagtactgaccactcaagcaggtcaaaaagtaaaagaggctcgtatttgcaaaggagcgttagggtattgaattcttctaggttcgtttacaaacagagcacatccgccattttttcatttcaaataaattccataagattgaaactattggatattatagaaccgcagtttggttctatagatgcattgctatcaaacaacttctttgcaattacagaggattctcagatagtctatttctcaaagaacctgctgatagaaagaaaatcaacatcactggaggaaccacaagaaattgtgtcaatgatcttaaataaaaccgttcacgagcccgttctatatcttcatagaagggcaaacggaaagattagaataattcttaacaagatgcgtatccattattatgcaagatggttagagattttgaaaaagaacattaactcggataatctcggttcaaaagatgcatcagtatctcaaaagcctagtaaaaatcaatcagactctggatttccctgggaattgaaatgtctagactgtgcactaattctacatcctttcagattaaaaagcgtgatggttattgtactcgataacttgacatctagtgggagttcgtatattccgcaagtgaaacttctttcaaaagtgaatacgttatttttgatagacgactactcaaattttaaaatccaaaaggataagaattggctcaatttaataagtttctatgccaatcaaggcttctcggcaattggaaaaatagacactttgaattttatgataaataaatccgatgaaacgctcttgttagactgtaaaatagggcaagttggtctttcattgtgcgcagattcctttcaaactttttgtcagctttgcgtcgatttgaagtatccacaaacgttccctgatgagaagaaatttaaaacagagttgagaagtcccattgatgtattcaaagatattgattgtgatctcttcaactctgctttcatactagagaatgatggcctccaaaatgattatgaatcggtgcatttagtggatagtttccttgataaggctcaggaatttaacagcggtgccaggagtaaactttcatctcaaggctcgcacgagccggattcttcttctggtactggaacggatgccattcttctccctcatgagagttatttggactttgcacaatcaaaggatgatgatattccaaaaatggcctcggaagagcaagaaagaaatgtagatataagaggtagtattgacatagagaaagttatcgtaaagctgtttgatgggtacgattggaaatacacccggaaatttatcacgaataccgttgataaattggatagagaactcaatgaagtagaagaaaagggaccgaaatcgaatattcaatcagaggcaaacatttttgactctatatatatatctgctaataagaataatgtttccgatttgaagaaaaacttggatggtgagatccagggagttcaaaattcctttattgacgtatccaaagttaatttgcgaccttccaagcattacaaagccttgattcagttgaacaaattgcaggtgaatttgaagacttatcgagtagatgaaccaaaggaatcggaatcagataattccacggatattttgaacaaatgtgtgatttcggtttacgagttcgaagttatagataatgttcctacatcgacatggaataagtttgtaactttgctgaagcatgaaccatggccccacaattcgccaatgtttctcatgaatcttgaacttatccgtccaattgactttttgcaagcggtggaattagtgatgcaactgaaaattgcacctttacggctgcatgtggatcaggatactttagaattcctaataagatttgggggttttaaagataagaggtttgaattgattgacgagtatccggacgttgtatttgttcaaaaattttgcactaattcaattaagctaagactagattataaaccaaagaaagtcgactatgcgggtttgagatcaggacaaacttcagaactaatgaactttttcacgcttgatgggtccaaaattgttttgaaaagcgtcgtgctatatggattgaatggatttgatgaattaaatgataaattgaagggtatctggacaccggatattactaacaagcagttacctggtgttttggagggtttggctcccgttaggtcgttcatggcgattggatcgggtgtaaagacgctagttacagtactaatgtcagaatataagcaagaaggccatttgggtaaaagcttgaagaaaagtggtaacgtctttgtgaaaactacgactggagactttattaaattgggggtcaaattaacgtcgggcactcaagcaattttagagaacaccgaggaattatttggtggtgtcggttccaatggtaggatgtacgatgcgtcgaaggcggggtccagtggtgatggtgacgatgatgctgctgctgtattagatttggacgcgatattggaagaggaccagttggtcggtagtaaatattccagaattagagaccatgaacccacagtggtagtcatcgacgtgtcttcgtcgggaaacccgaatggggagcccaagatagtgagtctatatgcggaccagccgttggacgtgcccacgggcttgaaagaggcgtatagttcattagagaagcacatgcacattgcttacgacgcggtgtggagggccaagggacagatgaaggacgatagacgaggcggacccagtgccgcagcggtttatgttgcgagggcggcgcctgtggcgataattcggcccttgattggggccaccgaggctgtttccaagactttgcaagggattgctaatcaagtggataagacacacaatgagcaaatcaacgacaagtataagtccaaccggatttga

SEQ ID NO: 3237 - DNA, 2928 bp, Saccharomyces pastorianus
atgacggtattaggagagcatctagtgagctggtccaagactggaattatcgcttacagtgactcacaatcgcaggatgccaatatctgcttgacatttttagaatccattaatgggattaattggcgatttcatactccacaaagatacgtcttacacccacaattacacgaagttccataccttgaaaatggcagtgcttcaagtgggcactcgacaactgcttctgtgaacggatcaactacagccggtgtaggaagtactccgactgttggaagcagcagcaataaatccactccacagtttttctataacatatcatccattcactggaacaactggtttagtttaccaggagatatgttagctgtttgtgatgaattaggtaatatgactatgttaattactgggcaacgacctgatcgtgccaccacatatgaaaaactaacaatggtattccaggataatgtatataagatttacaatcatgttatgccattgaaacccgttgacaagctaaaacctatgaacattgaaagaaagcaaacaagaaaggaatacaatacatccatccttgagttccactggctgacatcctctaaatccgtaattgtttcccaattttgtgcatttgatagtagttccaacacatacagaagtagagcccagcaagttcctccatacggtgtatttcatcccccatttataaaatatgcatgcttggcaattagaaaaaatggtcaaatcgatttttggtaccaattctcaaactcaaaggatcataaaaagataacgttacaattgttgaacgcattaaatgaaagatctaaggatcttcagtggcttgaacatgctaaaataacgcctatgaatgacgatcaatgtatgttgataactacatactcaaaactgtcaaagaatgtttctttctacaagctacatgttaactggaaccttaccactgccaaaccaaacgtcttgaacgatccatctttaaagatacagtacattttgagtactactctagatccaacggatggtgaaggtcatgtgttgaagttaacaaacttgcatatcgtgtctaaatcctcgatcgaaaaagatccatcgccagaaattcttattttgtacaatgtgtgcgaaacatcaaaaccattagtgaaaagataccgattggcccaaacacaacttccggccgaatatttagcaatattgaaaccagacttaaacatcgatcgaaacaattctacaagccaaatatttcaatcacgccgttataatcttcgtcagcacactgatatagtccttgacaaaaaggttatcttaataacttctgaaatgtttgatggattcgtttcgatttattttgaagatggcaccattgaatcctataatcaaaatgattggaaattggaaactgaacgacttataaatcaaaaccaattgggaaaattcaagaatattattgcatctccattaagcgccgggtttaattatgaaaagcttcctttaccaccctcactcgagtggatgaaagtttcaccctctatgtgtggggttattatcaaacaatacaacaaaaaacggcctgaattttatgctgcagctcaaagcaattatacagatcctgagaaggattccataaacgcgacatcgttggcatttggatatgtaaagagtttacacaaacaaatatctgccgaagatttaacaattgctgcaaaaacacatatactcaagatttcatttctggacaagaacagggccaaggaatttatcacaacattattaaagagcttgtacgcttttttcaacatttctcctgatgcgccaaaggaagttatggataaaattattacaagtagaccactacaaaaaattatgctattgcagctagaacttggaagttgcttttcgcacgataacattgaacaaatggcaagagttatcctctatttgaaaaatgttttgttcgcatttaacggtgtagcgaggaattttcattttgccattgaacaaataagcaataactctaaccaacaacaaaacccgaaattatttcaaaccatattttcaaaacaggacctcatccattcgttgattcccgttgcgaaatggttcgtaaagttcgttacttatctgatccaaggaattttaattttaattaacgatcccacaaatgaagactatactcttgtccatggaatatttggggctaagatgtcgagaacactgatactatccatccttaacgaaattaagaaagtcacccaaatagttgcaaagtttccagaaaattcatacccgattctaaacgaatcatctactttcttaaaacttgttttatcagagtcaccggtggatttcgaaaaatttgaaacatttctagtcgatgtaaacaacaaatttattgccctgtctgaacagcaaccatcacaggaaagagagttttcacttttagtaaaagccgaaatcccccctgaatttgccaaagtgggagatttccttttgcagtacgcaaataatgcagtcatttctcacgccaatgcggctgcagtgtattttgcagataccagtggtttaaagatatccaatacagagtttttcaatcctgaaatattccatcttttgcaacccttggagaagggactgattattgatactgatgaactacctaaaaactgtagaagctctagatctttcagcaaactactgtatgacgacgtaacctgcgaccaattgagtacgtcagaaataaatgacggaaagctgaagagatgtagcaggtgcgggtccgtgacaagggcaggtaatgtaatatcgggtgacaagacaattgtcccaaccagcatacagaccaaaagatggccaaccatgtacacaaggttgtgcatatgttcaggaatgctattcgagatggaggcctga

SEQ ID NO: 3238 - DNA, 1035 bp, Saccharomyces pastorianus
atgaataacaacggtaaccaagtatccaatctatccaatgctctccgccaagtaaatatagggaatagaaacagtaataccactactgaccagagcaatataaatttcgagttccctgccggtgtaaatagtaatagtagcgttcaaaataacaacaatggccgtaatggtacccaaaataataacaacgagaacaatatcaaagatactctagaacagcatcgacaacagcagcaggcattctcggatatgagtcatgtggagtattcaagaattacaaagttttttcaagagcaacctctagaaggatatacccttttctctcacagatctgcccctaatgggtttaaagtcgctatagtattgagtgaactcgggtttcattataacacgatttttctagatttcaatttgggggaacacagggctcctgaatttgtctctgtaaatccaaatgccagggttccagccttgatcgatcacaacatggacaacttatccatttgggagtcgggcgcaatcttgctacatctagtaaacaaatattacaaggagaccggtaatccactactttggtctgatgatttagcagaacagtctcaaatcaacgcatggctgttctttcagacttctggtcatgcaccaatgattggacaggctttacattttagatacttccactcccaaaaaattgcaagtgctgtggaaagatacacggatgaagtcagaagagtttacggtgtggtagaaatggcattagccgaacgtagagaagcattagtgatggaattggacacagataatgcggcagcatattctgctgggacaacacccatgtcacaaagtcggttttttgactatcctgtatggcttgtaggagacaaattgactatagcagatttagcctttgttccatggaataacgttgtggataggatcggcattaatgtcaaaattgaatttcccgaagtttacaagtggaccaagcatatgatgagaaggcctgctgtaattaaagcattacgtggtgagtag

SEQ ID NO: 3239 - DNA, 1803 bp, Saccharomyces pastorianus
atgaagacttgctattacgaacttttgggagtcgaatcgcatgcttctgatcttgaattgaaaaaagcgtatcgtaaaaaagctttacaatatcacccagataaaaacccggataatgttgaagaggccacagaaaattttgctattattcgagctgcttatgaagtgctgtctgactctcaggaaagggcatggtacgattcacacaaggaacaaattttaaatgatactccaccggatgctgatggatactgcgattatgaagtggacgctgctgtcacaggtgtcactgctgatgagttgcttttgttcttcaattctgccctatatacaaaggtagacaactcggctgcagggatctatcaaattgcaggaaagatatttgctaaattagccaaagatgaagtattgaatggtaaacgtctgggaagattcaacgagtatcaagacgatgtctttgagcaagatgtaaataacactgggtatttaaaggcgtgtgataagtacatgaataaaaccgatatgcttctatatcctttattcgggtattcatctacaaactatgactacttaaagaacttttataaaatttggtcgaccttcaatacattgaaaagcttcagttggaaagacgaatacatgtattccaaaagttatgacagaagaactaagagggaagttaatagaagaaacgagaaagcaagacaacaggcccgaaatgagtacaataaaacagtcaaaaggtttgtcgtttttatcaagaagcttgacaaaagaatgaaagaaggcgcaaaatttgcagaagaacaacgtaaactaaaagaacaacagaggaaaaatgaattaaagaattcgaggaataaagagaaatctagtagtctgaacgacaacgaatgtaaagccagtttcaatctacagagttggcaaactgtaaaagaagaaaactgggatgaactggaaaaagtctatgataattttggggaatttgaaaactctaaggatgataaagaagatgaggtattgatctacgagtgtcttatctgtaataaaacattcaagtctgaaaaacaattgaaaaatcacacgaacactaaattgcacaagaaaaatatggccgagattcgaaaagaaatgaaagaggaaaacataacccttgggctagacaatctttcggatcttgaaaattttgattcagcggatgaggttgttgaagagaaagataatattgatttggaagcattacaagctgaacttgctgagattgagagaaaactagcagaaagttcatctgaagatgaaaccgaggacgatagtgtaaaagtggaaatggaaatagaggtggaagacgtcagttctgatgaagatgtgcaagtacgcacgaaaggtaataataagaagaagaagaagaagaagaaaaacaagaagaaagacaatgcagagacagaaattgacgaaacagattcatctgacgacgatatggataaaagaggcgacgaattgaacgatcttctagcgtcgttgaatggcaacggcttccaaagcgacgacgatgaagattggtctacaaaagcgaagaagaaaaagggtaaaccaccaaaaaaaaactccaaatctgcgcgaagcaccccatctctaactactccattaccttcagcatctccatttgccgtgatcgaaaaatgcggtacctgtggagaatcatttgatagtcgaaacaagctatttacgcatgtgaagatagcggggcatgcctcggtgaaaagccaggcaaagagtaggaaagtcaaggtaaacaagaaatag

SEQ ID NO: 3240 - DNA, 1761 bp, Saccharomyces pastorianus
atgaataataaaaagacatcagtagaacagctcatctcatgccctatctgctccaaaagggtattcttttctcaaatcaattcacatcttgatacatgtggcaaagaaaagtcaaaatctgccagtaggccacaaactgtgtcaagtcttttggcaggtccgaaaaagaggaaacaaagctgtaccgagaaagttatagatcttgataaggacgatgatgaagctgtagctgttgtaaagaatgagtacgagagcattgagaatgttgaaagcgaaaacaaaagattcaagacagcacaatctacagaactagggacgacaatagtgagtccaacccttaataaaaatcaacagtatcataacgactatgaaatcagatggctgcaaaaaataagccatttaccattgagtgaaaaactaaggccgaaagagttacgagaatacgttggacagcagcatattctctctcatgagaatggtacgctatacaaatacataaaacaaggtacgattccatctatgatactctggggtcctccgggtgttggaaagacatcgttagctagactactgacgaagaccgcaacaactagtaatagtgaatcgaaagctggttccaaatattttatgattgaaacaagtgctacaaaagcaaacacgcaagaattaagaggtatatttgaaaaatcgaaaaaggaatttcaattgactaagagaagaactgtactctttattgatgaaattcatagattcaataaagttcaacaggacttattattgccacatgtagagaacggtgatattgttttgattggtgcaacgacagaaaatccgagttttcagttaaataatgcactgattagtagatgcttgatttttgtcttggaaaagttgaatgtcaatgagctttgtattgtcctatcgaggggtattgcgttattgaataaatgcaggaaacagatttggaacgttgaccgtcctttaaaactatctagaagcatatcggaatatgtggtagatttgtctgtgggtgatacaagaagggcactaaacatgttagaaatgatcgaagtttctacaagggaacgtaaatcggacaatgaagaattatccatcgatgatatacgagacataatcaagaataacagcagcaatgggttgaatacctattatgatccaaagggcgataaccactatgatacgatctcggcgtttcataaagccatcagaggaggggatgaaaacgcttctttatattatttagcaagaatgctgcaaggcggagaagatccattgtatattgccagaaggatgattcgaatagcttctgaagatatcggaccacgggataactcattattgcctttggctgtcgcagcgcatgatgcagtgatgaaagttggtttacctgaagcagaccttgctctagcacagtgttgtgttgctttggccagagcacccaagtcagtggaactctacagggcttggaaaaagctcaaggccatgatgaacgaaaacatgtatagtttggcgagcagtgaaataccgatgcacattaggaatgcgccaactaaattgatggaggagttaggatatcataaaggttacaaatacaatcccgattacatcagtggcatagtccagcaagaatactttcctgacgaagtccttgagaaatgtccaaataaggatgatttgaagtttctggatggtaaacacttgggagataaaaaagacccagatttgaaagagaccaaatag

SEQ ID NO: 3241 - DNA, 591 bp, Saccharomyces pastorianus
atgaaaggatatcctgggcacattgattggccttccaatgcaaacatcaaaaggatggagaagataaacccgactttgaagactattaagaccttactatacaatggaggattaatttatgcgttcttgtactctgttgtcgtcatgttcgtcgaaccgatactgcaaaagcagtatttgcaaagacacgatttatctttatcgactttattgcatttgaggagatgcatcgcacaactacaaaaaaagctaacgaagactccggtatctgcgctagggtacaatgaacatgataaatatatggagaggtccacgcagacgtcagatgataatattatacaggaggataatagccattggccagaaataaatgttcaattgcaaagcgtgaagcaggaattacaatactttaacaaattttcaggccaaacatctgaaaccatagaagattttgtattccaaactaaaatggtgactgatcaagttcaagtaacggataattctcaaattttctcaaataagtcaagagatattattcagggtattcgggagatgaaaggttggtttgttaatggtcaagtgccaaggtaa

SEQ ID NO: 3242 - DNA, 255 bp, Saccharomyces pastorianus
atgcctcccagaagtttagaagaatggttttactataaactgttgagtagtccaggtttccacaggtttgtacgaaaggtatataggaaagtgaatggtattaaggaagatcccttcaccgatcagccaaccgcttctcaatatctttacaagccgacacaaacacagaaatttaaagctcttcgtcttctattttgggatgaaatgagatctaccttcggattcagaaggaaactaagcgaccgctttaaatga

SEQ ID NO: 3243 - DNA, 879 bp, Saccharomyces pastorianus
atgaatacaggaaatactctggatagtaagtttgtgaccgaaggttcgtggaggcctgagttatttaagggtaaagtggcatttgtcactggcggtgctggaaccatatgccgagtgcaaacagaagcattggttcttctcggttgcaaagctgctattgttggaagagaccaggaaaggacacagaaagctgcaaaagagatttcaggattggtgaaaaacgatgatgcagttttgcccatcgcaaacgttgacgttcgtaattttaaacagatggaggatgccgttttgaagaccgtaaagaaatttggtaggatagattttgttattgccggcgctgctggcaattttgtctgcgatttcgcaaacctctctccaaatgccttcaaatctgttattgacatagatttattagggagtttcaacacggcaaaggcatgcctaaaggaacttaaaaattcaaaaggttctattcttttcgtctctgctactttccattattacggtgtacctttccaaggacatgtcggagccgccaaagctggcattgatgccttggctaagaacctagcggttgaattaggccctctaggaatacgctccaattgcattgctccaggtgctatagataacacagaaggtatgaaaagattggccggagccaagtataaagaaaaggccctggcaaagatccccttacaaaggcttggatctacaagagacatagccgaatcaaccgtctatattttttcgcctgctgcgtcttacgtcactggtactgtcttgattgtcgatggtggtatgtggcatttaggaacttattttggacacgaactatacccagaaaccctagtcaagagtatggcatcaaaactgtaa

SEQ ID NO: 3244 - DNA, 1689 bp, Saccharomyces pastorianus
atggggcctccgagaaattttaagcattccagtaagggcaagaaacacaagaatgaacagaagccattgatcacgcaagaagacttttacttggccgcgatcgactgcgaagagcaggccgaccggtggttgctctcggacatcaagaaatgtttgcggttctatctgaaggccctggagtactacgagaacgggcttggtgctctagattccacgccggagggtaaatacaacatttactacaacgagacacggctgtttctacagatttatacggactatctggccaacaacggctatatcaatatcatgcagtatgtgaaaatggacgacatgcctgatctttccagtctggtgttgtctttgccgcagatcactcaacggtttgaaatcgtttacgaaactttcccgcagcaaagaacgtgggatcttcagttcaatctcttgacgtgctacctgactctgttagagtccatggacgacgtctctcaacccaccgtgtctttcgaaggttatgacatcttgaacatgacgaacaagtatattgaaattttccaacatctggttggctatctgcttcaagaactacagaactggggcgattctccgccgcaggaagccagtgatgcggatatcgacttgcaaagagacaccttggatgaggacgcagagcgcattacaagggacggaaccgggatacgaaccaacggccaatcggaaccacaggcggagacgatggaagtgtccgaacaagtaaccccgtcctcccttactgatgtactggttaactccttgaagttcaatcacattctggtggaactgctcgttgagtcgaaaatacctaccgataagtgtccggaaaaggaactcttgaaccctgtccaagccaatttcttggaagacacaaccaacaagtttttctcacaattaaccgatatcatagactctatttccactacaattccattggatctgaaggagatcggtttggtcaagactttgattcgaggttcacaaattgtgggctctggtgatctcgaatccttgcaatgtttcgttctggaagccgcctcccttaccgacttgctagatgacaatgacgtacagggcaagatcgatctttcgttgatcagggtagatatcgttgaatttgccatttcgtgtctaaaggaatgttcatcagagactggttggaaactttccggcctgttggataaagcccttacagagactagatcactactgacaaatcagagaaaccacatcatatttgtgaaaaaccagagattgaacgagcaactcagccatgtggtcttccaactctgcgatgtcttggtgaattcttcggataacgaattaagaaggtacgctatcaagcgtgctagtgaatcgcagcaaactcccgacgaagcacgtactttagaaatactgatgaagaatgctaatgttttcttgagcaatgcggttgctatctcatcgaaaccttgtggcttacaagaaacgatcatcgataaactgaaaagaaactatattcataatcaagctaaagagagactgcttttcctacaacacttagaacagaagtcaaatgttggtggtgatagcgctgttatgtcatcgtcctcttcctttttcacgcttaagtttgatgtgccacccgatcaccccttttatagccactatttttag

SEQ ID NO: 3245 - DNA, 1677 bp, Saccharomyces pastorianus
atggatgaagaagtcgtttttacaactaatacctcggggacaatatcctctgtgcactcattcgaacaagtaaatttgagacaatgttctacccaatctagaaatagttgtgtccaagtgggcagcaagtacttattcgttgctcaagcacaaaaggcattgatcaatgtttacaacatgtcaggttcattcaagagagagtctgtagaacagcgcctaccattacctgaagttttaaaatgtctagaagtggttcaaaataccggtgtacagtacgaccgtatccatggtgtaaaccacaacttgccagagttcaatcttccgtacctgttgcttggttccaccgaatcgggtaaactgtacatatgggagttgaattcggggattttattgaatgtgaagccgatggcacactatcaaagtatcaccaagattaagtcgattttaaacgggaagtatattgtcacttcaggtaacgattcgagagttattatatggcaaacagtcgatttggtatcggcatcgaatgacgagcctaagcctatctgcattcttcatgatcatactttacctgttacagacttccaagtttctaccagtcagggaaaatttttatcttgtgctggtacaaaactattcacggtatctcaagatgctaccatgagatgctacgatttgagtctaataggttctaaaaagaagcaaaaaaagcaagaagaagacggtaatgaagttagtatcggcaaagcgcctagattgctcgctacatttacattaccttttgccattaaatctatatccctcgatcctgctgatagggcatgttatattgggactgccgatggctgttttgcactaaatttgttctataagttaaaggggaacaccattgttaatctgttacaatctacaggaatgaacactattcaaaaaggtagagttttttcattggtacaacgcagtttagtaactggtggcgaaaatcaagatttggattcattatattcaataggtcagctggtttgcgataagcttttggattctaacgtgtcgtgtctcgaaatatcaatggatggtacgttacttatgatcggtgacactgaggggaaagtttccattgcggaaatatactcgaaacagatcattagaaccattcaaaccttgaccacgtcacaggcttctgtcggggaagtgactaatattctagtaaatccttacagaactgaaagtggcgaccaactgtttgaaggggcaactacaggaaaacataccagcggtagtaatggcaataactctctaaagataccaaatctacaaagggttatatttgataatcaaaacaaaagcctctcgcacgatatttggtatcagataggagagccagaaaccgaggcagatcctagtttagcgttaccattgaacgactttaatggctatttggaacatatcaagtcccaagaatccatgttcgcacatatgggcaggatttcaagtgacgtgaaagtggttggtacagaaacggacgctgtctcatcttttgacgatcaaaccgctaaagatgaagagattactgaactcaaagctaacgtggaggcactaactcacgcctacaaagaattacgtggtatgcacgaaaagctatacgaggagcatcaacacgtactcgacaagctttag

SEQ ID NO: 3246 - DNA, 5223 bp, Saccharomyces pastorianus
atgacttctacaccgtgtattgggaatgattgtttgccaagggtatctggcgataatgcttctgattggcagctgcaagataatataacaaacaagccagggggtatagacggagaggtttggctgtcgagggacggtctgcgcgtgaagtggtgtattgaagatcaatgcatacgtcagtttgcttataaccagaagatcatcaaagccggctatatcgacttcgaaaagacgtcggactgtttcgtggtggtgctatctgatattgcgcatgtatatttcctacccaagggcaatgccacgacggtgtgcttcccatttttgatcggaaatgcgttttggtacgctaatggagtgatcttggagagagacacttctgctttcttcatggattgctctactgattgtaagcccatggacttcgatttgaagcataaatacatcactttaacggatccaatgactccttttggccttatttccatctcaaatacttacaagggtggtataaatagcgcttctggtaataaaagcgatggtttacaggacttgcaacttgtgctcttccccagcgacaaggaaaaatacatagcagtatttttagaccggaattctaaaattttacggttttattatagcagagttttatcatcagatcagtcacgaaaaggagagctaacgacctcttcgacaaagaagagcggtttggacaccgcaagtaatagccataagactaacggaattactaagaacctacgcaaattctcacttctgacgcgtaggacagcatccataaactccagttcacacgattgcaatgcaactgaaagggtccttagcggcactctaggcaacgccccaaacaggacagatattttcgctcttccgtcttcatcttcaagaagaagcctatcggcaaccctagatagaatggggaacaatatcgccatgaataatagagctactccttcaccctttttcgatttctccacaaacgctggggctcattcaaatatcaccccagtatcacaacctatgcaacagcaacagcaggaatatttaaatcaaacagcatcttcctcgaaggatatcgttttaacagaaatatcatctatgaaactaccggatgatattatattcacttcccaaagcttgagctctatattgagcaccttgaagtttttgtctttgagatttggaagtcaagaagcgcttttaatatttcatgagcccactcatttttgcaaaatctggttaattgatcttttaccagatgtattggattctattccatttaaaatatacgggaactcgccgcaaaacatgattaggctagaaaatctaaaactcaaagacccatcaagaataaagactataaatatacataagcgtcttaacgggtgcctgattatagtattacaagaaccgaatgggggagaatacgagtcatttttacacaatccatttattaaaatatcatcgcctttattaactgtttccaaagagcttactgaaaaaaatctggtcccttgcttacagcaatcgttcccatatcctgagactagcttcactaagctttgtttcgaagctctcaagtatatcaccccccctgcatttaacatctcattcatatttatatggcaatttgcatattcactgctaccttcaaggattagtagtgaagttggaagcttaaaactagagcatgacgctttttcattagtcctttccttattgattctgcaggtacctggttcttccactcaggaatataaagattataaagaaatatacgaacacgagctgtttcggcaattaaagcgggatccggaaacaaccaactctgttctaccgaagattgttatcggattgcatttgatacgagaggaatactccttgaatatcctgtgtcgcactgagtatgcattgttggggcaatttcttagctttgctaccgccgttatgggctggcctgatctatggcaaaggtattacttaccaaatacggatctagaatcgaaaagccaactactcccaagcgaacgaaactcagcttttgttcatccgctagatgaaccgccctcgattacaaaatcattatacagtataacggaaaacagttcaataccgttatgtccattcattagtttctcgaggcttgcagcaacagacactcaagttgaattgcgcatcactccgagaagtttcaaaattttggggctatatgaactagtgcactccgctaattttttaccggactatattttaggtattctttccagtttgaaaatagaagaaaacgaattccaaacttatcctttaggcattttggttccactacaaaatatcttgaaaatattggaagataagctatctcaagttcaggacaatttagagttgcttgatagggcagatttacaaagatgcagtgcaataatcaaaggcataaaaaatgattctcaggaaattattaaaagaggccaaaaagatggttctatatcgtacaagctaccggtcaccaggaatagaggctctttacgtaagaaacccaatgatatatttacagtattatccgagattgtgaaatgtgcaagtcaagttccactggatggatctgctatgaggatgtcaaacatcgaggacgatgaggatatcgatgaggggcgttcgctcaaactaaatgcagggctgatattttcagaagataaaagatttagccatgttgtatcattattagcctattataggcctacgcagacgcaatttttcaccactaagacagagtatgcccaagtgctatcccaaaagaaatattttgctaaaataatggcgttaagaacttgtacgaatggtataggttggggtgctgtggcatacgctacagaaaaaccaatatccacccaaaaatgggtggtccagcctctcaatatgatttcagtgtttcctgatgacacaaaaatagctgtaaaggtcccagaagatattggtcatgatattgctaagtgggggcagtttcatgccggggttagttctggtctccgtatatctaagaaggcaagtggtatcacaggaagttggattgcgtttaataaaccgaaagaactagatgcataccatggtggtttcctttttggtttgggacttagtggacacttgaagaatttagaagaatggcacatatacaattaccttagtcccagaaatactcatataagtattggattacttctcgggatgagttcaagtatgaaaggcagtatggattcgaaactaataaaggttatcagtgtgcatctggttgcatttctgcctagcgggtctagcgatctaaatatagatctaaaattacaaaccgctggtattataggaatgggtatgttatatctcaactcaagacacaagagaatgagcgattcaatttttgcacaacttgtgtcactacttaatgtcaacgatgaactggtcgctgatgaagagtataggttagcagcaggcatatcattgggtcttattaatttgggagctgggcaaaggaaatcaaataagtgggattcatctttactgaggttgggaaattatctttcggaagatatttatgactcaaatgatgttgagcaaaatgaaatgtatgaagaacttactacaaagttattggatattatcaccagtacatatgatgtggaaaaggattggataccagaaagttcacaaattggtgcggtgattgcgattatgtttttgttcttaaagacaaacaattttgagattgccgatatactgaaagttgacttaaatgccacttcaaaattaaacgtcagttcccgtccggaattattaatgtatcgagaatgggcatccaatatgattttatgggaccatataggtgatgacctgtttttcatcatgaaagatatcgacatcggtgaaaaatatggtgaacttaatacggatttacttcctttctactatactatggcaggaagaattttagctgtgggtattagatttgcttctacgggaaatttgaaaatccgcaatgttcttctatcccttgttgataaatttctgcccttttatcagtatcctgggagacagaatcttgactttaggttgacgatttctgttattaatgttttagtaaatgtcattattgtgtctttgagtatggttatgtgtgccagtggtgatttggacgtcttgagaagagttaaatatctgcatgaagttgtatctgggccacattctgacttatttcgagcgattcccacttctaaaagtggcggagacgcatctcaggtaaactcaaatgttaacacaccaggaaataatgactctgatgagagaaatgatgaaacaaggacttctttggatgatgaaagatcagtgaatggtagtgacattagtgacccgacagcctttttagaagataaaaaggatatggatgaccattatggtaaatttatttctacagatctagcattaggttttctttttcttgggtctggacagtacgctctcaacacttctactttagaatctatcgccttcttaagtatgtcagttttacccacatatacaactccgcatcccttgcaagagctgaagcatttctggagcatggctgtagagcctcgttgtcttgttatcaaggatatttctactggcgatccggtgaataacgttcctattcagttggtggttgaaaaagacattgaaaaggatgaagtggtaaaggagatgtcaacaccatgcctacttcccgacttttctaagatcaaatctatcagggtaaaaaagcatgattactttccaatggaaattaacttcactaaagacttgtcagcttctgatttttttagtaatggaaccattatttatatacaaaaaaaatcacaaagtgctttcgaggataggacttcatataagaacgcagaggacattcatgttgcgctcaagaaaaaggcaacagaagctaaaagttcgaagcttactcccaaaaggaggcatgggagttccttttcctcacaactcatagaaagtttgggtattcaagatttgacaatggtggaacttgatagcatttttaatgcagaaaataatacagcattgacggattctgaatcatataatctaggtttgctttgttcggataaaaacagtggtgacgttttggattgtcagctcaaactgtggaacaaaagttttgggccgcatgctgattaa

SEQ ID NO: 3247 - DNA, 603 bp, Saccharomyces pastorianus
atgcagcttgcgcgaacccagcttggacaatggctttttgtatttattctatttagcattggatttgtgcacgctaatacagaatcaatcctgtttcaagtcccgcacaatttcccactctcagacgtaagagacaggtttgtttccagcagcgatgtcgacaccgttccttttatatctctattaggcgaaacgatggcccaggtcaccgtcaaggttaataccaccaatgcgcagctaggtagcgctacgtatatcgaattgaaggacctgcaacgagacgaaacataccagataaaagtatgttggtcggctatacatccagtatccatcgatgacctacagactatcataataccgcgttccactgaattccaaggaaccacatcggaccacgcgagaatagtagtggcgtttcagatgatgtccgactcataccccagcgagaacgccatggtcccaattcaagtctcgttgattactaccaagttgggcatcccggtggatatctatcctatcctggtcgttatagtattattaatagcaggtcttgttgttacccgggcaccacacgtgctgaacgatcttttgttgaagttttag

SEQ ID NO: 3248 - DNA, 1221 bp, Saccharomyces pastorianus
atgtctgaagaagtgtggagtggaaatcaaggtacgctgtctgtatatgtgagcaaagccagagacctgcccaatctgaataagctggacaagcaaaatgtgatgcttaggttacgaatagctcatatgacaagagcaagtaacactttacatcgggcaggtcaaaatcctgttttccgttacttggaaaaattcgatattacccccgaaattaagcctttgatgtacgtggaggtctactgcgatagaagaaagaaatctccccttcccattgggagatgtgaaatagatctgttaaatgctattagggcagacccgaaggaaggttattgcacctggtatgaactgaagagaagcggggacgaatttgctggtaccatatttattgagttgacatttactccaaaagtacctcgtctaaacagagatgaccttaacaaagaaacggataggttggattcctcaatggcaatgagacccatgccgccattaccaaccgagttagaatacgactatgtccacggctctacaatgcgacaggtcactccacaattgagcgctacaactactaagattagatccgagggacaatcatatagaaatgcgaatatgttttcaatgtcatccaaatccgacacagcagtcttagctaacgataccgatccgaccgttttgccaccaacttttgcatcttccatggggacaacgtctaccctagagactaatgacactgttatatcgaacacttcggatactaagttccattttgccaatctgagaaaattaaaggaaaagataaatattttcaagaatccagatagttcgacaaataattgccaaaatgaagctaataaagtggacattgaggctcttcaaaaggccattggtgtaacctccttgtcttacgatgatgacgatgaggaaatacaggaagggttctattcttcaagtcatagggtttcgcataacttaaaccaaccaccattacctcctataccaactagagacgatacatctacttattcgagatcacgcaataggtctcctataccgaaaggtagagaggctcgccagcaatcggttcctttcaactcgcatattccttcttcagttttgaattctccaaaactaccaccactaccgacaggttcaaattccaatttcagttcaaggaaaaattccatgtctcccacaaggagaagaccaccgccaaggttttag

SEQ ID NO: 3249 - DNA, 1131 bp, Saccharomyces pastorianus
atgtcagcctctattccagaaaccatgaaagccgtcatcattgaagatggcaaagctgttgtcaagcaggatattcccattcctgaattggaagaaggattcgttctggttaagaccgttgttgttgctggtaaccccaccgattggaagcacattgactacaaaattgggcctcaaggttccctcctaggctgtgacgttgccggccaaattgttaaattgggtccaggcgtcgattccaagcactttgccattggcgattacatttacgggtttgttcacggtgcctccgtgagattcccctccaatggtgcctttgccgaatattcagccatctcatccgagattgcttatagaccagccagggaatggagattgtctgggaaggacagtctacctgaaggtcccgttaagtccttggaaggtgctgttacccttccagtgtctttgagcactgctggtatgatcctaacccataattttggtctggacttgaagtgggaacccgccaccccacaaagggaccaccccattttattatggggtggtgccaccgccgtgggtcaaccactgatccagttggccaaaaaactgaacggttttaccaagatcatcgtcgtcgcttcccggaaacacgagaagcaattgaaagaatacggtgccgatgaacttttcgattaccatgatgctgatgttatcgaacaaattaagaggaagtacaacaatatcccctacttggtggactgtgtctctgatctaggcacgctgcaacaggtgtaccaatgtgccgctgatgaactggatgccaccgtcattgaattgacaagtttaactgacaagaacgttaaagaggaaaacaggagacaaaacgtcagtgtcgacgggaccatgttgtacctgatagccggcaacgacgttccattcggaaacgtgactttaccggccgacccgcaatacaagacagccggcatcaagttcatcaaattcatcaatgcaaaggtcaatgacggcgaaatccaccacatccctgtcaaggtctacaagaaggggctggacgatatcccacaactccttgacgacatcaggcggggcaagaactctggtgagaaactggttgcagttttgaactag

SEQ ID NO: 3250 - DNA, 522 bp, Saccharomyces pastorianus
atgtcatctgcggccaataatacgagtaacaatacaggaggcaagaaaccgttgaaatttgtatcggaaggagtaagcaacatagaaacccagaagatacgagaacaagtggagcagaagaaatatgaatcagagtacaagaggaaaactaggaaatccctgcgagaccagctgaggtcaaatgcaatcagtaaacaaaagcaatacaatggattggtgagagaccgcgaaagctttaccaggctgagcaaagacgaattagcattctaccagaacagtaagaatgaggcgctgaaaaaggaaaaggaactgaatgagtacttgaatgccaaggcaactagctttgaaagaaagaaaaaagctttgctcaagggcactaacgctacggctaatccagaaggggacgtaaaagtcaaaacaagcctggatagcaacatacaaatcaaaggtataaagcctctaaattcgaggccaaagattaaaatatccataaaaaaactgaataagaaactagacaagtga

SEQ ID NO: 3251 - DNA, 1203 bp, Saccharomyces pastorianus
atggacgagtacgccagtgaagaccaaagagaaaacaaagctatagctagcgtgatcatatcgttcctaaagtatgaggaatatgccttaagagagtttcacggtttaagagtaaagaaatgggaatcaatctcggatcgccagaaatcgatgatcccaaactacacgaaatatctagcagatttgaaagttgcaatagaagtgaatggcaagtttttcagaagcgtggctgaatgggccatgcaatccataagcattggaccagaagagatggtacagcccgatgatacggatatgaacaagacctgctctttacttattcaggtatatagggaatggtccacagaggctgtctccgaacgtcgttgtttacactcaaggctcataccggttttgaaagcgttggaaccatcccaaactaatattcttataccaggtagcgggacaggacgccttcttgtggaccttagtcgaatggggtataattgtgagggcaatgaatgttcatatcacatgctgcttgtatctcaatatcttctaaatgcagggctaacccaaggatcaactatcatctatccattcttgcattctttttcccattggaagggcaacgaggatcaattgactcccatcgggatccctgatatcgaggcggggtcttcaaagagagttatggggcctatgtccatatgtgctggctcgtttgtcgattgttatggtcgaaatcagggcacaaagatttcttctcactatacattttcacaaaggatgcaaatgagcagagcaaaggcagaaaactcgaaagatatcgtaataacaaacttttttatagacacagggcccaatatcttggattacctggatacaatagtacacgttctaaagcccggtggaatctggtgcaatttcggcccattgttgtaccatttcgaaaatgaccgtggagtcgagaccacttacgaagtcaacccgtactccgggttccaggacaaggtcaatgattccacacccttgatggggttagagttgtctggcgacgctatcatagagatcgctacaaaatgcctggacttcgagctaatgcaaagagaatcaggaattctcagcggatatgggcgccacgtaggtctagaaagttgcgcaatgcccgggtacatgtgtcatttctgggtcttgaagtggagccctgctggcaaagtgtga

SEQ ID NO: 3252 - DNA, 309 bp, Saccharomyces pastorianus
atggaaggcgacagcatgagcggcgacggcagtgccgtccatccagtcgaactgtcggtatactcagtactttctgctgacctagacggcttgtaccagtccatcaatgaactacgggagtcgcaagcgttactcattcttatgctacggagggttcgtgataaacttcgaagagagggacaagttctttacgacccggaacctttcaagcccacgatggataaattggccaacctgacgactcgcgtgaacacgcttacaaagacgtatgagcagcttcagggcagcgtcaaatctctcgccaaatag

SEQ ID NO: 3253 - DNA, 1362 bp, Saccharomyces pastorianus
atgtgtgtgtacaagtcgaactcgaacaagagtaacccttccttcatttttgaaagaaccgtgcaagacgtaaactctaacaatttgttctttgcacccccggtttccgcttcgaatacagctcgtagttcgaggtccaacacagctcgtagttcaagatccaacagcttttacaacctacagactgtttctcctatacccatctcaggcggcaggacgaagagctcgtcatcgaggaagaactccaacaatgttttgtctcccctagataacgtgatgcccaactccaggtcggcgtcgaactccaccaccagctcgctggcacatcaagagtacgtcttgaacccgatctctgatatgcatcaccatcacagtcgtcgtcgtactttggagaactcggtggccccagctttggacgcaagttgctcgatagtgaacgatgaaaataccgacctgaccgatgtcgacatggtatattcgagaaggccttcttccaccatcggcttaaatctggctttattggctagaacaaatagcgccaccctcccatcggtctcttcgcccgtttctccagatctcaagctttcaagatcttattctcattcagcaggtgctcgcccagctctaaataatgttaacaacactggaatgacaacagcaagcggcgaaccgaaatccagaatcctgaggttttactcttatgtcgatatgttaagcgatgaaaaactcacacaaacaaataatgccccctcaaatagaccatctttaaaatgtcagccaaattcatgcccttttattctcaaacagcctcaacctcaaccttctttttcatcatcagcaacaacaacattttccaatccttttaccaaaagtactgaatttccatccggttctccttacgtgtctccacagcagaatgcaagacgttactctaccaatgcctccaaatcacctccgaatcagtcgtcgtcaatactgctacaaagaaaacccgctttatcaaacacagaacctactacaaatatcgggagaaaccctagatttgaaatagagtcaagtgacagcgaagaggaggaagatttagcaatggacatgttagaaccctcatttcgcccagcttcatccttacgttcaagtgcaacttgtttagcgagtaatccagaaatagcaaatcaggtgtctttgtcgtcatcgtcgtcatttgcaacaatgcctaaatctacgtccttatcgaacgatccttcattcgtatcgtcatctaatactttagcctcagataacgaattacgaactgaaaaagttagcgaggtgctaaagaaaaaagtctcaaacagtggattttcatccgatataaacaattaa

SEQ ID NO: 3254 - DNA, 954 bp, Saccharomyces pastorianus
atggtcaggaaaaatttcataccatctgtctcacttgtcggaagagacattcccaaactaaccagcactacggctagttcaactaccgtgtcagcctctgcatcagaaatagcgtcccacacgacttccaagtccttgccgtcattgaacaccgcgctttccagttcgaagacatcgtcgtcatcgctaattgctccgacgataacaccgccttctactttggggaacccgtttatactgaacgctgcccataagactaatggaaccgtgtatattgctgtaggcgctatcataggcgccatttttgttagcatctttatatggtggttatactccagctatttggcccgtcgttccgcgataaatgtttcctatccaaatgatagcaagagtttttacaagggacatcataaacacacttcttctttgcaaaacaatccgttcgacattaatgatgaaaagtctttcatgcaggatgactgggattcgataagtcaattggaatctaatgaggaaaatgtttctccattcaacccaattcaagacccattcgcggataatagaaggaacttattcatatcgcctactttgcaagtatcacagcatgaaaaaggccatagtcgtcatcaatcaagggacaccattagcagtttcattgatgataaatccttgtacataggcaactacatggaaaatcaagaagacgaagaagatgaagaagagagaaagctgaatctgaatagaccacaaagggcagcatcacccgaaaggaaggaaaagaaaaccaattcaatgaaaggttaccataaaaaaaacaaatcctcattgggtcttataccggtagcttctgccacttccaataccagctcacccaaaaaggctcataagaggcaggcgccatcaatgtttttggatgatatcttgaatggcaaagaaaaaatagagactatatag

SEQ ID NO: 3255 - DNA, 1650 bp, Saccharomyces pastorianus
atgatgtctggtacttgggcaggttacaattttaaagagatcaaatcgcattttgggttcaagaaatatgccgtgtcgtgcttgatcattctgtatggactaataaaggtttcgacgtggatcttccgtcaatgggtgtattccagtttaaatccattctccaaaagaaactttctgcttaagagagctacagcctcctgtggcgagaagaacgtcaaggtttttggttttttccatccgtattgtaatgctggtggtggtggtgaaaaagttttgtggaaagccgtggatatcactctgaggaaagatcctaagaacatcattatgatctattccggtgatttcttggatggcggggatgtcactccggagagcatcttgaatgatgtgaagacgaagttcgattatgacttagattctgatagaatatttttcatttcattgaaattaagatatttagtggactcttcgacatggaaacattttactttgattgggcaggctattggatcgatgatgctggcattcgaatccattattaagtgtccgcctgatatatggattgattcgatggggtaccccttcagttatcccattgtggctagatttctgaagagaattcccattgtcacatatactcattatccgataatgtcaaaggacatgctaaataaattatttgcaatgcccaagaagagtttcaaggtttacggtaaaatattatactggaagatctttatgttaatttaccaatccattggttctaaaattgacatcgtcattaccaactcgacgtggacaaacaaccatataagacagatttggtcatccaatacatgtaagatcatatatccaccatgttccaccgaaaaactagtcgattggaaacagaaatttggtggtgctagggtccagaggctaaaccaagcaatcgtgttggcacaatttcgtcctgagaaacgtcataaactgatcgttgaatcttacgcaaacttcttggaaaatttacccgattctataccgccatttaaattaataatggtgggttctaccagatccaagcaagacgaagaatacgttaagagtttacaagactggtccgaaaatgacttgaagattcccaaaggtttgatatcattcgagaagaatttgtcctttgataagattgaaatcttgttaaacaaatctacatttggtatcaacgccatgtggaatgaacattttggtattgctattgtagagtatatggcttccgggttaatccccatagtccatgcatcagcaggccccttattggatatagtaatgccatggagctctaactcgaatacaaaaaatgaccgctcacaatgggaacttcaaaaggaatatttttccgattttaatgatgacggtgagacgactggatttttcttcaaagaggaaagtgatccggatttcaacccaaccaaggatcccctcaggtaccccaatttgtccgaattgttcttacaaatgatgaaattggacgacgactgcgtaagcgcaatgagtgcaagaaaccaacagtattcattatttaaattctctgatttgaaatttgatagggattgggaaaatttcgtattgaatccgatcgaccagctattagaagaggaggaaaggggctga

SEQ ID NO: 3256 - DNA, 1767 bp, Saccharomyces pastorianus
atgagtagtattgttaataaaagtggcacacgttttgcgcccaaaatcaggcaacgtagaatagctactagtggaacgccgacaccaaaaccaagaacgcctcagctgttcatgcctgagagtaaagaaatcgacattgacaatagtgataatgacaaagctactgataccaagaaggcttcagaagtagaagagcactttttagaaggctctacattagctaccagtgccagaaatgacgatgagttagaagagaatgaagggcctattgatgcttccacccaaaagcctacatcgaacattatagaagagagcgagaaactgcaactagcacctacccaaacacaacgtgaacaaaagagatcgaggtcgagtaggttagcctcattgagtaaagatagcgaaagtcgcccaagtttcaagccatcgttcttggattcttcaggtaataataatggtcctgctcgacgtctatccacaatatccagtaaggttccgaagaaaataaggctaggaagtattacagaaaatgatttaaacttgaaaactttcaaaaggcatagagtattgggaaaaccatcgtcgactaaaaaatcggcaagtgcacacaggattagtattgtctccaaaattgcaccacctaccgcaatgaatgattctgtagacaagagtgaatcttcacccgaaagtattcttttggcaggagccaatgaaaatgaaaactacgtaatcagtaaagttaaagatattcctaaaaaagtaagggacggagagtctgccaaatatcttattgacgaagagaattttacgatggctgagttatgcaaaccatctttccctattggccaagtatcagagaactttgagaaatctaaaatggctaaaaaagctaaattagagaaaagaaaacatcttagggagttaaggatgcgtgcacgtcaagaattcaaacctttgcaatcgttgacaaaagaagaacagcaagaagaagaggagaaaagaaaggaagagagaaataaagtattcaatgcagacattcctgagtcggaccgcaaagcccatacggcaattcaattgaagcttaatgctgatggtactatggctattgatgaagagaccatggttgttgacaggcacaaaaatgctagtattgaaaatgattataaggaaaaagttgatgagaatccattcgccaacctttataattatggttcatatggtaggaattcttatacagacccttggactgtggaagagatgataaaattctataaatcactatctatgtgggggacagatttcaatttaatatcgcaattatatccttataggtcaagaagacaagtaaaggctaagtttgttaacgaagagaaaaaacatcctatactgattgaattagctcttcggtctaaattacctccaaatttcgacgagtattgttacgaaacaaaaagggacattgacacggtagcaaatttcaacgagaaattagttgaattacagaatgaacatgaacaacatatgaaggaaatcgaagaagccaaaaatacagcaaagcaggaagatcaaactacacaaaggctaaacgacgccaatttgaacaagaaagggtccggtggtattatgacgaatgacttgaaagtttatagaaagacagaagttgttttgggtacaattgatgacttgaaaagaaagaagcgtcaagaaaaagatgcaaatggaaacgaggataatgaagggagtggagcagaatctgaagtcgattag

SEQ ID NO: 3257 - DNA, 1776 bp, Saccharomyces pastorianus
atgtccacgccgttccaagactttaagacgttctgcaataaagtgggcttggacttccaatgggctaatacacagtcccccaaacctactcccgaaactaacccttctgaaatcccttcagccgtcaatgaaacaagacaagaaaggcccaaagattctgtcaactgcgtatttactgatatcaagaacgcacagctttggaacgtcttcaaaaaggttggcgtaaatactctttccactgagccggctcgatcaaacatgtctgagacaaatgctagtaaaaccgattgtgctattcataatgatttcgccatgatggatgcatcaccgccaacaccatccgctgtgggccagaacgaaaacagtggcccctcttcaacgcatggcagtgacgcaactgccccatctacagcggcctcggtatccaccaaccatgagccagtgccctcattggcctcctcggttagcacttcctcttcagtttactcgtcatgggacccccctcatcctccatcttcatcatctttccctgctgctgctgctgccgccgctgctattaccccatacaaccattccaaggactgcaggtcaaaacagacaaacgaatacactgttctatttgacatttcctgcctgagcacagttgacactgtcagccaccatgaaggttcccaagattgtcgccgtcgctttcctgacatgacatctccagctgacgacgcccgctcatcagctctagtcacaccctctcctacgccgcgccatcaagatgtgaaccgcagtggttgctccacagccgcctgcactgcttcgaactccaccgccgccaccaccacgactccctcatacatggaaaagtacctcaacaagccacgaaactggtttgaaaagaccatgggcaaatactgtcctttgttccttagaagcaccaagaacattgactacgactctactgagttcatgtttgaacgaaaaatgatagccgtccaattcctgcttctagacgaacactcggagcccaggctgtactacaaccctaccaatggagccgttccgttctggaaaaggccatttaactacgacatgatgcccagctacgaccaactcttggacgaggccgagcgctctttcgatacttatcagtacaggtatgtggggttccaaagaatagagccgtactccattttctgtccctggaagaacacccaaagagaaatagacctggtgcttgaccacatccatttctccttcaatgttggcaggaaaaagtctctccaacggaagggaaacatcacgctcgatacgctggacagcgacatcgaccgcgatattagaatcgagccttaccggccctttccttccgaaaatcttgtgtacgagggcctcacacaccctgccgaacagtctttcgttgctgggagcccggacgcatcgcttatcgagaaggggtaccaggcactagtcgatatctgtagggagtctcgcccaccatccaatgacttcccttcccgcagtctcgttagcgctccacagatcgcagctccacagatcgcagctccacctaatacttgccgcctagttcttgttcgtgaatgtcgcacggcttccgagtcggagctcaataaggccttctggtttaattcaaagagaaaggacgtcacggtaaccgtaccagcacctccctctcctgcttctctctctcccccctctcctcccttttgcacaacaaaaggcctcccacgaaagtggttcttccctcttgtccgccgccagtga

SEQ ID NO: 3258 - DNA, 1473 bp, Saccharomyces pastorianus
atgaatttctacagggacgcaacatgggtgctagaggatattgagaaggaggctgcgaaggtgagaatttctggttctatgcagacgctagtgctgaagagctgtaaaagatacaagttgaaaagtaatcctaaacacatttatgctgtgctcgattcgtgctggaaatataagccatatttggaaaaagtgatgaaaaaagcacgcatactggaggaaatccctaagaaaaagggcaaacctctcttttcaagactaacattattattactgtgccatgatttgttactctctaaacaaaaaagaattcagatgggtaagcatcccatcaaagaatacgtattgaagttcaagagcccattacatagcgaaatggtcaaattaaagctgaagttgaaggtaagagacttatctgagttggttctaagtgaagacattgtcaatgatcttccacctgttagatggattaggatcaacccattgaagtgccatccagatgggaatacagaacctgtattggctgaactgaaaaagaaatttactcagaaggtggacaattggtctgagttagtacccggttccatctattatgatgaatatatacctaatttgtttggtattcatccaacagacaaaattacagcacacgaattgtataagcatgggaagattattattcaagatcgagcttcttgtttcccagctcacattttgcatccggggagtaatgatattgtcatagatgcgtgctctgctccaggtaataagacaactcatacagcctcctatatattctccgaaccaccaaaggacaagaacattcaaatatatgcttttgaaaaggatcccgaaagagcaaaaattttacagaaaatgataaagatagctggctgttcttctaacatcgatgtcaacgtgggtgatttcacaaaattggctactccagaaaaatgcaagggtgtcactggatttattatagatccaagttgctctggtagtggtatctttggtcgtaagtttttcgattcgcttaatagaaggaaaattgatgaaaaggatgatgaagatgatgttgtaccagatgaacaggaggagtttatggcgaaagaagaattgcagacaagactagcaaaactgagctcgtttcagttccagatggtgaaacacgcaatgagtttcccaagtgctaaaaaaatagtatacagcacatgttccattcatgcggaagaaaatgaacgtgttgtgatagaccttctactagataaggccgttcaagaatggggttgggaggtagaatcaagaactgaagttgttccttcttggcctagacgaggcaaagtagaagaattcgaagaggtcttcagggacggaagcgcccatgacccgcaacaactcgctgaaggctgcattagagctctaccgaaagaagatggtggtattggcttctttactgtctgctttgtgaggaaataa

SEQ ID NO: 3259 - DNA, 1410 bp, Saccharomyces pastorianus
atgtctgaaaataacgaagaacaacaccaacaacaacaacaacaggagcccgttgctgttgaaacccctttagtaactgaagttccaacttcagcagacccatccgctgagcagaacgtctctagtgaaggaaactctgaacaagttgacgatgaacaaggtgaaaacgatccttctgtagttcctgctaatgctatcactggtggtagagaaacttctgacagagtcttgtatgtcggtaacttagacaaagctattaccgaagacattttaaagcaatatttccaagtcggtggtccaattgccaatattaagattatgattgataagaacaataagaatgtcaattacgcctttgttgaataccaccaatctcatgacgctaatattgccttgcaaacgttaaatgggaaacaaattgaaaacaatgttgtcaagatcaactgggctttccaatcccagcaaagctcctccgatgatacatttaacttattcgttggtgatttgaacgttaatgtcgatgatgaaactttaagaaacgccttcaaagatttcccatcttatttgagtggccatgttatgtgggatatgcaaactggtagttcaagaggttacggttttgtttccttcacttctcaagatgatgctcaaactgccatggacagtatgcaaggtcaagatttgaacggtagaccactaagaatcaactgggctgctaagcgtgataacaacaacagcaacaacaacaacaacaacaataacaacaacaatactaataactacccgcaacgtcgtaactacggcaataacaaccgtggtggcttccgtcaatataacaacaacaacaacaataacaacatgaacatggggatgaacatggggatgaacatgaacatgaacagcaacagaggtatgccaccaagttcaatgggcatgccaatgggcgctatgccattgccatctcaaggccaacctcaacaatcccagaccattggtttaccacctcaagtaaatccacaagcggtcgaccatatcatcagaagtgctccaccaagagtcaccactgcttatatcggtaacattccacactttgccactgaggctgatttaattccattgttccaaaacttcggtttcattctagatttcaagcactacccagaaaagggatgttgtttcataaaatatgacacccacgaacaagctgctgtttgtattgttgccttggccaacttcccattccaaggtagaaacttgagaactggttggggtaaggaaagatcaaacttcatgccacaacaacaacagcaacaaggtggtcaaccactgataatgaatgaccaacaacaaccagttatgcctgaccaacaacagcaacagcagcaacagcaacaacagcaacaacaataa

SEQ ID NO: 3260 - DNA, 3135 bp, Saccharomyces pastorianus
atgaccgattcgcaacaatctataactgtattggaagagctttttcgacagttggaagttgcaactcctgaaactagagatggcatttcttctgaactttcctcgtttttgaacgggaatattattgagcatgacgttccagaggttttcttcgatgaatttcaaaaggcaattcagaataaacaaaaggcactaaacactctgggggccatcgcttacatagccaacgaaactaacttgtctccatctgttgagccttatatcgtggccacggttccttccgtatgcactaaaacaggcagtaaagataatgacatcgaggtcgtggccacgaaggcgctgaaggccattgctagcgctgtcaatccggtcgccttgaaggcatttttgcctcatttgattcattctctgggaactaccaacaagtggaaagaaaaagttgctatacttgaagtgatttcgacgttggtagatgccgctaaagagcaggtagccctaagaatgccagagctgatcccggttctttccgagtcgatgtgggacacgaagaaagaggtcaaagacgccgctacggcaaccatcacaaaggcaactgagactgttgataataaagatatcgaaagattcattcctaaactgattgaatgtattgcaaatcccaatgaagtgcccgaaactgttcaccttttgggtgcaacaacttttgttgccgaagtcactcccgcgactttgtctatcatggttcccttattaggtagaggtttagctgagagagaaacttccataaaacgtaaagctgccgtgatcattgataatatgtgcaaattggttgaggatccccaagttgttgccccattcctgggtaaactgttaccagggttaaagaataattttgctactattgccgatcctgaagcacgtgaagttacactaagggctttgaaaactttgagacgtgtcggtaatgttagtgaagatgatgtgttaccagaaatatcgcacgctggtgatgtggccacaacattgggcgtcattatggaattgctcaagtctgaaaaggttgctcccagattcaagatcgtcgttgagtatatagccgccatcgctgcaaatttgatcgatgagagaattattgaccaacaaacttggtttactcacgtcacaccttatatgactatatttttacacgagaatacagcaaaagagatactggatgatttcaggaaaagggccgtggataatattcccgtcggaccaaatttccaagatgaggaagacgaaggtgaagatttatgtaactgtgagttttctttggcatatggtgccaagatcttgctaaacaaaactcaactaaggttgaaaaggggtagaaggtatggtctatgtgggcctaatggtgctgggaaatccactctaatgcgttcggttgccaatggtcaagttgacggcttccccactcaagatgaatgtcgcaccgtttatgtggaacacgacatcgataatacacattctgaagtttccgttttagagtttgtttatgctggtaatgtagggtccaaggacgttattactgcgaaattaaaagagtttggctttagtaatgacatgataaatatgccaattgcttctttatctggaggttggaaaatgaaattggctttagcaagggctgtgctgaaaaatgcggatattttgctattagacgaaccaacgaatcatctggacactgtcaatgtacaatggttggtaaattacttgaatacttgtggcgttacatcagtgattgtttctcatgattctggtttcctagataatgtttgccagtatatcattcattatgaaggtctcaaattaagaaagtacaaaggaaatttgtcagagtttgttcaaaaatgtcccacagcacagtcgtattatgaattgagtgcctctgacttagaatttcaatttccaacccctggttatttagaaggtgtcaagacaaagcagaaggctattgtcaaagtgaccaatatgacttttcagtacccagggacaactaaaccgcaggtttctgatgtcactttccaatgttcattatcctcgagaattgcagttattgggcccaacggggctggtaagtccactttaattaacgttctcactggtgaacttctaccaacaagtggtgaggtatatactcacgaaaattgtcgtatcgcctacatcaagcaacatgcgtttgctcatattgaatcacacttggacaaaactccatctgaatatatccagtggaggttccaaaccggtgaagatagagaaaccatggatagagctaataggcaaataaatgaaaatgatgcggaagccatgaacaaaatcttcaaaatcgaaggaactccacgaaggattgcaggagttcactcaagaagaaaattcaagaacacatacgaatacgagtgctctttcttcttaggcgaaaacattggcatgaagtccgagagatgggtcccgatgatgtctgttgataacgcttggctaccaagaggcgaactaattgaatcgcacactaaactcgttgcagaagttgatatgagggaagcacttgcctccggtcaatttagagccttaactagaaaagagattgagtctcattgtgccatgttaggtttggatgccgaattagtttcacattcaagaatcagaggtttatcaggtggacaaaaggttaagctggtcctcgctgcctgcacctggcaaaggccacatttgattgttttggatgaaccaaccaattatctggatagagattccttgggtgctctttcaaaagctttaacggcttttgaaggcggtgtcattatcatcacacattcggcagaatttaccaagaatttaactgatgaagtttgggcagttaaggacggtaagatgacgccatctggccataattgggcggcaggacaaggtgtcggcccaagaattgagaaaaaagaggacgaaggtgataaattcgatgcaatggggaataaaattagtagtgggaagaaaaaaagtaagctttcttcagcagaattgagaaagaaaaagaaagaaagaatgaagaagaagaaagaaatgggtgacgaatacgtctcatcggatgaagatgtttag

SEQ ID NO: 3261 - DNA, 855 bp, Saccharomyces pastorianus
atgaacactttctttctatccttgcttagtggcgccgctgctggcacctctacggacttggtttttttccctatagatacaatcaaaaccaggcttcaagctaaaggagggttctttgctaatggagggtacaaaggcatataccgtggcctaggaagtgctgttgtagcatcagcaccaggtgcctcacttttttttgttagttatgactatatgaaagtgaaatcaaagccatatgtcagtaaactatattcaccaggatctgagcaattggttgatacaaccacacacatgctttcctcctctatcggtgaaatctgtgcatgtcttgttcgtgtcccagcggaagttgtcaagcaaaggacgcaaattcactccacaaattcttcctggcagacattacaatcaattctccggaacgacaataaagaaggtttgagaaagaatctttatagaggctggtctaccaccattatgagggaaataccgtttacctgcatacaatttcccttatacgagtacttgaagaagacatgggctaaagcgaacgatcaagcccaagcggagccatggaagggggctgtttgtggttcaattgcgggtggaattgcggcagcaacaacaacgccattagatttcttaaaaacaagactaatgcttaacaagagaactacctcacttgggaacgtaatcgttaaaatttatagagaagaaggtgctgctgtatttttcagtggagtggggccacggacaatgtggatcagtgctggtggtgccattttcctaggaatgtatgaaaccgttcattctttgctatcgaataaatttccgacaagtgaagaaatgaaaccgtaa

SEQ ID NO: 3262 - DNA, 1152 bp, Saccharomyces pastorianus
atgaaggttattagtcttaagaaggattcagttaccaagggaggagccgttattacattattaccagaagacaaggaagatttgttcaccatttatcagattatagataaagacgatgagttaatatttaaaaaaaagttcacctctaaacttgatgaaactggcaagaaaaaaagtaccgatttgattaaactaaaaattaaagtaatatccaatgaattcgatatgaaaggagagtatctgaaatacaaaggtattactgtaacagatgaaacaggagacaataaacctgttggtaaatatttagggtttaccctagattacgtatatcctttcaccattataaagcataactttaataaattcatgcagaaacttctgaatgacgcctgtaatgttgaacaaaaatcagatactgcagcaatagttttgcaggaaggaattgcgcatgtttgtttagtgacggcctcatctaccattttaaagcaaaaaattgagtatagtatgccaaagaaaaagagggctactgatgttgtaaaatttgacgaaaaaactgaaaagttttataaggctatttacaatgcaatgaaaaaagaccttgatcttgaaaagctaaaaaccataattctctgctcgcccggtttttatgccaaaatattaatggacaaaatagttcagtatgccgaagaagaacacaataagaaaatcctagacaacagaggtatgttttttattgctcattcctctacgggctatttgcagggtattaacgaagttttgaaaaaccctttgtatgcttcgaagctgcaagataccaaatattctaaagaaaatttaataatggatgaatttctactgcacctaaataaggatgatgataaggcttggtatggggaaaaggaaatcacgaaagctgcagagtatggagcgataaattatttattattgacagataaagttttgcactcagatgatattgctcagagaggaaaatatctaaagctaatggactctgttgaaagtaatggagggaaagcgttagtatttagtactttgcattctcttggagaagagcttgaccaactaacaggtattgcctgtatcctcaagtacccactgcccgatctggacgaagataataatgaagtatga

SEQ ID NO: 3263 - DNA, 2670 bp, Saccharomyces pastorianus
atgtcaaactctatatcaggtactggtaagcgaagagtgaagagaacctatgaagttaccgggaaagatgatggcgtaataagtgccgagtcagcctctccgatgagtagggaagaggaagaggaagaggaagaagctagaaaggaggaccctatatttttgcgaccaaaaaaatcacgttatgacccaaataaaactttttcctctaccagacaaggatcggaggatcatgcggtatcaaaggaagaactattagaatcagagaggaaagcttccaataatggcaagcaagctctgttaaagagcgaggtttctgcgatggggaatctggtacatgtaacccaaaatcaagctgagaatgcttctaattcagattcaaatgggggagaagatcgaagtcgcaaagcggaagttgtgcataagcaaactaacgctaaaaagagtgaaaatggaaatagacaacgaatgtgggaagaacagcagctacaaaacgcgatggctgcaaaaaatgacaatcctgatgacatcaccgtagaggggtctgacaagtacgactatgtattcgatacagatgcaatgattgattacaccaacgatgacgatgatttgctgcctgaagaaaaacttcaatacgaaactcgtttagcagaagcattagagactgaggaaaaacgtatactaactatacaagaaacaagaaaattattgcctgtataccaatataaagatgaactacttaaggagatcgagaaacatcaagtgttgattataatgggtgaaactgggtcaggtaagactacgcaattgcctcaatatttagtagatgatggttacaccaaacagggggagttccaaattgccataacgcaacctcgtcgtgtggctgccacttctgttgcagcgagagtggccgacgaaatgaatgttgtacttggtaaggaagtgggctaccaaattcgttttgaagataagactactcccaataagacaattctgaaatatatgacagacggtatgttactgagggaatttcttgcagattccaagctatccaagtactcttgcattatgattgacgaagctcatgaacgtaccttagctacagatatcttgataggtttgctgaaagatattttacccaaaaggcctaacttaaaactattaatttcatcagccacaatgaatgcgaaaaagttctcggaattttttgatgattgtcccatctttaacgttcctgggagaagataccctgtcgatattcattacacattacaaccggaagcaaactacatacacgctgccataacaacaattttccaaattcacaccacacaagctttaccaggggatatactggtgttcttaacagggcaagaagaaatcgaaagaacaaagaggaaattagaggaaattatgtttagattaggttctcgaacaagggaaatgcttataacacctatctatgcaaatttacctcaagaacaacaatcgaaaatttttcaaccgactccagaggactgtaggaaagtcgtcttggcaactaatattgcagaaacatccttgaccattgacggtatcaaatacgttattgatcccggatttgttaaggaaaattcatatgtaccttctacaggtatgacacaacttttgacggtaccatgctcaagagcttcagtagatcagcgtgccggtagagctggccgtgtggggccaggaaagtgttttagaatttttacaaaatggtcatattcacacgagttagaactcatgcccaagcctgagattacgagaacaaatctctctaacactgtattgctattattatctctgggtgttaccgatttgataaaatttcctttaatggataaaccaggtattcccacattacgaaaatccttggagaatttgtacattttaggtgcgttgaatagtaaaggggcgattaccaacctaggcagaatgatgtgtgaattcccctgtgaacctgagtttgcaaaagttcttcatacagctgcttcgcacgagcaatgccaaggtgtgttagaagagtgtttgaccataatttcgatgttacacgaaacatcgtcactatttattggtcagaagaaggaagctgcagcaagcgtaacaagtgaagtggaaagtgaccatatgttgtatttagaaattttcaatcagtggagaaattccaaattttctaggagttggtgccaggatcacaaaattcaatttaaaacgatgtcgaggataagaaacattagaaaccaactattcaggtgtagtgagaaactggggttggtggaaaagaatgatcgggctagagtgaaggtaagcaattcaacggtttacttgaatggcaggataacgcgttgcttcataagtggattcccaatgaatgttgtacagttggggcccaccggataccacacgatgggtaaatcgtcaggtggactaaacgttaatattcatccctccagtatccttttcgctaattacaaagaaaaggcgcagagaccaagcaaatatgtgctttatcaacaattgacgctgacatcgaaggagtttatcagagactgtctggttattcctaaggaggaatggttggcggagatggttccgcaagtttttaaaggcttgcttggggagaaaacaaatagaggaagagaatga

SEQ ID NO: 3264 - DNA, 609 bp, Saccharomyces pastorianus
atgaattccaccgatatcaagccttgcgctatcaacacgcccgtttctgcccacatcacgttccactataagccggctacggacaggagcagcagctgctgctcctcgtccgccggctcgaactcctgctcccccaggggcagctctgccggcctgccgcccaccctatcgagcgaaaacgagatcatcgagaccgtgctgaacgtgtctgcgcccgccgccgccgacccaacgccgccctcgttgttcaagagtaactacaccgctgccgtcgccacgaggtcgagctcgtgctcgacctcgccgtccagacgcaactccgtactgcccgcgggcgacttccaccagtgtgcgcatcacaaaaactttcagagaagggccagtgagccgcagctgccctctttcgaagaccgctcgtcgtccgagatgaaacggtctgtctcgtacgcccagcacaacaacgtgctgtttcccatcagagacttgccggagccccagacacccgattctcactcggactcgtcttgtccgtgcaacagacaccatcacaggaggaactccgtcgccgtcaagttcgacaagccactatacaaaagactatactcataa

SEQ ID NO: 3265 - DNA, 1422 bp, Saccharomyces pastorianus
atgaagtttgtgacagctagttataacgtcgggtatcctgtttatggtgccaagttcttggacaatgatacgttgcttgtggcaggcggtggaggcgaaggtaacaatgggatatcgaataaactgacgactttgcgagtggatcccaccaaagatagtaagaagagccagttccgcgagttgagcgagtttgtgttggaggagaacggcgattctcccacagcaattgatgcctcgaagggtatacttttgttgggttgcaatgaaaacagtacaaagattacggaaggtaaaggtaataaacacttgaggaagttcgaatacaacggagtgaacgatcaattgaagtttgttaccagcgtggattttgataagtccacgaacccagatgattacacaaaactggtttatatttcgcgagaaggtaccgtggccgccatagcatcatctaaagtacctgctataatgagaatcattgacccaagcgacttaaccgaaaagtttgagattgagactaggggggaagtgaaagacttgcatttctcttcagacggcaaggttattgcttatatcaccggttctagtttagaagtgatatcgaccgttacagggagctgtattgcaaggaagacagatttcgataagaattggagtttgtcgaagataaacttgatagctgatgacacggtattaatcgcagcttcgttgaaaaagggtaaaggtatcgtgttgaccaaaataagcataaagtcgggaaacacctctgtattgaaaactaaacaagtaacaaacaaattcaaaggaatcacttccatggatgttgacgtgaagggtgaattagcggtaatggcaagcaatgataactcggtagctcttgtgaaactaagagacctatcagtctctaaaatattcaagcaagctcatagttttgccattactgaagtagcaatttccccagattccacatatgtggcaagtgtctctgcggccaatactatccacgtaataaaactaccgttcaattactccaattatacttcaactaaagaaaaatttaccaagttcttcaccaacttcatccttatcgtattgttttcctttattttacagttttcttacaagcacaatttgcattccacgctctttaactatgcaaagagcaacttcatactcaagaaggataccatttcttcgccctacgttatcaatgaagacctacatcaaactactttatttggcaactacggtacaaagacctctgtgtccatcacggactccataaaagtgcatgatatgcacgcgacgaatagtgtaggtgaaagtggagatttccgtgttgaaaatgggagtattcacacagaggcaattgaggtcggagccactgaggtaaattcagacgacaagaatgatgctgaagcttaa

SEQ ID NO: 3266 - DNA, 1302 bp, Saccharomyces pastorianus
atgtctgcgttaaggaatattaagtataatgaagaggaagatggggaattgcccagcctagtgacaggtgaagagacgaatttacaagaaatactggaaaatgtttcgtatgatggtgggaatattgttagcgacaccaaagtggaaagagtgaataagcaaatggaaagtgtaggtaataatatgaaggggttacaaaagaggaaacgtatccctgtgagcatcatcactggttatttaggatcaggaaaatcgactttattggaaaaaatagcattaaagggtgcggataaaaagattgctgtaattttgaatgaatttggagattccagtgaaatcgaaaaagctatgaccatcaaaaatgggtcgtccagttatcaagaatggttagatttaggtaacggatgtttgtgctgctccctgaaaaatataggtgtcaaggccattgaagatatggtggaacgttctcctggtaagattgattacattcttctggaaacatccggtattgcagaccctgctcctatcgccaagatgttttggcaagatgaaggactgaatagtagtgtttatatcgatgggatcattactgttctggattgtgaacacatattgaagtgtttggatgatgtttctgttgacgctcattggcatggggataaagtcgggttggaggggaatctgactattgcacacttccagctagccatggcagatcgcatcataatgaacaaatacgataagatcgagcactcgcccaatacgatcaagcagttacagaaaagaatacgggaaatcaattgcattgcccccatgtatttcacgaagtatagcgaaacttcgatcgacaagctgttggatattcacgcatacgacagtatacgagtatcagacattttagataacagtgtgggagatgggaccattcatgatcatcgaatgggcacggtcatgcttactttcagaccattaagagacgaggaggaatatactgagagattcctcaaacaatttttgcagcccttactatggaaaaattttggggccctgactgtattggaagatggctcccaacatcataagcatgattgggaagtgcaaagaactaaaggtttgatacttatcgaaggcaacaaacctgctgtgcgtgtgattcagggcgtccgtgacacatatgatgtctttccaggccgacatgatgatgatggctcccataaggaatgtaagattgttcttattgggaagtacctggaaaaggattccatacagaagctgttacataaaacattgaattataagtag

SEQ ID NO: 3267 - DNA, 765 bp, Saccharomyces pastorianus
atggttgccaggagtcagtttaagggaagcagtgccacggtagcgcagttgattgaggaagtcggccgcagtgggggtaggaggcctgtgttccagtataaggttccacgctcgatacgatgggcttcgaccgccctagctgtggtgttcgtgacgtatggggctgcttacaccgatatgtcgtggagaaccgctcgagaagtgtacgggaatgccaccgaggatgaacaacgcagtgtatggttcaagttcaagacttttgggccggtcgcccttggggtcttacccatagtcctggcctgcggtacgaagcacgtaacatcgaggctagtcacagagatgaaatgtctaccgcccgccaagaatagcacggtaccacggtgccagttgacccgacacactcccttccgggggaggccagtcaccattctcagagacatcaatgagctgtccaagaacaaaaccaccaagatctttaccggggtgggatcgcagggtatggaggacaaggcgacgtttgtgttcttcatagaagacaaaaaggcgacttcattttttaacaggttttatatcttctcgagatctggcagcgtagtcaagaacgacgctaggatcttggattgcttcttcaacgatgcctcagtcaacaagctactgaacaagtcgatattgacccagattctctcgcgcacctctgccaagactcaatttcactccaataattccagattttccatcaaaaatattgttaagcccaaacactaa

SEQ ID NO: 3268 - DNA, 2136 bp, Saccharomyces pastorianus
atgactttctcttccgctcgtttcacttacatatgcacgattttgttgggattgaccaatattgctctggcctcagatccagagacagtttgggtcactgtgacgaagactgatgaggcaaatggggctgtcgcaaccacagtttcgcctgcattggtttccacatccaccatagtccaagctgatactacgactttgtacacgacttggtgtccattgaccattgccgctgcctctactactgccacctctactgttgctacctctactactgctgcatctccttcagttttttatgcaacaacattatcgcagttcagtactttgacgttatccactgaagtttgttcacacgaggcatgttctttatcgtcaacattaccaacaacgaccctatccgtcactactgagcttaccttatacgtctgccctacttgtcaaacaacaactatcaactcgtcccccaagctggaaactacaactgtaccatcgtctagtgttactacatcgtcgacaagtccctccaagtcctcatcaagtacttcaatttcttcaagcaaggccagctcaagttcaatttcaagcatacacacaagccccagctcagttgtaacttctactgttcaaaaaagctccatttcaagcaccacgtctacgtctaccacgtctacgtctaccagttcaccttccaccagttcgccttctaccagttcgccttctaccagttcaacttctgccagttcaacttctaccagttcaacttctactagttcaacttctactagttctacccctagtagctctgctctttctttggtaaagtcatcgtcatcgttatcaccatcatcatcatctacaagctcctcggtatctccgccaccttcttcaactacctccacaacatcaacatctacatcctcatatgctccatccacgcaatcttcctccatcgtttcgacctcatcgcctgttgtcattccttctaccacttcctcaacagtcgaggaaaccaccactactcaaagttcatctacccataccagcgaattggccaccacaacctcttccgaggctccatcgctttctatgtccacatatttcacaactatcagtggtgttactactatgtacacaacatggtgcccttactcctctgaatctcaaaccgctacattaactgggacccatgacacaactacgactggcattgagacttgcactcatgaaacctgtttggcgacatcttctcagactacaaattccgtagtatcttccacgatcacacctacaacaagcgatgttgcttctacagctacctcatcatctgaatgttctacgtgcactgaaaaattagaatcgacatcgtctgaaaaaccaacatcagcaatttcttctgagcaagacactacatccacagaaattactgcaagctcgacaacttcttcaggagaagatttcaataaacacgctaccggtaaatattacccaacttcatccaataccgtatttggatcgtccatcagaagccaaacgacaatttcgccaagcattggttcaagctctcaagaacaattgacgtcttcatcatcgacatcttcttcatcttcatctacaccttctccatcttcatctacatcgacgtctccattttatccatcttcatcgacatttaccccactaccatctatttcaatgtcgtctgcttctacaaaaacactatcctcgaccagttcattatcgccatatagttcttcgccatcgtcaactgatgaacaaccctcaaccgctacaccatctgtgactccatcaactagcactgaactgacatcgactgctaaaccagccatttcttcatcatcctctgtaccaacgactactacgtcatccacctccacatccttggctgctacatcatcatcatcatcatcatcatccgcctcctcttcatcacagtcatttgtatcaccatcctccgttactacagcgtcggaattttccagttcaatttctgtgcagtaccaaacttcttcagtggtaacaatcagccaatacatgggtagcggttcacaaaatggtttaccattgaataagattttctttgccgtcattgccgttgctttcaacgcaattatctaa

SEQ ID NO: 3269 - DNA, 630 bp, Saccharomyces pastorianus
atgagtcaagtgtcacaatcccaggaaggctccgggcgattttggaacaagttcaaaacatcaaccaaatcgttatctacatcattgtcacatttatccattaagacagagaaagatggtgacacagcaaattcaaccctggtccataagggactggtcaaattctatcaaaatcagcaccccttccagggattcccaggctggttaggggagaaagaagaactacctaatgagcgcaaaatattagatacgcaagtgaagcacgatatgaaaaagcaaaattctcatactttctcatcgtccttctccagcagaaggaaaccttcttctgaaaaccccatggatcctcctgcgtcgagtgggagcgtgccggaatatacacctgcaagcaaatcctttcagaacatttataacaacacagcaagttcttctggctcagcaccgagaagggctgtatcgcgaccctctaaaccttctgcaggccaagaatttagagcaagcttaggtcggagtaaaacatcgggaagttttaacacttccaatactccaacgccgccaccagaatcaaatggtggggttatggcaatgaaggatagactaaagaggcgcaataatgattatgggttttaa

SEQ ID NO: 3270 - DNA, 726 bp, Saccharomyces pastorianus
atgaacagcaaacctcaacaagaagaagaacaacaacaacaacaacaaccaatcgtattcgtcaccggtacagatactgatgtcggcaagacttttgtatctgcattgctggtacacaaatggaaagctgcatactggaaacccgtgcagacaggaattgagtctgatcaaggtgactcggagacattgaaaaatttcaaagtagccgcatcgacttggcaaccacgtatattcacgcccacctatgtgctgcagaagcctctgtctccgctacaggccatggaatatgagcctggagtggacatcaagttgttggattttgcagttcctgatgaatgggacgcagagagcccactggtcgtagagggagccggtggggtctgcgtgcccatcactcgcaagctggaaataactacggatctgattaaacatctgatcgagactagtagccatcctgtgtacgtggttgtcgtgacacgcagcggattgggaactctgaatcatacgttgcttacatggaatcacctctgcgataacggtttgagaggccacttgttcggggtcattcttaatggggaacccaatgaaggcaacgtgcaggtgctcgagaagttcggtgtggacgtgatcgcacaagttggacaatgtgctacggcgcagaacttggaaatggcgctgcatgggctgccaacggtggagtcattggtgacccaacaagatagataa

SEQ ID NO: 3271 - DNA, 2163 bp, Saccharomyces pastorianus
atgatgcttttaaggtctattataaccttccttttgttctttcagctttcggttgcaaaagcccctccaaggaagactgctagattaaacactcatgagaggagagctatgtattcatgctatgtggggttacgtaaagaaccgtgggaatttaatggttccgctatatgcaaatatgagcccgcgattcaatcaatgctgtactgtctccacgaggacacgcatgatagagggtattcgaataaaactcttgggaaggttttcgaagaaatgagacagttttgcgacacaccaaaatttttgaacatgactgacgctgaattttatgcctcattgaataatgggacacattacattcgggatcaattcaaaacaaacatcaatctaacctttcctattgtactaaattctacgctaagaaaaggctattatgacgcgtattatggattctactataatcttgatatgcctcattattttggaggaattatttgtgcttacttcgtgggagttatgctagttgcaggtttaattcggtttttagattatactcccataaaaagagtgattttcaagcagaagctgatcgattatgcgagaggttatgtcacgttacctactctttggaaaaaacatgcagagcctttctcctacctaaaagtgattactggctaccttcccactagattcgagactttggttattttgggatacctaatacttcataccattttcatgtcttacaaataccagtatgatccttaccacatcattttcccagcccataaagcagaagtggccgattttgttgcatttaggagcggtatactttcatttgcacatttaccgctcattgtcctatttgcagggagaaataactttctacaacttatttcgggtttaaaatatacttcgtttatcacgttccacaagtgggttggaagaatgatgtttcttgatgccgtgattcactctgcagctttcacctactatttcgtgtttactaaccgatgggaggctgctagaataagaacttattggaagtttggcgttactgccacctgtttagggggaataataattttcttttcctttggagttttcagaagacacttttatgaaagttttctcctcctccatatcgtactctctgctctatttctttatgcctgttgggaacacgttacaagtattggaagtattgagtgggtttatgctgcagtagcaatttggggtgttgacagaattgtacgcatcgttagaattattctcttaggattcccaaaagccgacttgaaattagttggttctgatttcattcgtgtgacagtaaccaaacaaaaaaacctctggaaagcaaagccaggccagtatgtgtttgtctctttcttacgtccgttgtgtttttggcagtcgcatccgtttacagttatggattcgtgcgtaaaggatggagaattggttattattttgaaagcaaagaagggtgtgacaaaactggtaaagaaccacgtcgagcgtgaaggtggaagaacttccatgaggttggctatcgaaggtccatatggatccaggccctctgcccatcacttcaacaatgtcttacttttggcaggcggaacaggtctccccggtccgattgcccatgctattgagttaggaaagacaacggctgcaagtggaaaaaattttgtacagctagtcatagcagttagaggatttgatatgctcaacgcgtgtaagcaggaactgatggctttgaaagatctgaatgttcaggttgatatttacaattctaagcaggatgcaactccaggtgaactaatcatttcaaatgtatccaaaaatgacgaaatagtgatagaaaacactccttctgttgccagtaattcagagaaagctctttctgaaaacgaaaatacggagcaacccctctctgtaagtgacacgtccagcgccgattttgaatttgccactttccatgcgggaagacctaacgttgcagaattgttgaaggaagcggtcagccatcctggttcacttgcagtggtgtgttgtggtccgcccgtttttgttgacactgctagaaatgagactgccaaagctgtaatcagaaacccatcaagtgtaatcgaatactcagaagaatatcaagcgtggtaa

SEQ ID NO: 3272 - DNA, 876 bp, Saccharomyces pastorianus
atgtcgaatattactccaacattccacaagactcaaactcaagacggtgtgaaggcctggtaccgtgaggcaggtgaaagagggaaccccataattgttttactacatgggttccccacatcttctaacatgttcagaaacctcattcctttattggctagacacttccatgtcattgccccagatttgcccgggtttggcttctcagagacaccggatgactacgacttcagttttgacgcgttaagtgacacaattggatatttgcttgacactttgagtatcgataggtactttatttatatatttgattatggttctccggtaggcttccggttagccttgaaaaatccttccaaaattagaggggttatcactcaaaatggcaatgcatacgaagagggtcttgacgaccgcttttggggtcctttgaaggagtattggaagtcatatcaaagtgacccgaaatttgtcaaagctctctcttcatacatccaggatcctgccaatgtcatctctcagtaccatggcggagttgcgaatactgagtctgttgatcctgctgcttatacgctggacattgcgctcattcagcgtgtaggtcaaactgacattcaattgaagttgttctttgattaccaaaaaaatgtcaagttgtattccgaatttcaacggtttctaagagattcgaacattcccgttctagttgcttggggtcgaaatgacaccatctttagtgtttccggcgctgaagcctaccggaaagatgtcaaaaatttaaagattgtttactatgataccggccattttgctcttgagactcacgtagttaatattgctaagcaaattatcagcgtctttggagagaaggcttga

SEQ ID NO: 3273 - DNA, 1035 bp, Saccharomyces pastorianus
atgacaaatagtgacaatagtaatgaatacggagtcatcacaattggtgatgcgactaggttccaagccaccattgccaaacttggtgcaactttggttgacttaaaagtgaataatcaatcagttgttttaggatattcggaagttcaggattatttatccgatggcaacatgatgggtgctatcgttggccgttatgcaaatcgtatttccaagggtgtttttcatctggaagatggtccccaccagttgactgttaacaactgtggtaacacaaatcacagcagtattagttccctcaaccttaaaaaatacaaggctcttccagtcgaaaacccctccaaggatgtttacacggctgaattctcattgttagatgaccatacacaatccaatcctaatgaattcccaggtgatctagaagttacaataaagtacaccttgaatgttgtcgaaatgactttggacatggaataccgtgcacaactagttcgtggagaggctactcctatcaatatgaccagccacacctacttcaacttgaacaaggctaaaagtgacaagtctatcagtggtaccgaagttaaactttgttcgaacaagtcattagaagtcagcgaaggagcattgattccgaccggtaagatcatcgagagaaagattgctacatttgattctacaaaacctaccactttgggcgataatgctccagtttatgattgtagttttattgttgatgcaaataaagatttggaagtcaccgactctttgagcgtaaataaattggtgcctgtttttgaggcttatcatccagaatcacgcctcacactagaagttgcaacaacagaaccaactgttcacttttataccggtgatagtctatgtggcaaatttactcctagatcaggatttgccgttgaacaaggcagatatgttgatgcaatcaatcatgatgaatggagagattgtgttcttttaaaacgtggtaagttatacacctcaaagacccagtaccgttttaaggtacagatgtga

SEQ ID NO: 3274 - DNA, 366 bp, Saccharomyces pastorianus
atggtcaaattcgcttctatcgccgctggtgtcgtcgccatcgcttccggtgccgccgccgccaccaccaccctagctcaatcggacgaaagagttaacttggttgaattgggtgtctacgtttctgatatcagagctcatttggctcaatactacctgttccaagccgctcacccaactgaaacctacccagtcgaagttgctgaagctgttttcaactacggtgatttcaccaccatgttgactggtattgctccagaccaagtcaccagaatgatcactggtgtcccatggtactccaccagattgagaccagccatctccagcgccttgtccaaggacggcatctacactgtcgccaaatag

SEQ ID NO: 3275 - DNA, 363 bp, Saccharomyces pastorianus
atggtcaaattaacttcaatcgctgctggtgtcgccgccatcgccgccggtgcctccgcaactaccactctagctcaatctgacgaaagagtcaacttggttgagttgggtgtctacgtttccgatattagagcacatttggcccaatactacctgttccaagccgcccacccaactgaaacatacccagtcgaagttgctgaagccgttttcaactacggtgacttcaccaccatgttgaccggtattgctccagaccaagtcactagaatgatcactggtgttccatggtactccaccagattgagaccagccatctccagcgccttgtccaaggatggtatctacactgtcgccaaatag

SEQ ID NO: 3276 - DNA, 1539 bp, Saccharomyces pastorianus
atgatgagtagtgtaatccagaaaagaatttttgtaggaaacattttccatgatgcagatgactgttattcagaactattaaatagatttagcaagtttggtgactaccaagatgcggaatttgaaaagcacaatcactttgcatttattgacatgaaatttaatgatgaggcagcatttcacaagctgaaaaaaagtttcaataatgttaagtttaaagggaacatattgaagattgatgaagcaaagccgagttgggaatctatttgggcggtacaacatgcgaaggacctcgaggagaatattgtgcaaaccatcaagatgaaaaaaaagaattgggagcattacaagaagatggagaatgtggcgaagagctggaaagatcataaggaggttatttctggaagaatgagagaggttcccaggaaaagagctcagtcgagaaacattaccttcagaattaatgtggacggatcgttgaaagtttataaatgttacaaaacaaaattatggggttatgagagaaacaaagaattaaatgacctggtgtataaatttactaataatttctggaaaaacgggtatgatcatattgtagataggttagactatagtcatgcagccaagactattcgattcagtaatgggctgaaacagttgaccgtatcacagagtgagaacgctggaagcggaactacggacagcgatgagaatgtttcagaagaagagaaggagaaaaacaatgacattctaaatggcctattaaagggctttgatttcgataagccgatgccattgaatgactccgaggatgagctgattgtacaagatgaagcaggggaagaatatgtttcagagagggaggattccgtactggaagaagtaccagaagaagccacagaggaaaatgtttcagaagaggaggatactgtaatagaagaagacattgcagaagaggaggacgcagtagtggaagatagttcggagcaaattgtgaacgaagaagatgacgttataatggaagaagttccagagaagaaagaagaacaggatgacgatggggaggaggatcatgaattcattccaactttcagcaaggaagttggtcaaggcacaataagcaacacagagacattaagaaccttgttcaaccccaacgaggcagaaccagtgtcaggatttaaattaattgaagattcggacaacgatattgatcatgcaaaggatattgatgtccagcaacaagaagtagaagcaagaaactcacacgctttggaatttgattccaccatggcccaaacatccaaggataaagataccaagaacttcttatttttccctcatttacaatcgccatttttggtggggcaaacacagttgagtaaagtgagggctagtgagaacgaaaagattctgtcgacctgggacgaagagttttgggccaacagaggtaactggacgcgtgacatgagacgcaaaatgaaagatgcacagaagcatcgcaagagaaaacaatccaaaaacggggttcttttataa

SEQ ID NO: 3277 - DNA, 690 bp, Saccharomyces pastorianus
atgtccaatggtactggaaacgaggtcagttcgctgtacccgcctccacccccgtacgtaaagtttttcacacagacaaatctggagaaattaccaaaatataaggaaaataagactacgaacacagagcaagctgcgccgggagacggcaccggcagcagcggtaaagatgagcagcggggggaagaggagattacttgcgccctggactacctgatcccgcctcccatgcccaagaaccagcagtaccgagcgtttgggagcatatggcaggtcaaggaccaactgcccgacctcgagaccatggggctcacccaactgtacaaaaagtccacggagagcgaaagcacaaactaccagtacaaggtccaagagctgcgcaaactgttgaagtcgctcctgctgaactatttagagctcgtcggggtactaagcatcaacccggacgtgtatgagcgcaaggtggaggacatacgcaccatcctcgtcaacatccaccacctgctcaacgagtacaggccccatcaatcccgagagtccctcatcatgctgctggaggagcagctggagtacaagcgcggcgagatccgcgagatcgaccaggtctgcaaacaagtacaggacaaactcactagcatacaggacaccttgagagccggcacgcatcctcccccatcgtcctccccttga

SEQ ID NO: 3278 - DNA, 1422 bp, Saccharomyces pastorianus
atgtatgcgatgaaatttgcaatcacgtttattttcctggtcttggaactgctcacattgtgtcaagcttcagtccatcccataaaaatcaaggacaagcatttcgttgacacagtgactggaaagccgttcttcataaagggtgttgactatcagccaggaggctcttccgaagttaacgaaaaacaagacccgctatccaatcccgaagcatgtgctcgtgatattttgttgtttcaggatttgggcataaatacagtaagaatatactccataaatccagacctaaatcacgacgcatgtatgaccatgttggcgatggcaggaatttatcttattttggatgtgaattcaccgttacaaaaccagcatctgaacaggtatgaaccttggtctaccttcaacgaattttatttggaacatgttttcaaagtggtggaacaattctcccattacaataacactttaggattctttgctggtaatgaaattgtaaatgacaaaaggtcagcccaatattcaccggcatacattaaagagcttattggatctatgaaaaaatatataagtgcacactctgccagaacgattcccgtaggttattcagctgcagacgatttaagttataggatctcgttatccgagtatttagaatgcaaagtcgaagataagcctgagaacagcgttgatttctacggtgttaactcttatcagtggtgcggtcaacaaactatgcaaacttccggatacgacacattggtggaagcatacaggagctattcgaaaccagtttttttttcagagttcggatgcaataaagttttgcccaggcaattccaagaaatagactcattgttctctgatgagatgtattcagtgttcagtggaggtttggtttacgaattttcacaagaggataataattatggccttgtcgaatatcaagacgacggtaaggtacagttattggcagattttgaacagctcaaaatgcattaccaaaatgttgagtttccctctatgaaaactttaaaagagactgttgaaatgcaggacgccccatcgtgcatcgaagattatgaaaatttgaatattgaatccaaaattgctaaaaatttaggaagttttttggttaaaaaaggtgtaaaagttgagaaggggaaatatatagatctgcataagaatcagttatcccctaatgttacgatattgtgtgtagatggtagtagctgggatggacccaaaaggattgaagtagtacaaagtttaacatcctcagaccagcaagaggggggggaggaggacgaggaaggggaaagagatgagttgaaaagaaagcacagaaattctggctctatgatcggccctttggtaccccccggtttgtttttgctcttttatattttaaacatcctattttaa

SEQ ID NO: 3279 - DNA, 726 bp, Saccharomyces pastorianus
atgtgcgatagcagccaaaaagaagatcacagcacaagtgcgagcgatagcgcgttgttcttcaactaccatgagttctcgtttccattctacaaagagctcggttccgaagacgctatacccaaggagcacgacgaagaccacaaattgtgtataacgcactttccaaacgtctacgcgccgcggggctccgccgagtttcagatgacccgggtggtgcgtgtgccccggcgattcgacgagtcccgggacagcctggaaataccacagttcagcacgcagttgcccgggagcgagccggcggctatcgtcggagacaatagcagtggcgggtttgtgcgatgcgggcgctacgacaccggcgatcacgtgttcggctgctcgtccgcgtcgccactgtccgagctgttggacgcggcggagctggcagaggtggtgcgccgggtaaacgagtacctgcggcgggaggggtatgaggtgtacgggtggcgcaatcttggtggcgtggtgctggacgcggtcacgggcgggctgtggagctgggcgtcggggccccttctcgctttgtgtgggcctatgtttcaagagtcgcgcgccctagaacagtacgtggcgcagctgaactcgccgggcggattgctccacgagcgcggtgtgcgcctagttctgccccgacggtccgggtgcctatccctggattttgtcgtgcctcgacctgccgagtaa

SEQ ID NO: 3280 - DNA, 1830 bp, Saccharomyces pastorianus
atgaagacttcgatagctgctagttctcgatgggccaagggccgtttctctcatttccttccctcgtcgaccaacgaaaacgatatagaggcctcatccactgatgaatcctctttacaaggaaaggaactacatcataggaaaaaccacgaggaagaaaataatggtacgaggccaaaaaagtctcagatgtctacctcgactttgcagatagagacgagacaagatgaggatgaggatgaggatcgaatcgtcatcaaacccgttaatgatgaagacgatacctcggtgataataacattcaatcaatcgatctctcctttcatcatcactttgacatttgttgcctccatatctgggttcatgtttggttatgatacaggttatatatcgagtgcgttgatttctatcaataaagacttggacaataaagagttgacgtatggtgaaagagaaataatcacagccgctacttccttgggtgctttaatcacaagtatcggggcaggtaccgcggcagatgtgtttggcagaagaccgtgcttgatgttttccaatttaatgttcttaatcggggcaatcttacaaatcaccgctcatagattttggcaaatggctgcaggtaggctggttatggggttcggggttggtattggttctctaatttcaccccttttcatcagtgaaattgctcccaagatgatcagaggccggttgaccgtcataaattctctatggctgactggtggtcaattgattgcctatggctgtggtgcgggccttaaccacgtcaacaacggttggagaattttggttggtttatcgttagtacctactgttatacaatttactttcttttgtttcttaccagatactccaagatattatgtcatgaaaggtgatttagagaaggccaaaatggtccttaagaggagttatgtgaatacagatgatgatgtgattgaccaaaaagttgacgaactggctagtctgaaccaatctataccgggaagaaacccgataataaaattctggaatatggtcaaggaattacatatggtaccttcgaatttcagagcattgattatcggttgcggtctacaagccattcaacaatttactggttggaattccttgatgtatttttcaggcacaatctttgaaacggtaggattcaaaaactcttctgctgtttccattattgtttcaggtacgaattttattttcacattaatagcgttcttctgcatcgataaaattggccgtagatatatcttgttgattggtctgccgggcatgacaatagcattggtcgtatgtgccatcgccttccatttcttaggtattaagtttagcggcgctagtgcggttgtggcatctacagggttttcatcctgggggatcgtgatcattatatttattatcgtttacgctgcattctatgctttaggtatcggtaccgtaccatggcaacaatccgaattattcccacagaatgtgagaggtgtggggacttcatttgccactgctaccaactgggcaggttctttggtcattgcatctactttcttgaccatgttacaaaacatcacacctacgggtacgtttgccttctttgccgctgtggcatgcttatcaacaatcttctgttacttctgctatcctgaattatcagggttggaattagaagaagttcaaacaattttgaaagatgggtttaatattaaggcttccaaagctttggccaagaagagaaaaaggcaggtggctcaaggtgctgttcatcacaaattgaaattcgaacccacccaagaaatcgtggaaagttaa

SEQ ID NO: 3281 - DNA, 690 bp, Saccharomyces pastorianus
atgcaggtagcgcaaaaagataaaagagatacgcagatctccaaagctttgtcatatttgcttcgacatgcagccacgaaggaaaatttgatcattgacacgaatggttatactccagtgaaagaactactaagccataatagattgaaaactcataaatgtacactggacgatatacatcgcattgttaaggagaatgataagcaacgtttccatataaaagtatccgaagcgggtgaagagtggatttgcgctacccaagggcattcaatcaaatccatcaaaccatcagatgacgttcttgaaccgatcactgaagtatcgcagctaccagcggagctgatacatgggacaaatctccaatccgctataaatatcattaaatcaggcacgatatcaccgatgagcagaaatcatgtccatttgtcgccgggaatgttacatgagaagggtgttattagtggaatgcggtcttcaagtactgtctatatttttattaaatgccattctctctcatttcttcaaaatattaaagtattcagatccctgaataatgttttcttgagtactagcattcctgttcaatatattgaaaaaattgacatcaaaagaaatttgagggacgaagagaaattaaatatcttgacaagaatcttgggtgagagaaatataccgatggaaaagatgtaa

SEQ ID NO: 3282 - DNA, 1302 bp, Saccharomyces pastorianus
atgagtagcgacgagagtgtagaacaagtcacccaacaagtgtctggactgaaaaccgccgatgtcaaggaacaagtggtcacaccttgggacgtggaaggtggtgttgatgaacaaggtaaggcccagaacatagattacgataaattgatcaagaagttcggtaccaagccagtcaatgaagaaaccctgaaaagatttaaacaagtgacaggtcatgaaccacatcatttcatgcgtaagggtctgtttttcagtgagcgtgatttcaccaagattttggatctttacgaacaagggaaaccatttttcttatataccggtagaggtccctcaagtgattctatgcacttgggacatatggttccatttgtgttcaccaaatggttacaggatgtgttcgacgtgccattagtcattgagttgactgatgacgaaaaatttttattcaaacataagttaacgattaatgacgttaagaattttgcccgtgaaaacgccaaggatatcgtcgccgttggctttgatccaaagaataccttcatcttttccgatctacaatatatgggtggcgcattctatgaaactgtggtaagagtctccagacaaatcacaggttctactgcaaaggccgttttcgggttcaatgactccgattgtatcggtaagttccatttcgcatctatccaaattgccactgcgtttccaagttcattccccgatgttttaggcttgcctgataagacaccatgtttgattccatgtgccatcgatcaagatccatatttcagagtctgcagagatgtagcggataaactaaagtattcaaagcctgcattgctgcattccaggtttttcccagctttgcaaggttctactaccaaaatgtcagcctctgatgacactactgccattttcatgaccgacacaccaaagcaaatccaaaagaaagtcaacaagtacgcattcagtggaggccaagtctctgctgatatgcatagagaattgggtggtaaccccgatgtcgacgttgcataccaatacttatcgtttttcaaagacgatgatgctttcttaaaagagtgttacgacaaatacaagtctggtgaactactatcaggtgaaatgaagaaattgtgtatcgaaactttacaggaattcgtcaaggcattccaagaacgtagggctcaagtggacgatgagactttgaacaaattcatgctaccacataagctggtctggggcgaaaaggaaagactagtcgcacccaagccaaaggtcaagcaagaaaagaagaaataa

SEQ ID NO: 3283 - DNA, 942 bp, Saccharomyces pastorianus
atgatgtttgtaaggtcccgggtattgaggagtgctacagtgtggaagcaattggatgtttgttcgaggtttacggttgggcgacaaacaagatacaaatctactgatgcctcggaagatgaagtgaagcatttccaggagctggccccaacgtggtgggacactgacggatcgcaaagaattttgcataagatgaaccttgcccggttggattttatacaaagaacactaaggaaccaaatcaagattcaggatccagaggtatacgtccctgggttcaactacaaggaatttttacctgactatgtatgtgacaatattcgtcgcgaagtgcaagggagtatagaggctggcttgtccggaaggcaggaaatgagcgtcttggacgtggggtgcggtggtggtattttgagtgaatcattggcgagactcaaatgggtaaagaaagtccaaggaatcgacttgactcgtgaatgtattatggttgcaaaagaacacgccaagaaagatcctatgctggaagggaaagttgattatgagtgtaaggccttggaagacgtcacaggacagtttgatattatcacttgtatggaaatgctcgagcacgtagacgttcccagcgaaatcctaaggcactgctggtccagactgaaccccgacggaggaatactatttttgagtaccatcaacagagatctcatctcgtggttcactacgatcttcgtaggtgaaaatgtcttaaaggttgttccaaagggaacccatcatttgagcaaatacatcaattcgaaagagatcctagcctggttcaatgaccactacgacggccaatttcgcttgctggatctaaaaggaaccatgtaccttccaatgcaaggatgggtcgagcacaactgttcagacattggtaattattctatggccatccagagattgaagtga

SEQ ID NO: 3284 - DNA, 972 bp, Saccharomyces pastorianus
atgtccaagattttgtctttgcaacttccatgggtggagaaatatcgccctcaggttttatctgatatagtcggtaataaagaaaccattgatcgacttcagcaaatcgctaaagatggtaacatgccccatatgataatatctggtatgccgggtataggtaagaccacctcggtacattgccttgcgcatgagctgctgggcagttcctacggcgatggtgttttggaattgaacgcttcagacgatagaggtattgatgtcgtcagaaaccagataaaacactttgcccagaagaaattgcatcttcctcaaggtaaacataagatcatcatcctcgatgaagcggactccatgacagctggtgctcagcaagcattgagaagaaccatggaattatactcgaattcaaccagattcgcatttgcttgtaatcaatctaataagatcattgagccattacaaagtagatgcgcaattttaaggtactctaagctatcggatgaagacgttctaaaacgtctcttggaggtcataaaactagaagatgtcaaatacacgaatgatgggttagaagcaataatttttactgccgaaggtgatatgagacaagctataaacaatttacaaagtactgtagcaggacatggcttagtcaacgctgataatgttttcaggatcgtcgattccccacatccattaatagtgaagaaaatgctactagccaccaacctagacgattccatcaacatcttgagaacggatctttggaaaaagggttattcctcaattgatatcgtaacaacatccttccgtgtcactaaaaacttgacgcaagttaaggaatcagtaaggttagaaatgataaaggaaattggcctaactcatatgagaattttggaaggtgtcgggacttacttacaattggctagtatgttagccaaaattcgtaaactaaatactaaagtctaa

SEQ ID NO: 3285 - DNA, 9246 bp, Saccharomyces pastorianus
atgtcccatcacaccaaaaataataagaaagagcatggtaccgatgctcaatcatcccatatgactcgcacactgatcaagcatgttcttttcgatagaatactcccgatcttaccggtcgagtccaatctcagtacttatctggaagtggaggcatacgctccattcatatcatgcagatctttactctttaacgtcgccgtttttagagaccttaacgctatcgtgggttattctttggaattgattgagttactcctccagggccatgatatcatttcggatgagaacaacgacgacgttatcgagtcgatattggtcactctgcggctattaagtgatgtgctggaatataactggcaaaagctggaaagtctcaaccatagcgacatatcaactcaaatagaacacgagcaagaacagaagccaaagcttcccggtatttttcccgagttctcttccactcataataatgacaataaacattttttccatcagatgaaaccatactcactaatacctgatttggcgtcgaagttgatcgagacttgctcggctttgaaattcaacacgagaactctgcaaattttacaaaatatgattgaccatgtgcacggaaatattttgacgacattgagttccacgattctgcccggtcacaaatcttatctggcaaaaaataaccacccttcccattgtaaactaatcgattccaccctgggtcacattctccgatttgtagcagcttccaatccatctgaatatttcgagtttatcaaaaaaagtgtacaaattcctgtaacacaagcccaggtgcactcccacagtcactcacattcattgtcgtcttccgtgtataacaacatagtgcctcacttggatcttttcagtttcatctatctaaccaagcataacttcagaaggtatttggaaatcgtaaaaaacttatccatgccactaaagagaacgatataccattgtcttcttttacatttcaccgcaaaggcaataatgttctggataatggccagacccgcagagtactatgaactttttaacttattgagagatcataatgatgaatctgcaaaatccataaacttgctaattcatactctttttgaggagatccactcaactttcaacgtgaacagtatgataaccgccacccaaaacaaccacccgggttcatcgtcttcttcgccatcttcgccgtcgtcgccacctagctcatcatcatcagataataaccaaagtgtgatagctaaatctttaagccgccagctttctcaccatcagtcttgtatccagcaacaacccgagagaaaagtccattcgtcgtggaccacaaattctcaatcctctacgtcattgtcgtcgtcagcctcttcatctacaacaacatcattatccgctcacgcacaatcagttgaatatgatccatctttcgcagatacaccaacgatgtccaatgttaccatcagtgcctcctccttgctctctcagacacctacgccaacaacacaattacaacaacgattaaacgcagcggcggcagcggcagcggcagcggctgcatcatcgtcatcatcatcgaattcaacccaaactgcatacacggaacaacagcaaagtcgagccgcatatgactcgcccaaagttggtcacactggtaaggattatgatgagaatttcttatccgtgactcgtttgaataatgttctggaactgtacacgcatttcgatgacactgaagtactgccacatacatcagttctaaaatttttgaccactttgacaatgtttgatatcgatctattcaatgagctgaacgcactgtcatttaaatatattcctgattgtatatcgcatcgcccaagggaaagagcaagctcatttaatagcgccgcgttacatgaagttggttcagaaagaaccttaggtataaaacacatcacacagggtttgaaaaaattgacttcgttacctacgtcaacgaaaaaaactgtgaaatttataaaaatgttactaaagaacttaaacgggacacaggccgtatcggatgttgctcttctagacacaatgagggctttgctatcattcttaacaatgacctccgcggtcttcctcgtggataaaaatcttccttcagtactttttgccaagagacttatccccataatagggacgaatttgagcgttggccaagattggagttctaaaatgaattacaatttaatgggttgtttgaaaaagaattccaacgcgttcattcaattacaattaatattcttctcttctgcaatccaattcgatcatgaattattactggcacgtttaagcattgataccatggccaacaatctaaacttgcaaaaactatgtctttatactgaaggattcaggatatacttcgacataccaagtaagagagaactgcgtaaatctattgcaataaaaatctccaaatttttcaagactttattttccattatagcagacattctcttacaagaatttccatattttaacgagcaaatcaccgacatagtcgcatctatccttgatggtacaattatcaatgaatacggtacaaagaaacattttaagggaagctcaccctctctatgtccgacaactagatcaaggtcagcatccacatcccagagttctatgacccctgtttctccattgggatcagaagcagacacgtatccaatgaacactttatctttagtcggttcaagcacttcaaggaattctgacaatgtaacccctttgaacagttctcctaagaatttatctactgatccgtatctgtcacatcttgtagcgccaagagcacgtcatgcgttaggaggtccatctagtattttgaggaacaaggtgcccactactttgacatcgcctccagatacagaaaaatcatcacctgtacaacgtccgcaaactgaaagtatcagtgctaccgccatggcaataacaaattctactccattatcatctgctgcctttggtattagatctcctctacaaaaaataaggacaagacggtattccgatgaaagtttggggaaattcatgaaatcgacaaataactatattcaagaacacttggtaccaaaggatttggatgaggctgctctccaagacgctagaaggataatgattaatatattcagtatattcaagagacctaatagctacttcatcattccacataacgtaaattccaatttacagtgggtttcccaagatttcagaaatataatgaagccgatctttgttgcgattgtaagtgctgatctagctttacagaaaacggcccaatcatttatggatacgctgctatccaatatcatcaattatagcgagtcagatgaaaccattagtattgaaggttatcacctcctttgtagttatactgtaactttatttgccatgggtctttttgatttgaaaatcaagaatgaaaaacgtcaaattcttttagatataacaattaaatttctaaaggttaggtctcacttggctgaaatagctgaaacttcgcaccatatggagtacataaatgatgctgaaaaacttactttcccactgatagtgggaaccgttggtagagctttattcgtttcattatattctagtcaacaagaaattgaaaaaactttaaaagtagcatactcacagtacctttcggctatcaattttcatgaaagaaatatcgatgattctgataagacctgggttcataacattgagtttgtagaagcgatgtgtcatgataattacaccacctcgggttccatagcgtttcaaagaagaactagaaataacattttacgatttgctactattcctaatgcaatattacttgactctatgagaatgatatacaagaagtggcattgttacacgcatactaaagacttagataaacaagaattgaatgatttcagaaatttcgcaggtattttagcctctttgtctggtgtcttattcattaacagaaaaatgctagaggacacatacccttatctcctcgacactgtttctgaattaaaaaagaacattagctttttcatttcaaaacaatgccaatggctgagttatcctgatttattaacgagagaaaactcaagggacattttgagtgtagagctacatcctttgtcgtttaaattacttttcagtagtttgagactcaaaatgaaagaattggcttgttcagacttatcaataccagaaaacgaaacttcttacatcttattggaacaaatcatcaagatgctacggacaatattaagtcgggaagatgataattctgttatgttgcttttctccacagagatagtagacttaattgactcattaacagaagaaatcaaaaagatgccagcgtactgcccaaaacattttaaggcaatcattcaaatgaccaagatgttcagtgctttgaaacattcagaggttaatttgggtgttaagaatcactttcacctaaaaaatagatggttaagacaagtgaccgattggtttcaagtcagtatttcaagagaatatgattttgaaaatttgtcaaaaccactcaaagaaatggatttgatgaaaagagacatggacatcttatacatcgatactgcaattgaggcctcaacagcaatctcatttttaactaggcacacttttctggaaattccacctgcagcctcagatcctgaattatctcgttccaggtctgtgatatttggatactattttaatattttgatgaaaggcctcgaaaaaagtaacgaccgcgataaattcccagtgtttttgaagcacaaaatgagtgtcctcaatgataacgtcattctttcgttaacaaatctttccaataccaatgttgatgcaagtctgcaattcaccttaccaatgggctattctggaaatcgaaacatcaggaacgcatttttagaggtattcatcaatatcgttacgaactatcgcacctacacagctaaatccgatcttgggaagttggaagctgcagacaaatatttacggtttacaatcgaacatcctcagttgtcatcttacgcggcagcagtttgtcctgccagtgatatcgatgcttatgctgctggtttaataaatgcatttgaaacaaggaatgctactcatatcgcagtatcacagttgatcgagaatgaaatcgaaaaatcttcaagacccaccgatatacttagaagaaatagttgcgctactaggtccttatctatgttagcaaggtccaaaggtagtgaatatttgattcgtaccctgcaaccactactaaaaaaaatcattgataacaaggtgttttttgaaatcgagaaattgaaaccggaagatgcagacgccgaaaaacaagtacaattgttcatcaaatatatgaatgaattgttagaggccatatccaactcagtctcgtacttcccacctcctttgttctatatttgtcaaaatatattcaaagttgcgcgtgtaaaatttccagaccatgctctcattgctgcggggtccttcgtatttctaaggttcttttgtcctgcattagtcagtcctgattctgaaaatatcatcgacatatctcatccaagtgaaaagcgtacatttatcagcttagccaaagttatccagaatattgctaatggctcagaaaacttttcaagatggccagttttgagtacccagaacgactttctgaaggaatgtagcgataggattttcaaattccttgctgaactttgtagagcggaccgtatcatagacatccaagtcaggacagatcctacaccaataccctttgattaccaatttcttcactcctttatatatctctacggacttgatattagaaaaaatgttctcaatgaagcaaaacgtgatgatggtgacattgacgatgatgagttctataagtcaacatttttactcatcgatgatgtcctcggccaactaggtcaacctaaaatggagttttcaaatgaaataccaatatatattagagaccacatggacgactacccggaactttatgagtttatgaatagacatgcattcagaaacatggaaaccccaacaacgtccaatccaaacgtccacgaatctacgtcaagcgaaggtgttccaatcattactttaacaatgtcaaatttctcaaacaaacacgtggacattgacacagttgtttataaattcctaccaatttatgctcgaatctggaccactaaacattgcctaattattgattgcactgaatttgatgaagacggacttgacatgagaaaatttatctccctggttatgggattattgccagaagtagcaccaaagaattgtttggggtgctactattttaacgtgaatgaaatgtttatgagcaactacgggagatgtctagacaaggagaatgttttcgtctcttcaaaaattccccattttttcatcaatagcaattctgatgaagatctcatgaaatcgttaggcataactggtcagggattaaaagttctgcaagacattcgtgtctctttacatgatattactctctatgacgagaaaaggaataggtttaccccagtttcactgaagataggtgatatttacttccaagttcttcatgaaaccccaaggcaatataaaataagaggtatggatacattatttgatgtcaaattcaatgacgtctacgaaattagccggatatttgaagtacacgtttcttcagtaactggtgttgctgctgaatttacagtgactttccaagatggaaaaagattgatttttagtagtcccaagtatctcgagattgttaaaatgttctactatgcacagatacgattagaaaatgaatatgaaatggacaacaattcaagcgcttcttcctcaaaatccagtgctaaggataaagaacaaaaggaaaggaataaattattgtgccacttactattagtatcgctcattggcctgttcgatgaaaataaaaagatgaaaaacagttcgtataacttggttgctgctactgaaatatcattcggtttgaacttcggttctcactttcatcgttcgcctgaagtgtatgttcctgaggaaaccactacgtttctatcggtaatcgggaagtcacttgcagaatctaatcccgaactcacaacatatatgttcatctatattttggaagctttaaaaaacaacgttatcccccatgtttatatccctcacacagtttgtgggttatcttattgggttcctaacctataccagtatgtgtatttggctgatgatgaagaaggtcctgaaaacatatcgcacattttccgtgtgctgattagactgtctgtgaaggagactgatttcaaggctgtgtacatgcaatacatttggctgcttcttttagacgatggtcgcttgactagcattatcgtcgaagaagttattaatcatgccttagagagagattccgaaaaccgtgactggaaaaaaacgatatcgttattaacagtactaccaactaccgaggtagccaacaatattattcaaaaaataatggcgaaaattagatcttttctgccatcattgaaacaagaagctatgacccaaagttggtctgagttaacgatattggtcaaaataagtatccatgtcttttttgaaacttccttattggtacaaatgtatttgccggaaatcctattcatcgtatctttattaatcgacgttggcccaagggaactcaggtcatcactgcaccaactactgatgaacgtatgccattccttggccatcaactcagcactaccacaagatcacagagacaatctagatgagataagtgacatatttgcccaccagaaggtaaaattcatgtttggatttagcgaagacaaaggaagaattctacaaatattcagtgcaacttcatttgcaagcaaattcaatattttggatttctttattaacaatatactattgctgatggaatattcctcaacttacgaggcaagcgtatggaagacaagatacaagaagtatattttggaatctgtattcactagcaactcctttctttcagcacgttcaatcatgatagttggtataatagggaagtcttacataaccgaatcattatgcaaggctatgattattgaaactatgaaagttgttgctgagccaagagtaaccgacgaacaggtctttttggtcatatctcatatctttacttattccaagattgttgaaggtttggatccaaacctagacttaatgaagcacttgttttggttttcaactgtttgcctcgaatcaaaacaccctataatttttgaaggtgctcttttgtttgtgtcaagctgtatgagacgcttatatatgtcccagtttgaaaatgaaagcgaaacatcattaagcacaactttactaaaagaaagaaaattcgcctccaccttactatgcgaaatagagagcattaatggtatcgtttggaatggagataattttacacacattatagtttccattgttaatagagggctctgtaacccattcatcaggaatacggcattagattttttaaaaatggtgtttaaaaattcctattttgagcaccagattgatagaacctctgatcattatttgtgctacatgtttttgttgtatttacttctgagctctactcaatttgaggaagttctaggtgatgttgatttcgaaggcgaaacaatctccattgaaaacgaaaatactattccaaaggttttattagaatggttgagttctgacaaagaggattccaatatttcactctaccaaggtgcggtgttattcagaagttctgttatagatgaaccaagcaagttcagatttgggttgattgttaggcatttacttaatgtaaagccgatttgtgcattcaggttctacaacgttattcgtaacgagataagaaaaatctcagcatttgagcaaacatcggattgtgttcctttggcgtttgacattttgaatttattggtgacacattcagaatcttattcattggataaacttaacgacaagtccattgaacttttgactaaaagaggtctcctgataacaactaagatcgacaaatttgcaaagaattccgatatgatgttactgatacatttagaaccccatattctttatgaacgtaaaagaatactaacaatgattttatcgagaatggcatgctctacttag

SEQ ID NO: 3286 - DNA, 1374 bp, Saccharomyces pastorianus
atgggaatggacaagttcagccagctactggatcaactgggacggggcaatttcacacaattgacactgaacctgttccaaaacggtcaagaaattgctgttctacaacaacagttggccggatatgatgataaacagttggtcacgttggtggaacaacacccggctatgcccaatgacacacggttcaagatgatgtgcatatcatatctgaaatatagtcgggatgtggatccatggtctgtctgggctagctcagatttaatatttgagttttatcaatgtttaatcaactgcctcatcaatgacaatgctcctcacattgaggcattaataccggtggccatcagagagacggagtttattattgccctagctcataaactagactcgttccacttgcaattgcatacaagaaaccatcagtttttatcgcatacatcgtccattctatccagattattcaacagcaccaaacctccacgtggtaatggatcgtccaaaactattccaggaaagcagcgaatactgctgtatttggtcaataagctaaataacatctacttcagaatcgagtctccacagttgtgttccaacatcttcaagaactttcagccaaagagcatgctcgcacattttaacgagtaccaaatcaaccagcagatagaatatagatatctcctggggcgttattacctattaaactcccaagtgcacaacgccttcgttcagttcaacgaggcattccaatcgctattgaacttacctttaaccaatcaagcaatcgtcagaaacggttcgagaatactaaactacatgatccccacgggattagtactgggcaagatagtcaaatgggaacccttacgaccgttcgttagtcaagaaactatcgacaattggaatacactgtacaggtttgttcgtttggggaatatccaaagtgtaaaccactggttgaggcacaacgaacgccacttgtgtgcgagacagttgctagtagtactcttagagaaattacccatgattgcgtaccgaaatctggtcaaaacggtgatcaaaatctggaccaccgaatggggccaaaacaaattaccatactcgctaatagaacgggcactaaaactatccattggcccagcatacgaagacaacacagcccaggatttcaccatttataacggcattcactcctcaaagaacgtagaaaacgtacttgtgaccttgatcaacttggggttcttacgtgcgaactgtttcccacaactacaactatgtgtggtaaaaaagaccacaatgatacaagaaattgtcccgccagtcactgagcggatcaccaagatatttccagcaaactctcacgttctttggtga

SEQ ID NO: 3287 - DNA, 480 bp, Saccharomyces pastorianus
atgtttccaacagtcacaaagacattgtcgctgcagcgctacagaatcactagccctctggttgggtccacttcgttgttgcgcagccttaggtggtacagcagcgagaaagatgaccacgacgatgtgatgacaaggatcaaaatggcccctataaagagaaccaatgagccactggacaaaaagagagcacggttgatataccagtctcgcaaaagaggaatcttggaaacagacttgcttttgtctgggtttgccgctaaatatctgaagaaaatgaaccaagaggaactggaggagtacgattcgctactgaatgagttggactgggatatctattattgggcgacgaagaactacgagattagtcccttgcctgagaagtgggccaattcaaagttgttgacgcaattacaagagttcagcgaaaataaagagaaggaaatcctgagtatgcccgatttgtccaagtaccaatga

SEQ ID NO: 3288 - DNA, 2874 bp, Saccharomyces pastorianus
atgccttctcagctacccaacgaaactgacgatccttttacgagatggctaaaatcccgccccattatacaaagaactatatcgacgagagagtgctttgattctgaggtgttcttggcctctggtggctggaatgtaactaatgaattgctaacgctaaagaaatactaccagctgaaatggccgaactcaagtggctgtacgttccacccaaagactatagagctcattgaagaacgattgcgcagtttggaggagcatgattcttcatgcaaaatcccaaatacatcttattcatacaagaaaacatttctggaagataccaaatctgcattgtccaatttagaacccgtttggggcccaccaagacttttgaatccagcagaattgctgttaccacaagatgagaagttattcgttcaagagataccactaaaattcgaacctttccaatacacaaacagatttgcatatggtggcctacagtttaagaacaatttattcgtgacttatggaagttattctttcctggctgctggtcaaagcattgaggttcataattttgacgtgcttttaaacgcttcctcattagagatctgtcatgctctattgcccgtggtaatgccagacgatgaaggtgttagaaattctcgtaattcttcttatgtgaaattcaaagatgcacaattcaatgacatacctatgttatcctctgtcaattttctgaaaatctgtaaccttatgcatcaagacttcttgttggcatgtggtgataatggggttgtttacatgtgggagatttacaaggtaatcaaaatattcaataaatttacttcagacaccttagcaggcagcgataacagtcgagaaaggtacataaacgttgatccatatatggtgttgagagtagaggactcttgttggagcgtcgacgcaatcgacatatatggtgtaatatatatcgctgtgggacataacaagcctggtgttactgtcttcgcctttgataaggataccggaaaggaaaggaaacacattcatccactagacctcccctcgtctcataacgttccttgtgttaattttgtcccgaattcaaaagattccaatggatatattactttgagttactgctccatatttgggaacgttgttactgttaagataaaggaacacaactctagtattctaacgagctttcttgatacccaattttttggcgatgatttgtggacagtaactccactaagtaaaaatgattttatgaatgttgaaaattttgaatcactgaatcttaactaccaagatggcttcaaggaaaatatgttgtattctatttgccgagatgatttcttactagggtattactgtgataacacatatctatcagggaattttggaatcggtacactactcaatcaatttcaagttcctgtaacagatctacggctaacttcctcagaaggaattccagacgaacaaatcctactaagattcacctcatttgatagaaattataccaccacaggctcaataaaatatgagtacagtagagaggatttcgcacttatcttacatactagcgatttagatgatatgaaccatacagtgacaaaaagtgttccttgcgaaccacatttacggcagtggacattttgggacgattttggtcacaaacattaccgtaccacggatcgtgggttttcaaagtataaagatatcatcagtacctttccacaaatgataacgccaagcggaagaaataaatcatcacaataccagagtgcttctgacaggaaaatctgcgaaccttttacttataaacttactgatctagaaaacgatattgaagatatttctagagaattcaataaaagtgtccgcaatctaagaatggacaaaagaagacaactgcaaacgtcaaaagagtttaaatcgctaagctcagtaaaccatctgcccattattgagtcggggaatttcttatggtacaacactgacgctgcagctgattggagaacactttcaggtaaaaatttaaagactgttctaaagaacccagagatatgtagccttcgcctgaactccgtagaggataatgaggtcatcagcgactctgagaacgaagaatctggcaacaacttaacaagtttccaacgtagatataggaatactgaacagcgtgctaatctcaaatcagatacacaaaaatcctgggggttccataactatgtaagaagcgtcaagcggttattggagtcagtggtaccgggttcggaagattcgccgcttggataccaactacctgaaatgcatgacgaattcttccttgtcactacagcacacaggttagtattaatgaaagcgcatcccctcatcattacatcagcgacacagcatgacattttccctctagatggtgttgtcacatgtacctcgaaatcgttactgcaggcattgaatagaataaattttgtatgtcacatcaaggaactacattgcgtagccatagcctcacaattgggtctcgtttcattattaagactaacggagtatagaggcatatattcgttcagacaggaatatattctgggttgggaagtacaggaccccactaatcctagcgtagagtgtaggtgcaacagaaatctgtttaacgcacccatatacggtgtcgacgaagagaattcagatagctattgcggagtttgtgatgcatacttccctatgggtgatgtttgtggtcttgactacacttacacagctggcgatgaagcgttgaagcgtaagggatatgccacactctacgtagcctcgagaggcgccttacgggcgttcaagatcaccactgagcatggagctgccctattatag

SEQ ID NO: 3289 - DNA, 2871 bp, Saccharomyces pastorianus
atgccccctcagattcccaatgaaaatgatgatctctttacaaggtggcttaagtctcgggccatcatacaaagggcagtatcgacaagagagtgctttgactcagaagtatttctggcgtctggtggctggaatataacgaacgagatggtaacgttaaagaaatattatcaactcaagtggccaaactccagttgcaattcgtttcacccaaaaaccgtggagtttattaaagaacgattacacaacctagaagaacatgactcttcatggaaaatcccaaatcctgcttactcatccaaaaaagccttcttagaggatactaaatctgcattttccaacttagaacccgtctggggaccgtcaaggtttttgaatccagctgaattactattgccccaggacgaaaaactacttgttcaagagataccactagagttcgcaccttttcaatacacaaataggtttgcttatggtggtttgcagttcaagaacaatttgttcgtcacttatgggagttattccttcctggctgccggtcaatgcgtcgaagttcataatttcgatgtactattgaacgtttcgtcattagaaatatgtcacgccttattgcccgtgataataccagatgacggagatgtaagaaacttccgcaattcatcatatgtgaaatttaaggatacgcagttcaacagcatacctgaactatgttctatcaactttatgaagatttgtaacttcatgcatcaagattttctactagcatgcggtgacaacggaattgtttatatctgggaaatcaacaaagttattaagatatttaataaatttacttcggatatcttgggaggcaaagataacagccgggaaagatacataaatgttgatccatatatggtgttaagagtagaggaatcttgttggagtgttgatgtaatagatataaatggcatcatatatatcgctgttggccataacaagcctggagttacagtctttgcattcgataaagatgtaaagaaggaaagacggtacattcggcctctggatcttccctcatctcacaatgttccttgtgttaactttgttcctaattcaaaagattctgctggatatattacattaagttattgttctatatttgggaatgttgttaccgttaagttaaaggagcatgattgtaccattttaacgactttccttgatactcaattttttggcgacgacttatggacaataactccactgactaagaaggattttgcgaaagttgacaatttcgaatcgttgaatcttaactaccaagacggtttcaaagaaagcatgttatattctatttgccgagatgattttttacttggatattactgtgataacgcctacctctctgggaatttcggtattggtacattactcaatcaatttcaggttcctgtcacagacctacgattgacttcttcagcagggatccccgatgaagttataccattaagatttacctcatttgatagaaattacactacaacggcctcgataaaatacgagtacagcagagaggattttgcacttattttacatgccggtgacttagacgatatgaatgatgcagtaacaaaaaacacttcatgtgaacagcatttacaccaatggacattttgggaggattctggttataaacattatcgtgctactgagcgtggattttcgaagtacaaggatattattaatacttttccacagttgataacgcctagtggaagaaataaaacatcgcaatatcaaaacacttctgggagaaagatctgtgagccgtttacttataaacttactgatctcgaaaatgacattgaagatatatctcgcgaatttaatagaagtattcgtaatttgaaaatggataaacaaagacaactacgaacttcaaaagagttcaaatcgctaagttcagtaaatcatttaccaaatattgaatcgggaaactttttatggtacaacaccgatgccgctgccgattggagaacactttttggcaaggatttgaacacagtcttgaaggacccagaaatttgtagccttcaactgaactctacagaagaggacgatgtcaatagcgaccctgaaaatgaagaatctggtagcagcttaacaagtttccagcgaagatacagggatactgaacagcgtgctcacttgaaatcagaatcgcagaaatcttgggggttccacaactatgtaagaaacgtcaagcggctattggagtcagtagtaccgggctcagaagattcgcctcttgggtatcaactatccgaaatgcacgacgagttcttcttcctaaccacagcccataggctggtgttgatgaaagcaaatccactcataattatatcagcaactcatcatgagatttttcccttagatggtgttgtgacgtgtgcttccaagtcgctgctccaagcactaaacagaataaattttgtgtgtcacatcaaagaactaaattgcatagccgtggcttcacaattgggtctcatttcattactaagactaacagagtacagaggcatctattcgtttagacaagagtatattcttggatgggaagtccaagaccctgttaaccctagtgcagagtgcagatgtaacaggaacttgtttgacgcaccaatgtatggtgcagatggagagagctcggacacatactgcggcgtgtgcgacgtctatttccccatgggtgatatttgcggactagattacacttatgcatctgacagtgaagagttaaaacgtaagggatatgctaccttatacgtagcatcaagaggctccttgagggcattcaagatcacaactgagcatgaaacaactcaataa

SEQ ID NO: 3290 - DNA, 1485 bp, Saccharomyces pastorianus
atgagtaatattgttgtctttggaggggactcgcaccccgagctggtgaccaagatctgtgagaatttagacattcatccgttgcaggtggaattggggaagttttctaatggggagacgagcattgccctgcgtgagtctgttcgtgagaaggacgtgtatatcatccagagtgggtgcggtcaagtgaatgacacacttatgcaactgttgatcctgatcagtgcttgtaagtctgcgtctgcctcgagggtcactgcggtaatgccgtatctctgctactcgagacagcctgatattccatacactgccacgggtgcccccatcatttccaaacccaaggagagctacacttttgaatcgcatccaggcaccccggtgtcttcttcgttgatgacgcaaagaccaggtgctgaaagttcgttgaagagcttggatagtgccatacgatccaccatcaatctggaaaatcctcaacctatcagaacaccaaacatcaacgccacagcgaacaacaatcccgaaatcaaaaaaacgctttcgttttccagaatccccatgatccctggtggtaaattacaaaacacaagcaacagcaaggatgcaggtgaattgttcaacgctcaaaacgcgggctacaagttatgggtagtacaagccggtactttgattgctcatttgttgagcgctgcgggcgctgaccatgtgatcaccatggatctacatgatccacaattcccagggttttttgatatcccagtcgataacctttactgcaaaccaattgctcaaaattatatccaacaccgcattccagattatcaagatgcagtgatcgtttctccagatgctggtggtgccaagagggccaccgcgatcgcagacgctctagaattatcgtttgctctgattcataaagagagaagatctcagttactaaagggtcctccggatgctacattgacttcaggtggttcgttgcctgtatctccaagaccgttggtgacgacacttgtatcttctcaaaacatgactacatcaattgccacaggtgttgcagctctagaaatgaaaaaaacaacatcaaactcttccacttcatctcaatcctctaattcatccaagtttgttcagaccaccatgcttgttggtgacgtgagaaacaaggtgtgcattatcgtggacgatttagtagatacttcatacaccatcacgagggctgccaaattattgaaggatcaaggttccaccaaagtttacgctctgattacacacggtatcttttctggggatgcactggagagaatcggccagagtagtatagataagctaattatttccaatactgtccctcaagacagaaccttacaatacctgggcaaggaaagagtggacgttattgatgtttcttgcataataggtgaagctatcagaagaatccataatggtgagtccatttctatgttgtttgaacatggttggtag

SEQ ID NO: 3291 - DNA, 912 bp, Saccharomyces pastorianus
atgactgttggcgacacttttaaactatttattttaagacatggtcaaagcgaactgaactcagagaatatattctgtggatggatagatgccaaactaactgaaaaaggtaaatctcaggctcgccattccgcaaaattgatcaagcaatatagcgacacaaataacatccctttgcctcaaattggttatacttcaagattggtccgaactgagcaaactatggacgtccttctcgaagaattaaaattaggacaccaaaaccgcataattactatagatacagacatcaatgaagaactacatgatatagggttgcgaggagagatacctgtgttccaaacttggagattgaatgagcgccattatggttcatggcaaggacaaagaaaaccaaaagtcttaaaagaatacggcaaggaaaagtatatgtatatcagaagagattacgatgggaagccgcctaaagtcgacttgagtttggaaatggttcaagaggagaatgatcaaggttcctccaccggctatgattttaaggagcctaatagacgcttaaaatatgtcgcagaagaaaatgctaatgaacttttacctgaaagtgaatctctttgtgaagtggtcactagattgagacccttcttaaatgacgctattttatctattgctagaaaaaacaaccaagaatcatgtgttatagtgggacatggtagttctgttagatcgctgttgaaaatcttggagggcgtctctgacgaagatatcaaggatgtcgacatccctaacggtattccgctagttatagagttggatagaagtaatttccaatttgtgagaaaattctatttggatccggaatcagctaaagttaatgcacaaatggttcgcgatgaaggtttcgaaaaaaactcatga

SEQ ID NO: 3292 - DNA, 3279 bp, Saccharomyces pastorianus
atgagcagcctcatagatttaggtagatatgttggaagaactcgccatgaagaagacgcctcatcgagctccaaaagagtaaaagttgccacagctgatttatcttccttccagcctggcagtataattaagatccgtttacaagattttgtgacctacactttaactgaattcaacctttcgccgtctctaaacatgattattgggcccaatgggtccggtaagtctacttttgtgtgtgctgtgtgtctggggttggctggtaaaccagaatatattggtagaagtaaaaaagtggaagattttatcaagaatggtcaggatatttcaaggattgaaatcactttgaagaattcaccaaagattcatgatattgacttcataagtacacatgacgaaacaataaaagttactagaataatcactagatctaagaggagatctgattacttgattaacgacgaacaggtatcggaaaatgcagttaaaaccttagtctctcagttgaacatccaattagataatctatgtcaatttttatcccaagagcgtgtggaggaatttgctcgattgaagtcagtaaaactattggtagaaactataaggtccatcgatgcaagcctgttagatgtactagaggaactaatggaactccaggcaaatgaacagagtttgcaaaaggaccttgacgttaaaaaaatgaaagtcgttcatctgagacaagagagcgataaactacgaaaatcagtagagtcattacgagattttcaaaagaaaaagggtgaaattgagttgcactctcaattattaccttatgtgaaggtaaaagatcataaggagaaactgaatacctataaagaggagtatgagcgagcgaagtcaaatttaagagctttattaaaggataagaagccatttgcaaatacaaaaaaaactttagagaatcgagttcacgaattgacagaaaaatgttccttaaagaatgacgaatttgtgaaagcaaaagaaaaagttaatgatatttttgaaaagttgaataccatacgagatgatgttattaagaagaaaactcaaaacgaatattatagaggtagaaccaagaaattgcaagcaaccatcattgatacaaaggaggatttggcgagaaaccgagaaattctagaacaaactcaattgcctgaaaaaagcgtatttgaagatatagataacaaaagaaaggaaatcatcaacaaagaaggagacctccgaggacttatttctgaaatagacgcaaaagcaaatgccgttaatcatgaaatgaggagtatacagaggcaagcagagaataaaactaagtccctcaatacaactgataaaattggtattttaaatcaagatcaagatctgaaagaggttcgtgatgccgtgcttttcattagggaccatcccgaaatgaaggagaaaattctagaacctgcaattatgacagtgtctgctattaattctcagttcgcagcttatctggctcaatgtgtggattttaatacaagtaaagccctgaccgttgttgactctgacgcttacaggctatttgcaaatccgattcttgagaaattcaaagtgaacttaagagaactatctaacactgattccaaacctccggtgcctatagaaacagttcgagatttgggtttcgaaggttacttatccgattttattactggtgacaagagggttatgaaaatgctttgtcaaattaacaggatacataccatcccagtatctaggagggaattgacgccggcccagataaagagattgattacaccaacatcaaatggaagaattcttttcaagagaattattcacgggaacagacttgtagacatcaagcaatcatcttatggtaataagcagatatttcccactgatgtcaacataaagcagactaacttttaccaagggtctatcatgtcaaatgaacagaaaactagaatcgagagtgatattgacaacttaaagaatgaatataataaccgaaaatctacgttagacacattgtcgaatcagaagagtgattataggcacgaattatctgaacttgcatcaaaaaacgacaatataaacagaaaggctcatgaactaaatgaggttcgtaaaaagtacactatgaggaaaagtacaataggaacactggaagagaaattagatgagttgaaacgtgaagccaggaaggatgtatcacagaagatcaaagatatcgatgaccaaatccagcagcaactgctcaatcaaacacgattactgtccaagatggtctcttcgatggaggatttaaaaaattctcaaaaggaattaatgacctcccaaattttccagtttgaagcccaaaatatggacatttccatgaatgatgtgattggatttttcaacgaaagagaggctgaattaaagcatcaatatgagcataagaaaaagttcgtgaaggagatgagggatactcctgaatttcgatcctggatggaagaaattagacactacgacgaggatacaaaggaaagattgaataaagtagcagaacaatatgaaaaagagaggaatttcaatttgccattcattcaagatgttatcgataaattagaatccgagatagctatggtgaatcatgacgaatctgctataacaattttagatcaagtcgtcactgagttgagagagttggaacaaacagttcctcagcaaactaaagatttagaaaccactaaagccaagttaaaagaaggtcatgccattttggaacctaagctggatgacatagtatcaaaaatctccacaagatttgctcgtttatttaataatgtcggtagtgccggtgctgttcatctggaaaagccaaaggactatgctgagtggaagatagaaatcatggtcaagttcagagataatgcaccattaaagaaactagattcccacacgcagtcaggtggtgaaagggcggtttctacggtcctttacatgattgccctacaagagttcacctctgctccattcagagtcgtagacgaaatcaaccaaggtatggactcaagaaatgaaagaattgttcataaggccatggtagagaatgcatgtgccgaaaacacatctcaatatttcttgatcactccaaagttgttaaccgatttgtattaccacgagaagatgagagtacactgtgttatggccggttcttggattccaaatcctacggaggatccaaggatgattcatttcggcgagacctctaactactctttctga

SEQ ID NO: 3293 - DNA, 522 bp, Saccharomyces pastorianus
atgtacaagatgtcgaaactagcaatatactcccagctaggcgattttacaaatttagaagagccgccggagcccaaggaattattccaagaccttggtagctttcctacttttgccaagatacatttatcaagcacccaaaggtcaacaaactatagtgaggccttgtgtcattccaggcagagttatcctgtcacactgtccaaaatgacgttgcaagagcagaggcacaatatgtccacggttccgttacaagaaaaggatcagatgaaaatttacgatgcttacaaggtgatagacatgggcgatcacgtttcaccggaatccctgcgtttgaaatcaagaacagcattcgaaggatcccatgtaaataaggcacgctcaaagacagagggattttttaacgagccaactgtactcaattcagacttccaagcactttccattgcacaaaattcaaacgtcttcttgtatgaagactacaaaaaattcgtttatcgacagctaaatatgttcacctag

SEQ ID NO: 3294 - DNA, 2163 bp, Saccharomyces pastorianus
atgacggatgttattgatttagagttaggcgacgacatcgtcaagaagcctattgattcgaaacgcccgaaccagtcttcgaaaaccaaggtcaagaggaggggccaattgacttttgacgatttcagaaacattaaagttaccgaggaacctgttgtcttttctcacaatgtttccatcgatgactcgttggacgctgctatccagaccaataagcacaataaagatgaaaaaattgatgatgaagagcctccaagcaaaaaattaaagggtaacgccaagcatgaacactctaacatcaaagctcatccaaacgaggtaataaaggcagaatcgaacaatgaaaatatcattaacaatagaccgctatatactttaaactggtcacccaatatccctttacaatttcttgactaccgaaaacctgtaggcgaagacaaagctgtagaagataagtgggcacctcccaactgcattcctctcccatacgcaggtgatattataaaggtgctttcgtttattgctaaatttcattgggccttcggtgatgatttactaaatttatcattccaagaggtggagattggattagagttacaatccaatctccacgttgcatatgttcattctttgaaggatgttaagctctgtcaagacaaaatgaatcttctattctgcagcattttaaaattattattcaaccccgataaaggaactgagaaccatacacacaagaatttcactttacaaaggttcctcaatttgaaaaatccatacggaaaattggtacgcaaactaaagactgtaatgcaggaatggggctgccctgaagaatggcgtaataacgatgactcgttatctaccttaaaccttaatgggcgtggtttgttgaccatgaaaccatcagctagaataatcctattaaggtgtatgattgattggagttgtagctactctccgctttttcataacgaaatccagaggctgtctcatttgaaaggcgacactgggtttaaccatcagactttccatacccccagactttccatgtacggagtcgatgacactttaaacaattttgaagtattgtgttctttaatgaatcaaaaactggaaaaccggaaaaagaggaggtctcacgaccaagacaaactgagtgagatcaacgaacaaatgaaatttttgaaggacgttcgaaagtcgctgaacgaaaagttgactgcggacagattacgggcaaccatcaaaattaatgaacagtggagcaagtatttcgagaacgaactatcgcacacaccggttgatgaccctatagccgatgaaatatataggttaaggtcatcagagttcatgatcgcaagaattccgaagttaggtgatttttacttgccaccatttcgcatcgaaaataagtgcaatgcaactagtactacttataattttaacaaaatgacaacttatgttaattactatatcaaatttaaaaaagaggacagagtggcaccaaaacagcttgcggcaagtataccgagagaaaacacctgtcaattaaaactattatacaatgacacttcggtacgtgttcacgatctactttctagtgacactaaattagcgaaggcgtctcattggtttgaagtttcaggtgacctagagtctttaattggctttattgaatatttagaaagagcgccgttacttgaggaaagtactggtgccgatacgaaaaagggtattgataacctaattgaatatttgaaagttttcattgtctttataagtgaaactattaaaattactacagatacgactacacagagcattgtaggacgtcatctgcgaacgaaatctcggcaaagagctagaacgcattactcggcggatggggatagtgactgctttgaggaaaccgaaaacgaatttgacaaagagtttaacgataattgtcaatctgaatatttctgcagtagggaggaatctgaaaaaactagtggtaatgggataagtgaatgtttaaaggctggaacagataatgaaagtaataatcagagtgaggattacagcgatgtagaaattttttcagaacctgtgaggcaaatgcctagcgattctagggaagggagaagtttaagacgtaatgccagaagagatctatcattttga

SEQ ID NO: 3295 - DNA, 1365 bp, Saccharomyces pastorianus
atgcccaaggagacaaagctcataaactctgagtttgatgtagaggttcaagatccagaacgtctaaatggccaccctgtggccaaatttatcaacaagttgagcggtcaacctgaatcttatgtcaacaggaccaattatattttcggtcgaacactgggtgctggttctttcggtgttgttagacaagcaagaaagttgtctacaaatgaagatgtagccatcaaaatccttttgaaaaaagccttgcagggaaataatattcaattgcagatgctgtacgaagagctatcaattttacagaaactgagccatcctaatattgtctctttcaaagactggtttgaatcaaaggataagttttacattgtcactcaattagccactggtggtgaattattcgatagaattctctcgagagggaagtttacagaaatagatgctgttgagattatagtccagatccttggtgctgtagagtacatccattctaaaaatgttgttcatagagacttgaaacctgagaatgttttgtacgttgacaaatcagaaaattcacctctggtgattgcggactttggtatagctaaacagttgaaaggaaaagaggatttaatttataaagcagctggatcgttgggttacgtggcgccagaagtacttacacaagatggacatggaaaaccctgtgatatatggtcagttggcgtgatcacttacactttactctgtggatactctccgttcattgctgaaagtgttgaggggttcatggaagagtgtacggcttctagatacccggtaactttccacatgccatactgggataatatatctattgatgctaagcgctttattctaaaagctttgatactggacccgactgataggccaaccgctacagaattgttagacgatccatggattacatcgaaaagagtcgaaactagcaacattttaccacacgttaagaaaggcttttctttgcgtaagaaattgcgcgacgctattgaaattgtcaagcttaataacagaattaagagattgagaaacatgtatttgttaggtgatgacggtgataatgacatagaagagaactctcctaccgggagttgcttggatggcatcacacgctcattgcatgatttgcgttttcaacctcaaaagaaagtagcagaactttcaaaagagcaaatgaaactaaaatctgcgttgacgaaagaagcgtttgtccaaatcgtgaaagctgcaacaaagaataagcataaagttctaggtggcgaggaggaagagagtgatagtaccggaagtgaggaaaccaaagcaaataaccaagagtccaactcaaaggactcaaattactga

SEQ ID NO: 3296 - DNA, 822 bp, Saccharomyces pastorianus
atgtcatttgatatcaactggagtacactagaatccgataatcgactaaatgatcttattagaaaacatttaaattcatatttgcagactacacaactaccaagctacgtaagtaatcttagagtattggatttcgatttgggaaaagttggtcctgcgataactctaaaagagataacagatcctctcgatgagttttatgactccataagagacgagctcgagaataatgaggcagaagaaaatgacaataacaaaaacgaacacgaacacgccaatattgaacatcgtgtagtcaatcaagaaaatattaatgaagattccgagccactcgtaattatgccgtccccgaatgacgtacagtttttattagaggccgaatataagggtgacctacttgttacaataggtgccgatcttgtactaaattatcccgttgaaaagtttatgactttgccagtgaaactttctattagtgatatagggctacattctctttgcattgcagcgtatctatcaaagcaactattcttcagttttctgtgtgatgttagcgatcccgcattggatgatagtcaaattattttggatcctaaaggaccaattctggcagctactaagccgttagaacgaatatctattgtaagaagtatgaagattgaaacggaaataggagagcagtatcagggacagggttctatactaagaagtgttggggaattagaacaatttatgttcacgatttccaaagattttttgagaaaggaattggcatggccaagctggatcaatctagactttaacgatgatggtgaacaataa

SEQ ID NO: 3297 - DNA, 633 bp, Saccharomyces pastorianus
atggttataataacaagttgcttgcagacttcagtactcttcaggagagcatctctcaagccagttctaaggtgtccatttgaaaggcatttttttggtttaggcaccagtaatcatgctattagggaacaacggtatgtcttacgcaagaccgttaacacgcatcctagtactgtttatgcagctgtttctgaggtttctgaatacaaggaatttattccttattgcattgattcatttgtagacaaacgaaatcccgtagataacaagcctgtaattgcggggcttcgagtcggttttaaacagtacgacgagaaattttcatgcaatgtctcatgtaaagaaaaggtaaacggggataacacttacacagttgttgctgaaactatatctcataatttatatgatctattgtactcgaaatggactataatgccccacccaactagaccaaatgcgaccatggtagaacttttgttgcggtttaaatttaagtctcgcatatataatagtgtttctctgatatttgcaaagactgtgaccgaattagtgatgaacgccttcgctaaaagagcataccatttggtaaggctggccatgttaaaatcttcatctaaagaaactccttcatga

SEQ ID NO: 3298 - DNA, 369 bp, Saccharomyces pastorianus
atgaatgctccagacagatttgaactattcctgctgggtgagggggagtccaagctaaagatcgagcccgacaccaaggcccccaacgccgtggtgatcacgttcgagaaggaggaccacacgctgggcaacctgattcgcgcagagctgcttaacgacaggaaggtgctgtttgccgcctacaaggtcgagcaccccttctttgcccggttcaagctgagaattcagaccaccgagggctacgaccccaaggacgccttgaaaaacgcctgcaacagcattatcaataagctgggcgcgctgaagacgaacttcgagaccgagtggaatctgcagaccctggccgccgacgacgcgttcaatatgtaa

SEQ ID NO: 3299 - DNA, 4680 bp, Saccharomyces pastorianus
atgtcgcaggtctggcataatccgaattcccagtcgaatgaggcgtccactccaactgataccgccaattcgaaggaaagaaccgaaaaggaaccgcccctccagggaacacagcctagttccttcgttcaaccacaacaacgcattactctaccttcactgtcagctttgaacgctaaggacgaagacaggagagatggcaatggcaatggccatggtcaacaacaacaacagccgttgggctcacattctactcgcatactgggctatcctcctgctcattcgaatgtcatgccttccaattcggcgctaaaacaaccccacgactaccacccccgttcgaactcgccctcctcgtgtccttcttcaaacgccgcgactatggcggctgctgtagcagcggctgctccagctccagcaccagctcctctacctactacaggaggtgctagcttttccctatcaagattcgacaatcctttgccgatgaacactcttggacgtaccgaagaccggaagagttataacggtctgccagaggaagaaaaaataaaccaacaagttcaagatcataaggaagttcccactgtggtacaacccgccgacgcggccgaagtctcaagtgtttacactgacactaaagacgatgttaatgtcgagaacactaacgatgaagatcctgactatagacccttaaacgtcaaagatgctttgtcgtacctcgaacaagtcaaatttcaattcaattcgcgtcccgatatttataatctatttttagatatcatgaaggacttcaagtcacaagcaattgacacgcccggtgtcatcgaaagagtgtccactttgtttaggggctatccggttttgattcaaggattcaacacgttcctgcctcaaggttataggatcgagtgttctgctaacccggacgaccccattagagtcaccacccctatgggtactacgacagtaaataataacgtcagtccacccgcaagaggcactctagacacgcaggagcccagttcttttccggaagccgatggaagcactatcccacaatctcacaacgtgcccatggtaccttcgaatgtttaccactcggaacagagtcaagatcaacaacaatctcagcccctttcgaataatcctcctggcttaccttcaattcatcaacccgaatcaccaattccccagggtcaacctttaactattcaagaagacgttaagaaaaatgtcgacgtcgaatttagtcaagccataagttacgtcaataagattaaaactagatttgccgatcaacctgatatctataagcatttcttggaaattttgcaaacataccaaagagaacaaaagccgatcaatgaagtctatgcacaagttactcatcttttccaaaatgcacctgatttacttgaagatttcaagaaatttttaccagactcttcagcttctgctaatgaacaggtacagcatgcccagcaacatgcccagcaacaacaggaggcccaaatgcatgcacaagcccaggctcaggctcaggctcaggctcaagcacaagctcaggctcaggctcaagcacaggctcaagcacaggctcaagtggaagcagaacagcagcagcagcagcagcaattcttgtatccggcatcgaactattatagccattctgctaacggaggtattccacaacagaatttgccccccattggaagtttttctcccccaacaaacggttccactgcacacgaaggttaccaagatcaacaacatatgcaaccacctcatttaattcccttaccttcgatggttcagcagggcccaaatatggtgcaccaaggaattgtaaacgaaaacctacctctttcggatttaagaacttctcttaccgaccagtatgctccatccagtttccaacagcaacagcaaccaagtactagtcctataatagattcgcaatatggtgatgtgcctgttaggccagaaatcgatttggatccaagcatagtacctgtggttcctgaaccaacagaacctatcgaagataacatatcgctcaatgaagaagttactttttttgaaaaagcaaagagatatattggcaataagcacctatacacagagtttttgaaaattttgaatttgtactctcaagatatacttgatctaggtgacttagtggaaaaagtagatttttatttgggttccaacaaggaactattctcatggtttaaaaatttcgtcggttaccaagaaaagaccaaaagtatcgaaaacgttgtccatgaaaaacataggttggacttagatctatgtgaagcattcggtccaagctacaaaagattaccaaagagtgatactttcatgccatgttcaggcagagatgatatgtgttgggaagtattaaatgacgaatgggttggacacccagtatgggcttctgaagattctgggtttattgcccaccgtaaaaaccaatacgaagaaacactattcaagattgaagaagaaaggcacgaatatgatttttacattgagtctaatttaagaactatccaatgcttagaaacaatcgtaaataaaattgagaatatgacggaaaacgagaaggccaatttcaagcttcccccaggtcttggtcattcttcaatgactatttataaaaaagtgataagaaaagtttacgacaaagaaagaggatttgaaattattgacgctctacatgaacatcctgcagtgacagctccagtcgttttgaagagactaaaacaaaaggacgaagaatggagaagagctcaacgtgaatggaataaagtttggagggaactggaacaaaaggtttacttcaagtcattggatcatttgggtttaacatttaagcaagccgataagaaactattaaccacgaagcagctaatatcggaaatcagcagcatcaaagttgatcaaacaaataaaaagattcattggttgactcctaaaccaaagagccaattagattttgattttccagataaggatattttctatgatattttgtatttggcagacagtttcatagcacataccacagcttattcgaatcctgataaagaaaggctgaaagatttgttagatcattttatatctttgtttttttctattcctttagaaaaaatcgaagaagcattgcaatcttataaacaaaatttgtcagactctagtggatctgacgatggagattctactacatctagaaaaaggccatatcaacaggaaatgagtttacttgacattttacatagaagcaaataccagaagctaaagcaatctaacgacgaagacggcaaagtaccgcaactttcggagccacttgacgaagaatccaatgctatcgaggaagaagaactcatcaatgaagaagccaaaaacccttggttaaccgggaacttggtggaagaagcaaactctcaaggcattatccaaaatcggaatatctttaatttgtttgccaattcgaatatttacatatttttccgtcattggacaaccatttacgaacgtcttttggaaatcaagcaaatgaatgaaaaggtcactaaggaaatcggtaaaagatcaatggtcacttttgccaaagatttagatctgctttctagccaactttctgaaatgggattggatttcattggtgaggacgcgtacaagcaagtactgaaactgagtaggaggctaattaacggtgaccttgaacatcagtggtttgaagagggtttacgtcaagcttacaataataaggctttcaaactctataccattgataaagtcacccaattgttggtaaagcatgctcacaccttaatgactgatgctaaaactgcagaaataatggttctatttgtcaaagatagaaactcttccacaacatgtgccaaggatcaaattatttaccgtttgcaggcacgttcatatatgtccaatacagagaatatgtttaggatggagtttgataaaagaaatttgcatgtttccgttcaatatattgcccttgatgatttaaccctaaaggaacctagagcggatgaagataaatggaagtactacgtaacatcatatgctttaccacatccaacggaaggtatctctcacgagaagctcaagataccatttttggaaagacttattgaatatgggcaagacactgatgggagggaagttgacgaaaaattctctccagaaggtatctctgtatcgacgctgaaaatcaagattcagcctgtgacttataagctgcatattgaaaatgggtcttatgacgtttttactcgtaaggcagctaacaaatatccgaccattgctaatgatgacattcacaaagaaacggtcgtaaaaaagacagggttggtatcaaagtttttggataacgcaatacgtttaaggaatgatttaaatgagactaggaaattaactatgcaagaaaaattggacagcctaaaaggctccacggcaaaggtggacgttgataataaaataatagtaaccaaaaacgaaaaagctatagaggcaaaggaagaacagccagagaattttccaactcccgatacacatatattaccttcttccatcgcaaatgtgccacaagatgataatacagtagtgaccggaggcacgggtccttccgataaagagataaaataa

SEQ ID NO: 3300 - DNA, 2847 bp, Saccharomyces pastorianus
atggcatcagcactaccaaccatacctgagcctcaaaactttgcacctagtccagactttaggtggctttgcgaagagttatttgccaaagtagatgaggttcgaattaatgggaccgcaggaaccggtaaatcagtatctttcagatattacgaaataatatcaaacttcacggagttgtggaggaaaacggtaggaaataacatatatcctgcgttgattctcgctcttccataccgcgatagacggatctataacataaaggattatgtgttaataagaactgtatgctcttacttaaagttgccgaaaaactctccaacagaacaaagattgaaagattggaaacaacgtgtagggaaaggtagaagcctttcttcccttcttgtggaagagataagcaaaagaaggactgaaacaactggaaaatttattaccgttgacagtattaatgattatctggatgaattaagtgaagagatgaacgcgtctggacgtggtttcaagaacctcgtcaagtcgaaaccctttctatactgtctggaaaatatgacttttgtcgagttaaaatacttttttgatatcgtacttaagaatagagtaattgggggacaagagcacaagcttctgaattgttggcatcctgatgcccaagattaccttagtgttgtatctgatttaagggtagtgacatcaaaactctacgatccaagagttcgtttaaagaatgatgatttgagtataaaagttggctttgcatttgcaccacaactggccaagaaggtgaacctttcatatgaaaagatatgccatgccttgcgcaatgacttttttgttgaagagaaaatggacggtgaacgaatccaagttcattatatgaattatggaagatccataaatttttttagtagacgaggaattgactacacatatctatatggagaaaatttactatcgggaactatatcgcaatatttgaagttttcagacagcgttaaggagtgtgttttggatggtgaaatggttacttttgatgcaataaggaaagtgattctcccgtttgggcttgtgaaaggaagtgcaaaagaagcgctttctttcaatgacataaacaataatgatttccatcccctttatatggtgtttgatttattatatcttaatgggacctcattgacgccattgcccctttatcagagaaaagagtatctgagcagtattttgacacccttaaaaggtattgttgaaatagtacgatattctagatgctatgatgcagaatcggtaaaaaaggctttagaagttgctatttcactgggttcagaaggagttgttttgaaacattataattctggctataatgtcgccagtagaaacaacaactggataaaggtgaagccagaatatctagaggagtttggagagaatttggatctaatcataatcggcagagactctggaaaaaaagactcttttatacttgggctactcgtggtggatgaacaagaaacagccaaaacggatcaagaaggctcccccgaaattttaaatgattcaagtgtcgaacagcctgtaaaaaatccaaaaatgagtgttaaaaaagtcctttcattttgttctattgccaacggaatttctcaagaagaattcaaagagatcgaccgtaaaaccagagggcactggaaaaaaacatcaggattttgtcctccatcttctattttagagtttggctcaaaaacaccagccgaatggattgaacctagcgagtctatcgttttagaaattaaatcacggtcattagataacactgaaacaaacatgcaaaaatatgctaccaactgcactttatatggaggttattgtagaagaatacgatacgacaaagaatggacagattgttacacactcgatgatttgtatgaaaacaggcggactaaatctaatccgagccatcaagttgagaacctccaacttcaactggtgtctaagaaaaggaagagggtactagtttctgacccctttcaccaaagcagagaacaaaagccaatttcagacatttttgacggactgtttttttacgttctctctgattacatcaacagtgtcactggagtgcggattacacgggcagagcttgatgatgatattgtaaaacatggtggtaaattgatacataatgtaattttgaaacgccattgcattggagaagttcgtctaatcggttgtaaaattaccggggaatgtaaggctttaattgatcgaggatatgatatattacaccctcgttggataatggattgtacggcatataagaaacttcttccgatcgaacctagttattgctttagcgtctctgaaaaattgagggcagttgcaacaagaagggtggactgtgtcggtgatagctttgaaaatgatatctcggagagtaagttgtcttcgctacaaaaaagccagcaaaatttaccatcaacaagacaagttgacaaaagttttgagctccagattattccgttatttttgttttccaatagaatagcatacatcccacgcagcaaaatcggtctgaaagatgagaagcttctagaaatgaaaatcaggctgtttggtggcaaaataacggaccaacagtctctttgcaacctaatcatcataccatatgccgatcctgtttggagaaaaaactgtttagaaaaggtacatattcaaataaaggaacgggtaaaggcttcggactcggtgagtgtaccaagaatacccagaattgttgcccctgaatgggtggaccattctataagcgaaaattgtcaagtacctgaagaagattttccagtgtcatactgttga

SEQ ID NO: 3301 - DNA, 939 bp, Saccharomyces pastorianus
atggggaaaggtaaaaacaagactcacgagcccaaaaacggaaaaccacagagaggcgctaatgggcacagctcaaggcaaaatcataagcgcatggaaatgaaatacgataattcagaaatgacaaaatttcctgtcaaactggccatgtgggattttgaccattgtgatccgaaaaggtgtagcggtaaaaagcttgaaagattgggtctaatcaaatcattaagagtgggacagaaatttcaaggtgttgttgtctcgccgaacggtaatggtgtcgtctgccccgatgacctcgagattgttgaacaacaaggtgcctcagtggttgaatgttcttgggcccgtttagaagaagtacctttcaataaaataggcggtaagcatgaaagattgttaccttatttagtggccgctaatcaagtgaattacgggagaccgtggaggcttaactgtgtcgaggcattagccgcttgttttgctattgtcgggagaatggattgggcaagtgaactgctgtcccatttctcgtggggattggggtttttagacttaaacagagaattacttgaaatctatcagcaatgcaccgattccaactctgtcaagaaggctgaagaggaatggctacagaaattagaaaaggaaaatcaagaacgaaaatctcagtctaaggatgaagacatctggatgatgggtaacgtaaatagaagggataatggagcgcaatctgatgaatcggaaagcgaagaggattctgatcaatccgagttggaaagtgataaacaatctatagaatatgactctcttggtaacgccattggcattgataatgtaaagagccgaaaaatgctctctgaagggtcggaagatgaagaaagtgagtctggagaggacgaagaacctgttagttatgactctctaggtaatataatttag

SEQ ID NO: 3302 - DNA, 207 bp, Saccharomyces pastorianus
atggctgaaaagaagtgcgcctgtgaatgcgaatgctgcaaagactcttgcaaatgcggaaccacctgtgttccaaactgctctggtggtgaaaagtgtaagtgcggccacaagtctgaaagtacccaatgtaacagttgcggtaaaagttgcaaatgcggtgccacctgcagttgtgaaaagagtaaatgcacctgtgacgaatag

SEQ ID NO: 3303 - DNA, 1281 bp, Saccharomyces pastorianus
atggaagaaaaagatagcaaggatattccttcagttgagaagaaagaagctccaaaacaaattgatgaggatatcgcaaagactacagatgtcgatctcagcgccgatgagaaagaagatagtgatgctgcagacaaggataagagcaccccacaaaatgttaaagaaggagaaaccccctgtgaagctaatgatgatacaaaggcagtttctgcaaagaaaacagatgaaggagaggaaaaggaagaggagcagcctcccttaccggccagaaacaggtctgaagagcctgcgccaaaggagaacccaatattgcaggagttaaaggatgcttttcccaatttggaggaaaagtacattaaagcggtgatcattgcatctcaaggtgctttggaccccgctttcaatgctttattattcctatcggatcccgaatcaggtaaagatattgaattgccaacacaacccgtgagaaagatttccgaggcgccggtgagaagacgtcaaacccaattggaacaggatgaactattagcacgtcaactagatgagcagttcaaccggtcgcattctcgccgccaccaccgtgaccgtgcagctcaaaatacgcatgaacagcgtctaaaagacagacagaggaggcgtcaaaaccccttatctcctgaagaaaggagggaatattatggagatgctgaggaacaggaggattcgtggtctcaatttgtagacaaggacctgcctgaactcacggacagggctgggcgttctttgcaggacacagcaaataaagtgagcagctggattagtgatgcttacaagagaaactttgctcaaggaaacgaacaaaacaacaaccaatatggtcaccaagaacaacaagaagaatgggaaccagaaatcgtggacttctcggcccagaatgaaaagaagacaaggccccagcagcctgagagaaagaggttcaattcgttcggtgcccaagtcggtgaggattcgctagaaagccacggaatcgcactacacaacgaagacgcgtttgaagaagatgaggacgtcccaccccaattgcctacaaggacgaagtctggtgaatcagccggaaaagtagtggcggagacagcctatatcgatacacctgatacggaaaccaagaagaagtggcagccactgccaccggagccattggacacgacaccaaccaaggtgaacgccttttccagggacaagaagaagaaccccgatgaggacgagttcttgatcaatagtgacgatgaaaagtaa

SEQ ID NO: 3304 - DNA, 1239 bp, Saccharomyces pastorianus
atggctaaaagacccttaggtttaggtaaacaaaacagagaaaagaagaggaaggtggaaagcggtgaaaagacggatgatgagccttcaaaagaacctacaccagcaagaagccaaatgagcgtcgaacttgacgacgacgccgatctagacgacgaattggcccaactgaaaggtctgtggtccaaatacttccactctgatagagatgatgagtatgttttgaatggtatcgtccacggatgtgatagattattgcgtctttccgaggagaacgaggaaatcaagaaaactttgaacgatgtattccatggtatttatgccttggccctatccgaactgactattttcagagcaggggatgaagaagcaactcaagaaaagagaagagaagatgtatcttcattttttgacagtgccatcgaaagagttgaattaggtctttcacgttttccagactcccagtttttaaaattgattttggcaaagatcattttccaaagaattccattggaacatatctccaccctcgacttgaagtcaaaaaacggaaaactcaaccttgttgaacaattcgagcgcgctaaagagcatttctcagtctatgaaaacgatacagaactaacgtacgagattctacagatgatgaatgacttattggacatcatcgaaaacttcggccgtgagcaatctattcaagaaggtatagatagtgataacgaagaggaagaagaactgatcgagattgaattggaaccagaacatcctgtatacccactacaacaatcgttggaagaaaactacgaatggttaagagaacatttcagcaagttgctcgacaccatgaataccgacatggaagtatatccatccgttgccaatactatcggtgaactatacttgaaaaaagctgaagaaccaagcaagatcttcttgagcttacagtatgacgatgacagcactgaaaaggccagcgacaaagaagccaaggccgcccaaaagacagcgttagcgcacacaaagaaagctttgcagtatctggaaaaagccaaactggaagatgatccggacacctgggttcaagtcgctgaagcttacattgatctgggtaacttacttgacaacgaaagtgttgaacaagaaaaagcatacgagaccgccgaagaaatcttaagtaaggccaacaaggcatcccatggcaaattccaagatgtccttgacaacttcttgaagaattga

SEQ ID NO: 3305 - DNA, 1044 bp, Saccharomyces pastorianus
atgtcgaacttgactccgttattccagaaatacgtcgctgtgattgaagaaaccagaaaagaacaaaatccagatgatatagatgataatgtaaaagacgaaaaacagaacttggtgaacactgatgaaattcgcgaactggttaacgattctttcattaaagaatgtgcaaaactactaaattcgcttattgagttgaacaaagtcataaagcagattgaaaaaaactatttggatgatttgaatatgagtgatggggaaaaggacgaatttgacatggagtgtaggttgcaaattcaacagtatttcaaaaaattcgaattcctagaaaattatgaaatggaaaggcatagtttaatgctaaagaagcttcaatcaaaacctcataagtggtcgaatttactttccaataagaatacaccttttagaaatgtaatacatccgcatgatgttgaaaaaggggtccacgaatttagattaggtgttcttcgatgcttgaacttatggattaaatacgtatcttccaaattcacctcaattcaacaagagaggttgatattggagaacaaaatgaattttaattccacacctgtgcccacttcatctaagaatgtagaggatttccctgcagatgcagtagatatctcagtgtcacaaactgctccagtcgaaacagtacaagatgaagtaaagcattatgaagaaacgatctccaagctatctcagcagcaattacaagtattagaaacagaacattcggaactattgaatcaaaaaaacgagcaattgaaaaaaatagataccataaacaaaacaatcctggatgttgttaatatacagaatgaactgtccaatcatttaacggtacaatcacagaatattaatttaatgctaaataatcaagatgatattgaaataaacattaaaaaggggaataatgaactacgtaaagcgaagagagccgccgggagaactgctaaaatgaccacttatggtgccattatcatgggtatctttattcttctcctcgattacgtgggttaa

SEQ ID NO: 3306 - DNA, 3561 bp, Saccharomyces pastorianus
atgtcacagaaggaggataccggggcagtagtacctaaaaagcctgaaacggcgcaagtggccaacattaatggtgtagataagttgcaacctccaaagacaaaagaggagaccgaagcaagcaaaagtgtgtcatctgaaaaggcatctcatgccggtgatgacagcttcaaaagaagcatccacgatgcttcctatgtaggatggaagcagatcggtggctgggaggaaaaagacgaattgactttggatgatgaattgatggatatgagtaaggaaacattcttgaataacatcataccggataatctctatggtgattggtatcattcggtggcgattttctttatcggaggtgttctatcgtttgcattgggtcattacaaattctcaatgggctctgcctttttcgtgattgtaatcacttcactgctgtatagaacgtccactaagaaatacagaggttccataagagagttagttcaaaaggaatttactgtgcaaaaagtggagaacgattatgaatccttggaatggttgaatactttcttggataaatactggcccatcttggagccctccatgagccaacttatcgttcaacaagccaatgaacaaatggccaccaatgaggcaatccctaaatttataaccgaactttggattgaccaattgactttaggcattaaacctccaagaattgatctggttaaaactttccaaaatactgcctccgacgttgttgtgatggattggggtctctcttttacgcctcacgacttgtgcgatatgagcgctaaacaggtcagaaactatgttaatgaattagtggttgtgaaggctaaaatctttggtgtcacgattcctatttctgtgtcagacatcgctttcaaagctcacgccagggttaaatttaaattaatgacgccatttccacatgttgaaaccgttaatgttcagctgctgaaagtgcccgatttcgatttcgttgcttccgtaatgggccgctctatcttcaactgggaaattttagccatcccaggtctaatgacattaatacaaaagatggccaaaaaatatgtgggtccaattttacttccgccattttctttgcaactgaacatcccacaaatactatctggttctaacttatccattggtattttagaaattaccgttaaaaatgctaaaggtttgagacgcaccacatcgatattaaaccagtcaatcgatccttacttgtcatttgaatttaacgacgtatctattgcaaaaacaagaactgtgagagacactttgaatcctgtttgggacgaaactttgtacgttttattgaactcgttcactgaccccttaacaattagtgttttcgataagcgtgataaattgaaggataaagtcctaggcagaattcaatttaacttgaattctttacatgacaaacccacccagaggaacctaaaggctcagtttttaagaaattctaaacctgttggtgatttgacttttgatttgagattcttcccaactttggaagaaaagaaactaccggatggatcagtggaggaactacccgacttgaatactggtattgctaaaattgtagtggaagaaggttctcattttgctgaagaagacaaaaaagtgactgcttacgttgaagtttacttgaatgctaagctggtgttaacaactggtaaagccagtgacacgcgtactttaaaatggaattccaactatgaagcagttatcgcagatcgtcgtaaaacaagatacaaatttgttgtgaaggataacaacggtgaagagataggatcttctatccagactttgaacgacttaatcgatagaagccaggtcgataagaatttgattcctctaaaaaaccaaaagggtgatattaaaatttctacgtactggaaacctgttaggctagagattggctccaattctgtcgcttatacgccaccaatcggtgccatcagagtctttatcgaaaaggcaaatgatctaagaaatctggaaaagattggtaccatcgatccatactgtagagtcttagttaatgggctgtctaaaggtaggacagatttcaagaataaaactttgaacccagtttggaatcaagtcatatatgttgcagtcacttcaccaaatcaaagaatcactcttcaatgtatggatgtggaaaccatcaacaaagatcgttccgttggtgaattcaatgttaacgttcaagacttattcaagaaggatgaaaatgataaatatgaagaaaccgttgatgaaaaaactaaagttggccgtctagtgatgcataagaaaagacctaaaggtactattacatactctacgtctttctatcctgcattacctgttctcacgttagaagaaatccaggatttggacaaagttaacaagaaaaagaaggtgttagaatcacgtaagtcagtcatggacgaaaaaaagatgtccaaagaggaaaaggctaagtttgagcaggaatgcaatgaagtgaaagaactagaagatatgtatagtaatagacagaaattggatttacaagagctattgcaatacaatcaaggtgtccttgctatcactgtccttgatggggaactgtctgattctgggttatacgttcagtcatttttcgacgacaatggtcacgcaagatttgtcagtccacaaattccatccagaattattaagaatggatggacaggtgacgtgataatcaaagaattggacaaatctgtcaccacgtttagagtctcaaagaacaagaatttcaataagatggaaaaatgtgtctgtgaagtggaattacctactctggaactagttaagaactgttattacaagccatcaatcttgcacctttcaggtgagggcagtgctaaactaatgcttcaaatatcttggtttcctattgacaccaaacaactgccagaaaacgatttgattacgaattctggtgatttgacgattatatccaagagtgccgaaaacttgatagcgtccgatttgaatggttactccgatccatacttgaagttctacatcaataatgaggaagatcacgtttacaagaccaaggttgtcaaaagatcgttgaatcccaagtggaacgatgaaggcactattcaaattaacaaccgtttgaatgacacattaagaatcaaagtgatggactgggatgccacatctgcagacgatactatcggtacagcagaaattccattgaagaagattaaggccgaaggtaccactgaattagatgtgccagtagaaggattagaaaatgctggtgatggtggtatgttgcatttggagtttagtttcaaaccaaggtacacgatcagcgtgagtaaaagagaaaagaaagtcggggatatagcgtccaaaggactgggtactgggttgcgagccggtacttcggtgataggtggcggtgttggagccattggtaagatcaagaagggtgtgttcggtggattgggcagtatcacaaaccacaagaaaaaccacgaaaagggtgaagacgaaaccaagttctag

SEQ ID NO: 3307 - DNA, 1815 bp, Saccharomyces pastorianus
atggtaaaacattcattcatagcgctagctgaacaagctagcaaactaagaaaatccattctacctgtaaagttaacttacaagaacatgctaagggatccatccgaaaaatataaggcattcgtcccaccaaagatgaccaaaaggatctggccagataaaacaattcaaaaggccccacgttggttatccaccgacttgagagacggtaaccaagctttgccagacccaatgtctgtggctcaaaaaaaggagtatttccataaactgatcaatattggtttcaaagaaatagaggtttccttcccatctgcatctcaaactgatttcgatttcaccaggtacgccgtggagaacgctccagacgatgttagcatccaatgtcttgttcaatctagagagcatttgatcaagagaactgtcgaggcattgtccggtgccaagagggccaccatacatacctatttggctacaagcgacatgttccgcgaaatagtgttcaacatgtccagagaggaagccatttccaaagccgtcgaggccaccaaactggtcaggaaactaactaaggatgacccttcacaacaagctacccgttggacatacgaattctcccctgaatgtttcagtgatactcctggtgaatttgccgttgagatttgtgaagctgtcaaaaaagcttgggagcctacacaggaaaatccaatcattttcaacctgcctgccaccgtggaagtagcctcaccaaacgtttatgctgaccaaatcgaatacttctctactcatatcaccgaacgtgaaaaagtttgtattgctacgcattgtcacaatgatcgtggttgtggtgtcgcagccactgagttaggtctcctcgccggtgccgatcgtgttgaaggttgtctctttggtaatggtgaacgtacaggtaacgttgacctggttaccgtggccatgaatatgtatactcatggtgttccacctaatttggatttctcagatctaaccaccatctcagaaattgtccaacgttgtaacaagatcccaatttctccaagagcaccatacggaggtgacttggttgtctccgccttctctggctcccatcaagatgcaattaagaagggatttgccattcaaagcaagaaacaagcccaaggtgaaactcaatggagaatcccatacttgccattagatccaaaggatattggccgtgattacgaagctgtcatcagagtcaactctcaatccggtaagggtggtgctgcctgggttattatgaggtccctaggattggatgttccaagatcgatgcaagttgatttctctaacactcttcaaaaaaatgcagatgccttaggaatggaattaaagtccgaaggaatcacaaaactatttaaagaaacttacaactacaataacaatgaatacatatacgtcactttgttaaactacgaagtgaagaaattaaactctgaacgtagggccttagttggtcaagtcgaagtgaatgacaaagttgttgatatcgaaggttacggtaacggtccgatctcttccctgatggatgcattatccaacttattaaatgttaaattgagtgttgaaaactactccgaacactccctaggttctggttccgccactcaagccgcatcgttcataaacctttcctatataaggaaaaatgatcatgctaccactaacatgtggggtattggtgtatctgaggacactggagatgcttctgtcagagccgtctttgctacggtgaataacatcattcattccggcgacgttttattaccagaacaatag

SEQ ID NO: 3308 - DNA, 3024 bp, Saccharomyces pastorianus
atggcgtcaaccttgcccaacgaacaatttccctcgtgtgtgcggtgcaaagattctataaccactgggcacgcgtatgagctaggttgtgatagatggcacacgcactgtttctcatgctataaatgtgagaaaccattaagttgtgaatctgattttctagtacttggaactggtgccttaatttgtttcgattgttccgattcatgcaaaaattgtggtaagaaaattgacgatctggccattatattgtcttcgtcaaatgaagcttattgttcagattgtttcaaatgttgcaagtgtggtgataatattgctgatttgcgatacgcaaagaccaagcggggcttattctgtttaaattgccacgagaagctattagccaaaaggaaatattacgaggagaaaaaaagacgacttaaaaaaaatttgcccagtcttcctactcccgtgcttgacaatgattctattgatgtaacttcaattacggcagttgcacccaaaaggtcatctagtagacctgtatcaccggttaagaaaatatccttagagtccgaatctatgaaagatatagcaatagaaaccaactcgagcgatatcattccgcatttcatcactgggtatgatgatagcgacgataattctggaagttcgaaattcggttctaatatttcaatagacattatagaaccacagcaagatagcgcggagcatgcaaaagatgagaaagtagaagaggtgaaggtgcattctagaaacgcatcgcttgacatagcattggatgctactccaagtcataaggtcttgttgggcaacacggaacctccgagccgctctaagattttattaaacaaaacaccattaaggaattcatccggacaatatgtcgcaaaatctccaagttcttatagacagggtatagttgttaatgatagctttgaggaaaataaccaggtcgaacctccaaatgacggttcccgaaccgcaagtgagctgttgagctcggtattacatagccctgtttctgttaatatgaaagattcggaggggcttgatttggatcttttcaatgctaggtcggtctcccatatggctccttcactatcaatgaatggtttgaataatatccgtggagagaaaagccaatcacaaactgttggtgtaaaaggggacagaaatagcaatgatttgatctctacccaacaacagcaagcagcgaaatcttcttcccactcgaacgataacggaaataataagaaaatatcaaggtcactgtcacgaaggtctaaagatctgatgtataatctgaagtctaaagctacaagtaaacaagataatagcattaagctttcacctgcttctaaaccttcctcgagaggatcacaggaattacttagagagtttgatacgcatcctagtttgggcactacaagtaccaacagcaattatatagacaccttggtgaagaaccaaaaaaacttaaatccaaagggatctgctgacagtagtattcccaaaaccaattctgatataggacacagcgccgatgaactgaactatcttggaataaaatcaccgtcaccaattggtcatttattacaatcacctgccacaccaagtaatgtatccatgtatcgaaccccgcctttggaaagctcactaacattcgataggatgaatggatcttcatatagtaatcataatcatagtctacctagctggcaaaatactccaaagacacagttggaaaagaaaggcaatctcgaaggacaaagtaacgaatctaaagatagatcgtctttcgataaagaaatcacagcagctgagttacatttaaagaaactaaacataaacttaaaggaactcgaatctcaaagggagcaattgatgaaagagattaatgaaatgaagtctacaaaagaaacgctacgccagcatatcgaagcctttaatatcgaaagaagtaaattatatctagattcaagcgattcttcagagaatcctcctacaataaaggaaactggtctggacggattatcacctatgaggcatgttgcaaccacaagctctgtaacacgcagttccgttaaaccgaaattctggaagttcttttcatctaccaagccccaagccgagcaatctatacaaggtacaaataccagcaatctgaattccgtcatcaaagccgctccagttttgcattctgttcctttagctactagcagctccggtcgtatagaaatctcacctcctgtattgcagaatcctaacgaatttagtgatgtaaaattggtccctattgaaaatagtggaagcatggcactaaataaggataccgaagattattcggatggaagcaatctgtacggttcaactctggttgctaggtgtaattatgaaaaaaacaaaataccgatgttactatctgtctgcatagattttatcgaggcaaacgaggaaaatatgaagtcagagggtatatatagaaaatcagggtcacagctagtcattgaagaaattgaaaggcaattctccctgtggcaggtacaacatgataacgaaattcctaatattttaacagatcaagatctgaatgctgtcactggtgtattgaaaagatatttaagaaagcttcctaatccgatcttcacgttccaagtttacgaaccactaatgaacttggttaagtccagaaagatgatggaaactttaccatttacgggaggaaagctatctctagattccagaaattcggataattatactaccagtgtaagtgccttaaaaagcatattggaaagattgccaaaggaacatcatagggtattgagggtacttagtgaacatatcgaaaaggttacgaaatacagtgattggaatcgtatgacacttaataacttagccttggtttttgcgcctggtttgattcgtgattttagtggagaaaaggatattatcgatatgaaagagagaaattatatcgtagcatttattttagtgaactatagagagcttttggcgtag

SEQ ID NO: 3309 - DNA, 657 bp, Saccharomyces pastorianus
atgaccaagttgcaaggactagaagcattaaggcacatcaaagcagttgtattcgatatggatggtacgttgtgtctgcctcaaccatggatgttccctgcgatgagaaacgccatagggttgcacgacaaatcgatcgatattcttcacttcattgaaacgctgcccacagagaaggaaaggaaagaagcgtgtaatcaaatagaagtagttgaagccaaagccatgaaccagatgcaaccacaaccctctctgattgatttgatgaagtatctgacaaccaatggtattagtaagaatatatgtactagaaacgtcggtgctccagtggagactttcgttgcaaggttcatcccacaggagttttccaagttcgaccatattataacaagagatttcaagcccacgaaacctcagcccgatccattacagcatattgcctccaagctgaacctaagtccctctgaaatgatcatggtgggcgattcgtacgatgacatgaaatctggtagatctgctggttgcctgacagtattgctcaaaaatcatgtgaatggccatctagtgctcgagaacaaagatttagtagatgtctctatagaagatctttcagaaatcataaaactgattcaaaacctgaataagagtagtctctag

SEQ ID NO: 3310 - DNA, 1884 bp, Saccharomyces pastorianus
atgagattacattatagaagaaagtttaattttttacggaggatactttttatattatgcattttttctctgtatatatcaagagattcattaagtctgaatgcaaaaaatacgttactgggctctaatttttccgaatatcatggtggtttaatagacgatattcaggttttacgatgctactgctggtacaggcaatgtggttccctatatgctccaatattacagccttccggtgccagtaaactggttaaggaaaaaaagaacgtgttgtggaatagggtttctaagaacataagtgcagagccaatatattcacttgaaaacggaattttttacaatagctacttgtatgtccatgccaaaaataaacagagcaagttgaaaaattcgataaaagaattagctatagcacgagactcagcgttaattccattagaagtattgagagacatcaacaaaatggttaaatcgagtgacagttctgtcttccataaccacgtatatcagcgcgataaacctacctcaccttggtggaaactactttttggtatagcggtggattcagacgatatatccgtgtttggtgaggagtgggtatacaaaggaagtggcatatggtgcaagtatattcttaatgatgatgacaatgatccgcctatagtaaatttagaaatgtatttaggctcatcattcattgaatcaagaccttattggaaagaagttattcatgaattccacagaaataatataccatcgttgcccatatcaattacaagaaaaattaagactccgcgtgctcgtcgtgggcctttaaacggattatcagggcctttaaaatcacctgataatgaaaacaacattttaagattacttcaagtagatgaagattacaaaataacatctccccatatccacttttcgaagggacaaaggtcattcaaaatccttcaaatgacagatttccactttaaatgcacagaaaacagtatgacaatcattaacgaaataaaaacggtaaattttattgatcacatactcgccttagagaatccggatttggttgttattacgggtgatctgctagactccacaaactccatggactaccaaacttgcattatgaggcttgtacaaccaatgatctccaataaaataccttatgcaatttccctaggtgcatctgatgaatcaaaactggctgcattgccgcaaataaaagactttatcagcaacttaccttactcgtttaatcacgttgcaacagcagaggggcatatggctatacaagtttcattcacaaaaaaattgctgaagcatgctctctttgaaagagaaacagacattaaatatgaaccaagtccatcagaagctttattttttatttttgattccttcaatcctgtgaataacttcttgttaaagtacattgatcttattgggaaaattgattatggtttgacattccagtacttccccctatcggaatatagaccgcatggactgtttcctatcatcggacaatataatgaaagatcaactttaaccgtggatacgtctaggtctaaaggcgaggtttcgatgatgatcggcggtaaacactataatagttttcttgatatcctgaatctttggaatgtgaaaggtgtcagttgtggacatgaacacaataatgattgttgcttacagtcaaaaaatgagatgtggttatgttatggtgggtccgctggtatgggcgtgtcaaggatggagggtctctatccaaatgtcaggttatttaatttggatgacattatggatgaaataacatcctggaaaaggagttctaattttgttgacgaggtttacgattatcaatatatttataagggaaaacaacaataa

SEQ ID NO: 3311 - DNA, 1995 bp, Saccharomyces pastorianus
atgatggacaaccaggctgtgaagtcgctactggaaatgggtattccccacgaggtggctgtggacgcgctccagagaaccggtggcaatttggaggctgcagtcaactttatattttctaatgagctgccggagcaggcaagcacgggtcagcccatgatctctgagaataggatggtgtccgatgttgagaccagcacctacgacgttccgaactctggcgaccaggatattgatatgcctgacgtggtcggtggtgatggtgatggtgaggcctacgacgacctgaccgacgaccatagcggctccagcagctccaatagtcgcgggccggaccactactccatatcggatacctccttgccgcccccttcgtacagtatagtgcaacacaatcaattcaagtctgccgtggacgacccgacggtcgtcttgccgctgcccttgaactcgctgatcgagagttattttggcctgtttgcgctgcttgcgtccatgtacttcccgcatgtgttcttgaagccggacttccaggatctgaactataggccggactggttcaaggggtcatccttcgcagcacctaggtacaggctcgcctacagcgagtcaaatgacggctccaccacatcagaaattgtggtggccagcgggctgagcaaggatccgcagccgcacctgctgtggcagttacagaagctcatctccgtggtcaacgcgaaggcatgcgaaagagcctttgtctcggccaagctgttcacgctgtctttggaaccacaattgaggtccaagttggctgattccgagcatctttacgaagtgctccccacgttcatcaagtcattggcagtggacttggaaatgtgtccggggatcagagaccgagaaacaagaaacctctttatatcatctgctttacacactccagataagagcgaaccgcccatggagacctttttgtctctgttccattttctgccagaggaatacgattccaacctgtacaaaatgtttaatgtcctgttgtaccctgaggaagaggaggaggaagcgggaaatgtcgtatatggcggtgagggtgggcaccaagatggggagtactccgagcccgagaacacgttgaaggaagtggcacccgtgctgacaatactgttcaatgaactagaaactaatacagagacagtgacgcttcccaacggtgtggacgttccactggaattttacccgcaactttacacgaagcgttgcaaagaccaactaataagacacatcatttataagcggaagcaagcccgcatcaagtccagatctttactccaagagatcaacaatttgaaaagttaccaaggtaaaaacatatccaccatcttagattctacgctagcatatttgcaagcggacaagaaagatgctgataacgagacctcgaagcaaatcgcgtcattgaaagatacgctaaactcttccagggccgctaaaatggaggagtacaaggacttggcatctaagctgcacggggaatggaacctctcacacccagagatacatatcatcaacaccgccaaacagttggggttgattgaaaatccatacattctctcgatggcagcactatcgccttattcctatttcactagagacagagacggcgagtggtcatggacacagagtaacacattgggcacagaattcaaaataaacaaatgctcgccttctgcggttcaagaagccatcaggcgtggaacgaaatttgcaagtgaaatgcctctgatgttcatatactgtgaggaggggaaaatccccaccaacgacgaagtcgcgaaagctttagagaacaataccgggtgtgtaaagtttgccaaagatgaccaaaattcattgaacactttgcgtgcgcagttcaacgatagcactggcaatatcagtacaaactccgaccaaaatatcgacaataataatagtaacgataacgataacaacaacgactccgattaa

SEQ ID NO: 3312 - DNA, 558 bp, Saccharomyces pastorianus
atgaacaaaatatcactcaagttagggaacaaaaacttgaaaaaaaatgtttccaagaaaaccaagaagaagaattcattacaaaataccaatttgtttaatttggataatgcagaaataacaaatcttccacgcaagtctcaaaataagatcaagatcgaaagcattgacaagtttgaccttgatggaggactgctctccaaaaagaaactagtgatcaaactagaggaaactgccaatgatcaaaacaataatttagaagaatatgtcactgaaaaagaatatagtgaggtacctattgaagagtttggagatgcattgcttcgaggcatgggatgggaaagtgattccgagaaaaacgcaaaaaagggaaaggaacaaagtaaaaaaaacaatgtttcaaacgttttgcaaacacaccctgacggattaggaattggtgcaaaattaaataaggaaataaacgtgaaggaagatttatttatgcctgtcgtgaaaatcgacaaagtgacgggcattaaggtcgatagcaataaaaaaaaagaacctgagccatga

SEQ ID NO: 3313 - DNA, 1542 bp, Saccharomyces pastorianus
atgaagtaccgttggtggctttattcaatatatgccgttggactactgctggggctaggcccatcgtatattcacccagatgagcatttccaatgcatcgaaatcctggttatgtggttcacaaatagtaagggtaccgtaccgtgggagtttgaccctagttttgctgcaagaagctacgttcctttactgctggtctacgggccattgttcaccattttaaagttttttccgtactttcagaataacccaatatcaatcctatatttaatgagattacaaaattatctaatgatcatattgtgcggtaattttatcgtacccaaactaataagaggtgacacgaaagccgttcaatctttaaaaaaattcttgtttctaacctcctacgtgacctggacgtatcaaattcatacgttctccaattctgtggaaacaattattctgacgaacactctgatagtaatggaaagcatagcaaatgcgaaaaatgttgaaaagaatagctacaagaaatcggttttactggggtttatgattagtcttggtgttttcaatagagtcacttttcccgcatttcttttactaccgtgcttgatattattttggaaattttaccgcactcattggcggtctatagcaatgctttcactttcatttttgatatcatcttgtttaattgttcttatagatacaaaaattttcagtaacggaaaaggattcatcatcacaccttggaataacctgaaatacaatatcaatatcaagaatttacaactgcacggattgcattcaagatacacccatttattagtcaatttaccacaaatgctaggccctgcattgttactagcaattttgtccggttataagctcaatcagctatctacctactcaataatctcaggaatgctatttttgtcactattccaacatcaagaattgagattcttaataccactagtcccattgttcataacaaatttgagctggacacgctcgagttcgaaattagtcgataatatgtggttcaaaggggcgtggcttctttttaacataattatgggttttatcatgggaatttcacatcaaagtgggatagtccagtttttgggagattactccagatttcatagcgaaccgatgggtgtccatatatggtggaagacatattcaccgccaacatggatgtatatggataactcgctaactgtctcttccgttgttaatttacaaaatggtgctgaatcaatagatgagataccgttcaatgtaagcaatcatcatgtaatagaccttaaaggctgtgaccttcaacttttaaaagacacaataaaacgattactgtcgaaggggatccagaatccactgactttagtaacgtctgattctatgatatcaaaattgaagaaattggaggcagatgaagggataacgttaataccaaaacgtcattacctgtctcatttagatttggatcattttgattttaatgatttgacatcttttaagtcagggcttactgcgtattctatcgaatag

SEQ ID NO: 3314 - DNA, 492 bp, Saccharomyces pastorianus
atgtcacaaaaaattggacatagtgggttggcatttgcacgcctttggcatcacgtggatgttgcccgcgataagagaacgttgggtagattggcctcagctattgcaatcaccttgatcggtaaacataagccggtttatcatccatcgcaagactgcggagactatgtagtggtaacaaactgccagaaaatgcgtgtcacaggtaagaagttcgaacagaagacgtactggtcccattcaggtagacctggccagcttaaactacaaacaatggaaaaagtcgtggcagataaagggtttggagaagtgctgaaaaaagcagttagcggtatgttgcctaaaaataaacttagaaagcaaaggttagatcgcctgaaagtatttgatggtagtgagactccttataagcagaatattaccgcctttgctcatgaacaaccatcgttgccggattctattaaagaatccatttctggtcaaccgaattag

SEQ ID NO: 3315 - DNA, 951 bp, Saccharomyces pastorianus
atggggaaaggcgtggccaagtacggtttcaagagtggggtcttccccactactagatccatcctgaagaaccccactacaaagcagacggacattattaataaagtaaaatctcccaagcccaaggggattcttggtattgggtatgcaaaaggtgtgcaacatccgaaggggtcgcaccggttgccacccaaggtcgactttatcaacgtggatagccttattgaaaagaccgtggccgagcctcagagcatcaagtcgagtaatggggcagcccaaaaaataaggctacaaaaggctgaactgagaaggaattttcttatcgatgctttccgcaaggaggaaaccaagctactgctaaaacacgaatatttgcaaaagaaaacaaaggaacttgaaaaggccaaagagctggaacttgaaaaactgaacaaggaaaaatcctccgatttgactataatgactcttgacaaaatgatgtctgaacctcttttgagaaatagatcaccagaagagacccagttgttgagtttaaaaagaaactacaacagatcactgctaaattttcaaacccaccaaaacaaattaaacaaactattaaacctgtatcatgtcgctaatgaatttattgtcactgaagctcaattgcagaagaagatcgacagagtgttcaacgatgaaacgcaggagttttccgatgcttacgatgtaaattcaaacttcacacagtttggaagtaggaaatcgctgctttcgggtaattccactttccaaaccaagatcaataacgcaattatgggttctttgactaacgaaaagttttttgatgtttctttagtggattcattcctgaacaacgacttacaaaacatttcagggcggatcgattccaaattaaacggttcattcgatgaacctgaaaatggcaacaaagatacaacctccttgtaa

SEQ ID NO: 3316 - DNA, 2364 bp, Saccharomyces pastorianus
atggtcaagagaggtgacttacaggagggcatttcttcgtcggaggatgctgccaaaaatcggcggaaaaggcggaaaccaatcaaatcatgtgcgttttgcaggaaaaggaaactacgctgtgaccagcaaaaaccaatgtgcttaacttgtaagtcgaggggtcgccctgattgcctctacacacaggaattcacacacagtatagagccggatgagctatttggcagcactcctaatatcgaattgttgcagaaagtcgacgagttggaaaagaaactaaatggtaaaggattggagagggaaaatgtagcggagaagaggaaaacagctcgaaacccatatgccaacctttaccactttcaatgtagaggttcgggtaggagaatagcgtatggtcccacatctttgagaacgtacctcttcaatgataatgtggagtttgtgaagagatataatcaattacggtccaggaaagtcaaaatcgaaatcaacaagtggaaagctgcaaacacatggacgaggatgtcagaatttggggttctagaaagtacattagtcgaaaataacaattctaatgttttaaaacagatttgtgaatctctaccatcatatgaacagactttaaatattattacagactttttctgtaacgaacgggggactaatgacataaatcaggtattggataaaaataaagttattaatgatttcaaatcttcatttcttccaggcaacaaattgcaatcgaatggtgaaagacccattgaaactttattgctctcaataaataaaaactactacaaaatcggtgtcatcttaatgattctgtgcatatgtcatttctatgagaatacgccaccggaggttgaaaaatatgttgtcatgctgacaggatttaccacggccaaggcgtctttcattgagcatgctcaatttatcttgctgagataccatcaccgtgaattgttcttagcatgcggggatgattctcatatgatcagtctggttgatttattgtgtagctcagccgttacgctgggcctacacctagatataagagaagtttacaaggatcaagaaaatattgtcggaagtttaaaaagtctagaaaacttatggatttggattcttttatctgattttaatgtctctttgaatgtcggaagatgcttggccatcagctcctcatattttcaagctgacgaatacgaaaacgatgatgattcgcatactaaaacagtcaatggtttaccggccactttatttggtgaatctgatacatgtgtgagtaagataaaaaggtttctgagactagccaggccaatggtcgatgaaatttatgacaagagctgcttcccagatttagaaaaaaactgtaaaattctgatagattttgtagagacagaatttgctccaatttcatatttcattagcagtgatttaatatctaaggttcctttgggcgaaaccaaagtgcttttgcaagttttaaatttactgctaacattttattcgttgagatttttggtttcgagggaaaggggcgttgttttgaagaataatattttgcaaactatcttagtttcgttttctgtggttatcaatacaaccagaatgtgtttcgatttggataaagagcatttccctgaactctttgcacctgattgtcctaatctatcaccgtttatggctttatcattagcgtacacgaattttctgtttccaagggcatcctctgtattttgctcctttctttatcacaacttaacacttttcgaaaagggacactatctatcctccgataatatagatcaaaatctggctgattgggatttatccactttaaatattcccttggataaagacataaatatactctctgcgtttcagacctattcagagatttttgatggatggttaaattccaacaatcaggagttaagaaacatcatgtgccgttcttgtacattcgttgccattattgcgatggaaagcatttgcaggaccgttttgaagaaagttattgaatgtagaactagggttgaaaactcaaggttgcaacaattgcacaacataaatactcccatcgatcctagtttaaatgatttgcatgtcacaactaacaacgtaccaatgggagatgcgccagctgtgctcctcccggacgcacaaaataataataacactgtcaacggcgggagcactcaacaagaattgacaaacaaggacaacaccgatgtacaaaataacgaggctgggttggctcaaattatatcagatgaattttgggcggcttacaatactggttgggaagaattaatgaaccagccggactataaatgtttattcgacacacattag

SEQ ID NO: 3317 - DNA, 1338 bp, Saccharomyces pastorianus
atggtttcgtttacaaggttaaccacactagcgctgggctttacaaaattagtgaattgcaatccagtgtctcctaaaaataatgactctttgcggttcatttataaagaaagagcaaatgtatactccgacgccaacagccaatccattcgtgaaaaaattcgtggagttaatttgggtgggtggctggtattggagccatatattacaccgtctttatttgaagctttccgcacaaacccgcataatgataacggtatccctgttgatgagtaccgcttttgtcagagtttaggttacgaaaaggcaaaagaacgtctgtataaccactggtcaacgttttacaaggaggaagattttgcaaaaattgcttctcaaggcttcaatttggttaggattcctgttggatattgggcctttacaacactaagtcatgatccatacgttaccggagaacaagaatattttttggacaaggctgtcgattgggccaggaaatatggcttaaaagtttggattgatctgcatggagctgctggctcccaaaacggatttgataactcagggttgagagattcatataagttcttagatgatgaatatttaagcgccactatgaaagctttgacctatattttaagcaaatattccactgacatatatctagacactgttattgggattgaactactgaatgaacctcttggccctgttttcgatttggaaaaattgaagaacctctttttgaaaccagcttatgactacctaagaaataaaattatgagtaagcaaatcatagttatacatgacgcttttcagccttacaattactgggatgattttttaaatagtgacaaagaagagtatggcgtcataatagatcatcatcattatcaagtattttcgcctattgaactagcaagaaacatggatgaacgtattaaaattgcctgccaatggggaattggtaccttaagcgaaagacattggtctgtagcaggcgaattctcggcagctttgacagactgtacaaagtggctgaacggcgttgggtttggtgcgagatacgatggaacttgggccaagggaaatgagaagtcctatcacatcggttcgtgtgtgaacaatgagaatgtaggtttgtggtctgaggaaagaagacaaaacactagaaaatttgtcgaggctcaattggatgcctttgaaatgaccggtggatggatcatgtggtgttacaaaacagagaacagtattgaatgggacgttgaaaagctaattcaacataaccttttcccacaaccaattagcgacagaaaacacccaaatcaatgtcgctga

SEQ ID NO: 3318 - DNA, 1122 bp, Saccharomyces pastorianus
atgaattccaatttcacagacataaataccggtgctttaacgttcataaataaagaagctgaagatgaatcgtgggagcagttgagacgagagtttaacacattattcagtaatttgagaacagagaataaggaagaaggagaacccattcacaatgaaacggaagaagccaagaaaccaataattttacatgaccacgataattcaagttccctgaatcaaagaaaaactcttaatttttcatgtaatggaaattttaagcaagtggataattctaatgatatgaggaaatgccatatcaaaaaagttcttcaagcaaaattaattttcaatactcttgaaggcaaagaagttttcttgaaaatatctcagcatacattaggtctaataagtttactgttaaggaaggcgaaattccgagtaccaattctttcatctaaattacgatctgttgcattacaattgagtatatttcggtacttattgaggtttggaaactttgcggtaactttatatagatttatcaagacatttcgcgaatttagggagatggatagatcaaattttcaaaaaagattattttttttttgtcaaaaagggttcaagtttcgtgatgttattgaatttttttatagtttgactgatgagctaatattgttcgaaaaactaaaaatcatatcctatagagaacaaacacttaaaactagtgttagcaaacctacgctctttattaaacggcaacacaacattttgtgggaagtcctaaacatactcgatgcatccaaaagcattcttcaatggcaaaaactcatgaaagatgagatttatttaagcctattcaatctaagtgacaatgaaaagaaaaaacacaagtcagagtataaactacttgtcagtaacaaagtcaacttaaatttgcaaaaaaatatcgtgacatgggatttttacaagataatattcaatctgttatccaatctaattaatatcatgggtaaaaggagagaatttaaggcaggcctaacttatgaaatactttcagtaagttccggtatcactgatttcatcaggctatggaatcaggctagactggctctaactaaggactgtacaagcgtttgttaa

SEQ ID NO: 3319 - DNA, 1236 bp, Saccharomyces pastorianus
atgtataaaccatcggctagagtgctatgttttgaaagacatgcgagatggctgtcatcaagtattagacgtgggacaagcgcgactccgccaataggatccaacgaactgaacactgattcagatcgtggtaatgctagagctgcagctgatgttgaaggtgtggcaagtcggttatctgctacccccccagcgcgcaaacccagggagaacagaagaaggatcacagagtttaaagatgcgcttaatttaggcccatcctttgcggattttgtttcagggaaggcttcagacatgatcctggatccactagaaaaggcaagacagaatacagaggaggccaaaaaattaccacgttggcttaaggttcctattcccaaaggaaccaactatcataaattaaagggtgatgtgaaagaactaaagctaagtacagtctgtgaagaggcaaggtgtcccaatattggcgaatgctggggtggtaaggataaatctaaggcgacggctaccattatgctactaggtgacacctgtactcgtggatgtagattttgttcagtaaaaaccaatagagcacctagtaaacctgacccaatggagccggagaataccgcagaagccatcaaaagatggggattgggttacgttgtattgactactgttgatagagacgacttgattgatggtggtgccaatcatttagccgaaaccgtccgtagaattaagcagaaggctccaaagaccctggtagaaactctttccggtgatttcagaggagatttgaagatggtggatattatggcacaatgcggacttgatgtctatgcacacaatttagaaacagtggaagcactaacgccacatgttagagacagaagagctacttatagacaatctttaagtgttttggaaagggcgaaaatgacagttcccacactgcttactaaaacttctataatgttgggtttaggagaaactgatgaacaaattatacaaactatgagagacctgcgtgacattggatgtgacgtagttacttttggccaatacatgagaccaacaaagagacacatgaaagtcgtggagtatgtaaagcccgaaaagtttgactactggaaagaaaaagccttagagatgggattcttgtactgcgcttctggacccttagtgaggtcttcgtataaagctggtgaagcattcattgagaatgttttaaataagagaaacaaaaactag

SEQ ID NO: 3320 - DNA, 1290 bp, Saccharomyces pastorianus
atgtcagagccagtgattgagtcccttttggacacggacatgtacaaggttacaatgcatgccgcagtcttcacgtattttccagatgttacggttacctataaatatacgaaccgatcttcccagttatctttcaataaggaggccatcaattggttgaaagaacagttttcatacttaggcagcttgagatttacaaaagacgaaatcgaatatttacaaaaggaaattccatatctaccatcggcttatatcaagtatattagcgactcgaactataagttgaatcccgaggaacacatcactttcacctcagaagaaattgaaggcaacccctcccattatagtttgaaaattctggttagtggttgttggaaagataccattctttatgagattccgttattggctttgatctctgaagcatacttcaaatttgtcgataccgattgggactacgaaaaccaattagaacaggctacaaagaaagcccaaaccttgtttgaaaacgaaattaaattcagtgaatttggtacaagacgtcgtagatcattgaagacacaagatttgattatgaaaggaatcatggatgctgtggaagcaaacccagaaaagaatgaaaaattatttttgggtagttcaaatatcctttttgccaaaaagtatggtgttaagccaatcggtactgtggctcacgaatgggttatgggggttgcctccattagtgaagattatctgcatgctaataaaaacgccatggattattggattaacacatttggtgccaaaaatgctggtttggcattaacagatacttttggcacagatgatttcttgaaggcattctatccaccatattcagatgcctacgttggtgttaggcaagattctggagacccagtcgaatatactgaaaagattgcccatcattaccacgacgtattaaaattacctagattttcaaaaattgtttgcttttccgattcattaaatatcgaaaaggcaatctcttattctcatgcagccaaaaaaaatgggatgctagctacatttggtattggtacgaatttcaccaatgattttcagagaaaatcagatgcgcaggtcaaaagtgagccattaaatatcgttatcaaactattggaagtcaacggtaatcgtgctattaaaatttctgataacttgggtaagaatatgggagatccagctactgtgagaagagtgaaacaagaactagggtacactgaacgaggttggagtggtgacaatgaagcgcacagatgggcttag

SEQ ID NO: 3321 - DNA, 711 bp, Saccharomyces pastorianus
atgttaggattgtatttatcttcgcttttctttgcttttttcatggcccaagtgtttgctaccaaatactcaatcacattcacgtcagacgattatgaagagggccagacaggacagaacaaatctaatcctttagtgtttcatttggaaaaaaactcactaccatcagcactgatagatcaaatggagtttagtccctatttggtgttagcggacatgccagataaatctcgcgttttacattcgcaggaacaagttgatacggtgattgcatcaaaatctgtaattgattttctcctggaagatccactggcaatagcagaacacaaaaagttttcacaaattgaaagtatcttgtatgaaatcatggaagacagcttaatggagaaaaacgggactgaggggatagtggagcaagagccggaactgaaaatatatgcaaacaaagaaattatagctactcccagtaacgcaaccagcaataatgaaaatccaacaactaccgtgaccttggtcagcacaatcccgaatttatatagctcgacaagtattgctatgcccacgggcggtacaagtgttggaatattgccgactacggcaccagcaaatatcacaatcgttggaggatatgaaaattcctccccatttttgatgccatcgatcagggtgttatccattatcttttgtgcgtacttgctactctactcttaa

SEQ ID NO: 3322 - DNA, 909 bp, Saccharomyces pastorianus
atgatagagttgcaggaaatacctccagaaccaatagatcctactagtcttcctcaatatgatggtacgggcgcccccaaaggggagagtgattctgacgggaggaggaagatatttggcattccgtatccaatttctaagaaatcatgccaaaacttcctttggaactgtcaaaagatttcggttctgcctatggcgttatatttcccattgcacgcaataaacactttggttacaccagccatttcgcctgactccgctcctgacgatgtgctaatgatggtgagggagattttaccgtcaataaccaccaaactgctagttagtgctctaacactccatgtttccgctggtgtcttactccgtattgtaaggaactggaacaattcgtcaaggaagacagataagcacttaaagatatctgctaagcaagatctatcccaagacaaaattggattaacgggtggagtgtatggctatttgttcggattgtacaagaatttccgaatatcaccgcaagtaattagcggttatatccttactccggtactgatatatcacctattgattatgaaatggattccatgttctctttccactgaagttaatttcgcctccataaagcagctgctatctcgcaagaatgggtggtggaaatggcttggaggctttattccattggccgttcttattgagtcaagcgtatatcatataggttcaggattctgccgctatctcggtatcaaaaaaatgagtagtagaaagaattggtccacagctatcaacctactgtcgctagctgggttcatttccgtgataagattgatgagagcagattctacaagattgggacctaaccagtttgaaagtattttcaagaagattggattgttgctgcggaaaagatag

SEQ ID NO: 3323 - DNA, 903 bp, Saccharomyces pastorianus
atgagtgaaaatattgaactgattttggtaccatgccactcgatatggaaatcttcagcacaatcaagcaatggaaccataaatttaggtcaattgcctgactactggcatttggcaccttttcaatacgaaggtaacgatcatttggcgttcatcaagcatggactaacagccatcaaactactgctgcaaagaatgaaccatgcaactgtcatattcagtggatcccaaactaaaaagcaagccggtgtcatatctgaagcacaaagctactactttctatgcgaaaagctgatcaggtatgcaatgtgcaatgataatatttcaatccctggtttcgatgacgaactgcgccttttgctacaagatatcaagaggtttttgatcggaaagcgtatagatatagacgaattgttttatggcggttcaattaccacggaagagttctcactagactcgcttgataatttaatcttttctatgtataggttcaaagaggttaccaacagatttcctcagaagatcactatcattggttttgcgttcaaaatggaaaggtttgttaactgccatgcaatggctatcgactatccacgatcaaacatacattacattggaattgaccctaaaccaacaaattacagcgaagaacagttagaaaagtattatggcgatctggtcaaactggagcattctaacgcactgaacttattcttttcagattggtacgctacaagggaaccattagtcgccaaaaagaaatcgcgtaatccgttcaacaggactgcgccatatactcattcggatctactattcaatagctatatgaggacagaagatgacaagaaatactttgagaagaatatcaaggacaaaatgccgtggtcatcattcgataaatag

SEQ ID NO: 3324 - DNA, 693 bp, Saccharomyces pastorianus
atgctacaagccactaccattttcgctattttagccttatttacaggttccgtctcggccatctactcaaacagcacggtttcagccaccactaccttggctccaagctactccttggaggcccacgaaacgactgtgtcatactctgacgagactaccaccttcttcgccacctccactgtctactccacgcactggttcaccttaaacacggccaccgtcaccaacgaggcctcttcaacctccgcctctggaccggcagcaactgcatcgactcaggaaaccatctccaccgttaccaaagcggcctcatccttctccgcttctggatcagcagcaactgcatcgacccatgaatccatctctacctcaaccattacttccactttgttgataactctgcatgacaccaccgtcttggctccatcgtcatctgcagcagccagtatcggcgacgacggctcgaacaacaagggcgccaacatcagatcattggaccaaacctcgacttcttccaatggttgcgtcccgatcaccaagttcgtcaccgtcaccaaggagcccatcacccagtacgttacagtcactcccaatatgactactcaatacgtaactgtcaccggtgctttctcggccgccagtgtgtctaccggcaacgtgcaatggttcaacaccaccaccattactaattag

SEQ ID NO: 3325 - DNA, 843 bp, Saccharomyces pastorianus
atgagagcacccccatcaccaagaaaatccagatctggttacttactttacttctacttccgactccgtcaatgttttagctgccagagattgaagagaaggtggcacattcacaaattgcacgtccgtcagtacagtactcgctggaacttgagtcctctttcgggaatacagattgaagacatgataaacgagccttctggcttgtgtcccggaagcgccaaaaagaaaccactgctgatagcaaggttcccaaagggctgtcaggaatcaccaagggtatacgtattacaaagaaataacttgtctcgtttaaagttaagcaaaaggaaatatgccttaaggttttattacaatgatttttttggtaagggctttaacaaaaaccctgagtttataaatgagagccatcaacactgtgcagaaaccgttagaaagatcaagaaagccacagcaaagcatgcggatgtaaaaataatttatcatgacaaaaacacgataaggagctacagattgagcagtaagaatgacaagaaactaattgtccacgatgtccttgaagaagaaaaggaagaagaagactcttcctcattgtatatcagattcggtgatgaccattcactaagagtcaaagactaccactccttacacaagcactctcagaagattccatcgcagcgccgtaacaacgctgtaggaggaaagcccaagttgctggaaaaactttttgaagaagaaccattaaaaaataataacaacacggtgaaggaaagtggtgtggttatgaatcaaggatttcgaaattctccccttatctccttctcacacattattcaacaataa

SEQ ID NO: 3326 - DNA, 1278 bp, Saccharomyces pastorianus
atgccaagaaagtttttgggagaaagaattgacagaaatgtggatgcggttagaccatcatcactaacgctatcaccagacgacttgaagcatataccagtaataccaagcgattttactgatgatgatagagtcttgagtaacggcagttttgaaaagaggttatctagaaagtttggcggtacgatggtgctgaagaaaagactagagtctgttccagaattgttcttacacgacttcaagaaaaaaccacgttccaaacttgacgtaattaaagaaagagatcctaaatactcacctgctcctaaagcatcagctatgcctaagattgatagggtacggttacaagagagaaaaagggtgggatcgtcaccgattcaaagaaagggactgcgtaggtcagcaatgccacaaattacggtgacgcgacccatagagcatgaagaacgcccggctgatattattaacagggtgtttgtttcgcaaccagccccaattgtaatgcctgtacagactatcactgcggtagatccggtgtccgtaatgcaaaagcaatcacaacatggacatgggaggaataagtatggtaaaagtaacagcgagatattatttgaagaaattctgtcagcttatgaaaatacccctacaaaaagttctaccgcactaaactcagaaatcgatagaattattgatatatgctcttccaaacacatggctaaaaatacagaagcgttccaaacaacgcagattgcgtgtccgtatgatacagagactctcttttcatcagcaacaccgaaactaaagcctgtgcatttcaatgcattgaacgacatgatttctagcccggaatattccacatccggcggcagcacctattctgaacattggagttcaggcgaagagctgcctgaagtcgaaagcatagcatggaacacccgcaaaagcgcaatgagatcatccatagcgtcagagagtaccaacgagcaaggctattatactgccgctgaaacgttgccctcaacgatatcggtggaagacctggatatacacaatgcactgccagtacctgcacaaaaaccaccgcatacggctcttctagaccgacttccaatgagaagattaaaaagagtgactctcgattctcccaagataatgcatatgttggattctgatgatgatagcggtgagcatgaagaggatatgattttacgcgctttacaagataaaattgacaacattgaaatcgcaagttgcagcagtagtatatacagcagctaa

SEQ ID NO: 3327 - DNA, 2529 bp, Saccharomyces pastorianus
atgtcggagaaggaggaagcgatttttcgctctgctgaaatggctttggtccagttctatatccctcaagaaatctcaagggactcggcctacactttagggcaagtgggtctggtgcaattccgtgatttgaattctaaagtgcgtgcatttcaaagaactttcgtcaacgaaattagaagacttgacaatgttgaaagacagtatcgttacttttattctcttttgagtaaacacaacataaagctttatgaaggagattctgacaagtatttggatggctctggtgaattgtacgctccaccaagcggttctgtgatagacgattatgttcaaaatgcctcttatttggaagaaagattgatacaaatggaggacgcaactgatcaaatcgaactgcaaaaaaatgatttggaacaataccgctttattttgcaatcaggggatgagttcttcttgaagggtgacaatatcgacagcacttcctacatggatgaagacatgatcgatgccaatggagaaaacattgcagctgccattggtgcatctgtcaattacgttactggtgtgatctcaagagagaaagttgcaactttagaacaaattctttggagagttctaagaggtaaccttttctttaaaactgttgaaatcacggaacctgtgtacgacgtcaagaccaaagaatacaaacaaaagaatgcctttattatattctctcacggtgacctaatcatcaaaagaattagaaaaattgcagaatctctagatgccaatttgtacgaagttgattcttccaatgaaggcagagctcaacaattgatgaaagtcaacaagagcttgagtgatttgtacactgttttgaaaaccacttccactactttagaaagcgaattgtatgctattgcgaaggaattggactcttggtttcaggacattactcgtgagaagtccgtttttgaaattttgaacaaatctaactttgatacgaacagaaagattttaattgctgaaggttggattccaaaggatgaattggccactttacaagcccgtcttggcgaaatgatttcaagattgggtattgatgtgccatccatcatccaagtattggataccaaccatacacaacctactttccatagaaccaacaagtttacttctggtttccaaaatatctgtgactgttatggtattgcgcaatacagagaaattaatgctggtttacccacaatcgtcactttcccattcatgtttgctatcatgtttggtgatattggtcacgggttcttgatgtttttagccgcattagctcttgttttgaatgaaagtaaaattaacaaaatgaaaagaggcgaaatctttgacatggcttattcaggtagatacatcattttgttgatgggtgccttttccatgtacaccggtttcctctacaacgatgtcttttccaagacattaacagttttcaagtcaggttggaaatggcctgatcattggaagaaaggtgagagcattaccgctacttctgtcgggacatatcctattgggttagattgggcttggcatggaactgagaacgctttgttgttttcaaattcatacaagatgaaattatctattttgatgggtttcattcatatgacatattcctatttcttttcattggcaaaccatctctactttaattccatgattgacattattggtaactttattcctggtttattatttatgcaaggtatttttggttatctttccgtttgtatcgtatacaaatgggccgttgattggatcaaagatgggaaggccgcacctgggttattgaatatgttgatcaatatgttcttgtcaccaggaaccattgatgatgaactataccctcatcaagcaaaggttcaagtgtttttgttgctaatggccttgatttgtattccttggttattattggtgaaacctttacatttcaaattctcgcaaaaaaagaaatcgcatgagccattagcatcaaccgatgcaggtgctagttcagaagacttagaagcacaagatttaattaccacaatggacgctgatgatgctgaagaagaagaagttggttctggttctcatggtgaggaattcggcgatattatgatccatcaagttatccatactattgaattctgtttgaactgtgtttcacacacagcatcctatttacgtctatgggctttgtcattagcacatgcgcaattgtcaagtgttttatggacaatgacaattcaaattgcttttggatttagaggatttttgggggtgtttatgacagtcgcacttttcgccatgtggtttgcactaacttgcgcggttctagttttaatggaaggtacatctgccatgttacattccttacgtttgcactgggttgaatctatgtccaaatttttcgtcggtgaaggtttaccatatgaaccatttacattcgagtacaaggatatggaggtagctgttgctagtgccagttctgctgctgtcgcttccagctaa

SEQ ID NO: 3328 - DNA, 483 bp, Saccharomyces pastorianus
atgaagtatactattgacgaactattccaattgaagccaagtgttgctttagaggttaatttcgatgcggtggaattcagagccatcattgaaaaagttaagcaattgcaacaattaaaagaggaagagtttggcactcaccatgctggccacttcagccgtagaagatcttcccaccatcatggtagaccaaaggttaagcacaacaagcctaaggtgaccaccgattctgatggctggtgcacatttgaagctaagaagaaaggcagtggagacgaagatgaggaagaaggtgagactactccaaccgccaacgtaccagctgtcactattgctcaagagactttgaaagtcaagccaaacaataagaacatctcttccaatagacctgctgatgccagagatattgttgcggataaaccaattcttggtttcaatgcattcgctgctttggaaagtgaagatgaagacgatgaagcatga

SEQ ID NO: 3329 - DNA, 825 bp, Saccharomyces pastorianus
atgtctagccacaagcaaaccagagtgatactacttaagaacaaaaccgttcccattgacaaatacgaatctgagtgtaagtgtaaggcattcgagccagtatttataccactaattaaacatacccatgttatagaagattttaaaggtgttctagatagcattccaaattatttggaaaccatcaactacattatcatcacatctcaaaggaccgtagaatccctcaatgaatcgatcatccctactttaacaagccaacaaaagtcgactttatttagtaaaacggtttatactgtgggcccggctactgctgatttcattaaaagatcaggtttcttcgatattagaggtggcaaagatgctggtaacggttctgttctcgcagatatgatcataaatgacctaactacagataccgtggctcagccacctaatgaactattatttctcgtgggcgaaattaggagagatatcatcccaaagaagctttttggcaaaggtataaaagtaagagaagtagttacctacaaaactgaagatttagatgataatttcgttaggtttaaaaacgttgtaaaatcggatgatgaggacgagaggtctttgaactgggtggttgtcttcagtcctcagggtactaaagaaataactcagtatttaagtgttaagggccatttgtcaaatgctagaatacgaattgcatccatcggacccactaccaaaaagtatttggatgataacaatatagcttccgacgtagttagcccaaaaccggatcctaaatcattattagatgccatagaatcatacaaacgccaataa

SEQ ID NO: 3330 - DNA, 3366 bp, Saccharomyces pastorianus
atgacgacccatcaggaggaagatcaggtacataactccgaagatgacgaataccaatcctcggtagagagtccgtccgacgcatctgactcggattcaggctataacaatgatggcggtaatatcgaccaaagtgaagacttatccggtaaagaagcatatacagttgcagatagacctccggaatattgggctcagaggaagaaaaagttcgtgttagacgtagacccaaaatacgccaaacaaagagataagtccgatacgtacaaacggtttaaatatttattgggtgtcaccgaccttttccgtcattttattggtatgaaggcaaagcatgacaaaaacattcaaaaacttttgaaacacctcgattctgattcaaataagctctccaaatcacaaaacgacatcaattcttcttcgcgtcatcatagaaaaacagaaaaggaggaagatgctgaattgatggctgacgaagaagaagagattgtagatgaataccaagaagacatattcgtctctgaatctccatcttttgtcaaatcggggaaattgagagactatcaagtgcaagggttgaactggctaatttcactgcatgaaaacaaactatccggtatcttagcagatgaaatggggttaggtaaaactttacagacaatttcgttcctgggctatctaagatacgtaaaacaaattgagggcccttttttgattatagtgccgaaatcgacgttagataattggagacgagaatttctcaaatggactccaaacgttaatgttcttgtattacacggggataaagatacaagagctagtatagtgcgtaacatcatattacaagctaggttcgatgtattgattacatcttacgaaatggtcattagagaaaaaaatgccttgaaaagattggcttggcaatatattgttatcgatgaagctcacagaattaaaaacgagcaaagtgctctatctcaaataattagattgttttactccaaaaatagactattaatcacgggtacacctttacagaacaaccttcatgaattatgggctctactgaacttcctattacctgatatatttggagattccgcaatattcgacgattggtttgaacaaaacaattcagagcaagatcaagaaattgtagtccagcaactgcactctgtgttaaaccctttcctactaagaagagtgaaggcagatgttgaaaaatcgctattacctaaaatcgaaacgaacgtttatgttggaatgacggatatgcaaatccaatggtacaaatcgctgttggaaaaggacatcgacgccgttaatggtgctgttgggaaaagagaggggaaaacaagattactgaatattgtcatgcaactgaggaagtgctgtaatcatccgtatctttttgaaggtgcagaacctggtccaccatatactacagatgaacatttaatttttaatgccggcaaaatgatcatattggataaactacttaaacggttaaaggaaaagggttctcgtgtgttgatttttagtcaaatgtcaaggctgttggatattttggaagattattgttatttcagagattttgaatattgtagaattgatggttctactagccacgaagaacgtatagaggctattgatgattttaatgaaccagattctgaaaagttcgtctttttgttaactacacgtgctggtggtctaggtatcaaccttgtgacagctgacaccgttgtactttttgactctgattggaaccctcaagctgacttacaagcaatggatagagcacatagaatcggccaaaagaaacaagttcacgtttacagatttgtcacagaaaatgctatcgaggaaaaagttattgaacgtgctgcacagaaattaagattagaccaattggttattcaacagggtaccggcaagaaaaccacatctctgggtaattcaaaagacgatcttttagatatgattcagtttggcgctaaaaacatgtttgagaaggaagcaagcaaaattactgttgatgcagatattgatgatatcttgaaaaagggagaacaaaagacccaaaagttaaatgccaaataccaaagtttagggcttgatgacctacaaaaattcaatgggatagaaaaccaatccgcttatgaatggaacggtaaaagtttccaaaaaaaatcggaggacaaagttgcagaatggattaatccgtctcgaagggaaagaagaagagaacagacgacgtattcggtcgacgactactataaggagattattggtggcggatctaaatcagcaactaagcaaactccacaacctaaaatgccacgtgccccgaaggttatccatggtcaggattttcagtttttccccaaagaattgaacgctctacaagaaaaggaacaacttgcatttaagaggaaggttaattacaaggtatcctcctatgatattacaggaaatacccctaatgaaggcagtgatgctgaagaagaagatgacgaatatgtagatacaggggatccagaaggtcgtgcagcccatgaagatcttaaaaaaaaaattcaagaggagcaagaaaagatcgattcagcacctgattttacagaagaagatgaattagaaaagcaaaggctaatatcacaagcatttagtaattggaataaaagagatttcatgtcgttcatcaatgcctgttgcaaatatggtagagatgatttggagaatatcaagatatctatagattctaaggcaccagaggaggttgaagattatgcgaaagtattctgggaaaggctgaaggaaattaatggttgggaaaaatatttacataacgtcgaacttggcgaaaaaaagaatgaaaagctaagattccaagaaaccttattgaggcagaaaattgaacagtgcaaacatccgttgcatgagctagtaatacaatatcccccaaacaatgcaaggagaacttataatacattggaggacaaatttttgttattggcggtaaacaaatatgggctgcgtgctgataaactatacgacaaaataaagcaagaaattatgatgagtgacctatttacttttgactggtttatcagaacgagaacagtgcatgaactatcaaagagagtgcatacgcttctaactttaattgtaagagggtacgaacaaccagacgcaaacaagaagaaaagaagtagaaccaccgcaactagagaagatactcctctatctcaaaatgaaagtaccagagcctctacggtaccaaatattccattagcgattgtaccgaatcaaaaggaaataagcaatcacgttgacaaaaagcccaaagtagagcaagaagtatga

SEQ ID NO: 3331 - DNA, 1317 bp, Saccharomyces pastorianus
atgaagcttggaagcaaagaaataaggatcatatccttgctgttgcttgataccgtgtttttcgcaatagaaataaccaccgggtacatgtcccactctctagcgttaattgcggattcgttccacatgctaaatgacataatttctcttgtggtggcactttgggccgtaaacgtcgccaagaacaaaaatccggattccacgtatacatatggctggaaaagagctgagattttgggtgcgttggttaacgccgtctttttgattgctctgtgcgtctcgatcatgattgaggcactacaaaggcttatttcccctcccgcgattgacagtccaaagttggttttatatgtgggcatcgcagggttagtatcgaacaccgtagggcttttcttgttccacgacggcgatgaagaacatgggcacggtcattcgcacagtggcatctttactgatgacgaggctcatatgccctcgtcgcactcgcactcacactcgcatgcacacggcgacgaaatagaggacacctcccgtatggatagtaccgacaacatcagcgagattctacccaatgctgtagtgaacagcgtcatgaacgaaactacaaggctactggaacaagagggtgcttccaagacaccatcctacacaacgtctagtcacacggttgccagcgccggcaatgacgcagaacacaaggggagcaagaggtctatgaatatgcacggtgtgtttctgcatgtcctgggcgacgcccttggtaatataggggttatgatctccgcacttttcatttggaaaaccgactattcttggaagtattacacagacccacttgtctcattgttaatcacgggcataatattttcatctgcgcttcccttatcatttagagcttctaaaattctgctgcaagccatgccttctgctctgtccgcggagcagatggaaaaggatcttctgcaaataccaggaatcattgctatccatgacttccacgtttggaacttgacagagtccatttacatcgcatctctgcatgcccaactagatatcacaccggaccagtttactggcttggccaagatagttagaacaaagcttcatcactatggcgtgcactcggctaccttacagccggaatttatacgcaaagaactcacctcggctgcaagaaccacgcatacagggtctgctggtggctcccaagaggatacacattcttcaagacaaatgacatacgatacaacactatccaactgtcttatcgacgatgctgccaattgtaacacggcggattgcttacacggcccttaa

SEQ ID NO: 3332 - DNA, 1812 bp, Saccharomyces pastorianus
atggatttgctcatcaataggatggagaatcctgggtcaagaaactgtacccttttgcctccatcgttctcgaggagcctttgtgggcgaaggagaaattccggtggtgacaaggtgatgattaaggagtctacgccacaggcacagccgcagccggagcagtccagcacaagtatggcacacttttcgtcatcgtctccaaggctgcccgtcatagcagtaaatgataatccggtgttgttgaggcccagtacggaggtcaatcttgggttgctgctacagaaagagaaggaggacgaggaggaagagaaggggacgaagcccgctgtgcatgacaagaaacacctacatgtgacgaggaacagactgcttaggacacggcaccggttgatggagatgtctagtttgcctgttttaggatccactaagacggggaagttcagcgagtgtttgttcgaagatggcgtcgataatagagtgtaccgccacagtcggtcgtatagtggagagtcgagtctcgatgacccattcagaatatctcccaaaaacgactgcaagtccagtagggcccgggcgtcttgtcttaacaagggacaccgggggtcgacgcccgctttccaaagttgccatgcggggctggctttcaaccaaatacagggctcctcctcttcacagcgaagatcatcggctagttcctttgattacgaaaggaaaagactggtgaaccagtttttacagtcctctacaggggtgtcagacccgttcgatgcattgaaagagtctgcggtgcttgagcccgcactatctgctggtaacattaaaccggggaacatgcattcgcaatcagaagtttccgttaactcttcgcccaacacatctttgttttatcatgatttagatggttcggccaataacgactcttcatcttttttgtattcacggtctaacgtgctaactttttcgtcatcatctgccttttcctccatttcatctgcatcattggattcagtagatgcagacaggaggggttccaatggtatgtgtccctcttctggctatttgaataataggagaaaggcaaggaactcatcgagctcctcgactacctccggttcggatgtcttggcattcaagtcctcgttgaatcggcaaaagtccgccgagtctcttacagggaccaaaaatacagcgaaactgaacagcatgagttactctgcagtgactttggactctagcccaaactcaatttctaaaagcaattcgaacctggacgacaacatcgatgagctgaattattatcaaaaccacatttccacgctcctagtaaaaattgagaacgaaatgaggaggagtctgaatgatacaataatcaagaacgaaaacaatgtccaaaagacaatacagaaatacgatctgttatcgggagaattgaccactctactggacgaaatgaccactttacgaaccacagtggttaacgaatttttggtcaagttgaaatcagactttaactacgatgatgacagggcattcattaatgaattgactacttcggtggaagagagcgtgggccagctacaagagctggaaaaaagaatggaagtttgccaagggagattaagcaagcaaaaatcttccttgagagaaatggatagtttattagagttgaagaccatgttgaacaaatcaaaaaaggatacgaaatcgatatatctatacagatacttcatcgtagacattattgcattggtcttgatgggtggcttcatcatttatctcaaaaatatgatagttcactattttgctcactga

SEQ ID NO: 3333 - DNA, 1107 bp, Saccharomyces pastorianus
atgctagataacatgcaatttcactcacctgcgccggaacatccccgattgaatgaaagcataaacggaaatcccgcttcgcatcgtttgggttacaaactccaccagaaggtacagagactgaatatggtcaaggagaacattgagggggaattgaactcgatgggctctgcacatggccaaatatccgtcggtagcagtatccatgctatcgattcaagtgtcgatgactacctgataccttctccgccattgtcgcccaaactgagacattctcctatagtaagccagccgcaagtgattggtatgaaagccgactgtcgggacttgatcatgttgacccctgtttgggaaacggggttggattcgcagaggtacaattacaacactaggaatttcttatcgcagtatagcttctttcgggatatgaagattacgaaaaggttgcctacaaaggattttaaaaggtcgaaaatggttagaccggtaaacaatccagaaatactacccaagagaagaaggtacgataggaaaattaagagaaggtcaagagagatagatgacgatgacggggtcggattggaaaactatgacgaagaaagtagccctattcgtgaggttcctgtcagatcagtgacccctatacgtcaaatcaaaagatcacttcatactatttcttccccattggcatctcaaggcgtgattaacagtgttcccaagtatgttccgagtatgtcatgggaaaggttacctgattactctcctaatttatgtactttagccaatgacaatagcaaagctctaagagtggaatggaaaggttctccaatggatctgagtcaggatccgctcaagcaacatttgcatccggcagagttggtgctggcacagattttaagactaccatgtgatctttatttggactccaaaagaagatttttcttagaaaaagttcaccggttcaaaagggggttgccatttaggagaacagacgcgcagaaagcttgtagaatagacgttaataaagcatcgaggctatatgctgcttttgaaaaggtgggctggttacaggatacgcagtttgaaaaatatctccaagaaaaatga

SEQ ID NO: 3334 - DNA, 471 bp, Saccharomyces pastorianus
atggcagggcaagagggcgcttgcgtaacgaaacgtctacagaatgagttgctacaactactatgttctactacacgaagtatcagcgcgttccctgaagatgacaatgatttgacatactggaccggatatgtaacgggcccccaaggaacaccatacagcgatctcaaatttaaaatttcattaaattttcctgaaagctaccctttccacccaccaaaagtcaagttcgtaagtccaatgtggcatccaaacgttgatatgagtggcaatatctgtctagatattttgaaggagaaatggtccgcagtttataacgtggaaacaattctactatcattacaatcattgttgggagaaccaaataatagatctccattaaatgcggtggccgcagagctttgggatagagatatggaggaatacaaaaaaaaggttctggcctgctatgaagagatcgaggattgctag

SEQ ID NO: 3335 - DNA, 1989 bp, Saccharomyces pastorianus
atgaaatccacttttaaaaggttttcatctactcatataggtaaattgatcaaagagtctttaaatacccctgaaatactaccacagctggagcggaagtcatcattgcataaacatttcctgaacgccaagagaacaaactcaattactgataagtggttgaaggatgcattgacaagaaaagataaactacatgaagatgaacttcgaaatgtaaatctacgattgaccgtagtactgactactttacagaagctccgaacaacttataagccggcctcatatttcgcattgttgaatcgcattggtacaggccatataaaatggctaaataaaagcggccaacaaatcgatacaccgatatatggtcgcttgcccttagagttttatcacgaattatctaacatgctctatagtatatcactccgacgtgcaaatgacaaaattgcattagctaaattttcactgcagttactcgatcgttattattaccttaaaaccaattctttcactggcaaaaagaaattccaatcgaaccccaagtttttgagaaactgtggcctattagccgttaaatcagagtcgatctactatttaaaggcgatgcaagagctatttagggaaaacgcggaaggtccgttgttgacaagcttaactcagttggcattttatgtggagacgcaccagtggacaaatgtattggactgtgtgtattcgtgtattgtggattttgattcagtaatctcgaaaactcatgatagggatattcaaacgttagaattattcagttcatatttggttaaaagtttagaactattaataacacaagatatggagaacgaagtttgccagattttgacaagcttatcttctaggtggaactttcatttcgacgagcacgattcttcgaatttgttacaactatgtgaaaaccattcctgcttcaaaatcattgaaactttgaacaaaatatcatttgtctctgttgaaactaggcatcttgaaatgataaactcatcatccgagatgagtttgaaacaatgtgtgaatttcctggccaaaaggaactttcagcctttcgagcaaaagtcatttcttcattcattatcgttcaaattaaaggagttacctttgagcgtaaaagtatgggaacagtacatcgatgaatttgatgcgtatatgcaggcagaatccatttctcttccgttacgagcattttttgttgatattttactcaaacgtctatctacccatagaggttttaatttcacgttatcaattgtagagcatatgatatatgaaagaaatttttggcagccattcttaatgacagagaatataattgataacaaagaaaattccaacttccattatctctttcacgctatgtctcgagccccttccaccaagatttctctgctgacactgttcaaccgattgaaggaaactggctatcaatttagcatacatgattttctttcgatgttaaagccttgcaaacgctattctgattgcgattatttctatttcgttttctataatttgttgtctatacacagtcacaaattcctttacttcgacaagttaagtggtaagtatttatggagactgccaaaccagattgtagatgcgatttctggatggctttctaatttggaaattggtctacaggaaaatactgatagggttgtgcagataacagacgatgttaatgaatggtatgtcgcagagagattaaatcatttagaagaaactactattcgaccaatagacaaaattaaattgcgtaatgtttttggggagcaagagacatttttcgatatggattctgaaacttttcaagattgtgaagagaaaagaggtgaagaggtaagaccgcaacattcatttagcgcaaaggatggacagtatagtctagagttagatctctcatattcagaaagaatagaagacttgctttgttatataagctctcaaaaacagcaatga

SEQ ID NO: 3336 - DNA, 1014 bp, Saccharomyces pastorianus
atgtccaaaccaaatacacctttacacgctcaaccgaatgaacagctagacttgagtaatctgaacgatctggacgaaaaagacattgacgatttaaacttggatccagactctgacgtagagataatcacagactccgacgctgtcgcgagttcgaatataaatgatacgatatggaaatgtaatcccaataagaaaaggtatcatacgccagaattcaatgacgtttacagtgaaactaacaacgccataaacgacataaccatgcttgatgacgttgatgatttccagcctagaattaacgtatcctctccgttttcatccactacaaaacttaatgacttattgtcaagtggccacaatgaagttacacatccaagaagattatcgatgtcccaacaatccaagtttatatcctatgttgatgaccagcttttacaaatccagagaaaatttgtccaatccaggggtttgaatgtgaaaaatggttatgctagtcttactcccttattgaaagacttgaaaactttgattgactttatttggtattccatcgcacatgttcccaattcggactatttacttcagtcagaacaaaagagacactgcccttgtgcccgaacgtcaagcaccacatctgaacattccagttatttcggacagggatcttatttaatcaaaattgcagacgatctcattgattatgcggaaaagttcacgtttaaagatatggaagattcagagatcaacgatacattatccaagctattcaaactatttttcatccttgataagatattcgtaatcttgatcgataacaacgactgcaaagaaacggcagcggtggcttcaaaaaagaaattgaacggaactgaaatcgttagattaaaaggtatcgcagaacgaacaagagttcgcttacccatatttttagaatctcaacttattcacggctaccattacgaattaagtagaatttatgaggggtttttagacaatgccaactcgatctaa

SEQ ID NO: 3337 - DNA, 2079 bp, Saccharomyces pastorianus
atgctttcccgtaatgctttaaggacttttggccattcaagggtgattatttcacaaaggtgtatctccttctcagctttgatattacagcagaataatgttcagttagataaaagcaaagatgaactcttagaaagcaacgaaaaatacgtttcaccatttgagagggtccaaaatgtcgcagctgagttgaaaagtgagttaaaagctccaggttcggatattaatgaagtttttcatgacttcaaagataaaattgaacttttaaaacagaaattacggaatccctcaaccatggaaagatcgcatttattggctaacttctcttcggaacttttacaggaattaagtcataaaaataaagacatggccacagatccctatcaagttttgaatacattgtgccaatacaaattagcacgttcacaacacttcaccattgttttaaggtaccttttatttaatgcatctccacaggacgtcattgctctttgggtaaaatatttggaaactatatcagagaactctgtgaatctactccaaaatagctcctctaatgcacatacacaaaacatagccattaccaccattgcttatttatccctaacaggaaataccgtggatattaagattttgtacaagattttacaaatcgatgacaaaacgggccaaactttgcccttcaacattgtaaagagaattttaaacacagaatgcagttcccttgaagggagggacctggccatgaaaaacctgaatgacctatattatcagtatacagtacaggatacagaccactttttaaaccaaatcgaaaacgcccctagatggatggatctaagagacctatatactcaatatgataaacttgaaggtaaaaaagatattagggtcatatcccagtttatggataagtttattgatttgcaaaagcctgatcaggtggtgagtatctacaaccaatatagtaaaatcttcccaaataattctttcctgagcgatcgtttattaatatctgtagggcgcctaagagccaactcgactaaagagaaattggacaggattttagccgtttggaatagtatcatcaaaccaggagacgacattaagaatacatcttatgcgtcgctcgttaatgctttatgtgactcgggtaattttaatcacttgaaggcattttgggaagaagaacttcctgaaaagtttaagaaagatccgatagtgaaggaagcgttccttttagccctatgccaaacctcgctattaacatatgaacaagtcaaggcagaactaggagagacggttaaaactacaaagctgtttaataaagttctcttgcttatgttggacgatgaaaaagtaagtcaggagcaattcaacacattttactacaaaaattatccaactaatggcgcattgtcccctactttggaaactttgagcattaagatgtatgccaactataaatatgaagcagaggatgtgcgtccagagtttaaactcttacaaagtatttccatgaaaccaacagattatgaaaaaatagaaaggattacaaaggttttcatttctgcgtgccctactattgagccaattcgtcaattttacaaacaattgggggctcgcttgaacgctagaaactatgcagattttatttctgcagagttcgataaggctggtggttcggttaccgaggcagaaggcatatacaacgacttcacagcatatcgaaagaccagaaaaagaaacgtggataatacgccactgaatgccttgttgttaggattctgtgataaactgttcaaaaccaaacagagtaagtacatttcttctattgaaaagtactacgctctggctaaggattcgagtatcagggtgtcgaacttggctgtttcgaaaattctattcaatttggcaacctttgcacgtgattctgagcagctggcggatagcgacatacgctttgttaaccaatttttgcaagatttaagcagtaatgaaggattccgtccgaaccctaaagatgtgcaaattttgaaggaatgcgatggaattatagtccctgaaaaacttgcttga

SEQ ID NO: 3338 - DNA, 498 bp, Saccharomyces pastorianus
atgcaaactatgccaagagaatttaaatcgtttgggtcaacggaacagtctttattatcgaggggtcatggagaacctagcttcagcgaaatatacgctgagccagagaacttcttggagattgaggtgcataaccctaagactcacataccaaatggggtggattcgaagggaatgtttacagattatgaaatattatgccgtacaaacttgccaagttttcataagagggtgtccaaagtgaggagacgatactctgactttgaatttttccgcaaatgcttgatcaaggaaatttcgatgcttaatcatccaaaggtgatggtgccccatctgcctggaaagattctcttgagtaatagatttagtaacgaagtcattgaagagagaagacaaggtttgaacacttggatgcaatcggtagcggggcatcccctattgcagtctggctctaaggccctagtgaggtttatcgaagctgaaaaatttgtcggttaa

SEQ ID NO: 3339 - DNA, 390 bp, Saccharomyces pastorianus
atgctggcgctagcagctggagtggcttctttgctttcagtatcgacgttgtctagaccagccttggctaattccttttcgaacgcgtctacgctactgtccttagtcttcttctttttcttcttcaaggacaactcacccaaggcttcggctatgtcgtcggtaggctccgtttcaggctcggcgtcagcggaagcactcttggacttcttctttttcttctttaatccagcaaatagatcatcacctgaaccattttctttaccgtttactgcagcatcaaaatcatctggaattaccttcttggtcttcttcttcttctttaaagtagggtcaaatcctaattcagcagctaaatcagaggacatcgtgtgcgtgctttctatgtga

SEQ ID NO: 3340 - DNA, 2073 bp, Saccharomyces pastorianus
atgatgaatgagagaagcaccataatcaatgcgctgaaaaattcagcaacctcgcgtttcatcaagaggttgactccggacacttccctgtcctctgttgcggaggcacttaatgccgttcagcaacacagtgcaacagatccggtgagattgaagctcttccatacgcctcggatggtctcgcagggggcacattttgcgttcagtttgccaacgaaaaagccccattacaagccgttgctgctttcgcacaaggctctagatgagttcagtttgaaacaggaccgtgatttggagaaaattttggctggcgaaaaagtgtacttctccgatgatatctttccctacagtatggtgtactctggattccaattcggttcgtttgctgcacaactgggggacggccgtgtggtgaacctgtttgacctgaaagacaaaagcgatggtcaatggcaaacgttccagttgaaaggggctggcctgacgccattttcccggtttgcggacggtaaggctgtgttgaggtcgagtatacgtgagttcataatgagcgaggcgttgcacagcattggaattccctccacaagagccatgcagctgaccttgctaccgggcaccaaagcgcaaagacgcacgcaagagccgtgcgccgtggtgtgtcggtttgcacccagttggattcggctgggcaatttcaacttgttcagatggagacacgatctggaagggttgatcaagttgtcggactattgcatcgacgaggtgtttgacggaggcaagcagttcgaggggaaacccgacttgaatgtattcaaaagcgaccttttccctgataaggaacagaaaatcgaccagcaagtggaacaggatgagaacgacgaacagggagcctccctggatggcgaaatttctgcgttgagtaagtacgacaagtttttcagacatgtagtcactttaaatgcaaacacagtggcgcattggcaagcatacgggttcgccaacggtgtcttgaacacggacaacacttcaatcatggggctgaccatggactacggcccgtttgcctttctagacaagttcgacccgagcttcacgcccaaccacgacgacacgtccaacagatactcgtttgccaaccagcccagtatcatatggtggaacctgcaacagttcgccaaggatctggcatgcctcatggggcccgagggacgcgaccttgagtccttgctcaagggcgagttgaacgaggtggacgacgccctggagaagaccatgatcgagagagtgcaaaagctggtggaattgaacgccaatgaatacaagtacgtgttcaccacgaggtacgcgcagctgatgtctcaaagactcggcgtcgatctggacctggcaacgtgcatgagctcccccaagcgtgaagacatcgagcgtgccgcggagaaagcccgcgagttctgtaccgccatcgtcgagccattgctggacgtcttgaagatcacgaacattgactacaacaacttcttcatccatttgcagaactacagggggcccttcttcgtcaaggataagaccgaggcaacaacactcttcgcagcgttcgaccaagaatacctacaaatattcttcaacgcaagccaactagaccaaatgggggaacacgaaaaaaccatcgcggctggtaagaaggtgttcgacaccgacggcgaagttcgcctgctggacgagaacctggagaaaatatacgactggacacaagactacttggcactagcgccccccacgaacgccacggcaagaacctctctcgccaagaaatccaacccgctgttcgtaccccggagctgggtgctggaagaagtggtagacgacctgatgtacaaccaaagggacggcttgcgggatcccgcctcgacgctggacacctccgcgctcaagaagctatacctgatgagcgtgaacccgtacgaccgcgctgggtgggacgccgcgctaagacccgagctggagcagaaatgggccgacttgtcgcaccaggagggtgccaagttcatgaaacaggcctcctgcagcagctga

SEQ ID NO: 3341 - DNA, 1623 bp, Saccharomyces pastorianus
atggtgtttgctaaagaagatgttaattattcattatatctggtgaccgattcgaccatgcttccacccgggacgaccttgtattctcaggtggaagctggcttgaagaatggtgtgacgctagttcaaatccgcgagaaggatactgagacagggagtttcattgaggaggctttggacgttcaaaagatatgtaagaaatacaatgttcccttgattatcaatgatcgtatagatgttgccatggcaattgatgccgatggtgtgcacgtaggccagcaagacatgccaatcccaatggttagaaaacttttaggcccttccaagataattggttggagtgtcggaaagccctctgaggtagagacattggctaaatgggggccagatatggtagattatattggtgttggtactctcttcccaactttgacaaagaaaaaccccaagaagtccccaatgggacctcaaggagcaattgctgttttggatgccttggaggaatataaggcttcatggtgtagaactgttggcattggtggccttcaccctgacaatatccaacgtgttattagccaatgtgttgccactaatgggaagagatcgttggatggtatctcgctggttagtgatatcatggctgcgcctgatgcttgtgccgctactgtaagattgagagagatgatagacaggactaagtaccaattcgttgattgcgaattaaacgaatcatttcctaccgcagtttccattaaaagtgtcatctctcaagtctcaagcaaccgcccactggtgcagcacgtcaccaacaaggtacatcaaaactttggtgcgaacgtcactctagctctaggctcatctccaattatgtctgaaatccaaagcgaagtatctgaattagcaagaattccaaatgcttctctactattaaacactggatcagtggctcccatagaaatgttgaaggcagcaatcaatgcttataatgaagtaaacagacctataacctttgatccagttggatacagtgccactgaaacaagactctgcttaaataacaatctgcttacttatggccagtttgcctgtattaagggaaatagcagtgaaatactatttctggccaaactaaacaatgataaaatgaaaggtgttgacgccggcagtgggaaaaacgatgatgcattactcgcacgcgcgactcaaatcgtggcattcaaatacaagactattgctgtctgcactggtgaacatgattttattgctgatggtacttttgggggtgaatgcaagctttcttcaggtacagcaggggttactgctgaaggtctcccatgtgtaatgattgaaaatggttcgatccccattatgggtgatataaccgcaagtggatgctcacttggttctaccattgcttctttcgttggtgggttagatcctaccggaaatctgtttgatgcagtcgtcggtgctgttctattgtacaagacagctggtaaactagcttctactcgttgccaaggaagtggttcgttccacgttcagttgattgacgcattgtaccaattattccacgaaaacaaaccagaaaaatggtctgcttctttaaagaaattcaattaa

SEQ ID NO: 3342 - DNA, 1707 bp, Saccharomyces pastorianus
atgtcagaagagaatttgagacctagctacgatgatgatcaagtgaacgaggatttctacaaaaggggcgctcaaagtaagttgaccaaggctcgcaaggcagactttgatgataatagcacagaggaaaatgaaaataaaaaggttaacaaaaaagacaagagatcaaaaactgatgacagacatgtggataaaaggccaaagagcggtccacgtttggatgaaaatggcaatccgcttcccaaggagcctcgtcttccaaaaagaaaagtggctgttatggttgggtactgtggtactggttaccacggtatgcaatataacccaccaaatccaacaattgaggccgctcttttcaagggatttgtcgatgcaggtgctatctctagggacaactccaatgatttgaagaagaatgggttcatgagagctgctagaactgataaaggtgttcatgcaggtggtaatttgatttcattgaagatgattattgaagatccagagatcaagcaaaaaatcaatgataatttgcctgaaggaattagagtgtgggatatcgaaagagtgaacaaagcatttgactgtagaaaaatgtgcagttcccgttggtatgaatatttattacctacgtattcacttattggccccaagcccagttctattctttacagggacattgcagaaagtaaaatcgaactacccggtgtgttagatgaggacttagaatccaaggaattctgggaagaatttaagaaggatgcggacgaaaaattcactccggaagaaatcgaggccatactggcatatgttccaccagctagggatgaattcgatcttaacgaaaaattgtatcagaaagtgaaaaagtataagcaattagaaaacactcaccgtagaaaatatcgtatatccgacgcaaaactggccaaattccgtgctgccacggagcaataccttggtgcacacaattttcataatttcacattaggcaaagattttaaagagccaagcgccattagattcatgaaggaaataacggtatccgatccgtttgtcattggtgaagctcaaactgagtgggtttccatcaagattcacggccagtctttcatgctacatcaaattcgtaaaatgatctcaatggccacgctaatcacccgttgcggttgtcccgtcgagcgtattagtcaagcttatggtcaacaaaagatcaatgtgcctaaggcgcctgctttggggctactgttggaagctcctgtttttgaaggctacaacaaaagactagagcaatttggttacaaggcaattgatttttccaaatacaaagaagaagtggacaagttcaaaatgaaaaacatttacgacaagatttataaggaagaagtggatgaaaatgttttcaacgcgttctttagttatattgatagtttcaacaaagttactggagcacaaggggaagaaactgctgaaaaatctggagtcgccgtacaaaggagcatatttgagtttttaactgctagaggtatcccaggtcttgttgatgcacccgaaagcaacaagaaaattaagcaaagaaaaagaatggaagagaaagaagctgagagtaaagttgcagcaagtcctattgccactgagactgaagttgcagcaagtcccgttaccgctgagattaaagagcaaaaggtacagaaatctgcagctaactga

SEQ ID NO: 3343 - DNA, 1107 bp, Saccharomyces pastorianus
atgaagcgtaatagcctggtaaatgtcaaactgaatgcaaattcgccatcaagaaacccaacaacaagaccaaatacgtccaagattaataagccatggagaatatcccattccccacaacaaagaaaccccaactcgaagataccttcacctgtacgagaaaaattaaacagactacctgttaacaacaaaaaatttttggaaatagaaaactctaagatcccatcacctataagaaaaatgacctccgccaaggtgacacacgaagaaaagaagaagttgctcaagtataaatcactgtcactcgatgattttgaactgggaaagaagttggggaaaggcaaattcggcaaagtttattgcgttcggcacaaggctactggatacatatgtgccttgaaagtaatggagaaagataaaataatacaatacaaattacaaaggcaattcagaagagaggtagaaatacaatcgtcactgaaccatccaaatttaacgaaactatacggttatttccacgatgagaaaagagtgtatctgttaatggagtatttggtcaatggggaaatgtataaactattgaggtcgcacgggccttttaacgatattttagcatcagattatatctatcaaattgccaatgcgctagactacatgcataggaaacacatcattcacagagatatcaaacttgaaaatataataataggatttaataacattatcaaactcacggattttggatggagtataattaaccctccggaaaacagaaggaaaacagtttgtggcacaattgactacctctcgcccgaaatggtcgaattcagggaatacgatcacaccgttgacgtttgggccctgggggtccttacttttgaactactaaccggcgctccgccgtttgaagaagaaatgaaagacaccacgtataaaaggatagctgcattggacattaaattcccaaacaacatttcccaggatgcacaagacctaatactcaagctgcttaaatatgatcctaaggatagaatgcgacttgaagacgtcaaaatgcatccttggatactaagaaacaaaccgttctgggaaaataaagggtcataa

SEQ ID NO: 3344 - DNA, 1245 bp, Saccharomyces pastorianus
atgacggcgaagtccattaaaagcataacgtccgttccaatatcaatgtcaaaaactggaaagatgaggttgacggcatctccagataacctggcgtctatgatgtccagagaccaaaataagctcattcatctggaccccgttccatttttcaaagacagacatgaaatcaaaccatggttacaaaagatcttttacccgcaaggtatagatattgtcatcgagaggtcagattctgggaaagtcacttttaaatgcagatcagtacgatctaacatgaggctgaatcctgaattcaaaagtacatcttcaaggtcgcacgcatgcccatttagaatcagggccgccttttctgtacggttacagaagtggaatgtggttgtcatgaataatatacatgcgcatgagctgaggtttgatttgatcactaagacagatgactataaaaaatttaaggaaaccctccgccagaaacgtgatgaaaaggcaatcaaaacctttgatgagctggaatataaggccagtctaaacttaccgctcgtgacaccgattatctcctgtgactgtggtctgaccaaagaaattgaagcttccaataatatatttcttccgatatcaaatccttctttgacctctaaaaaaagcgtgctcaaagctaataagaattccgtctctaaggcaaaatctaaacaaccagaaaattcaaagcctgggctaaggctgaaaacgcaattagattcaaccctagatgcaactggatttttagatgatatcaaagtacaaagcgcttttgtatcgacaggaaacgccgagtcactaatggacttgaacgagatcgacttcactaatatgtttaataacaatagtgctatcccaaattccaatcaaggtctgatggatttctcagtggatcccattacaggaccttcttcttccctatttccttcaacgcccatagagcctttttcacaaaacaatgtgacattagctatttcggagtcaatagcatcttcttctccaaatttcatggaaatgaaggctccttacgaggacgagatcatggatcttctcaaagataataaaagcaatgcaccaacctctgacacagatatcaatacagatttagggaaggatataagcggtagtcttggcatgctaaactataattatgaagcattgcttcagtttaatgataacgaatttagtgaattgaagtctatcgatccagcactaatatcaaagtaa

SEQ ID NO: 3345 - DNA, 717 bp, Saccharomyces pastorianus
atgaacggagcaggtggtgtggctgtctgggcacagcacccagtcagggactataatcatagtactgaccaagagtaccaaagattgagaaagctagctgacgacgcatataagaaaagagaccagttaagccatgaatcgcaaactgcttaccaacagggtgataagaagtcggctcatgagctaagcgagaagagtaaggcgcaactgaaagttgcagaggattacaacatgcaagcagccgaatatgtgtttgtggaaaacaacgccgactcttctagcaacgagattgatttgcatgggctatacgtcaaggaagccctatttattcttcaaaaaagaatcaaattcgctaccgatcacaatgaaccacaactgaacgtcattgttgggaaagggttgcattcgcaaaacgggatcgctaagctcaagccgtcgattgaagaatattgtgctaaacatggtatcaggaaccatttggaaaagggcaactctggagtgttggtacttgagttgcaaggtgtgcaaatcccgggaagtagtaccggaatggctgcacccgccaataattataatgctcaacctcaaccacaatacaataacaatggaggtcaaccccaaggtcaagccaataacaacaataacaataacaataaggacagtactttggctagtatatttaaaatattttgcagctgtatacaaagtctgacatga

SEQ ID NO: 3346 - DNA, 1509 bp, Saccharomyces pastorianus
atggaaacaacagcagtagtgcccatacactctgcaatgggaaatgaagatatggagaaagcagatgccaccacagtgagccaacccatggatagaacaacagcaacaacaacatcggctatgcatgaaagtgcaccggaggaaaatgtaaatcaagaagatctccatgcggaagaaggggatggggaagaagaagaaggcgaaactcgttgtatatgtggggagcttgatacacctgatgactctggattttttatccaatgtgaacagtgtagtgtttggcagcacggctattgcgtaagtattacacaagataatgcccctgataaatattggtgtgaacagtgtaggccagaattacaccagctttttactacagacactggtgaaccaaggtcattatacaaacctgttcaagaaaagaaaagacaatcaagaagaagggcacgcaatgctgctacgcctcaacctgtggcagacaatgaagttgagaaaagccccaagaacatcagcaatactgaagacaatatggacgatattggtgatgaagaagatgaaatagacgaagacgaaggttcagcttcagctaaagacggtaattcccgagctagtagaaaaagaagaaggaattcaacagatgatacctccatggaccaatattcattggaagctggtgacaacgataaaaaactgcaagataggaaaagagccacttttatggcaagagaggagaaacaataccaaagaatgttagaaaaagctctaaaagaaagcaggagaacatcccatcaagaagatcctgaaattgatggcgacgaagataatgatgatgaagacgatgccgaccttcaaaatggtgctggtgaactacctgagggtgtcgcacctacagaagacgatccagattcgataatgaacgaggatgtgaaagatacacccaagttgtcccaagaagaatcatcgttggagaaaacaaaagatttagtgaaggaagccagtcaggagaaggaatcttccatgagttccacgcaagacgttgaaaaaacagaagaacctatcccaccattgaattccatatcttcatccgaggatgactcaaggaaagctagttcttcaaggagctctagaaaagtttccaaaccagtaagaaaaagtaacagaacccgtcgaagtaatacaagctctgaaattaaccagagtagaaaaagtgccgatataggtaccgacaaaccagttaaacctagaataccaccgcaaagaacttctttgaatgagatgaaaagacgagtatctgccatcctggaattcatttctagaactcaatgggagttgagcgaagaccaatctgaccgggaagaatttgtacgatttgttgaaaatcagcatttcgtagaaaaagtagattctatttacaatggctataaggaaagtctatccatgatggacgacttgaccagggaactgctactgtgggagaaaaaatattcaaataattccaacgctacctaa

SEQ ID NO: 3347 - DNA, 2631 bp, Saccharomyces pastorianus
atgcacaatgcgcgtgttcaagataatgttcatgaacaagaaatatgtttacaggattgggtttgggttaatgagatgaaggggcaggtgaagtttattggggagacaaaatttgctaaaggtatatggtacggcattgaattagttaaaccattgggaaagaatgatggaagtgtgaaaggtattcgttacttctttatggatgaggctaaaaatgctttaaatggtgcttattacggtcttttttgtaaaagagaggcattacaattgtacaatctaacctataacgcaaacggtatgctaagggatgatggaacattgcaggaaacaattaaagagctacaaacagaacgtgaattgttgatctctaaactgaaagaaggtgaatcggggaaaaaaaagatggccgaatataaagccgccattaagaggctaagtatgagtgaaactgatttattatccaaaatttacaaactggacagattagtcgaagctttaaaatttgaaaacaatgatatgaagatccgtttagaaaatttcaataaaattctagatcctccaaatgaagcggtagtaccgaatgctaacgagagcgcattatgggaaagaaaccgtattcttcagggaatgcttgaacaaacgaagatgtcatataacgaaaacatgaaggtccaagaggagttgcttgaggaaaatacccagttattggaagaaaatgcagtattatccaaaaaaatatcagatttaagttcaaaactgcaacagtccaataatatgattagcgatctcacccttcaagtcgaggcccaaagcaaatcctctaatatcgttgaaaggctgacgaacgataatgttttacttacaagtaatttgaaagctttaaatgttcagttggaggaattgcgcacaagagagaaacttgatgaaaatttaagaatcacctatgtagaacttgaacaagaattgacactacaactgattagtatgcaatctgcgttggaaaagaaacagaattttgcagatcaatgtactgaagaaaatgaaagattgaatgctatgttgaagtcgtcagaatcacaggcaactcataaatttcaaagtcttgagttaaaagtgaatactctacaagaagaactgtatcaaaataaactgcttaaaagtctttacaaaatgtatgagccatttacgcaacaaaatatgtgggctctttcttctcagttacagtatttagccgaagtaatagatggcgaaaacattagaagttcccctattgaaaatattgaagcctatacgattttgaccgttttgagttatatcagttatgcattatacactcattcactggaaaatgctatcaaaaatctggggacaataacccaaagcttcaaggtaaataacgttcaactctctatgtggcagagtgagtttttacaacgagagttttcacccaaacaagaaatcatttcttctattaatagttttttaaaagaaaacaagtttctggacaatgacgtgacgttgatactcaaaacacttcactcgatctttgaaattatcactccgaagctgctggcagttttaaaagatagtactaattcaaatgaggatgatgggctgtctcttattagttcattatatgaagcgtcattctcagttacagccaatattgacacatttcttgaaaaaaacgaagcttcaggggaaaacaaaactttgcttctaagtcctgcttgcgacctgactttgtcatctattttatcgacatatttttcaaatccggttttcttaaatcaggattttgaacgtttacgtgcatgtgctatagaagaattgacgacattcttttcccgaacagaggatctcctagaaaataaaattgtattcactgaacatgtcagccaatcatcagctgacgcagaggataccaatgatagtacggaggaaaaatctccaaattccttagtaagtggccgtttggatgcagagaatatttatctcaaagaggaattgcttcaaaaggaaaatttgttaactgagctgaagactaaaattgaagtcatttctggacgggattcggaaaggaaaaacctggaacggattatcactggattacagaaagagttgaatgataaaaatgaggagaatcgttgccattctgaaatgctcagtgaacttaaagatgaaaataccaatctacgaagttgtttgaaaaatatggaactagacctttatcaagtagagggcaataacaacctaaatcgaatgtgcctagatagagagaaagttgataggatgaacttggtttctgagatcatgggattaagagaaaccattaaacgacaactaaaagatactaaacccgcaactattgatctaagctggttggaagagtccccaagtctcaaaaacgaggggcgatcgaaaggtgatattcatcgcggattaaatatttacaggattgaaatggcagattctgttaataactcgcgggtcttggatttaaactctggtcattctttgaaaggagatgaactatcatatgaaattgattgctcttatattgcttatttgaaacacaagaggaaaaacatacgccttaagctacagaacattgttacaaaaaaagaatga

SEQ ID NO: 3348 - DNA, 1392 bp, Saccharomyces pastorianus
atgagttactttcctcgaacatctgctcatttgatgagaaatgttctggctcaaaataaaggaaacgtatatctgcgaatcaccacatacgcgaccgatatcccgatacagatccggttcagtggagttcgctatattagcgggaaccgtgggggaaaacagcaacaacatataaatactgcgccaatagaattcactcccaattttgggtacggtgatagggttccgaaactcgacaaaaaggtagaatccactgccttgaagactctacgatgcacagatgacgtttcaaacacttcggaagcgggagccttgcccgatccaagcacacagcttccattcaaagtcaaactagtagacccaaaggaaaggaaatcaaaaaggtcatcacaggcaaccggccaaggtttcgacttgcagactttaaagaaaaaaattataattccctatcttcaattgaccaaacctcggctcaccattctggtgatgttgagtgccatatgttcgtatgccctatccccgtatccggcttcggtcagtgaattactatgcctaacggtgggcactacgttatgttctggttccgcaaatgctataaatatgggcagagaacctgaatttgataggcagatggtcagaactcaggcgagacctgttgttaggggcgatgttacacctgtgcaggcatttgagtttgccgcacttatcgggtctttaggtgtgtctactttgtactttggcgttaaccctaccgtggctatactcggtgcttcgaacattgcgttatatggctgggcctatacgtctatgaaaagaaaacacatcattaacacatggctcggtgccctagtcggaaccattcctccattaatgggatgggcagctgcaagccccctttcccatccagggtcttggtgcctagctgggctattgtttgcctggcaattcccacatttcaacacattaagtcataaccttcgaaacgaatacaaaaatgccggatatgttatgactgcctggaaaaatcccttattgaatgcccgggtttcgttgagatattcaatactaatgttccctctttgctttgggttatcttactttaatattacagattggtactaccaaatagattccggactcataaatgcatggctaacgttttgggctttcaagttctactggcaacaaagaataaactattccgcaaaaacattgaaggacaacgttaagttcaataagggtttgagtgtagccaacatatatgcaagaaaaacattcatggcgagtgttttacacttaccggcgattttaatacttgctattattcataagaagggccgctgggattggatatatcccggtgaggcaaagcggccacaggaacgtttatag

SEQ ID NO: 3349 - DNA, 636 bp, Saccharomyces pastorianus
atgaatagtagtaatacagttatctatgttaaaattaaaggaaaaacgccagatgggtttgtagatcctccaaaattcgagtggaatagtgcaaaagagcgccaactttgggcaatggtatcaaatctaaattattcgcgagatcaaatagattggcaagctctatccgaagtgcttgaagcaccagggtttttcctaaaaaaaaggacgtataagttgtttgctaaacatttggaacttttacagatacaattggaaaagaagagagatcttgagaagttttcaaatgaccaggtaaacgacagaatgtttgaggtgttaaataattatatccccactttacaaaacgaaaacttattgactgtaccgacaagcccatcggagacgaagggggagactttggaagaagtcgatgaagaagttacaaccgaggcattacaacatttgcaaacctctaaaatcttaaatattcacaaggcaaagtcaaacagtgaaaggaaatttgaccgtaacacgcctaacgatggcgctgaaaaagaatctgaacgaggtacttctgacgatgatttgtcttcgagcttaagcgtcagcaagtccgcattagaggaagcattaatggacagattgcaattctga

SEQ ID NO: 3350 - DNA, 2115 bp, Saccharomyces pastorianus
atgattcaaaaaatgagtccaagtctaaggaggccatctacaaggtctagttcaggttcaagcaatatcccacaatcaccctcagtacgatcaacttcatcgttttctaacgtgaggaaaaactcaattcgcaatgcgtccaattcaggttcacaatcagtttctgcatcctccacaagaagcagttcgccattaaggtctgtatccgctaagtctgatccctttcttcattcaggtaagataagggtcagaagaagcaatagcactaacaattgcttgagaaaaaatgacatatatacaggttcaatcactgtaactattcggcccaaaccgcggagcaccgtggcatcacacgacagcgtggggcttaaatcgcctagatattctcaaccaagacccaatccacaaagcggcggaaatacatttattagagatccttggtttatcactaatgataagacaataatacacgaggagatcggagaattcgagtttgaccatgtttttgcctctcattgcaccaacttagaagtttacgaaaggaccagcaaaccaatgattgataagctattggtagggttcaatgctacgatttttgcatatggtatgactggatcaggtaaaacgttcacaatgagcgggaatgaacatgaattaggtttaattcctttatccgtttcatatttatttagcaatgtaatggaactttcaatgaatggcgataagaaattcgatgttattatatcataccttgagatttacaatgaaagaatttacgatttattagagagtggattagaggagtccattagtaggccaagcacgccttcaagactgtacatgggtaagggaaatagtaatggattaagtgctgagttgaagattagagacgacacccaatacggggtgaaagttattggcctcactgaaagaagatgtgaaagcagcgaagagttactaagatggattgctattggtgacaaaagtaggaaaattggggaaactgattacaatgcaagaagctcccgatctcatgctatcgtcttaattcgtttaacgagtacagatttgaatagcggtacatcaaggtcaagtacgttatcgttgtgtgacctcgcaggttcagaaagagccacgggacagcaagagagaaggaaggagggatcctttatcaataaatcgttacttgcactggggacagtgatatccaaacttagcgctgataaaataaatccaacaggcccaaacatactcacgacaccgacgagtaccggcagcaatagtactggaaccgccactagtaataataatattccaaacaaccacattccatatagagactccaaattgacgcgtttgttgcaaccagcactcagcggggatagcatagtgacgacgatatgtacagtggataccagaaatgacgcggcggcagaaactatcaatacgttgaggttcgcatcgagagcaaaaaacgtcgcattacatgtatccaaaaaatccatcataaacaacgggaataatgacggagataaagaccgcactattgagatgctaagacgtcaattggaagaccaacgccggccgatatctgatttgaaaggccgctcaagtccaggtgagggctcaagtcacttctcgagtgacggcaacatcaaaagcaatggggccgtcgatccaaatttggcgctaatgagagcggaaaaccggatattgaaatataaactggagaactgcgaaaaactgctggataaagatgtggtcgacctgcaagattctgagatcatagagattgttgagatgttaccattcgaggtcggcactctactagaaacgaaattccaaggacttgaatcacaaataagacagtatagaaagtacactcaaaaactcgaggacaagattatgacgctggagaaacccgggcacaccgcaacgtcgctaaccggttgcggcgacactgaagtcacggaactgcggaagatgctcgaaaggaaggacaagatgattgaggccctgcaaagtgccaaacgattacgggacagagccttgaaaccgctcactaatgcacaccaaacctcgcaccctattgtaagaaacgataaattgacttga

SEQ ID NO: 3351 - DNA, 1530 bp, Saccharomyces pastorianus
atggcttcgatgttcaggccaccagcatccaacaggagccaccaaaagacaccaaaattaacgcttccagcgactttagttcaaactttaaaaccggctcatgaaggacaaaatcccaatcgatcaccttactcttccgtgaatgaaagcccatattcaaacaaccctacgtcggccacgtcggccacctcatctatggcttcaaattctactctactgtacagccgatcaactacgtctacaaagtctactttgacaatgaaaaatagaccgataccaccaccattaccaccctcagtcttaacacaaaaggaagacggcaaagaacacataatagctgacgattttcacatttctgaaagattctcaagtttgcatgttgacacaacataccaggaacctctgttgagtggttcttccaacaagttagctgatatagatacctcttttttcagaagggacctgagcacaccaggcggtgatgattcatatccttcgacacttctctcggcatacgatttaagtagcagtggaagcaatgccacccctataagtgccaccaacattacttcttgttcctccttagtacaggggaaagatgtagatcaactagaggaagaagcttggaggtttggccatctcaagaacgaaatcataacactgggcatcttaggagagggtgcaggaggatccgtagccaagtgtcgattgaaaaacggaaaaaaaacttttgcattaaagacaattaataccctaaataccgacccagaataccaaaagcaaatattcagagagctgcaatttaataagagtttcaagtctaattatattgtacaatactacggtatgtttactgacgaacggaattcctccatatacatcgctatggaatatatgggaggaagatcgctggaggcaacgtataaaaacttgttaagacgcggtgggaggataagtgagaaagtgatgggcaagattgcggagtcagtattgagaggattatcatatctacatgaaagaaaagttattcatagagacatcaaaccgcaaaatatccttctcaatgaaaagggagaaatcaagttatgcgattttggtgttagtggagaggctgtcaactccttggcgataacattcaccggaacatcgttttatatggccccagaacgaatacaggggcaaccgtatagcgtaacatgtgacgtatggtctttaggcttaaccctactagaagttgctgggggaaaattcccctttgaatccgacaagataacacagaacgtggcaccaatagaattactgaccatgattctgacattttctccccgcttgaaggacgagcctgaattaggtatcatttggagcaagacattcaaatcgtttattgaatactgtttgaaaaaagatgccagggaaagaccatctccacggcaaatgttaaagcatccatggattgtcggacaaatgaagaaaaaagtcaatatggaacgttttgtcaagaaatgttgggaaagtgaagaagacgagtaa

SEQ ID NO: 3352 - DNA, 3813 bp, Saccharomyces pastorianus
  modified_base (2826)..(2871): a, c, g, t, unknown, or other
atgataacgaacaccgagtttgatgtgcccgtggactggctgtacaagggtaagagcaggcggaaggtgaatacaaagccgtcgaggccgtcttcatctgcctctgcaccaaaggtggtggacagtagcaacaacagcaacagcaagccgcgtgcgaggtcttcgtccatatcgaatgcggccctttcaaataacgagaagtcgaacttgactgacggcgatggaagcgggtttggatcaggcactgagaacttgccgctccttactcctgttagcagtagtggccgtaccagtttggcggccgcagacgatggagatgccgatgatgtgataaatggtgacgatagcaaggctagcgtccctctcgtgaagaagaaacgctccacttccatatccaatgctgtggtctcgtccaagccaaggctatcaaattcaaacataagcgcaaccggaaccccttctcctgccaagggaaagctccctctaccaatctcttctttgtcaaatgccaatatcaagaggagcaactcgtcagggagcgaaaaatccaaacgatcgatcttcgggtctctgtttggcaaaagatctgccccttccactgtttctgcagtcaaaaaagcattgcccgcggtcaataccgccgcacctgtagataactcatctaagaaggaaccatccagtaacggtaacaacatcaacacaatccctcgtgtgaaggagctttcttccccgaaggtagcatctcctaccgtgagtaaaccgcccactcctatctctccctccccttcagcattaccttctcccgctctctcagtgaaggatttatctacggtttcgttgaaaagagtgtcgtttgccgttgataaattcgaagcggaccctccccagcaactcccttcaagaacgcccaagaagggcaatatcctgattccggacgatatgataagcgaagcaccgtctatatcggtgggaatatccagcattaatcaatcactcaaggtacccaaccccaactccaaggggccattgtatactaggaagtccaaagaatacatcctcgcattggagaaccagaaactggctctcagggaggctgccaaacatcagcaagaggcacatttcgctgctaataggatagctcacgaagtggctagtttcaaaacttccgcaaatacgggaggaaagcttgctgcaaagtcaccccggaactccatttcaaaacaaaacgaagaggcgtcacagtcaaacgttgaccaggattttgacaataacgcatttgcagaaaatctttcaaaagtaggcatcgataaacctattcacatgcatgagcaccatttcgaagctccaaatcatgaaaaaaacgacaccgactccaccttggaaaataaagaagtcaccctggatgtcatctacacaagatgttgtcacctgagagaaatcctacccatcccatccactttgagacaggtcaaggataaaaccgcccctttacaaatattgaagttcctaaaccctaagcccaccttaattgacatcctttcgttttgcgactttataaccattgtccccattcacaccatcattttcgacaatgtcgctttaaaccaagacatgtttaaaataattgtttccgctctagtaaactccacagtgttggaaaaattgagcttgagaaatgttcggatcgatcaagatgggtggagactattgtgtaagtttctcttattgaataaatcattaaacaagttggacatttctcaaacaaaggtcaaatccgacctagccgaatcattgtaccgtcacaatatggattggaacttgttcactcaagtgttaacacagcggtctcataagcccctggaagagttgctattgaatggtattcaattcagtaaggtctcttactcgtgctttgaacgtctgttgacatcctatgcgacccagaacacgttgccggaatccggtattaggcttggtctagcaggtgctactacttctaatatatcccaggactgtttaaaatttactttcaattggatgtctcaatataacatacaaggtgtggatctagcgtttaatgagttatctactatggttaaacccatggttagtaaattgtctgctttaccatatgataatttgagatactttatcttgaacagtaccaatatttccacttcttatgatttggctttgcttttgaaacatctctcaaagctgcctaatctgaactttctggacctaagcaatttaccacaatgcttccctgatattttaccatacatgtacaagtatttaccaaggttccccaatttgaaaagagtccatttggataacaacaatctaacatttaaagaattagccgtggtttgtaacattcttatcaaatgcaaatcattatcacatgtgtcgatgactagtcaaaatgtagaaaatttctacttgacgagtgacgactctccagttcaagcaaccaacacagatggagaatcggacaattccggtttaatggaaattagaggccaatttgctaagaacagtttatcttctacactttatgcatttgctagagactcccctaacttgatcggtttggattttgactatgatttaatatcagaagaaattcaatcaagaattgccctatgcttaatgagaaatatgcaacggactatggattctactttccagttagacgagttggattctcaagatgatttactgttcgatggctccttagttaccatgacggctgaaagtgtcctagaaaaactgaacctattgagtgacaggaacgcaaatgtcaaaaaagacgtcaccaaaagnnnnnnnnnnnnnnnnnnnnnnnnnnnnnnnnnnnnnnnnnnnnnnaatgttcagcatacgattgatatcatgtttgagaaaaggaaatccggtgaactaccattacaagaaaaggaaaatttggtaagactgctacttttggagcagaatttatgcaacattctcgaattgttttctcataatccaaacttaaatgatgttttgggctccggtaaggacgactccaaagaaagtgttgattcgagcgaggattcgaaattaccagctttgaaacacgttgaatccggataccatgtctctgaagaaaaaacacaacctgaaaatgaagtaatcacagcaagaccacatttgatggccactgattctggtaagactattgatgttttcacaggcaaaccgttggtgttcaaaaatgcgtcatcaagcacttctgtaggctgtaggaagcaagaagaagaagaaggtgaactgcataagtgggggttctttgtccaacaacagagatctttgtatcctgaaaatgaatctgcaaggcaagcgccaccaacatcacgtcacacatccaacaatttacaagctatcgataattcggcttcatcatcttcagtttcagcttccaccaacgaaacagctgccacgagtttatccactccagtaactccgaaaatcatgccaaagatcccatcaggtgcagccttgagatcagcaatcataaaagctaaaggtattgactctattgaagacctgattcaaaacgtcagttccaataacatcgaactagaaaacatttatggtaaatccattcaaaatagtgcttcgatgccctcatccggcttgctttccaatgtttctgctcctgtttctggcaaagattctctaaaagcatcgccttcaaacccgactactgacaactgtgagggtaaagttactgctacttacgagaagttattaaacaacttgtccatggagaggtcaaccaaaccgtaa

SEQ ID NO: 3353 - DNA, 894 bp, Saccharomyces pastorianus
atgataagattctgccccgctggtaaccttactcgtccattgattagaaactttgtcacatcaagctctcagtttataccacatacgcttgctttaaggcgggtcctttcaagaaatgtactagcaagaacttattcgatggaaagtgaaaagtcggcaccttcatttgatatttcaaaacttacaagaaatgaaatcaaacaattacgagacttgaaaagggcaagggaaagaaaatataaagatcgtacagtggcgttttattttagcagcatagcgatactcttcttaggtttggcatacgcagcggtaccattatacagagccatctgtgcccgtaccggcttcggtggtactcccataacagatagaagaaaatttaccgatgataaattgattcctgtagatactgaaaagagaatccgtatttcgttcaccagtgaagtatcacaaattctgccctggaagtttgttcctcagcaacgtgaggtttacgttctaccaggcgaaacagctctagcattttataaagcaaagaacaacagtaataaggatattatcggtatggccacctatagtatagcgcctggagaggcggcccagtacttcaataaaatccaatgtttttgcttcgaagaacaaaagctagctgccggcgaagaaatcgatatgcctgtctttttctttattgatcctgattttgctagtgatccagctatgagaaatatcgatgacattatattacattacacattcttcagagcacattatggtgacggatctgctgtaagtgactcgaaaaaagatctggagatgagctccgacgaaaaagccgcatctttagccaatgcagctatcctgtccccagaagtggtggacgcaaggaaagactaa

SEQ ID NO: 3354 - DNA, 3099 bp, Saccharomyces pastorianus
atgtccactacacttaatgagttaagcttggttcaagtgctggaacaagcaagtaacccacaacatctcagatctgaagtccaaaaattagctgaacagcagctaaagcagtgggaaactcattctggattccattacttactacagtcaatatatcttaatttatcaaattctttgcaaattagatggttggcagtgattcagttcaagaatggcgtagacaaatactggagatctaccaggattaacgctataccaaaggacgaaaaggcctctataagaggtcgcctttttgaaatgatcgatgaacaaaataatcaactttgtatccaaaatgctcaggctgcagcaaggattgccaggctagattttcctgtagattggccaaacctgtttgaagatctagagaacctactgaataatgatgccattaggaatgattcaatcaaagtgcacaatatattaatgcatataaaccaaattgttaaagtgttaggcacagcaagaatagggagatgcagaccagcaatgcaaagcaaaatccccttaatatttccactaattgtaagaatctacttacaatcattcgaagaatggacaacatcctcaaatcccaactatgaaaacctctccagtttacaggtttcttacctatctctgaaagtaataagaagaatgatctgcgagggatatgagcgcccacagatcgatcaatctgtgtgcgattttattaaactatccgtctcacattttgaaatgttaatttcaaaccatgaaaacttcagaaaatttgacatttacgaaaaatttattaaatgtctgggcaaattatattttaatttagttaccggatctccagcaaattttatattactcccatgctctactcaaattttgattagttatactaggttaatttttgataaggcccctaaagtatatagagaaaattctgatgttacaggagacttttgggaacaaactgcgatcagagggcttttaattttgaaaagagtcatcaatttcattcacaaaaagggtgcaattactttaaaagcaaggagtgataagttaactatagatgcttctatcaacaaaataaatacagagttcttgaatgacaatttgataaccaggctagttgacactttaatggaatggtatttgagattaagacccactgaattggaaagttggtttatggacccagaagagtggattaatgaacaaatggctacgagctatgaataccaaattaggccttgtgcagaaaatgttttccaagacttaataaataccttttctgaactgttagttccatatttattagaaaaaattgagaataatgcttccaaactttcaaattcattggacgatttcttgaaaaaagatgctatttacgcaagtttccaattgagtgcatctgccgtcagtgaaatggtagattttgacagattgttggtccaggttttcttgccagaaactacaaatgcaaatatatcaggtgacgaacttagaataatcagaaggagggttgccttgattattaatgaatggtctactgtgaagtgttcagaggagtctaaaaatttatgctacaagctgttcaccaatttcttaatgaatgaggatgacaaagttgttttgttaaccacagttcaaacattaagaactatgatcgatgattggaatttcaataaggacactttccagccatatttaaacgagaacgttcatttgctgttaagaaagatcttaccgtccgtgtcattaacagaaacaaggttgtatgttttaaacaccttgagtgacatcataattcaaacaaaaccattgatcagcagggatctgttggtcgaaatactgcaaataataccaaatctttgggaaatagcaacaaacaacgcaagcgaagctattttagcaaacgcattattaagattattgagacatttggtatcatctttgggaccacaatcgtacttaacgtgggatatcgctgtacctgtagttgcattatcgtgtgatccgtcttctatgcaatatcaattgttaagcgaagatgggtatgaactatggggcatgcttttacaaaacttttcatctcaagaacaagaactcgacgataaattcactgagctgataccatttttgaaatatggtgttgaaacacactcagaaatactaccaactttactggaaatcatcaaaagttatgcattaattttgaattctgaacaattcttcgcaaacatcacgttccaagatatttttaaacaaatgtctaaatatcttttaaaattaagagaagattcgtttcaattagtgctggaaatttgggaaattttgatactatcgaatgagtcagattacgagaacctcttattgcagaattttttcgagactggagtattgtcggctttatttgacgccatatttttggaggaagctccttcatcatatttgtgttcccaaataattcaagttgtcgccaggatctcctacgtaaatccagatgccttaatgaattttctaggtgcctatcatgaaaacttgccaagttctagtgaaaacgcacacttgccagaatccatgagaaaaattgtatccaaggaccaaccgtatgatcttgttgtgaacaagcttcttgctggatggattgtatgctttagggacatatttgaccccaaattcaaaaaagttcatattttaggcgtctcgagcttattaaggaccggcttggttcctattttaacagagttttcatcaattgcatctttatggatcgaaatgctggaagaaatcaacgagactaatcgtggagactgtgaaaaataccacttaaatgatattgtcacagaacagtcgcttgccttccatcctttaactaccgagcaactaaggtatcatgaactatgcaaaagcaatgatcccgtacacaacataagtataaaagattttatttcccaaacaatggaatatctggaatcacatctgggagtggaaaggtatcaagaattcttgaaaactatcaaccccagcttgttagaaaacctacagatgtttttatccatccaaccacaagagcatcattcatag

SEQ ID NO: 3355 - DNA, 669 bp, Saccharomyces pastorianus
atgcaaggtcaggaagattgggtagataaggataaaactttggtggaagaagaagaagaagaaggcgccaacgatgaatctcacaaaaagaagagcaatgatggtaatcgggtctgcaagaagagtgttaaggagctgaagaaacatctggacaagaaggaaattgcaatacagaatagagaatcgacgaagcaactcaccattttaagacaagaaaatacccatttacagcaggcctgtaagatcctcggcgaggacaagattaccaagaataaacaattcatagaaaaatggaggaccgtttgcgagatggagctttcattcatcctgaactccaccttaattaagattaacagaatgggcggttataaagattttctggaaaaagaaatggaagctaagaaaagaaggctggaataccagatagataacggaatggaagaccagctctatgaagtaagggatagcgaagactttaagcagctttctgaagttgagcaagagcaatgggagagtcaaatgaatgaacaactaaaagaagtggaaaagagtaaagaggtggagttggaaaaactaaacaagatgttactcgatagtgaggggaaggaattcgatatggcagaactatgtaatagattaaagcttgattataaactaatctttccctaa

SEQ ID NO: 3356 - DNA, 1491 bp, Saccharomyces pastorianus
atgaaagtattacagttcaatcaagacgcgacatgctgtgtggttgctgcgtcatctcatcaaatttcgatttataactgtgacccctttggtaagtgttttgaaattgatactaagaattcaaagagcaaaaatgggaatagtagtgacataattacaaattcggaatcacgaaataatgaagatagcatattgataagtaatggttctcgtgacaatggcgatgcggaggaagaggaggaagataacgacgacaatgcccttgtctcaggaaatatactaaaagaaggagagtttgtcattgaaatgctattttcaactagccttatcgccatagcagacagaggacaaggtttgaacaagggtaaaaagctaaaaattgtcaacaccaaacggaaatcgactatctgtgaaattgtcttcccacatgaaattatcgacgtagtaatgaataggaaacgaatgtgtgtgcttctggagagtgatcagattttcatctacgatatatcctgcatgaaaccactggaaactatcgacctttgggaagatcattataagaggtctcaagccgcttcatgcataaatacttcgaatacgggcgcttttgatggagattctgcgaatttgaacagaactgctagtaatctactatcaaacgccacgcagaagaacgcaagtagttccaatgggagtgtgagaagcaggagaaactccttgagaagtcgaataaggccaagaatggtactaagtaacgatgataggagcatactgtgctttactgcatatagctcacccaaaaataataagcccaactcagaggtattgcatgatgtggtgatatatgatactttgaacgtgacaccacttaactacttgaatactgtacataagggaaatgttgcatgtctagctgtgagtcatgatggtagactacttgccaccgcctcagataaaggaaccatcataagagtgtttcataccggggtcgattcagattatgcatcttccaggtcgttgtttaaagaatttaggcgtggcaccaggctatgcaatttgtatcagctggttttcgataagagcatgactatgattgggtgtgtaggcgatacagacactattcatcttttcaagcttgatgaagttgctagccttcccggagatgctattggcagtggtcagtggaatgaagaagaagagatattagcagcaaattctaatcctagtgtgggaagtcctaaagaaacatccataccgaaaccaagacttgcaaactatttctctaaaaagataaaatcttcaattcccaaccaaaatctgagccgtaatttcgcacacatatcagtcaatgaatcgaataggaattgcttggggtttccagacgaatttcctaatcaagtttatgtcgcctcggatgatggaacattcagtatatatagcattccatcaagacctggtgaatgtgtgttaaccaaaaataacaaatttatgtaa

SEQ ID NO: 3357 - DNA, 1482 bp, Saccharomyces pastorianus
atgctggaaatacgaaattgtagtcatttggtaaatagtgggaagaggattgtacctttagtgactcaccatagaataaatacgaaagtatggcataagacccgactttattcgtgcacgactagttcttcagaaacgcaagaaacacccaattctcgaagtaataatgttttggacgaactcaaacaaagaggtttagtatgtcaggtctcacaaccagaaaacgacctacggatgaggttaaattgcaatgaaaagatcaaactttattgtggagtggatcccactgctcagtcattgcacttgggtaatctagttcctttgatggttttgttacacttttacgtcaaaggacacgacgttgtgacggttataggcggagctactgggaaagttggagatcctagtgggaggaaaaccgaaagagacgttatggagaatgatatcagacaaaacaacatccaatcgatatcggaacaactacagagatttttccaaaatggattaaagtactacaccgatcgacacgacagaagagggatcaagccttatgggaaatacacgccaagaaataattataactggtggaaagatatcaaaatgttggattttttggctgattttggtaaacacatcagggtgcaatcaatgctagcgagagattcagtctcttcgagactagaaagtcaaaatagtcttggttttaatgaatttacttatcaaatcttacaagcttacgatttttatcatttgtataaggaagagaacgtcagtgtacaagttggtggcaatgaccaatggggaaatataacagcagggattgaccttatcaatcggttacagcctacacagaaaaagggcgtgccatttggtgttacagtgcccttattgacaacggcaacaggtgagaaattcgggaagagtgcaggtaacgctgttttcattgacccttcaataaacacagcatatgacgtttaccagttttttttcaatactttggacgctgatgtgtccaagttcttgaaaatcttcactttctcaagttcaaatgaaatcgattctgttatggaaatgcatatcaaatcacctaatctacgtcatggccaaacgctattagccaaagaagttactgatatgttatatggagttggatccggtacagactcagagacgctttctaacgttatttttgggcattatgacggcactttatctgctgccagattgaaagacctgtgttacaaggccaagatcctacaacatgcagataagaaggacaacttagtcaagttaatcgctaaactaggggactgttcaatttctgaagccaaaaggaaactttctcaaggaagcatctatttacatcattcaagaatcaaagtcaaagaggacgttgccgagtggggtccttatttaatagacgatcaagtattgattttgaggataggaaagcaaaaatgctttataatagaaatgcattga

SEQ ID NO: 3358 - DNA, 1377 bp, Saccharomyces pastorianus; identical to SEQ ID NO: 1

SEQ ID NO: 3359 - DNA, 1029 bp, Saccharomyces pastorianus
atgggtttggttaagcaagtaagactgggcgactcgggtctaaagatatcgcccattttgattggatgtatgtcgtacggttctaagaaatgggcggattgggtcattgaagataaagcccagattttcaagatcttgaagcactgttacgataatggtctgcgcacttttgacacggcggatttttattccaatggtttgagcgaaaggattataaaggagtttctggaacattatagcatcaaaagagaaacggtggtcattatgaccaagatttatctccccattgatgaaacactggatttgcatcacagatttacaatcggtgagtttgaagagttggagctctccaatcagagaggactgtctagaaaacacataatcgctggtgtgaagaactctgtggaaagactgggcacgtacatagatcttttgcaaatccatagattagaccatgaaacaccaatgaaggaaatcatgagggcgctaaatgacgttgtcgaagcaggcgatgtcaggtacatcggagcctcgagcatgctcgcaaccgaatttgcagaactgcaatttattgcagacaaatatggctggtttcagttcatctcttcgcaatcttactacaatctgctcaaccgtgaggacgagcgcgagttgatcccgtttgctaagagacacaacatcggtttaatcccatggtcgcctaacgcaaggggtatcctaacaagacccgtggacaaacacacagacagacacgtgagtgaccctaccatcaaagcgttgaaattggacgctctcgaagacgaccagaaggaaatcatcaaccgtgtggagaagatctctaagaacaagaatgtctccatggcaatgatctccatagcctgggtgctgcacaagggctgctaccccattgtcggcttgaactccacatcaagggtggatgaagcgattgccgcgctacaggtcacactaacagaggaagaggtcaaataccttgaagagccctacagacctaagaggcaagtaagctag

SEQ ID NO: 3360 - DNA, 846 bp, Saccharomyces pastorianus
atgagtaagatgtctccttggaaacgtttattatggctaaaacaagagtatccggataactatacagatccgagctttattgagctaagaataagacaaaataacgaaagcggtaagaagtccaataggaaattatctgaagccgcaagctctcaaattagattggactttataagtttttaccaaaccgttttaaacacatccttcatttacattacttttacttacatttattactacggttacaatcctatcccgccaactattatcctttctttcctaacattggttatctcaaggaagaaagttgaccctttattatcctcattcatcgacatcaaatcttcattaatcatcacgttcgcaatgttgacgctctccccagtcctcaaatcgctttctaagaccactgcatctgattctatatggacgttgtcgttttggctatccgtatggtacgttttcgttatttcttcaacaagttctaaacacaaaccctctaatctctctactaatatacttgttgccctagttgcggttttatcatcaagactatcaaccacgattgacgtattttgttttcttttaatttgtattcaattgaatatcattttacccagttatctatcagtgacaagtaaggcggtaccaataatttcaaatatcattgtttactccttccttaacgttactctcggttggatctatatgctgttggttttttttgcttctgtattttatattatagttttacctaggtggttcatttactggaaaatcaattatcataaaaaagataacgatttactcagtacatgggatgcaagagctccgattttggattag

SEQ ID NO: 3361 - DNA, 471 bp, Saccharomyces pastorianus
atgagttcccggtttgcaagaagtgatgtcaactcgaatcatattaggaaaagaaaccattctccagatccgataggaattgataattacaaaagaaaaagactgattatagacttagaaaatttatctctagatgagacaggccccaaaaacgcacgcacagacgatagtaaccttgttcataacagcatagcattctctgatgccatccacgacaaggctctgaaagacatcatcaaatcctcaacaggcaataatcatcacagtgggtcgatatatgacaagatttgggaacgcctaagagaggagagactacaagttataaaatgggctgactacaaggaagttgcttattcgaattggtggaggtggtttcataatcagtttgccccaaagcccacctatgatggagaggctgacaccgatgttgatatgttggtcatagatactgacgtggatatggatgagtaa

SEQ ID NO: 3362 - DNA, 4542 bp, Saccharomyces pastorianus
atgtcttctactgacgaacatcccgagaaagacatttcttcgaattcgaatcatggcgatgatcattcatacgctaattccgtacaatcgtacgccgccttagatgaccaagctgataatgaggatatgacggctacttcacaactatcgcgtcacataacgaatatcttatctaacgaggatggtatagaaagattggaatccatggcaagagtcatttctcgtaagaccaagaaggaaatggactccttcgaagtcaacgacttagatttcgatttgcgctcgctactaaactatttgagatctcgtcaactagaacaaggtatcgaacctggtgactccggtgtagccttcaaaaacctaacagctgttggtgtagatgcttctgctgcgtatggacccagtgttgcagagatgcttagaaacatcgccactatacccgcacatcttataagtaaatttaccaagaagtccgatgttccattgagaaacattattcagaactgtaccggtgtcgtcgaatcaggtgagatgctgtttgttgttggtagaccaggtgccggttgttctactttcctaaaatgtttatctggtgagacctcggaattagtcgatgtccagggtgagttctcttatgacggtctggatcaaagcgaaatgatgtctaagtataaaggctacgttatttactgtcccgaattagacttccatttcccaaagattaccgttaaggaaactatcgatttcgcgctaaaatgtaagactccccgtgtcagagttgataaaatgactagaagacagtacgttgataatattagagacctgtggtgtaccgttttcggtttgagacacacatatgcaactaaagttggtaatgatttcgtaagaggtgtctctggtggtgaacgtaagcgtgtttccctagtggaagctcaagcaatgaacgcatccatttactcttgggataatgccacaagaggtttagatgcttccactgctttagaatttgctcaagctatcagaactgctaccaacatggttaataactctgccattgttgccatttaccaagctggtgaaaacatttatgagttattcgataaaaccaccgttctatataacggtaaacaaatctatttcggtcctgctgataaagccgttgcatatttcagtaatatgggttgggtgaagccaaacagaatgacatccgcagaatttttgacttcagtgactgtcgattacgaaaacagaactttggatattaaacctggttgtgaagataaagttccaaaatctagttctgaattcgaacaatactggttaaactcggaagactatcaagaactgttaaggtcttatgaagattaccaagatagacatcctgccgaagaaacaagagacagattagatgttgccaagaagcaaagattgcaacaaggccaaagagaaaactcgcaatacgtcgtcaactactggacccaagtctactactgcatgattcgtgggttccaaagagtcaaaggtgattccacttataccaaggtttacttgagttcttttttgattaaagctttgattatcggttctatgttccatagaattgatgacaaaagccaatcgaccaccgccggtgcttattctcgtggtggtatgttattctatgtcctactgtttgcttctgttacttccttggctgaaattggtaattctttctccagtagaccagtcatcgtcaaacataaatcgtattccatgtatcacttgtcagctgaatcattacaggaaattattactgaatttcctaccaaattggttgccattttgatgttgtgtttgatcacttactggatcccattcatgaaatatgaagccggtgctttcttccaatacattttgtatttgttgaccgtgcaacaatgtacctcttttattttcaagtttgttgctaccatgagtaaatctggtgtcgatgcacatgccgttggtggtctatgggtcttgatgctttgtgtttatgctggttttgtcttaccaattggtgaaatgcatcactggattagatggattcattttatcaatcctttgacttacgcctttgaaagtttggtctccactgagttccatcatagagagatgttgtgtagtgccttggttccgtcgggccctggttacgaaggcatttctattgctaatcaagtgtgcaatgccgctggtgcaatcaagggcaatttgtacgttagcggtgactcttatatcttgcaccaataccatttcgcatacaagcacgcatggaggaattggggtgtgaatattgtgtggaccttcggctatattgtattcaacgttatcctatcagaatatttgaaacccattgaaggcggtggtgatttgttgttatataagagaggtcacatgccacaattgggtactgaaaatgcagatgctagaactgcttctagggaagaaatgatggaagctttgaacggtccaaacgtcgacttggataaagtcatcgcggaaaaggacgttttcacctggaatcatttggactatactattccatacgatggtgctacaagacagttattgtcagatgtttttggttatgttaaaccaggtaagatgacagccttaatgggtgagtctggtgctggtaaaactacgctgctgaatgttttggctcaaagaatcaatatgggtgttattactggtgatatgtttgtcaatgccaaaccattgcctgcctcattcaatagatcatgcggttacgtcgcacaagccgataaccatatggctgaactgtccgttagagaatccttgaggtttgctgccgaactaagacagcaaagatctgtttcattagaggaaaaatacgaatatgttgaaaaaatcattcttttgctaggtatgcaaaattacgctgaagctttagttggtaaaactggtaggggtttgaatgttgaacagagaaagaagctgtctatcggtgttgaattggttgctaaaccttcattgctgttattcttggatgaacctacttctggtttggactcccaatctgcttggtctattgttcaatttatgagggctttggccgattctggtcaatctattttgtgtactattcatcaaccgtccgccactttgtttgaacaatttgacagattattactgttgaagaagggtggtaaaatggtttacttcggtgatattggtccaaattccgaaacattgctaaagtattttgaacgtcaatccggtatgaaatgtggtgtctctgagaaccctgctgaatatattttgaattgtattggtgctggtgccactgctagtgttaacgctgattggcatgatctatggcttgcctctcccgaatgtgccgcagcaagagccgaagttgaagagttacatcgtgtgttacctggtagacctgtcaatgatgatcctgaattggctacaagatttgctgctaaatacaccactcaaattaagtgcgttttacggagaacttttctgcaattttggagatcacctgtatatattagagccaagttcttcgaatgtgtcgcttgtgctttattcgtcggtttgtcatatgttggtgttaatcattctattggtggtgccactgaagctttctcctctgtcttcatgctgttattgatttctttggctatgatcaatcaacttcatgtcttcgcttttgatagtagagaactatacgaagtcagggaagccgcttctaatactttccactggagtgcgctgttgttatgtcatgctgctgttgaaaacttctggtctaccctctgccaatttttgtgtttcatttgttactactggccagctcaatttagcggtcgcgcatctcatgcaggtttctttttcttcttttatgttttagttttcccattgtattttgtcacgtacggtttgtggattttgtacatgtctcctgatgtgccatctgcttctatgatcaattctaacttatttgctgctatgttattgttctgtggtattttacagccaagacaaaagatgcctgccttctggagaagattgatgtacaacgtatcgccattcacttatgtcgttcaagcattggtcactcccctagttcataataagaaggttgtttgcaatcctcatgaatacaacatcatggatccaccaagcggtcaaacatgtggtgagtttttatctacttatatgaacaacaatacaggctatctggtaaacccatctgctactgaaagctgtgaatattgtccatactctgttcaagatcaggtcgtggagcaatttaatgtcaagtgggatcacagatggagaaactttggttttatgtgggcttacatttgtttcaatgttgctgctatgttattctgctattatattgcaagagttaaggtttggtccttgaagtctgttttgaatttcaagaattggttcaatgggccaagaaaggaaaggcatgaagatgataccaatattttccaaaaggtaccaggtgacgaaagtaaaatcacaaaaaattag

SEQ ID NO: 3363 - DNA, 1341 bp, Saccharomyces pastorianus
atgcatatcctcctgagcaaaaaaatagcacgttttctattgatatcggtcgttttcgtgtttgcactaatggtgactttgaatcacccgaaaacaaagcagatgtctgaacagtatttgacgccatatcttccgccatcgctgtaccctatcgcaaaggttagtgtggaggaacaaagacgtatgcagcaggaagaagaagaagccgaaattaagcaatctctagaggaagcagctattagaaatgccactaacagtgccattaaggaaaaaatcaaatcatatggaggtaatgaaacaacgctagggtacatggttccatcatatatcaaccacagagggtcgccaccaaaagcttgttttgtctcattaatcacagaacaggattccatgacccaaattctactgtccattgatgaagtgcaaggcaagttcaataaggattttgcgtacccgtgggttttcattagtcagggaaagattgacgatacgaagaaggaaatgatttaccaggccatgaccgattccatgaatggtaattctgaagtgatcgacattaaatttgcagaaattcctgaggacgaatggacgtaccctgactggattgatcagaataaagcggcagactcactaattgcactagtaaacatcccagatggtgactctagagccgttagatataaagcaagatatttagccgggtttttctggagacatcccattttggacgagtttgattggtattggagagtggatcctggtatcaagttgtattgtgatatcgggtatgacttattcagatggatgcaggattctgggaaagtattcgggttcacattgagcaggagtgaggctaaggaagccaacgacaagatctgggatactacaaagaaatttggtaaagatttccccaagtttatatcagaaaataatttcaaagccttcattaccgaaaagggctctgacaatttcaacaattgtgaatttacgtcaaattttgaaattggaaatttgaacttttatagatcacctgcgtataaaaaatttttcgaatatattgacaaagaaggtggtatattttactggaaatggacggaatctattattcatacaattgggttatcgatgttgttgccaaaggataagattcatttcttcgagaatatcggatttcattatggaaagtatgacaattgccccatgaacgatgacatttgggagcaatataaatgtaattgtgatcaaggtaatgattttacctttaaaaaggagtcgtgtggtggacactactttgatattttgaagagggataaacctgaaggatgggatcatgtatcatag

SEQ ID NO: 3364 - DNA, 2574 bp, Saccharomyces pastorianus
atggaccaaaaggaacattcaaagaccttctaccatccttataagccatatgatattcaaatacagttgatggaaactgtatacagggtacttaccgaagggaagaaaatagctatcttggaaagtcccacaggaacaggtaagaccctgtcattaatttgcgccacgatgacttggctgagaatgaataaagcagatattattacccacatggaagctaactctaaaaataaagagaatggaagtgagagtgagagtgatgatgaaccagactgggtcaatgacacgtatagggaatcgctcctgcaagaaaagctgacttcgttaaatgagtacgaaaagcatttgaatgaagttagcgcaactagtcgtaagcaacctaaaacagcgcatgacctaaataaagaaaacagaagatacggtataacaaactcatttaaaaaaagacggagaagtactcagcatgttaatgtatcgcttgaagaacaagatttcatcccacagccttatgagtctgattctgaaacggatgaagttagctcaaagaagggagatctgtctgataaacatcatagattaagtgatttgaattcagaaataaaaacgcttctaaataaaatcgacagcaagactataaaggatctaaacaactacgatcaccttggagtcgtaaaccaaaatccagtgaagatatattttgcgtccaggacttattctcaattgaatcaatttacttcccagctgagattgccctcatttccatcatcgtttatagataaagttcctgatgaaaaggtaaaatatttgccacttgcttcaaaaaagcaactttgcattaatccaaaagtgaaaaaatggaaaacgctggaggctattaatgacgcctgtgcagatcttagacacagcaaagaggggtgtactttttatcagaatacgaatgaatggcgtcacggtcccgatacattggctctcagggatagaatattttccaaaattcaagacattgaagacttagttccactgggagagtctctagaaatatgtccatattacgcatccagagaagctcttcctattgcagaagtcgtaactttgccatatcaatatctactttccgaatctacgcgttcgagtcttcaaataaatcttcaagacgctatagtggttattgatgaagctcacaatttgatagaaacgataaattccatatattcttcagaagtctcattagttgatttgaaaaactgtcataagggaatagtaatatattttaacaagttcaaaactaggctcaaccccggtaaccgggtgaacctattgaaactaaattcgcttttaatgacgctaattcagtttataactaaaaattttaaaaaggtagggcaggaaatagacccaaatcatatgttcgcgggaagtaatattgatacgctcaatattcataagctattaagatatataagagtatccaagattgcttacaaaattgatacgtacatccaggctctaaaagacgcagaagtgctaaaaagtgaaagattaacaaaagaggcggataagccggtatcttctcaaccactgcttttcaaggtctctcagtttttatcttgtttgacaaatttgacgtcggaaggccagtttttctttgagaagagttacacgataaaatacatgcttttagagccaagtaaatcttttgaatcgatagtagatcaagctaaatgtgtgctcctggcaggagggacaatggagcctgtcactgactttttgaccaacttgtttcccgaaatccctacagaaaaaattacaaccttttcatgcaaccatgtcataccgaaagaaaacttgcaaacttacattacaaatcaaccagagcttgaatttacatttgaaaaaagaatgtctattcctcttataaacgatcatttatttcaatttcttattgacttaagtagagcagttccccaaaagggtggtatagtggcatttttttcaagttaccagtatttggcacatgtcatagaatgctggaaacaaaacgacaggttcgcgaagttaaatagggtgaggcaagttttttacgagtcaaaggatagcgacgatatactagctgggtattctgactcagtagcggagggcagaggatctattttatttgctattgttggtgggaagctttctgaaggaataaactttcaagataatttatgcagagctgtggtgatggttggcttgccgttcccaaatatctttagtggggaattaatagttaaaagaaagcacttgacggagaaaataatgaaatcaggcgggacaaaggaggaagcttcgcatgcggcgagagagtttatggaaaatatctgtatgaaagctgttaatcagagcgttggccgtgctatacggcacgcaaatgactatgcaaatatctatctacttgacgtacgatatggtaggtccaactttcgggacaaactgtcacattgggtccgggattcgatcaaatccgaacacttaactcgccaagttatcccatccacaaaggcattttttgcagctcacggcacgaatttatag

SEQ ID NO: 3365 - DNA, 1557 bp, Saccharomyces pastorianus
atgtttctagctaaaaacctaaaaaataaaagaattgcggtatatttgccaaaagagatatcttttgtccaaagacatttttttaatacagcaagttcacaaactaatgaaaggccgaaggcagacatagttttgagggatatcgcaacgtatgttcatgaaactcctataacgtcaactttggctttgaatactgctaaattatgtttccttgacacccttggttgtggcttagcggctttaaagtttgagcaagctcgaaacattatcaaaccaattgtagaagatacgatcgttcccaatggaaccaaaatattagggacatcctatgtgatggaccctgtaaggggagcatttgccatcggtactttgatacgctggttggattacaatgactgttggttagctgctgaatggggacatccatctgataaccttggaggaattttagctgttgcggattacttgaccagattaaatagatctactcatggaaaaaacgggaaagaatttcttgtgaaagacgtattggaagcaatggttaaagctcatgaaattcaaggtataatagcacttgaaaattctttcaacaaagtaggtttggaccatgtagtgttggtaaaagtagcaacaactgctgttgtttccaaaatgctgggtttgagccaggagcaaactactgaagcactatcacaagcatttgtagatgggcagtcattgcgcacttatcgacacgcaccgaataccggatctaggaaatcatgggcggccggtgatgcggtctcaagggccgtgaatttggcttatttagtcaagaacgctagtgttggtactataccttctattttgacagccaaaacttggggattctatgacgttttattcaagggcaaacctttcacctttcatcaaagatcagcatatggttcttacgttatggaaaatgtcctatttaagatatcgtttccagcagaatttcatgcacaaactgctgttgaggctgctgtgaaagcgtataacatccttagcgaacaagggaaaacattcagagatattaaatctatcagaattagaactcaggaggcggcaatgaggattatagataaatcaggcccgttatataattatgcggacagagatcattgtattcaatacatgactgcaattccgttaataaccggcaatctcacagctaccgattattcaaacgaggttgcaaagaatcctgagattgataacttgaggtcgaaaatgtattgcgttgaggatatccaattttcccaaggttatcaagatcctactaaaagatcaataggcaatgcgctactcatagaactaaatgacgggtctcagttagaagaaattgttgtagagtaccctgttggccataaatttagaagagaggaaggaataccactattactcaataaatttgaaagacatttgcgtgaacattttaccgcttctcctgaaaaggttgacattatcatgaaggtaagttcaaaaatagattttgtggacatgccaatcgactcctatatgaatttgttcgtttaa

SEQ ID NO: 3366 - DNA, 1029 bp, Saccharomyces pastorianus
atgtttagatcactgattaccggtttgccaaaagttagtaagaggcatctctttcagagaaattacgcatctactttagctttcattgaaagttcgaaagatggttcagtctcaagatcctcattaagtcttttggctgcagcacagaagctatctaatcctattacagccgtgatcacgggtagccaagctgggaagaccgctcaagcgttgaagtcttccttttcctgcaacagtttggaaaagctcatcatatttgaggattctaagttagacacctgtctacccgaagaattaactccgttgttagtgaagttgttaaaaggcaatgactactcgcatttcgttgtctcaaactcctcggtcgggaaaaatgtgttgcctcgtgtgggtgcactattggatattcaacccgtttgtgatgtcactgtaattaaagctcctaagacttttgttaggccaatttatgccggaaacattatttcaacaatagagtgtccggcagagaagaaaatattgagcattagaacctcttcatttgcaccaattccagagggaagtacggactctgttgcgatcgagaaaggaactgatatccccccttgtgatttggacgtcacctgggttaaaaccatcgttactaagagcgaaaggcctgaacttacttctgcgttgaatgtggtaactggtggaagagcgctcaaggataaggacacatttgataaattactctccccattagctgacgttttgcatgctgctataggtgctacaagagcttccgttgataacgggttatgcgataattctctacaaatcggccagaccggtaaggtgattgcaccaaatttgtatatagccgttggtgtctccggcgctgtccaacatttagcggggatgaaggactcaaaagttatagtcgccatcaacaatgatcctgacgctcctatctttaacgtggctgactatgggttacaaggagatctttacaagattgttcctgaactgactgaaaagcttcgtaactaa

SEQ ID NO: 3367 - DNA, 861 bp, Saccharomyces pastorianus
atgaaggagatgtatttgaaagcgttgggattgcacgattacacccttaaaaatctaatgtacgaaaataacttctgcaagttttacgatgctgtcgatgaaaatgacacttcgtatgttttgaagtttattccctcgaatacgcaatcagatgaggatccttttccattcatagactgctttcaggttgaggagggcatgttttttgtatatgcttcaaacaactttgcaaaagaaggcccagattactttacgtatggtagtagtagtagtagtagtagtagtgaggagaatatcagtattccaagtacacagagtaaattgcaatttatcgaaataaggcatccaaaacaccaaaaactagacgtaaaagaacagagaaagaaagacgcaactactgaccatttgggtaaaaagacgccaaacccggacgctcgaagcattaaagaacagaagagagaggtacacactaaaaaagtgaaaatcgaaagtaataagactgattcggcaaagatacgaagtgaattcatttgtcctattaaaacaaactatgcgctaggattgccatctatactgtcaaaagaaaatatcacgtacccgagtaaggtacatgaaaaacatattagtatcgtgaatccttccctacaaatatatcactcctcccataaacagatcgtcaaaacgcctgtccctaagagtggccgttctccggtagaaaagttttcttttaacgatttcaaatgctattctccaagacctctaaagcataaaagttctgagtgtgatgttaagaataatattgagctgagattactgcaaagttcaatgttgcagaggagacagttagcacactcgaaatag

SEQ ID NO: 3368 - DNA, 2706 bp, Saccharomyces pastorianus
atggagcaaattaattcgaatagtgggaaaaaaaagcagcaattggaagtattcaaacaatttgcgagtgtgttaacaaaagagggcacacctgttagtattgctaatgataagtctgaacgaaccacagtgaactacaataactttgaaatagcaagtaggaaacccaggatggacaaagttacaggagaaccaattctaacatatgatgatttcattgaattgatatctagctcaaagagtatatacccgaagttcacagaccattcatttaatttgaatcaagtacctaaaaacgcgtttggatgtattttctttgctattgacgaacaaaataaaggatatttgacacttaacgattggttttacttcaacaatttattagaatacgataattatcatcttatcattctctatgaattctttagaaaatttgatgtagagaacatcaaagcaaaacagaagagaaagtttggtaattcctctttcagtttaaaggcggcagatgacaggatcaagtcaatcaattatggaaatagattcttaagtttcgatgagcttcttttaaatcttgaccagttcaaagataccattcgactgctgcatgagtcgattgacgatgattttgttaaggaaaataatttgctactcgactgggaaaacttccgatttttgaagttctataaatgttatcatgaaaatgaagcattcttaagtttaaattccctagtgacgattttacagaacgatctgaaaaacgaaaaaatatttataggatttgatagattagcacaaatggactcccaaggacatcgtttagctttaagcaaaaatcagctcatatatcttttgagattgttttattctcatagagtttctgcggatattttctcctctttgaatttgtcaaatacgaaattattaaaagcagataataattccataccatacaatgtgttcaaggatgtgttttatttatttcaaaatttcgatttactgaatcaaatattgcacaaatatgttactgaaaacaatttaaccgagcaagatattagagaacagataattacgaaaagggactttatgacagttttgaatgcccagtatagcaaggtaaacaacatcgttgagttttccccatcccagatcaacttgttattttctatcgttgcaaattcaaaggaaaacagaagattaaggaagaaaagtaagcgagacaacgagcttcttaacgaccatcattacgattcagatattgattttttcattcacaacgaatatttacatggagtaagcaaatcaagaaaaaacttgcaaagttttaatgactactaccacgatctgtcagatggcttttcccaggactctggggtcaaaaaagcttctaaagcaagtactggtctatttgaatcggtattcggaggaaaaagggataaagcaactatgcgctctgatttaacgattgaagatttcatgaaaattttgaatccaaattacttgaacgacttagttcaccaaatggaattgcgaaaaaatcaaaacgaatcactttatgttaactattatttttatccaattttcgattcgttatacaatttttctttgggctccattgcaggctgcatcggggcaactatagtatatccaatagacttcgtaaaaacaagaatgcaagctcaaagatcattatcccaatacaaaaactcaattgactgtcttttaaagactgtatctcgtgaaggaataaaaggcctttactctggtcttggacctcaattgattggggtggctcctgaaaaagcgattaagttgaccgtcaatgactttttgagaaacaggttgaccgataaaaacggtagattaagtcttctacctgaaattatatcaggtgcttcggcaggcgcatgccaagttatattcacgaatcctttagaaatcgtaaagattcggttacaggttcaatctgattatgtgggtgaaaacatacagcaggctaatgaaacagcggttcaaattgttagaaaattgggtttgaaaggcttgtatagtggtgtggcagcttgcttgatgagagatgtcccattttctgctatttattttcctacttatgcacatttaaaaaaagatcttttcgattttgatccaaatgataagacaaagagaaatagattaaaaacgtgggaacttttaactgctggtgccattgctggtatgcccgcagcctttttgactacgccctttgatgtcataaaaactagattacaaatagatccacgaaaaggtgagacgagatacaacggtattctccacgctattcgtatcatcctgaaggaagaaagtttcaaaagtttttttaaaggcggaggagctcgtgtcttgagaagttctcctcaatttgggttcacattggccgcttatgaactgttcaagggctttattccttcccctgatgataaaatgaagtccagagggaataacaagaaattcattataggcgacaatacagagaataaaaaaataacagccaataatgataatgagctcccactgcagaagctctattcccgtgacaggaagcatgccaactattactataaaagctgtcaaattgccaaaacatttattgacctagacaataacttttctagatttgacccttcagtttacaagaagtttcaagagtatttaagagatattagtaaatag

SEQ ID NO: 3369 - DNA, 1173 bp, Saccharomyces pastorianus
atgactgatgttcaggtaattgaagaaaatgctgccaacgctgttactgcggaagtagtagaaaaagacaaagaagccccagctaaaccgcctgcggagaacaataagccaccgaattataaaagaatatcagatgatgatctctatagacactcgtcgcagtacaggatgtggtcgtatactaaggagcagcttgaggagaagagggtggacacaaattctcgagcggtagcctctattgaggaagatttattaaaattcagagaagctcacaatctaatagaagaagaggtaaaaattctagaagcaaaggctattcccctgacaatggaagaggagttgagtttggtgaatttctacgcgaagaaagttcaagtaatagcccagcatttaaatttgcccactgaagtggtggccacctcgatatcattttttaggcggtttttcttagaaaactcggttatgcacattgatcctaaaagtattgtccacactacaattttcttagcttgtaaatcggagaactatttcattagtgtagattcctttgctcaaaaggccaaatcaacaagagaaagtatcattaaatatgagttcaaattactagagtcgttaaagttttcattgttaaaccatcatccttacaaaccgctgcatggcttttttctagatattcaaaacgtcctttacggtaaggtggacttaaattatatgggccaaatttatgatagatgtaagaaaaggataactggcgcattgttaaccgacgcagtgtatttatatacccctccccaaataacattagcaacactgctaatagaggatgaagccttggtgacgaggtacctcgaaatgaaatttcctagtgacgaaaaaatccaggaagaagaaccaaccgaaaataaagaggctcaaaacgacggcagcaaggtagagaaagatgaggaccaaggcattgaagatgataagacttcaatagattcggcaaaactgctagcggtcataatggcgtgcaaggaacttatcgaggaaacagcgcctttgagtactgaagacgccaagagaatcgcagcaaagaattattactgccaaaatccatcaagcctaattcagaaactaaagagaaagatgaacgaagacacttccgctcctgaaaaaaggcaaaaaatataa

SEQ ID NO: 3370 - DNA, 3642 bp, Saccharomyces pastorianus
atgatgaaaagaataagatttccttggtccgatgaggaggcttcctattccaatctcaacaattctcctagcttgagaaataaaaagagtggtaataattacatccgctccaaatattattacacttttacgagatttgacttaatcaattcaatcttactatcggtgatgctatttttgttagctatcctcattactgcattatatttcacaaggaactctaggcagtcgatttcgcatgcttcgagagccattctgtttaatcctctaggagttatatcacagtcacttggaaatcatacattgaactatgacccagaagccagagagtcctccaaaaagctgtacgaacttctttccgatttcaatacggcatactatgatgacgataacatgattttaggtaccaacctgttttcgcagaatacatattcgagacagccgtatgttgctaacggttatataggtagccgtattcccaatattgggtttgggtacgcattagacactctaaacttttatacagatgctccaggcgctttggataacggttggcccttgagaaatcacaggtatgctggtgcgtttgtatcagacttttactgtctagaagcaaaattaaactccacaaacttccccgaattggatgacgtgggatactcctccgtcatttcctctattcctcaatggaccaatctacagttctccttagtgaatacttctcaatggttcaacccgcaaaatgttacattggatgacgtaactaactatagtcaaaatttgtcaatgaaggatggtattgtaaccacagagctagactggttagatagccaaatacacgtcaaaagcgaaatttgggcacatagaaatatccatccgttaggagtggtttctttggaagtttctttaaatatggaccacttacctgctgattttgattcattagagatcaatatatgggacatactcgatttcgactcatcccacaggacagttctacaggagttgggaacagatgaaaagaacaacgctgttttcatggttgttcagccagacaatgtgccatcctctaattgtgccatttattctgcgtgtactgtgaagtttgaaaattctacagagtcaatcaatgctggtcaatcatttgaagataacgacagccatacatcatcaaatgtctatcatgttatattaacagagggtcaacccaaaataatcgttcataaatatgtcggtataatgtctagtgaattcaacaggaacaaagagcagcaaaacgatactaacgttgaccttgctaaaatgatagcactcaacagcaaaggcaattaccaacagcttctgtcaagtcacaagcgtgcgtggtatgacctttataatgatgcatttattgagattccttctgacagtcttctggaaatgactgcgaggtcttccctgttccacctgctagcaaacacaaggaactacaatgtttcaagcgatagaggactgccagtgggggtgtctggcttatcttcagattcttatggtggtatggtgttttgggatgcagatatatggatgcaaccagccctattgcccttttttcccaatgtcgctcaaaatatgaacaattacagaaattccactcatgcccaggcaattttgaacgcagagcaatatggttatccaggagctatatatccttggacatctggaaaatttgctaattgtacttcgacggggccctgcgttgattacgaatatcatatcaatgtcgatgttgcaatggcttccttttcgatatatctgaatggccatgagggaattgacgacgagtatttgagatatactacgtggccaattatcaagaatgcagctcaatttttcactgcctacgtcaaatacaattcttctttggggatgtatgaaacatacaacttaacagaccctgatgagtttgcaaatcacgtaaataatggtgcgttcactaacgctggaattaaaacgcttttgaagtgggcaacagacgttggcaaccatcttggcgaggtcattgatcccaaatggagcgaaatttctaaagatatatacatcccaagatcttcgtctaatattactttagaatactctggaatgaatagttcagtggagattaaacaggcagatgtgaccttaatggtttatccactcgggtatatcaatgatgaatcgatcctgaacaatgcaatcaaagatctttattactactcggaaaggcaatctgcatccggacccgcaatgacgtatcctgtttttgctgctgctgctgccagtctactgaatcatggctcttcctctcagagctatttgtacaagtcggtccttccatatttaagggctccgtttgctcaatttagtgagcaatccgacgacaacttcttaaccaatgggttaactcagccagctttcccctttttgacagccaatggtggattcctacaaagcatcttgtttgggctaacaggtatcagatactcttatgaagtggatcctgacactaagaaaattaaccgtttgttaaggttcaatcccatagagttacccttgctgcctggaggtattgctattagaaattttaagtacatgaatcaagtccttgatattataattgatgatcataatggcacaattgttcataaatcaggggatgttccgatacatataaagatacctaacagatctttaatacacgaccaggacattaacttttataatggttctgaaagtacaaaaaaggcaaagttagagcgtcgagggctcgaccgtgttggtgaaccaatgcggatggatcgctatggtacctattatattttaaacccaaatcaagagctcacggttcagttatttaaacctggtttaaatgcagaaaataacatagcagaaaataaacaagtaacaaatttaacagcaggcgttcctggtgacgttgcattttctgctttggatgggaataactacacacattggcagccattagagaaaactcaacgcgctaagctattgatcgatttaggtgaatataaggagaaagagattaccaagggaatgattctttggggccaacggcccgcaagaaatatttcgatttctatcttgcctcattccgaaaaaattgaaaacatttttgctaatgtgacagaaattatgcaaaacccggggaataaccaaattcttaatcaaacaattggccaacttctagatgatgctggagtaccggtcgagaatgttattgatttgagcgacattgaaccggaggatgaagaatcttttggtgaagttcaagccttattacattggaagaaagaggacttggcgaagctaatcgagcagatacctagactaaactttttgaaaagaaaatttgtcaaaattcttgataacatgcctgtgaacccaagtgagccatattacgaatcaagtcgtaaccaatcgctgattgagatattgcccagtaatagaacaacttttactattgattacgataggttacaagtgggcgataaaggaaatacagagtggaggaaggcgagatatatagttgtggcagtacaaggagtgtacgatgacgatgatgatagcaagggagctacgatcaaggaaatcgtgctcaacagttga

SEQ ID NO: 3371 - DNA, 834 bp, Saccharomyces pastorianus
atggttgctatttacaaagtagttgcttcttttgttccactcctaggtttcattttagcgttcgaagaagatgacatgataaatacgattactgcaatcgaaattgcctttgaaacggtcacaatgacttcaaccgtacctgcccctgctgctacaaaatccgttagtgagaaaatgttggatgacactaaactgtctctacaagtaattcaaactatggtgtcgtgtttctccgtgggtgagaacccagctaatatgatttcttgtggactaggtgttgtaattctaatgttcacaattatcatcgagctcatcaacaagctcgaaaatgacggcatcaatgaaccgcaaaagttatctgacttaataaaaccaaagtatattgaattaccttcgagttatgttaacaagaaaataaaaaatacttttgaacctttggatatatatttaggagtaaactccaacacattagcagatagtcaaaatcaaaactgtctgattctcaaactcggcggggaatcagttttaccattccctggcttggctcaaaaaatatgctatacgaaaggcgttgcaaaagagttcacagactatagtttatccagtatacacgacaatttcagtgaaatcagacaagggatctccaatgacgttttccaaaaaatatcaactattaagaaaatgtctagagatttaaagtctcaactttattacatctcggaaactatcacagacgaaagttgggatggttctgctattggctttaaagccagtgaaagagaaaaagatccaaaaaaatctcaattatccgtcacattttatagagatcaataa

SEQ ID NO: 3372 - DNA, 2244 bp, Saccharomyces pastorianus
atgaatagagggtcagtagatgatgggcccaaactacgtgaagaaaagcatttccaggatttttatccagaccttaataccgatactttactgccgttcattgttcccttaggcgaaacaaataatgacaacaccattgacagtttaaatgatatccctaacttcaaagacagaaaaaacgagaatgctaagagcgtgcagacaaaagagttgatcttcaaggggaaagttactattgaaccattactattgaaaaaaaatgaagtggagtttcaaaaatgtaaactttcggcaaataatttggatgttaaaaaggcttcgtacattcctaggcccaatgacaattttatctccaaatattaccacatgaataggccaagaggtagaaaagctcataggttacagaaattagaatttgatgagttagaaacgccttatttcactaagttttctggtggaaaagtcacaagcagtaccgattcgacgcctttgaagaatgcaatccaaaaatttggtgaaatttcatccaatttggcgaatttcaagccgcagtatgatatggatgagcaagatgaattatatttacattacttaaacaagaaatattttaaagatcaaatgtctcatgaagtatttgaaatcttaatgaccatactagaaattgaatggcttcatattgaaaagcatatacctacaactaatacccttattgcaagacacaacgttttaagagattgccaaaattttgaactttatggttctgatgatgggacaggcttatctatggatcaagcatgcgcagtttgcttaggtacagacagcgataactctaatacaatcgttttttgcgatggatgtgatattgcagtgcatcaagaatgttatggtataatctttattccagaaggtaagtggttgtgtagacgatgtttgatctcgaagaataattgcgttacttgcctaatgtgtccaagtcacacaggtgccttcaagcaaacggacaccggttcctgggtacataatatttgtgcattatggcttccagagctatatttttcaaatttacattatatggaacccatagaaggtcttcagaatgtcagtatatcccgttggaaacttaattgctacatctgtaagaagaaaatgggtgcttgcatccaatgctttcagaagaattgttttacagcataccatgttacatgtgcccgtcgagctggtctctacatgagtaaagggaaatgtactattcaagaattagcaataaatcaatctccgcaagagtactcaatcgagagtttttgccacaagcatgcacctaggggatggaaatctgacatggaaggtattactaaaacaaggaaatatttctttctactttcgaaatttctaactgaaacaccccggtacaatagaacacaagatgactcaaaatttaagaaaacagtttggaaaacgtctagtcagacgcctgtggcgccgtacgtttttgcagaattactacaaaaggctcttgatttttttgatttggccaaccctccatcggcttcattggatatttgcagatattggtcgatgaaaagagagtttacgggaggtactccattgattacctcttctgaaaacaatccgtttggctcactgactgaggagcaactacaaacaagaatggattttgccgatgatcaactcaaagacttacacagactgaaagaactgaccagtttggtgaagaaacgggcacaaacctcgacaactatgtgcaaaactcaaaagaagatttgtgacataattgaatctccgcaaaaatatcttctgaaatatagtgtgttagatatttttgtcaaatcagaacaatttaaagctttggaaagacttgtcactgagcctaaattaatcgttattttggaaaagtgtaagaacaacagctatgataccgtccaacactttaagacagaaattacgtattttttctctactttagaaaaccttcctaacacaccaagaatacttcaaacaattttgttcagggcgaaagagcaagtgtcaaatttgactgagcccatagagcatatgaatatgaaaaagttactagccagagattttataataactgacggaaatcaagtagaagaaaggccttggagtgggccagtgatcatggaggaagaagaactaagtgatgcggaagaacttagtgcaggtgagcgtcgcgtactgaaactcatcctcaataacaagtga

SEQ ID NO: 3373 - DNA, 1221 bp, Saccharomyces pastorianus
atgtccgttaacatttgtagagacaaccatgatccattctaccgttataaaatgcctccaatccaggccaaggtggaaggtagaggtaacggtatcaaaacagcaattctgaacgtggctgacatcgcccatgcgttgaacagacctgctccatacatcgtcaagtacttcggtttcgaactgggtgctcaaacttctatttccgtcgacaaagatcgttatttggttaacggtgttcacgaacctgctaagttgcaagacgtgttggatggattcatcaacaggtttgttctttgtggaagttgtaagaatccagaaaccgagatcataatcaccagggatagcgatttggtcagagactgtaaggcttgtggtaagagaactccaatggacttgagacacaaactatcgtctttcattttgaagaacccacctgattccgtttccggctccaagaagaagaagaaggcagccacagcttccgccaatgtccgtggtggtgggctatccattagtgatattgctcaaggtaaatctcaaaacgctccttcggatggcactggttccactccacaacatcatgacgaggatgaagatgagttgtcgcgtcaaattaaggccgctgcttccactttagaaaatatcgaagtcaaagatgacgaatgggccgttgatatgtctgaagaagccatcagagctcgtgccaaagaactagaagctaactctgaactcagccaattagatgaatacggtgaatggatcttaaaccaagctggtgaagacaaggaaaaccttccatctgacgtggaactatataagaaggccgctgaactagatattttgaacgatccaaaaattggttgtgtcttggcccaatgtctttttgatgaagatatcgtaaacgaagtcgctgaacacaatgcatttttcactaaagttttggtctctccggaatacgagagaaactttttgggtggtattgaaagattcttaggtttagaacacaaggacttaattccaacattacccaaaattttggttcagttatacaacaatgacatcatttcagaagaggaaatcatgagatttggtaccaaaacatccaagaaattcgtacctaaggaaatatccaagaaggttcgtagagctgcgaaaccattcattacatggttggaaaccgctgaaagtgacgatgatgacgaggaagaagacaatgaatag

SEQ ID NO: 3374 - DNA, 528 bp, Saccharomyces pastorianus
atggaaatagtgtacaaaccattggacatacgcaacgaagagcagtttgcaagcatcaagaagctgatagacgcggacttatcagagccgtattcgatatatgtatataggtatttcttaaaccaatggcctgaattgacgtacattgctgtggacgtcaagagtagcacacctagtgcaccaatcgggtgcattgtgtgcaagacggatccgcacaggaacgtcagacagagaggatacatagggatgcttgccgtggaatccacgtaccgtggtcatggcatagcgaagacgctggtagagattgcgatcgacaagatgcagagagctcactgcgacgagattatgctagagacagaggtagaaaatgtggcggcgctgaacctgtatgaagggatggggttcattaggatgaaacggatgttccggtactacctgaacgaaggagacgccttcaagttgatcctgcccttaactgagaggagctgcacccggtccacgttcctaatgcatggccagatggcctag

SEQ ID NO: 3375 - DNA, 1029 bp, Saccharomyces pastorianus
atgaagaaaggagagagtcaagcacctgatgctatttttggccaatctcgtgcatttgcgttatcagactcttcagtaaatcctgatgtcattagatatcttaacgatgtaagagaacaagcattaagaaccaacgccatatcgattagtagtcaagtgaatctccagaagaggacacgacacaaatcgagcatgtacgacgatgaggatgaagaggtcaccaataagcgcattgtctcgccacctttaatcagacttcaaaagaacgcagatatgttggtaaagtggttcaattccgcaaaatatgtggttttgaacaatgcttacgagtttacgggttatgatgacgagacgttgaatcatttactattctgtctgatgaattatttaaaagacgtaccgtgcaagaattctaaagttgaaaaaattattaatgttttaaatgagcatacctttccagaaaatgaggaaaatacggaacagaaactagagttcgatgaagaatgggcgaagagtatcttggtacgactggggaaggcaaatattaataattatgaggatatcaaaaggataatcgcagaaggcgatacgcatacacttagcgggtacaaccaatggttcaaatatattataggtaatgacccacgacacactatgttttgtgagaagatcacatccaaagaactttgggttctcatgaaatttatgtcaaatacttggataaaagaaatctataaaaaaggaacaaaccaccgccgtttccaagattggctattttatctactgatacacacacctgaaaggcttacggcggagtgcacgagcacgttgagagacctgggtaagaaatgccgtgaattgattctaaagaagcccgttcaggctcacaatgatgataaaatcactcttccgatggagatgaaggagttagatgtaacggtaccacctgcgttggagaacatggcaataatcgaattagccatctgtatcatagctgttaactatgggcaaaaagacttattaacataa

SEQ ID NO: 3376 - DNA, 1122 bp, Saccharomyces pastorianus
atgcaaacagtttcgggaatcctaccaacaacattaagtccatccgagcttaaatctgatgatgaaagaactttccagtttgacgaagagaccgaggtggcaaagcttgtggacgaaagtgaagatttacgaagactgattaacaagactacccagctgggtatcaaagtcgaccatattcacagcaaaacagatcaagagattgccaggttggaaaaagtgatcgaagaggttgctaaaaatgatagtctctttaggtcttgttctagtaagctcaagcgaaagaatgcgtgtaaacatgcttcagacagtgaaagcagtacgaacactcaactgaagagcctttctcacttgcatggccgtcacgaccatgattggaagcaaaagttaaatagatggttccgaaagaataaaagtaaatttgccatacgatcggccagcgatctgaaaatgacagatgtagataacctgtttcactcgcagactagatttgtagaagatagcaagtcgccatactttagtgaaacagatggctatatgaacggtttggacatcatatcaccattaaccccggatgatctcgacgataatgaaaagtgtgttaaactcgatgaacctagtcaagcatgtcccaattcagacctgaagaagacttcatcaagtcccacatttggaaaccatgcaaacaatgagctggtcgtgaatggtacagagagtatcgttagtgaacctcccttgcaagaaagtaaaaagatcattctaaaatatcgaagcgttagaacatctcttagcgccataggttctgcgaaagcaacctccaaaaacaatagcagtgtgtttcgcatcttccacaaaagctcaggccttattgacaaaaatcaagaagacgtgccacgaatgtgggatgtggtcagaaataacttggagaaagaggtttttcttttacaagaaagattcaaaaggtggacttcaaagcacaaagatactggaaagactcaagtccttaacagcaactgtgtaaccatccctttatcactatccgaatcggggccaggaacacagtcggaatctggattctgttccatgcttgggtcagaagccctgcttcaagtacaagcttga

SEQ ID NO: 3377 - DNA, 1845 bp, Saccharomyces pastorianus
atgacttctttaggcagggataagctagaaagtacgttgagaaaaaggtttttctacacgccatctttcgagatatatggcggtgtgtcaggtttattcgacctaggtcctcctggttgtcagttgcagaataacgtagttcagctgtggcgagaacattttatagtggaggaagacatgttacagattgacgggccaatgctaaccccctacgatgttttagacgcttccggtcatgttgataaatttacagattggatgtgccgaaatccgaagactaaagattactatagggctgaccatttgattgaacagacgttaaagaaaagactactcgacaaggatgttgatccactggaccataagcgtatggaggatgcattggccacaattgatggatttacgggttccgacttggttcgtactatgcaagaatataggatcaacgatccagtcactaacgatgttttagatgcaccgactccattcaatttgatgttccagacaaatatcggggcatcgggtcagtcgaaagcatttttacgaccagaaactgctcagggacaatttctaaatttcaacaaattgttagatattaatcaaggtaaaattccgtttgcctctgcttcaattgggaaatcgtttaggaatgaaatatcgcccaggagtggattactgagagcgagagagtttttaatggcagaaattgagcatttcgttgacccgttggacaagtcgcatccaaaattcgatgaagtgtcagatgaggaggtaccattactatcacgccaattgcaagaaagtgatgaacctcacctacccgttagaatggctattggagaagcagtaaaaaccggaaaagtagaaaatgaaactctgggatactatatggcaagggttcatcaatttttgttgaggcttggggtcaacaagaacaaatttagattccgtcaacatatgaaaaacgaaatggcacactatgccactgattgttgggacggtgagttattgacctcatatggatggattgaatgcataggctgtgctgacagagctgtattcgatttgacagtgcattccaaaaagacagggaaaagtttgacggtgaagcagaaactaaacactccaaaggaacgaaccaagttggttttagaagtaaataagaaacttttcggacggaaattcaaacagagggcaaaattgatcgaatccgctctattaagtttatcacaagataagctgtacaataagcatgaagaactgaataagaacggtaaacttaccttccaaacaaatggtgagaccgtggaaattgaccagaacttggtttctattgaaatgaagacaactttacagcatacaagagagtacatccccaacgtcattgagccctcatttggtttgggtcgtattatttactgcatatttgaccattgctttcggacaaggctggatgatgacgaaagaacttatttctcattcccgttatcggtagcaccaatcaaggtttttattacaacaatatcaaataacgagaaattccctagtgtgatgtcgcaaattgtgcgcacaaaagaaatatatttcaaagtcgatgattctaatacatcaattggtaaaaaatatgcacgtaacgatgagttgggtacgccctttggcatcaccatagattttcaaactttgcaagatgaaactgtaactctgagagaaagggattctatgagacaagtaagagggaccgttgaagaagttatttcggtaatcgacaagatggttcatgaccctataaacgaattcacgtggaacaagtccacagcaggattactgcaggtagcagtaccctga

SEQ ID NO: 3378 - DNA, 2283 bp, Saccharomyces pastorianus
atgactagcttgaaggtgtttttcgccgtctacttgctaggtggtatcacgtttttgcccttggtccttttcaccgcttataaagtccatttattgtacagtaactttaaatccgcattagaagaagaggaagatcgtgatgataaagataggctattgactcgcggcatacgcccggatttcaaagctggtaagctagaagagctgtccggtgtaaaagtagttaacaagggctggatcactttgactaagcaatattactaccattcttcagaggtggccataattctgaaaaattctaacaacaacaaggattctgatgttgttcagcaagaacagatcttgcaaagaacagaactgaaaaaaaagcaacgattcttcgcggtgctaagacacggtaatctgtttttatacaaagatgacactcagaatgcaaatctggttcatgccatatctttacaggataaattcgtaaccatttggccccgttacgatgaaacgggtaaaaatgaactacccgatgcttcccttttcacaaagagaacctgtattgccgtcttcaaaaacgacctcgtttccatagattccaaaaaccataatgtcatcttgccgcatttcgacccacttaccagtgtggaatcgaacaatggggatatatccaacaacgatgccacacacgaaaatcagtcaccgtttcataactcgaatcagttcttcttgtatttcgaaaataacatggataaggaaaattggtattaccaattgatcaatacctcgaaaaacaataatactgccccaaccaatttgctgaaccctaatgtttctgccaacaccgcccatttaaaaaccaaagatatgttgcaactgattcaagacatcaactctactgagaaccaattgactactaaatggttaaatgctctccttggtaggctttttctttcctggcaacaaactgacagcttaaatcaacatattcttgaaaaaatcttcaaaaaattaaataaaataaagactccggggtttttagacgatttagtcgttgagaaagttgatgtgggtgacagtgcccccctgttcacatctcctaaactgctagagttgtctccagagggctccactaagttttctattgatgtccaatacaggggaaacctgacaattattatcgctacaaaggcaagtatcaacctagggtctcatttcaagcaaagagaagtttcgttacagctatccataaaaatcaaagaactttccggcccacttttgtttttgatcaaaccgcctccatcaaacagaatttggtatgccttccaaaatgagccaataatggacttcgagattgagccgattgtaagttcgagcaaattgtcgtacaatgtcgttactaatgccatcaaaagcaagtttgctgaagctatgaaggagtccttagttgttccgtttatggatgacattgtcttttacccaactcctaatgaaatctacagaggtggtatttgggaggaacatgactctgaagtaaaagcaaacgtttccgttaccgctgaggctccaggtactaatacaagtgctaaggcgcatttggcagctgttcaagaaaatggaacgaaatcttataggaaaattaaaagagtttcaagaacagaaagaaagaaagaaaagttaaaaggcattgttgacagtacatctgcgatagcggcgaaaacaaccacccagacaacagtcactgcaccaacgaatgacgacgtttccagttctgaaaactccactaaatcaagaaagtatttcaaaaattcaatcaaaaaaattggtaaatggtacaaagacaatgttggaaattcaagtgacactgaagacatagatgatttagacatccaagataggaaggatgatgactctgctgatgaaaaagaaccaggtactcccttactaacttccagccctaaaatgatttcgaatagaaggcctgtacctaggagaccttcacagcaggcgttgaacttaccatcttcaaatgttgaaggcaaaaaggaaacagaaccagaaaatttcccagttccgccttcgtcatcaaatacaaatgcttcagaaatgtttgctaataaagagaataggcaattttctgtatcctcaaaggactctcaaaatgcaccttcaaatggggaatccaaaacctcaaaacttgaaggctctcaagcttttgtcaaaaagacttccccaaatcgcttcaatgacgagtttttcaagcaagatatggaattcgaaaatcaacgagagtag

SEQ ID NO: 3379 - DNA, 879 bp, Saccharomyces pastorianus
atgatggacgattttgaaagtaatactgaagaaaacttatctttaggaaataagcgagtgtatgaactacgaaagaggaacttccaaaggaacttggtaaataacctgagctattttggatatgttctgatattactggaatacattaaattcgatcgtaccgtttggacactcataacaagggcgatagtgcaatcccttataagttcccctttcccgagtgatgctaagttacgtagactagcgaccgctggcggtgacagtaatactacggggatcgcaactcttccaggaggcacgtcgatcaggattcctggaatgttcaccacggaagcgcttgataatcattctaatggaactgaacaacaagacaatgcctctgttatatccataaagaggcaaattaggaaattcttattccatggttgcttatcgctgaacatgctatatattgtttttactattttattcccgatcgattttctggagccattgagtgagtatgttccggtagatagtctcaaaaacactccctcaccgttttcaaattcaaatggtctacttttaggtgagagaaggggtgggttattcttacagatgattggagaacgtttaccaaagagcaacctctctggaaacttcggcctgttaatatttgaatttagcatacttatagtacagttcactttgttttcattaacgtgtgttgtactagccgatttaaattgccaagagccggaaagtgtgcattctgtaaaaagcgatggatatgatgggtctgtagtagttgctcgaataccattaaataaaactttggacactgttttgtacgacggtgataataacgacattgaagagaatccaaacagtgccgtctga

SEQ ID NO: 3380 - DNA, 1239 bp, Saccharomyces pastorianus
atgtcattggaggctataagttttgataggtcgaatcctgaaagggtttcagtaaaggtactggatcaattacttttgccatacactactaaatacattccgattcatacaattgatgagggctactcggttatcaagagcatgcaagtaagaggtgcaccagctattgcgatcgtcggctcattatctgtcttaactgaaatacaactaataaaacatgatccattttccaatgttacaaaactgtataatccaacaaattgggaagctacaagaaaagtgctgaatgaaaggttagattttcttttgagcagcaggccaaccgcggttaatttatcgaactctctagcggaaatcaaaactatattaagatcttcaaatgatctccaagtttttgatcgtgatttatgccgttatacttgtcgattaatagacgaggatttagcaaataatatgaaaatgggtgataatggtgcaaaatatcttttggacgtattagagaaggatgggttcaaggacgaatttgctgttctgacaatttgcaataccggttctttggctacgtctggatatggtactgctttaggtgtcattcgttctttatggaaagattccgtggctaaaactcacgaagcaagtttaggattagataatgaaaagcatgctaaaatggaccacgtattcccattagaaacaaggccttataatcaggggtcaagattaactgcatacgaactggttcatgaaaagattccgtctacattaattacagatagttctattgcgtatagaattataactagttcaactccgattaaggcagcgtttgttggggctgatagaattgtccgtaatggggatacagccaacaaaatcggtaccttgcaactttctgtgatttgtaagcaatttgggattaaattttttgtagttgctccaaaaacaactattgataatgtaacagaaactggtagtgatattattgtggaagagcgtaggcctgaagaatttaaattagtaactggcacagtcgttgatcctgaagatggctctttgattctgaatgaatcaggagagccaatttcagggaaagttggtattgctcctcctgacattgacgtctggaatcctgcctttgatattactccgcacgagtttattgacggaattgtcacagaagaaggtgtatttaccaaaaactctgacggtgagtttgatctgcaacgtctttttaaataa

SEQ ID NO: 3381 - DNA, 1272 bp, Saccharomyces pastorianus
atggagggcaaccaggacaacgagcacggcaccagaggcggttctttgatctataatgaaaatgaaacacaattgagcagtacaaacgtgcggacctctcaagataaaaaaaatgctccgaagatggggagctccagtaaggaacaggtgcaagatgataaaccaagaagggccttgacagatgttccggtaaacaacaatcctttaaaccaagctaagaggatagctataaacaacaaggccgctaaagtacgaagggaagaaaacagtagacctattgttaccgccgtccagaaaagaaagatatacaacgatcataccgcggaggacgatgctgctgtctccatcacaagcaaaagacgcagatttggcgttgaaggagacgacgagatattaggttggaaggctttagattatgttgaaaaaaacgacactgcaatggtggcagagtattcttcggaaatcttcgagtttttgtacaagagagagttagaaacgctaccatctcataattacctgctggacaaaacttccaaatactatttaagaccctccatgagagccatactagtggattggttggtagaggtgcatgaaaaattccaatgctatcctgaaacattgtttctatccatcaacctaatggacagatttttggcccaaaataaagttacaatgaacaaactacaactactagcagtaacctcgcttttcatagcggcaaaattcgaagaagtaaatttgcccaaattagccgagtactcttacatcaccgatggggcagcctccaaaaacgacataaaaaatgcggaaatgtttatgctaacgtcactaggatttaatatcggttggcctaacccgctcaattttttgagaaggatctccaaggcagatgattacattttgactaataggaatactggtaagtttattctagagtatgcttgctgctgccaccaattcattcatcttcccccatctgtcataagtgcaatggctatgtatatagcaagaagaataaccaatagaaacaagaacgaactgtggaaccaaaatctggaacactacagcggcggcattgatcctctacacgataaaacgtttcaatcgtactgtacagatttggtcacagacattgctagttctaaaattcgtttggattctcttactttaaaatacaagaagccaagatatggatcggtctatttccaaacttctaattggtgtaaagctgaagtggacaataatttcccaagtctattcagtttataa

SEQ ID NO: 3382 - DNA, 819 bp, Saccharomyces pastorianus
atggggttagctgaaactaacttccttcgacggaattgtatacttgtagagcttaagttattctacgatacactatacccgcccaaggagttgtattggaaccatcgaataactacagaattgagtaaattctccgatatcaaatatgcaaggccaacgttcgcaattggtaaaggcactttcaagaagacgagtccgaagttggacttgatactggctaccccggatatccacaaactagctacggttttgttcaatctaagagcgttcataatgaataaaagagaggagaaattaactgtaacgatgtgtcaacacggttccggtgtgccaagtaacgagggagaggacaaagatttagaccagaagtactcaagtctattaaacgtgtggggcggcaacgccagagtgcaagactctcctttcactcagctccaacctgataccaacttattatttgccaggagaccagtagattatgctaatactacagaaaatagacgtgtagatttatccagtagagatttctttagactccacgaagagcaacatgagaggaatgaggatgatcgtgctgctgactattcccaatcaccagccgagataagaaaaagcgagtacgggcccaatatgattcaccttgaacctttgttgtaccacagttattcttcattaccaaccaatatgaaactctggctgaatggcgtaaaggatgacaagaagacgttaatggaaattgacgaaaacgcaaccgataaattagatatgttgttacatggtttcaaaggatttccgcaggcacatggcaacaaaaggtaa

SEQ ID NO: 3383 - DNA, 2793 bp, Saccharomyces pastorianus
atggtttcaattattgataaattggtttttgatcttggtggcaaaacattagtttcgctggcacctgacaataacactttatgtgtagctaataaaaatggattaaccaagatcctgaaaacaaataacccagaagaggaaccagagacgttagactcttccaagtcagtctcttcaattagatgctactctaattctaactttttgatgaccacaatgcaaggtgatgcactaaaatataacatcgactctatgcaagaagaattattggctagatttgctctgcccctacgcgattgctgtgtgattcactccggtaagatgggcgtatttggaggagatgatttagagttagttcttttggaattagatgatgctgcgcataagaagcataccgttaaaattgacgaacagatctctcagatatcttacaattcccaaatgaatattttagccgtttcgttgataaatggaaaagtccaacttttttccctaacatccacctcaccaaataaagtccacgaattgaatgattacatagtcgccaattcatatgatgatactcacagagataaaatactttcaaatatgatggatgatttcgacaaagacagcgataacgatctggacgaggcagttgactcgagcgaaaacaatgtcaatgatccagaattttgcgcctttaatcgaatttgtacaagagtggcttggcacccaaagggcctccactttgcattgccatgttctgatgatacagttaaagttttcaccataaaaggctattccttgcaaaagacgttgacgttaaattattctgcagcaaaggcccattttgtcgatttgcaatttgatccattacgtgggacttacatcgcagcaatagacttaaataataaactcactgtatggaattgggagacctccgaagtcttctacaccaaggagtttaagcgaaagcttacaaattttacctggaaagttcaaccagattcgaaaactttggatatcgttttaggtacatggtctggtagcatagtcactgtccaaaatttggctgaatctgttgtttcaaatgtaactgaagattctgtaaacgaatcttcaacaaaacaaggccttttcgtcgactctgattctgacttggaaaatccagaagaagatggtgaggcaagcaaagatgaaaagctattttctgatattgctcaagaagctaattcggaggatgtgttcactcaaaaccatgatgacaatccaagtggattaaacgaaaagagaaaatacaatttcgaagatgaagaagactttattgatgatgatgatggggctggttataccagtggtaagaaaccacatcatgatcatccttattccagaacacaaaaaagtcatccattaccaaccattttggcaaacacggcaaaattccgctataggccgttttctccagctggaacaccgtttggatttactgacagacgttatttaaccatgaatgaagttggatacgtatctactgtcaaaaatagtgagcaatatagcataacagtttccttctttgatgttggccgttttcgcgaatatcatttcgaagatttgtttggttacgacttatgtttcttgaatgaaaagggcactttatttggtcagtccaagactggccagatacaatataggccgcatgacactataaattcaaactggaccaagataattcctctaaaatctggtgagagactaacaagtattgcagctaccccagttcgcattgttgttggtacttctttaggatattttagaagttttaatcaatttggcgttccatttgctattgaaaagacatctccaattgtagcgctaaccgctcaagattacagagttttctcggttcactattcacaatttcatggactttcgtactcattattcgaacaaagccactctatcacaaaatattatcaaagagagcgcccacttcctatgagtttgccaaacgttaatcctgacctgaaacaagaaactaatttcgacttctacaattttaatccgatgggtataaaaagcttgtttttttcaagctatggtgatccatgtattttcggctacgacaacacattgctactgctatctaagtggaggtcatttgaggaaagcaaatggatacctgttcttgacagtaacatggaaatatggaaaatgtcggggggaaaggagactacagatatacacgtatggcctttgagcttgacatatgatacattaaactgtattcttgtcaagggtaaacatatatggccggaatttccccttcctttgccatctgaaatggagattagaatgccagtcctcgtaaaaagtaaactactggaggaaaagaaagctctggtaaacaagaagaatgaattcgaggacaatatagaagaaaacgaaggggaagatgataaagaaataccgattcccattccaatggctgcggaagaagaatatttgcgttctaaagttttgtcagcattgttgacagacacgcttgaaaatgatggtgaactatatggaaatgaaaacgaagtattagcggcattaaatggtgcatacgataaggctttgctacgtttgtttgcatctgcatgctcagaccaaaatgtcgaaaaagccctatcgctggcacatgaactgaaacaagatagagcactcaatgcagctgcaaagatatcagagagagctgaactaacttccctagttaaacgaataaatgacgttagggaagccagatatgaacagcagttaaataatgtgtaa

SEQ ID NO: 3384 - DNA, 2196 bp, Saccharomyces pastorianus
atggattcacttccacgtacgcccacgaaagccagacccacacagcaactttctacaccatctccaaaaaatgatattttgtctatgagaggttacaagagaagaaatacaaccacaccacctccactatacgctctttcgaaaccgcagcaggcagatgttcatagacactcgttggctggccagagccgcatatccatgtccccgaatcgtgatcttttgaaaaattataaaggcacagcaaatttagtttacggaaatcagaaaagtaattctggtgtgacttcattttacaaggaaaatgtcaatgagttgaacaaaacacaagcaattttattcgaaaaaaaggctacgttagatttattgaaagatgagctagcagaaacgagggaaagaattaacggggttaacctcaagttcgagactcttcgtgaagaaaagataaaaattgaacaacaactgaatttgaaaaacaatgaacttatatctatcaaagaggaatttttgtcaaaaaaacagtttatgaatgaaggacatgaaatacatttgaaacagctagcagcgtcaaataaaaaggatttgaagaagatggaacacgactacaagactaagattgaaaaattgaagtttatgaagattaaacaatttgagaatgaaagagctacactactagacaatatagaagagatccgaaataaaatcaccttgaatccttccacgttacaagaaatgctgaacgagtctgaacaaaaacaaggactggagaaagaagaatggcttacagagtaccaaacacaatggaaaaatagtatagaactgaataataaacatatgaaagatattgacaacattaaaaaggaaatcgaaaatgttttaagacctaaactgttagaaaaaaagaggctcttaacagagaagcacaaagagtatgaaacactcaaactgaaagttgaagaaaagaaagaagaaactacaaagctaaggaatgaagtggcttcaaaagaaaaggctaaccgggaaactttagaaaaaatcagggaacttgaagaatatataaaggacaccgagctaggaatgaaagagttaaatgaaattctaatcaaagaggaaactgttagacgtacattacacaatgaattacaagaactaagaggaaatatacgagtttattgtagaattcgtccacctttagagtctttggaaaacttggatactagtctaataaacgtcaacgactttgatgacaaccgcggtgtccagtctatggaagttacgaaaattcaaaataccccacaagtgcatgaattcaagtttgataaaatctttgaccaacgtaatacaaacgaagatgtctttaaagaggttggacaattagtgcagagttcattggacggttataacgtttgtatttttgcatatggccaaacagggtccgggaaaactttcacgatgttaaatcccggggacggtattattccttccacaatatcccatatattcaactggattaacagattgaagacaaaaggttgggattatgaagttaactgcgaatttattgaaatctataacgaaaacattgtagatctgttgaggaatgaaaataacaaggatgacacaagtaataatctgaagcacgaaatacgacacgatcaagaaaccaagactaccacgataacaaatgtcacgagttgtaagcttgaatcggaagaaatggttgatagggttttgaaaagggcaaacaagttaaggtctacagcgagtactgcatcgaacgagcattcttctcgttcgcacagtatttttataattcatttgacagggttgaatgcaaaaacgggagcgcaatcttatggtacattgaacctcgttgatttggctggttcggagagaataaatatttctcaagtcgtgggagatcgtttgagagaaactcaaaatatcaacaagtcactgagttgtttaggtgatgttattcatgcgctaggtcaacctgatagtgctaagagacatataccctttagaaactcaaaattgacgtacctactacagtattcattaactggggactcgaaaactctgatgtttgttaacatctcgccaagttcttcgcacattaatgaaacgttaaattctttaagatttgcctccaaagttaattcaaccagaatggtcagtagaaaatcagataaatga

SEQ ID NO: 3385 - DNA, 1260 bp, Saccharomyces pastorianus
atgtctggttatttttcaggattttctttgaataagatcaccgattcgattgctaccgctgctcacaaaactcaagacaccttgaactctgcgttggcaaatgcgaacgtgaacttgaacgatccgcaaacaagattgtctatcaaatcgcgcacaagatttgtccaagaatcattgggcactgtatctgatataagcaaattaccaccacagtaccaatttttggagaagaaaagcgattctttggagaaagtttgtaagaggattttgctagtgtctaagacattcgaagtggaaggctacgactatccgccaaatttaacggaaagtatttcggattggtggtcccttaataaagacggctggtttggctctaaaaaatcggaacacgcgagtaaaaagaaggattccaaccatgatgatgcatttttgccaaggtcctttgcccaggcaatttcgaaagcagctgttgattgtgaattcgaattcaaaaacttagaacagaacgaaaaggcagaattgaagcagaaaaaggagcccaaaaaagccgcacaggaaacagatgaacaagaagaagacgaagaggaggaagatgaagatctatcaaatctaatcaaagttttcgactcatggtcaacatgttacaaaaacatcgatgaaggcaaagcggaaatggattctatgatgattaaagaattcaacaaaaaattagaaaaattgataaacgaggactttaagaaggttcatgacttacgcagaaaagtagaagaatcaagacttaagtttgatacaatgcgttatgaaggcaagtcaaaagaagaacaatcgagagctcaaaaggatgaaacctcaaaggaggccgacaacaatgacaacactgcaaaccctaaacccttagaggatgctctcactactgaaaataaaacaggagaggaaaaccaaacaaaggttcctgaagaagaaccaaaaaaggtggaaaacgaggtcgccactgccgatgatagtgttacgaacgaaaatccaaaaccagctaatcagccatcaattgaagattccgaagaaaacaaactgttagaaaaactggaagacgagtttgtctccaatactacagttgctgtggaaacaatggaagaaatcactgacagttctgaaatttcgagtttagtgaaactatttcaaaatttccaattggtgtatttcagacaatgtgttcaggaggtggaagcaaatctgaaggttttaaacggtatggaaaactag

SEQ ID NO: 3386 - DNA, 639 bp, Saccharomyces pastorianus
atgattatattgagaaaaactgagattagggggctgtcctctgcaaggataaggagcaccatgatattcgctagcgtacagaggcggacgctcaccaggctggtgaatcccataagacagcagcatcagcagatctccaagcaaaggaactccaagctcttcaaaaacgtgcatttctacgatttcaggtcgctgcccaaggtgcccaccactcaatatctggaggctagggagctaacccgggacatcctgtacagcgggtacaggcctgtgatgtacccagtgaaggaaaaccccttattcagagacaagaagaagaagtctctgcagatgctcctagcatccgacgaggagcctgccacggtggccaagaaggccacggcaaaggacgagcataaaaacgtattgtttggcgagcgtggcacaggcggtataatgtccggtggcgtaaacggcacgtggaagtacaacccgacggtgcccaacgagctgctgccctacaactggtggtctacgtccagtatggggatggagtacttccctgagtggaaagacgtcccttcatacatgatgaggaagttgaaaccctttgatagagcactacaactacagtcaaaactcagtaacaagaaaaaataa

SEQ ID NO: 3387 - DNA, 2061 bp, Saccharomyces pastorianus
atgtttagttcagggagcgttctacctgtgaaaattcagcctcccctgctcaggccactggcgtacagagttctgtcaagaaaatatggtctatcgattaagtccaatgggttatctgctctggcagagtttgtcggcactaacataggcaccaattggagacaggggtctgctacgataagattcctcgagcaatttgcgacggtgtggaagcaacaggaaagaggattgttcatcgaccaagacggggttaaagaggtgattcaggagatgaaagagcgtgaaaaggctgaatggagccacgaacaccctacccagcacggcgatgatatactgaggcatagtgacgatgacagcgacgatgacatgcccatggcagctgattcctctttacaaaatgcattattatcttcacccattcgagaccccatcaatgagaacgagcacaacgtttcttccaggttagagaaatctaaaaacctggactggagagactatttcaaagttatcaatgcttcgcagcaacaaaggttctcatataatccccgtaaaatgcagttcattttcgttgcaaataaaaaggagaatttattgggcagcagtacggggtttctacctgatattgcggataaagtacagatgttcctgacaagatattatctcaccaacgatagagtcatgagaaacgagaattttcaaaacagcgacatgttcaatccattgtcctctatggtgtcgttacaaaacgaactatccaatgctggccaaaaacagcaattcaatagcatgaatatcacgccaatcaagaatctgctaggtagagatgctcaaaattttttgatattgggcctcctgaacaagaacttcaagggaaattggtcaatagaagatccttctggctccgtagaaattgacattttacaaactatccctacgcagggccattattatgcaccaggttgcatggtccttgtagaaggtatatattactctgtggggaataaatttcacgtcacttctatgactttacctcctggtgaaagaagagaaattacattggagaccatgggtaatttggatcttctaggtatacatgggctttccaataacaactttattgctcgtttggacaaagacttaaaaatcagattacatctattagaaaaggaattaactgaccacaaattcataattctcggcgctgatttattcttggatgatttgagaattatgaccgcgttgagtaaaatattacaaaacttgaatgacgatccgccaacattgttgatctggcaaggttcctttacttcaatccccgttttcgcttcaatgagtagtcggaacgtgagtagttcaacccagtataagaacaactttgacgctttagctacgctattgtcgcaatatgacaatttgactgaaagcaccacaatgatattcattccgggccctaatgatctgtgggggtcaatgatctcacttggggcgaatggcatattaccacaggatgccattcctagtgtgtttaccaaaaaaatgaacaaagtttgcaaaaatattatttggagttcaaacccaacaaggatagcgtacttatctcaagaaatagtactcttcagagacgatttgactgaaagatttaaaagacaccatttggaatttgcatttaacgaaaatgaagaatcgtatactgaaagtgctaatacgacaaccaaagatactgataccgttccaattgatgaattagtaaaaaatccagatcaactaccacaaaaagttcaagaatcaagaaagctcgtaaaaactatattagaccagggccatttatcaccctttgttgattctatacgcccaatttcatgggatttagatcatactttaacactctgtcccataccatcaacaatgattctatgtgacacatcgtctgcacaatttgatttgacatacaacggctgtaaagtcattaaccctggaagttttattcataataggcgtgcgaggtatatggagtatattccatccacaaagaaaactatacaggaggaaatatatttctaa

SEQ ID NO: 3388 - DNA, 2142 bp, Saccharomyces pastorianus
atggttgccaatctgaataacgagaaagaggttcttcaattgatagatagttttttcttgaaagcaacattgctaatatgttctacagaatcgagccgataccaatcttctacggagaatatacctttatttgacgatacatggtttgacacagaattagtgagtgagctgcccgagataatatcggaatggtctgattatgacggtcaaacaaatttgccacccttagtggtagagacatacttggacttaaggcagttgaatccgtctcatttagtaagattgaaagaccatgaaggtcatttatggaatgtttgcaagggaaccaagaaacaggaaatcgtaatggaacggtggcttatagaattagacaactcttccccaactttcaagtcgcatagcggagatgggacagatgttactgagctttccaaacagttagttcttcttttccgttatttgtttactttaatacagttattgcccacgacagagttgtatcagtcactaatcaaatcttatagtggtccacagaatgaaagtattaccaactcaatatcagtagcagatccggtagtcaacattcggacgcgtattcttgacggatccaaaccaattttatcaaagggaagaataggattaagcaaaccggttattaacacttactcaaatacactaaatgaatctaacctacctgctcacttagatcagaaaaaaattacaccagtgtggaccaaatttgggcttttaagagtgtcagtatcgtataggcgtgattggaaatttgaaattagcaataccaacgacgattcattttcaaaccgacatgtaatcctttcacgtaactcacaacaaccacaacagcaatcggaacaaccacaacagcagtcacaacaacagcagctagaacaaaacgaacaacaaacagtagaacagaatcaagagcaggcacaacagcatgatcaacaacaaagacggatacctgagagtagatctctctcgctttctccctgtacaagagccaattcctttgaaccacagtcttggcagaagaaagtgtattcaatatcaaggcctgttcaaccatttaaagtcggttctattggaagtcaaagcacgagcagaaatccttctaattcatctattttcaaccagttacccatccatagaccgagtataagttccaattctggacctcaaatgaatattgagggtactagcgtgggaagtacctcaaaatattcttcctcatttgggaatatccgccgtcattcaagcgtcaaaacgacagaaaatacagaaaaattgttaagagctgttaagagtccattacaactgcaagagtcgcaggatgatttaatggattttgttaaattattggaagaaaaacccgatttaaccatcaaaaagactaatggtagcaatcaacccaatattaatatatctgattcgttaattcgatatcaaagcttgaaaccgagtaatgatctattgagtgaggatttaactgtaagtttatctatggatccaaaccatacataccatagaggtaggtcagactctcattcccccttgccttccatatcaccttcgatgcattatgggtcattgaattcaagaatgtctcaaggtgccactgccaaccatttagttgcgagaggtgggggaaattcctctactagtgccttcaatagtagaaggaactctttagataagaatgcgaacaggcaaggaatgtcggagctacctcctatctttggcggtgagagtacttcatatcatcacgaagaagaagatgacgaggacgaccatttgctaaatcaaatgggaaacagtaccatcaagtttaaaagttcaatatctccaagatcgatagacagtatttcgagttctttcatcaaaagtaggataccgatcagacaaccatactactactctcaaccaacaactgcacccttccaagcccaagcgaaatttcacaagcctgcgaataaattaacggataatggcaatagaagcagtagcaataacaacaatcctaatgggactgatggaggcaacacaatgcataatgaagatgatgatcaggatgacgatttagtattcttcatgagtgatatgaatctttctaaagaaagttga

SEQ ID NO: 3389 - DNA, 276 bp, Saccharomyces pastorianus
atggcaggagaggcagtttcggagcagacaccagactcacaagaagtaactgtaactaaagtagtttgctttgttggtttattagtggaaacaggacaccacgtagtgtattccgtagcaacgccactgacagtggtcgtggcggtagaaaagatagcagaagtggcagtctcagaacagacgccagactcacagaaagtaactgtaatcaaagaagttttttcgcctgttgtgacagcagaagtcactttttcaatagtagtacgatcgcggtaa

SEQ ID NO: 3390 - DNA, 270 bp, Saccharomyces pastorianus
atggacttggcaatcttaccatccaaacgattggtgaaattcaaagccttcactaaacggtccttgtccatcaatgagatagaattggctaacttatcttctagaacctttttatttatctttttacccctcttgcttctatttgctttcttagaaatctttgcttccagtaatgcttcattcttggcagctgttctaatcaagatattggacaagttagtcttttctggtcttggtagttcggttaaatcctttacttctggatcataa

SEQ ID NO: 3391 - DNA, 576 bp, Saccharomyces pastorianus
atggctaagaaaatatcaaagaattctagagccgctagacaagcggaaatttatgatccagaagtaaaggatttaaccgaactaccaagaccagaaaagactaacttgtccaatatcttgattagaacagctgccaagaatgaagcattactggaagcaaagatttctaagaaagcaaatagaagcaagaggggtaaaaagataaataaaaaggttctagaagataagttagccaattctatctcattgatggacaaggaccgtttagtgaaggctttgaatttcaccaatcgtttggatggtaagattgccaagtccatttctcgtgccaagtacgtccagaacacaagaaaggctggctgggatagcactaatgaaactataaagagagagttggctcttttaagcggaggttattccgcgaaggccaagaataccgatgaagacgacctgaacaaaacaaaggatgaaagtgaggagatatcagacgtgtttgagtcttcaactgagagtaagcgagtagagaaagagtctgtcaataggtttggtgtcttaccagatgatgttgaagactag

SEQ ID NO: 3392 - DNA, 2661 bp, Saccharomyces pastorianus
atggagatttccagctcaccatggaatgacggtggatatagcccttacgagaggaacagagctgctgtatctccattgtcaccacctatggataatgatgagcgaatagaaagcccccagtcgttgggtgatcattgttttaagcctctaccatatcttaccaactatctttctatgtttgcgcttttcagtaacgaaatatttggcgataaagtgaacgttagctctcagaatgaatatttgttaaagaaatattattctttaaagaagccatttgctttgcgtcacagtggtggtacatcaaagaactcggatatgccttcacagagtaatgatatttggcagaccaattttatggttgataggtttttgaatcgtagtgtgcgatcggtgaattacgcgaactttcaaataatctctgatatgcaaaacagaagcattaggggaacaagcatcgggggaactccggagcacggcatcgatactttccaaaccgccagcttgccttctataccgtctgcagtaccatattttcaatactatagaaagttattgacggtaaatactaaagaatgggatattttgaaactacatagtctatggattccagacttaagaacggattttaaggattttgaactatgtcgtgatagagactcttcaagattgtatgatgacgattatgatgaagacaatgatgtgaaaaaggatcttttttttgaaaaaattccaggccaacagattttagatggtgaaggttatgttcccaaagaatatgaaatttcgtccggtagtttgtctattccttctttattttctgaagataagctcccagcattaacctaccattgtgctgtcgaattgaataaaaacgtttacatatttggaggattaatgccatgctatagttatgaagaggatgcaccacttttgaacgatttttttgtagatgggataaaaaacttacctcccccactattaccccaagtaatcaacaatccgtcaatggtcaataatcctcatctttatgtggccgctgtaccttcatgtcgttttagcaagcccaagatgagaggttatataccgcctccgttactctgtgttcaaggttccaaattaacagaacggcatattttcttttacggtggatttgaaatcagaacggaaacccgtggtgatgaaaatgggaaatatcatttaaaaaaaaggttatatgtgaacaatactggctatattcttgatattatatcattaaagtttaccaaaatagatgttatagtacagtcttctaaatataatgcatatccgactatgtcagcacgattcggtcatttgcaaatctccattgataaccagaatagaagaaatagcgttcattccgtaaacacgaacgagagtcatacagcgggatccgcttctatgaaacgagggcctagtatgtctaaagggcgactcgaaaaatcagcggtgctttcatccttatcacataatagtagcgcaccttatggtgtacacactatcataatatttggtggttatagacaaacgggcgatgaccgctacgaggcgatgaatgatttatggaagattgaaattcctgtgatgcgtcggggtaaaaagggttattgtaaattttcagagacggccaacgcaatacttttgacaccaagagagaaggacaagttagattggcctgaagaaagagcttttgcagctttttctcttcatggaacgtcgttgatggataggagcgcactagaaacgagtttactaagcaatttaaaaaaatacttcattttgaaaccgtcatatatatcaaaggaccgtgttattgatcctaagccagttttcccgatgatggtacatagtacgcatcaagatcttttcaatggcagttctgcaacggacgaaccttcaatttctggtgtcccccccagtagatcgagcgcggacagtactattggtcccgaaatgaactacgattttgataatatgacaatgaaaccaggggtgaacttgtcatctatccccatgagtacaataggaagacagagattaatactaagtcaagatatgcctatacgtaaaaacattatactacatggaggttccaacggtctcaatgtcctagatgatatgtggctgatggacctggaatgtgagacatggacacctatagagactttcacgagagcggaaccaagcaaaagcgtcgatgaaaagttagatactgtcaacgtgggactcgttggtcatgaaatggaaagcattggccgaatatgtgtatgtataggtggtatgttacaagaggatgtgaacgcactttattcgggggataatgatgagccttcaaaaaatcaaagtgtaaaaaaattaccgttgggtggtcattttctaaatacaattgacttgagtacgcagtgttgggaagaccaccagattatcttatccaagaaggaagataacgaagatgggagcgataatgaaaatgaggacgttaattcaaatgtagtggtcggtatcggcgggacttctttgcagtgtgacaagagcattgtaatgattggcggattaatgtcgagacgaacaaatttaaaagaaatatatttgcacggtacgatcctgaaaagtattttacctagtgtacatccaggaaattga

SEQ ID NO: 3393 - DNA, 474 bp, Saccharomyces pastorianus
atgggatgcaatcatgtggcaaaatttgggattgaagatatagatgatctgaacgaaaaaatcaaaaaagaaatccagatttcctcaggcttgaaacctccggtaaatacgatcgactcgttgaacagtgaactgtttgaaaaaactgctccttccgttgctcaaacatggagttcgtccttggataatttagaaaagctgtcatcggcagccgcagttagccaaaatttggactaccataccgttttacagcacggaaacttaccgggcggttccaaagaacaaacgccgctgaccgggatgaacagcctaaacaactcgatgaatgctacaccaatggctgacaattcatctggatcacaacttccaaatggattcgatcgaaatcaagcgaataacacacctttcccaggatattttggtggtttggatttatttgactatgactttttattcggtaacgatttcgcttga

SEQ ID NO: 3394 - DNA, 642 bp, Saccharomyces pastorianus
atggttgaaaacagtacgcttcagactccagataacggaaatggtgacggtgatattagtaagccatattccggggcattttccttaggcttgcataaaaccacgcctggattagaaggtgagcactcaagcacatcgcctgcccccgagaactccgaaatgcaaaacaggaaaagaaacagaatctcttttgtctgtcaggcttgcaggaagtcgaaaacgaaatgtgatagagagaaaccggaatgtggccgatgcatcaagcatgggttgaagtgtgtttacgacgtatcgaagcaaccggcacccagaattcccagtaaagatgccatcatatcaaggctagaaaaggatatgtactactggaaggataaagctatgaaactgctcaccgagagagagacgaatgactcgggtaaaagatcggcaagtcctaccaatacaaatgcggctaatggagaaagtcccgagaccaagaaattacacacaatggaaaacttgtaccagcaggattttaaggagagctcaagtaatggtgaagatgataccgaagtcaacctgtatagaagccatccaaccatgatcatgagcaggtatgaaagagaattagcctggctgaaactactatattcgatattttga

SEQ ID NO: 3395 - DNA, 1977 bp, Saccharomyces pastorianus
atgcaactgggcctttggcttagttttgcctctgtctgtgtatatattctttgtatatatatttattattttaattggaatcgcgaaatttcatatcagcaatactggatcaaaaaggtgggaacacaacaaaatagaacgctagtcatggtgcaacactggattagtggcggtaggcatctccacaacagtggcaacgacggtgaagatgacgacagcgaattcgcaaactcgatggattccggaatgaccataccgtccttcagggactccctgaccacaagatcatcgcaaaacgatcctttgaagcctgccatagtcaacgactccagtaaggtcaagcatttggaaaaggagctgaccagcgctaagatcaagatccaggtgctgtatgaatacatccgcaaaatttccagcaaggatgccagtttgccgtcgatgatcaacgacaatgaactcaagaattccacaatcgagggcctgaatgccgagatcaatagtttgaaacaaaccctacacacaagggaggtcgagtatcaagacacgctgcagttcgtgcaggaaaatttggaaaattcagatactatcgtcaacacaatcaacaatctactatcctttatattatcccatttcaacggcgacgacgatgatgcccatattattgatgatgaggagagaggggttttggacgagactctacaattgagctcagactatgtgctagagaaaatggacactctatctaaattcgttatcaagttcttggaagacttcttgcagggagctcgaacgcagcctgaggagaaggtcacttcactggctcaatcttcacctgcgagatcacacctcgaagatcactcactgtctagtaaagaaaacctggatgaaaaggcacatgaggaaaataacaatattgacgtcgaaaatgtaatggcaaatagtacgtctttacctatattaaatagcgaatcccggtttgagaaaaccttggacactcagttagagattgtcattgaaaacctacacaaggaatatgaccagtttattaattctatcagattgaaatttgaaaaatcgcaaaagttggaaaagctattagcgtccaaactaaatgaacaatcccttttactagattccttagaattgaaggaaaattcgaatgctaccatggagaaacaagacttcttgatatctcaattaaagcagaaaatacactcacaatctgtaatgatggaggagtttgaacacatgaaggaaaatttcaatagaatggaacaaaatgagaaaatattgaccaaagaattggaaacccttacgaaaatcaacaaattaaaggaaaacaactgggataattacatcaatgatctggaaaagcaaataaacgatcttcaaatcgacaagtctgaggaattcgagatagtacaaagtcaattagacaaattggatttagaaaattatgaattgaaaaaccggataaatactctggatggtcaaaatctggtgctatcacaatatgaaacaaatttcatcaaattcaatcagaatcttttattacaccttaataacgttttccatattctacagaaaatcttacaagaaagctccatcatacaatttgacaaaaaaatgaaatcaataaactcaataccaaatgcattgaaaaatttgaacgtaattcaaccaaaactagaatcgttgtacacattcatagagaccgccttagagtccataatagattcctacatctcctcattaatagccacgggttcttcagaacaacaacagagcaatgaagtaatagcaaccccaaataaagaattgaacctacgaatagaagagctacaaagaagatggatttccgaaagagaaagacggaaattagatgcaaacgcttcagaagctcgaatcagagctttagaacaagaaaacgaatcattaagatcgaagctttttaaattatcaattaataattcttaa

SEQ ID NO: 3396 - DNA, 339 bp, Saccharomyces pastorianus
atgctacgttccagattggtgaagacagcttgctggccaaggatcctaacggggccaaagctgtggtactctacgcaggtggccatgaccccggaggagaagatgatcaccgataaactgcaacaggagctgcagccggaagcttgcaaagtgcaagacgtatccggtggttgcgggtccatgttcaccatcaatgtcactagtaagaagtttaacgggctgactctcatcaagcagcaccagctggtaaataggatcctgaaggaagacatctctaggtggcatggcctgcaattgaccactaagaaggtaagcgtgaagaatccgaaatcgtcgtga

SEQ ID NO: 3397 - DNA, 423 bp, Saccharomyces pastorianus
atggtttgtagtggccaaatgaaagaaacttgtcaagtctcggaaatgacaaatcaaaaagagaacagaagcaaggcagaacaaagagcgatgttcaggcaagcaatgagcaccgagggtcccatggcgcaggccatcttaaaacaactggaacgtagtttcccagactacaggtcctttgcgtttggactgtacaacgactcgtacaagcacaagggccatgctggcatgcagggccttacctctgcagagacacacttccggatcgagatggtcagcaagagattcgagggtgtgaaactaccacagcgccaccgtatggtgtactcccttttgcaagacgagctggcccagacgaatggcatccatgcgttgcagctgtcattgaagactcccgaggagtacaagtccagggccaagtag

SEQ ID NO: 3398 - DNA, 513 bp, Saccharomyces pastorianus
atgctacgtaccactagactatggactactcgcatgcctgccgtgggcaggctgtttctaagaaacaactccagcaacgctctgaacaagaacaagctgcccttcttgtactcatcccagggaccacaggccgtgagatacacagctcagcatgaatggatagctgtgcaccaggacaaaatcgccttcgtcgggatcacgaagtatgctaccgacgccctgggggacgcgacctatgtcgagctgccagacgtgggcacccagatcgcccagagcgagtcgctagggtccattgagtctgtcaaatcagcctcggagatctaccagcctgccgatggtactgtgcaggagatcaacacccacctggaggagaacccgggcgtggtcaacgaggaccctatgggggacggctggttggttaagatgaagctggacgacaacgtcaacgtggaacaggtcgagggcctgatgtcgctggagcagtatgagaagacactggtccacgacgattaa

SEQ ID NO: 3399 - DNA, 2406 bp, Saccharomyces pastorianus
atggttgctaacagcaggcacagagacagcaggagcagtgcaatgtcgtcagcagagatggagcagttgctacaggccaagacgctggccatgcacaacaacccgacggagatgctacccaaggtcctcgagaccacggcgtccatgtaccacaacggcaacctcagcaagctgaggttgcccctagccaagttcttcacacagttggtgctggacgtggtgtccgtagactcgccaattgccaacacggagaggccgttcatcgcggcacagtacctgcccgtgcttcttgccatggcacagtccaccacggatgttctggtgtacaagaacatcgtgctcatcatgtgtgcgtcatactcgctggtgctagacctggtcgccaagacgtcgaatgcggagacgttcgaccagctgtgcgcattgaaggcgtttgtactctcgcactggaggactgcgtacccgttgcaaactaccactcacgacgagggcgacgtcgagccatggctggcacagatcgataagaacgtgggtgtcaagctggccacgatcaagttcatgtccgaggccgtgctggctcagaccaagtcctccaacggcaacgacatcaactccgccagcgtccccgacaaccaccctgtgctaaaccggtcggcactggagaacgaggccaagaaactgctggacacgctgctaaactacctcatcgaggagcagtacatggtctcgcctgtctttatcggcatcatcaacaccctgtccttcatcatcaagagacgtccacagacaaccataagaattctttccggcctcttgcggttcaacgtcgacgccaagttcccgttggagggcaagccggacctgaactacagattgtccaagaggtttgtagagagagcgtacaagaacttcgtgcagttcgggctgaaaaaccagatcatcaccaaatcattgtcgtcgggctcgggctcaggctcatcgatctattccaagttgaccaagatctcacagacactacatgtaattggtgaagaaaccaagagcaagggtatcctgaacttcgacccctccaagggcaacagtaagaaaagtttgtccaagcaggataaactgaagtacatctcgctatggaaaagacagctatctacgctacagtccaccgcggccgtggaaaggaaggcctctttgcccgttcctgccctcacagtagtagcctcaacggaaaacatgctcgataaattgaaaatcctacagaaatacaccctcaacaaggcctcccaccagggaaaccacttcttcaacaactcgcccaaacctatcaccaacacgtactcgtccgtgtactcgctgatgaacagctcgaactccaatcaggacgtgacccagctgcccaacgacacgctgatcaagctgtccacggaggctatcttgcaaatggacaccacgagactaatatccgggttgtctatcgtcgcttcaaggtacacggacctgatgaacacgtacgtgaactcggtaccgtcctcgtcgtcctcgaagagaaagtcagacgatgacgaagacgatgacgacgtaaacaacggcgacgacgacggcctggcggacaacagcaagaaagtcaaagtcgaggtagaggagccaacggaggaccccgaggatcccgaagacgacgaccgcatgcaaaagatgctacaagatgaaaccgctcaagaggacgcgggcggtgccacccgacccagctccaccgcgagggagattgcgccccccttccaacctgactcattgacgcaggatgaaaagctaaactaccttaccaggctgaccacgaagttgtttgagctgtccaaccgccaggactccaccccagcgtcaaagtcgctgccgccctcccccatcctactggacgacgacgactcgtcgtcgtggctccacgtccttataagactggtcacgaggggaattgcagcccaggaggccagcgacctcatccgcgaacaactgctcgccttcttcatccaggacttcgagcagcgcgtcagcctgatcatcgagtggctcaacgaggaatggttcttccagacctcgctgcgccaggaaccggccaactacaacaagtggtccctgcaggtgctcgagtccctggggccgttcctggaaaacaaccacagacggttcttcatccgcctcatgagcgagctgcccagcctccacgccggccaccttgatgccctcaagcccatatgcctggacccggccagaagttcgctggggttccagacgctcaagttccttgtcatgttcagacccccagtgcaggccattgttcgcgacctgctcctccagctcaagcaggaggacgaaggcttgcacaagcagtgcgactccctcttggacagactgcaatga

SEQ ID NO: 3400 - DNA, 171 bp, Saccharomyces pastorianus
atgcgtccagcgacagcaacgtggacctcttcatggtgtttgtgtatctcgatgtgtcgtgctctgctgtgctgggaactctctttcgatctgctttattataacgtggtttcttctttattctggtggaaaatcgccgttctagcgccctcctcgtatagagcgacgtga

SEQ ID NO: 3401 - DNA, 105 bp, Saccharomyces pastorianus
atgtccagttgcagctccccagagtcgtccatgatgtcgaggttcaccaggtcgcatggcatcgacgggaacgtcacgtccacgttcagctccagcttcgcgtga

SEQ ID NO: 3402 - DNA, 525 bp, Saccharomyces pastorianus
atgattctttttttaaacagtagagacttgcaaagtgttggagtgaccagcaccggccttgaaaccttggatggagacgtaagtgtcgttgtccttcaagataccgaattccttagccttttgaataccgaagttgatacgggcttcaacatcttcagtccagtcagagacagcttccttttcgaaaacgaatgggaagacacctctgtacaagtgagagaatctggcggctcttgggcatctggtgaccaagatgattggacagtttggtctgtacttggaaaccaatcttggggtgttaccggaagtggacaagacaatgatagccttggccttttgttcgaaaacagcggcgacagcagaggcagcgacggtttcggtggtagaggttggctttggagtacagtttctcatgtcatcgtagtttggcaagtaagcaatagcttgttcggcaatgacagcggtttcagccatggtggtaacggcgttgattgggtagttacccttggcggtttcaccagataa

SEQ ID NO: 3403 - DNA, 1233 bp, Saccharomyces pastorianus
atgggtttgtgttctcctgaatctgaaaagtctcaattaaacatggactacacttcaaagaacggttcgcaatccatttttaagcaccttaaccggcatctgaaactcaataacaacaataacaacgacaataacaatttgaacggcgcaaacatgagcagttatagcaatcactcaccatacgacccctcatacgacgcaaggatcaatcagaacccacaaaatagcggcaccggatgcttttctggcagcattgactctttgatggatgagcacataataccatcgcctcctttgtcacccaaagaggagtcggatttccagcacgatgcttcatctcacatatcctcgtcagcactggtgggtgccacgcccaaggggcctgtagagaatgtgttgaccgtaaagcctgcgtggcccaatgggttaacaaggaagagataccgctacgccacttatgggtttttgtcccaatacaaaattttcagcaatttggcacaaccatattccaagaacatcatcaataggtataacaatctggcctataacaacagatacaagtattccaagtataacgatgaattaaccccttcttcttcaaggttaccttctccgctagcatccccgaatttgaacagacaatcaagatataatatgaggaaacaggtcctttacaacagcaatctgggcaagtttgaatctgacactgaatggatatcaagggaacgcaaagtgtactcaccgcaaagaaggacaatgacgaccagtccacaccgtgccaagaagttttcaccctcagcatccgcgcctcatactaatattgcatccatggaggccatccatgaagcccctcaatacgttcccaatatctcatggaaaaaactgcctgatttctctccaccattatccacgctacctccagacactaacaaatcactcaagatcgagtggaaggggtctccgatggacctgtccgcagacccgctgagggacgaactgcatcccgccgaattggtgctggctcaaacgctaaggctaccttgcgatttgtatttggattccaagaaaaggttgtttctggaaaaggtttatagattaaggaaggggttgccgtttagaagaaccgatgctcagaaagcttgtaggattgatgtcaataaagcatcaagattgtttcaagcttttgagaaagtcggctggctaagggattcgaattttacaaaatacttatga

SEQ ID NO: 3404 - DNA, 462 bp, Saccharomyces pastorianus
atgtcgtcttcaagtagcctcaacttgccaagtgagacctttatgaagcttatatcatcgaatttttacagtgggaaatctaactccgtcgaaaactacaataatacgctaagattaaatattattatatcgagtacttttaaatcattaaacagaaaaaaaaaagagaatgtgtatagtagtaggcatatttttggggacataggctggtgtggtagtagtgagtgcgtggactacctcaatttgtttctgatcttagtggctattcgatgccctgcagattctttgatgtcgatcccaaatggcatcatattagtctctgcattagttgcaccgttttccaactctaatccatctcgaagactttttctgaaggtgaacccttcttcttgtcttaacgtgctatacttggacttatgttgtaatggcttgatcattgctgaggcaggtattggtggatag

SEQ ID NO: 3405 - DNA, 228 bp, Saccharomyces pastorianus
atgagagacaacataaataaagtggcggagagaggtgaaaggttaacgtctattgaggataaagccgataacctggctgtctccgcgcaaggttttaagaggggtgccaacaaggtgaggaaggccatgtggtataaggatttgaagatgaaaatgtgtttggccctcgtgatcatcattttgcttgtcgtcgtcatcgtacccattgctgttcatttcagtcgataa

SEQ ID NO: 3406 - DNA, 114 bp, Saccharomyces pastorianus
atgtcgtcgtctactccctttgacccttatgctatgcccgagcaggatgaagagcggcctcaaaatgttcagtccaagtccaagactgctgaactgcaagctgtaagtacataa

SEQ ID NO: 3407 - DNA, 1587 bp, Saccharomyces pastorianus
atgctagatgtcaagatgagttcccgtgctgacactgataaccccaaacatttcaccctggtagcgcctgagcctgcactggccgatacgcatgcagaagagccaccacgttccagagaggagtttgagccagagggcaacgaacacttggatgacgacggcgacgacgattacgaaagacagcactctgtgtccattgaaccgctagacacattgccactgaagaaaaaactacgaaacttctcgtacattacctttttcacgatagggataggtctcttgtggccatggaattgcattctcagtgcgtcgcagtacttcaagcacgacattttcaaggacacgtccatttgggccaagatcttcacaagctctatgatgtccttctcgaccatatccgcaatgctgttcaatatctatctggccaggagacagtacaagtactcgagaagagtcatgaacgggcttgtatgggaaatcatcgttttcctcgtcatgtgcttcttcaccatcctgcattttctcttacccaaatggttcaacttcatgttcatcatggggctcgtggtcatcagttccatggggacggccatgacacagaatggtatcatggccatagccaatgtcttcggttcggagtacagtcagggcgtgatggtgggccaggccgtggccggggtgctgccttcgctggtgctttttgccctgtcgttcatcgaaaactcgtctgtttccaccacgggaggcattctcctgtacttcttcacgaccacgctcgtggtcaccgtttgtgttgtgatgttcagcgtgagcaagatcggcaggaaagtggccgagagctggaacgtggaagatggacgcctcagcgacgtcctggtagggtccttgcgctccagcgaggaagaaatccgtattgtcgggcggattgaccaggtggacgacgatgacgatgacgaccacgaccatgaccacggccacaacaacaacagcgacgacgacgacgagggtgaagagctccaactaaaggtccccttcgaggttctgttcgccaagctgaagtatctggtgctttccatattcaccaccttcgtcgtgacgctcgtcttccccgtgtttgcgtctgccacctacgtaacgggcctacccttgactaacgcacagtacatcccgctcatcttcacgctgtggaacctgggagacctgtacggcagggtcatcgccgactggcccatgttccgtgaccagaacttcaccccccgcaagacgttcatctactccctgctgcgggtcgccgctatcccgctgttcctggtgttcacggccattacctcctcctcaagtggcaacgaggaccgcaacggctccgtcgtcgtcgacctgtgctacatgcttctgcagttcctgttcggcgtgaccaacggccacgtcatctccatgagcttcatgaaggtcccggaacagctggacaacgacgacgagaaggaggcagctggtggcttcaccaacatcttcgtctccacgggtctggccctaggtagcatcctcagctacgtcttcgtcttcgtcatcgactccatcatcagatag

SEQ ID NO: 3408 - DNA, 1194 bp, Saccharomyces pastorianus
atgagtcagcacacagcacaggagagtgaacagactgcggcgaaggaacaagatatcgatcaagagagcgtgttgagcaacattgacttcaacacggatttaaaccacaatttgaacctatcggagtactgcatatcgagcgacgcagacacagagaagatggacagcaacgaggaaacgtcgctggccagcctgccggagctgaggtacgcccccaagctggcgagcctggtgaagcaggagacgcccagcgacagcgtgaaacgaccacttcaggacgaagtggaagtgtacgaggagcatgaagacacgaagaagaagatcaaggtggcagagaaggaggaaaaggccgtggtggacgggaaagagaagagcgtggacctcagagacgagcagggcgacgagggcgacaatgaggaggagaacaacgaggaggagattgataacgaccacgagcacacggcgccgcccgtagcggtgatgccctcgctcattgaggtcgaggagcagcggatgactgcgctcaaggagatcaccaacatcgagtacaagtttgctcaattgcgccagaagctgtacgacaaccagctggtgcggctgcaaacagagctgcagatgtgtctggagggctcgcatccggagttgcaggcgtactactcgaagatcgccgcaatccgcgactacaagctgcaccgggcgtaccagcgacagaagtacgagctggcatgcatcaacaccgagacgctcgccaccaggacgttcatccaccaggacttccacaagaaggtcaccgacctgcgcacacgcctgctcaaccgcaccacccagacgtggtacgacatcaacaaggagcgccgcgacatggacatcgtgatcccggacgtcaactaccacgtgcccatcaagctcgacaacaagacgctgagctgcatcacgggctacgccagcgcagcgcagctgcgctaccctggcgagcccgtggcggaggacctggcctgcgagggcatcgagtaccgctaccgtgccaacccggtcgacaagctcgaggtcatcgtcgaccgcatgaggctgaacaacgagatcagcgacctcgagggcgtgcgcaagtacttccactccttccccggcgcacccggcctgaacccgctgcgggactccgagatcaacgacgacttccaccagtggacccagtga

SEQ ID NO: 3409 - DNA, 1914 bp, Saccharomyces pastorianus
atgcctgctgtgttgagaaccaggtccaaggaatcctctgtggagcaaaagcctgctcccaggacaagaaccagatcgaaaaggggcaggcgtggccgtggagacgatgatgagggcgaagaagatgaggaggaaagtgacggtgggtactacgaagtcggtggcgactacgatgaatacgcctcaagatcgaagctggcggacaacagaccctttgaaatagtagcgggcctgcccagcagtctggacgtgcctaactataactcttcgctcactcatccattatcggtaaaggactctggggttctttacgactctctagtcggttccaggagaacctggatacacggcgaaatgtttgatctctattggcgaagacccaaaagaatcattaacgaggctacgtccacgcctacgctggccccagcaatggacagcccaacgtccggtggtattccattgatacgagataagatgcagaaaatgtgcgattgtataatgaatggcggacctcacagcttcaaggttaggttgttcatactgaagaatgacaaaattgaacaaaaatggcaggaggaacaagattcaaggaaaagagaaaaggaactgaaaaggaagaacgatgcagaggccaagaaaacgagaatggaggagaggaaaaagcaacaattgcagaaaaaactggccaaagaacagaagttacaactgcaaaaggaaaataaagctaaacagaaactagaacaggaggcactgcgattgaaaagaaaggaagaactgaaaaaactgaaagagcaaaacaaaaataagcaaggctcaccttcttccatgcacgatccgagaatgataatgaacttgaacttgatggctcaagaagatccaaatttaaacactctaatggaaaccgttgctaagggtctagccaataatgaccaactggaggaatttaaaaagtttatcgagattgccaaaagaaggtccgtgcaagagaacctaaccaatcaccgttctcccactacagtagtacgacccccagccctgtctgaagataaaaacgtgtccgaggcaaatcgactgaactcgataactttggtgaaaagtactaaacccactacagccgaactccagccaaagaacaatgaagatatgaagaagcagccatccaaagagggaaacacaacggcagatgttccccaagtaaaagtaaaagcagaagaagaagaagaagaagaggatgtgaaagaaaaggatccaaaaaagaaagaagaaaaccccaccgtaccgaaaaggaaaagaagaaaccactcacaaaaggaagataaggacatgcagttaaccgcatttcaacagaagtacgttcatggcgctgagatcgtcttggagtttttggaatttactcattcaaggtattacttacccaagaaatccatagtagaatttctggaggatactggcgaggttctaatatcttggattgtcatccataaccttaaagagattgagaaattcaaaaccaaaaaactgaaattgaaagcgaaatctaaaacaaaaaaaccacaggaagatgatactaagcaagagcctggactcgagaaagaatccgagaaggaatccgagaaggaacccgagtttaaccctcttttcgaagatgattgtccgatcccactttacacccccatgactgtgaaattatcggggattcataaaagattcaatcaaattatccaaaatagcgtttcacccatggaccaggtcgtcaaagagatggaaaagattctggaaactggtacaagattgtctggttataatatatggtatcaactggatggatatgacgatgaagctctaagtgaaagcctgcgctatgaactaaacgaatgggaacatactatgagaagcaagaggcacaaaaggtaa

SEQ ID NO: 3410 - DNA, 237 bp, Saccharomyces pastorianus
atgcttcatatcaccctgcacttccgggtcgttgaagtttctaccgatcaaacgcttggcatcgaacacagtgttcgaagggttcatagcagcttggttcttggcggcatcaccgatcagtctttcagtgtctgtgaacgcaacaaaagatggggtagttctgttaccttggtcgttggcaataatatcaacacgatcattcgaaaaatgagcaacacacgaatatgtagtacctaa

SEQ ID NO: 3411 - DNA, 123 bp, Saccharomyces pastorianus
atggttgaccaatctgttgtcgaaatcttcaccacccaaatgagtgtcaccagcggtggccttaacttcgaagataccgtcttcaatggacaacaaagagacatcgaaagtaccaccacctag

SEQ ID NO: 3412 - DNA, 207 bp, Saccharomyces pastorianus
atggtcgccaccgtcaaggctatcaccatggaaggtttgacctggggtgctcaccaattcatcccaattggtttcggtatcaagaagttgcaaattaactgtgttgtcgaagatgacaaggtttctttggaagacttgcaaactaacatcgaagaagatgaagaccacgtccaatctaccgatattgctgctatgcaaaaattataa

SEQ ID NO: 3413 - DNA, 96 bp, Saccharomyces pastorianus
atggcattcaccgatttctctaagattgaaactttgaaacaattaaacgcttctttggctgacaagtcatacgttgaagggtatgttccgatttag

SEQ ID NO: 3414 - DNA, 3819 bp, Saccharomyces pastorianus
atggaacaaaacggccttgatcatgatagcagatccagcatcgataccatcaatgacacccaaaagagttttttagaattcagatcgtatactcacttgagtgaaaaattggcatctaacaccgcatttccagcatcacaaccgggggacgatgaggggcctaaaggggtggcaactgcaatatcacaaggttctgaatctgtagtctcatggacgactttgactcatgtatattccattctgggtgcctatggaggacccacttgtttatatcccacaaccacatattttttaatgggtacttctagaggatccgtactgattttcaatttcaacgagcatttgcaaacaattctagtaccgaccttatccgaggaccctgctgcccattccataagaagcccagtaaaatcgattgtcgtatgttctgatggtactcatgtggccgcctcgtacgagagtggcagtatatgcgtttggaatttgaacgtggggtatagagtcaaaactgctcatgaacccaccagtggtatgacccccaccccatctataccggcaattttacatatcgacgaccacctaagcaaagagattacgggcttagatttcttcggaactcgacatactgcactcatagtcagtgacagaacaggtaggatatcgctttataatggttatagaaggggattctggcaattagtttacaattccaggaaaattttagacctcaattcccacaatgaaagattaataagatcgcggctgtctcccctaataacaaaggacaaaaactccactaatttgttaagtgtactcacaaatacccattttgcccttctttcattatccccgcatgtttctttagtatgtcaagaaccaattgaatcctcaatacgacattcccttgtggtgaatagttccatttcatggacatataactcttccagagtcgcatattctgtaaataataaaatttccgttatttctgtgtctttatctgacctgaatgttcaatccattcagcattcttctgagtttccggaatctatattatctattcaatggattgatcagtttcttttgggtgtcttaaccatatctcatcaatttttagtactggatcctcaaaacgatttcaaggtcttactaagactagattttttaattcacgatttaatcatccctcctaataaatactttgtgataagcagaagaagtttttacttgttaacaaactactcgttcaagattggcaaatttgtttcttggtcggacattactttaagacgaatattaaaaggtgattatttgggcgcattagaatttatagaatctcttttacagccttattgtccattggccagtctgttaaagctatacgaaagcccagaagaaagaactaagcaacttatggaaccattttataatttgtctctggcggctttaagatttctaataaaaaaagacagtgcagactacgatagagtttaccagctattaatggttgtcgttcgtgtttttcaacgatttcccataaaatcagattcaattccttccctgaacgtctttttggagcaagctctggaattttttgaacccaaagacactgcggtatattttgaagttgtagcaaacattgttgctcaaggttctattacgtcaatctccccggttcttttcaaatctgtaattgattattacgccaaggaagaaaacataaaagttattgaagatttgattattgtgctagatcccgttaccctagatgttgatctagcagtcaagttgtgccagcactataatttgtttgacctgctaatatacatctggaacaaaatatttgatgattaccaaaccccgctggtggacttgatatacagaatatccaaccagaacgaaaaatgtattatctttagtggacctcaagcacctcctgagacggctgtctttgactatctgacgtatattcttactggcagacagtatccacagaacctgttcatatctcctagtagtaaatgtattcaaatacaaaaagaactgtccaagtttgtttttagtggttactcagtagaatggccattgaacagcgaccagaaactctatatatgtgaaaatccggaagaagaacccgcatttccctattttaaccttttgttaaaatttaatcccaacagatttttagcaatgcttaatgaagtattcgaagcctccttattcaatgacgataatgacatgatgaaaccaaccgaagaaactgagtccgtcagtaggcaatatattatcgacttgctaatggatgttataagaacctcagaacattctgatgatgtgaaagtgcttgttgctattttcattgcaaccagtatatcaaaatatcctcaattcattaaattatccaatcaagcactagactgcgtcgttaacactatatgctcttcaaaagccgaaggtacatttgaaatctcgcaactagctttagagtctcttctgccttactatcattcaaagaccactgaaaattttatattggaattaaaggaaagaaagttcaataaagtcctttttcatctttataagagtgaaaacaaatattccaacgcgcttttgctccttttagaaaccgataatgttgaaaaggaatataatactgacattctatccataaccgaatatatactcaagaaatgtccacctgcaagcttggaatacagtaaagtagttggtgttattgaaagtaacttcgaacttcttctttcaagagtcggtatcgaaaaatgcgtggcgatattttcagactttgactttagcctccatcaagaaattttgaaagtagagactgaagaaactcagcaaagatacttagataagctgttttctacgtcaaatatcagcaataaaaccgacaagcgtttgaggagtttatacatcgagttgaactgtaagtataagggcaaaaaggaaatcatatcatggttaaataggttagatctcaacaacggtgagagcttacatatcctcgacttggtaacccaaaactctaattttgaagctgcagctgtaattcatgaacgcttactagagttcaacttagcagtcaaagacttactggaatgtattgaacagtgcctcaatgaaggagaaacaaacattaatgtcttatctgattatttgaggaaggcaattgatgattgtaattccgctgctactgagaaaaagtcctgttggatattcttgattactttcctgattactttatacgggaactactctaaacatgatgacaagaaaaatttgtgcaatgaattgttgcaagaagcatttttgggactggttagatccaaaagttcctctcaaaaaaattcggggggcgagttttgggaaataatgtctttcgttcttgaacaccaggatgtcatactgatgaaagttcaagacttgaagcaattattattgaatgtcttcactacctataaattggagagatcgctctctgagttactccaaaaaataatagaagactcttcgcaggatcttgttcaactttataggaaatttcttaatgaaggttggtctatacacaatgatgattgcgaagtctgtgggaaaataatatggggcgccggtctggacccactactttttctagtttgggaaaaggtgcagcgccatcgggatatgattagtttagatctcgaaacgccgcttgtcatatttaaatgtcatcacggttttcaccagacttgtctcgaaaacctagcccaaaagcctaacgaatatacttgtttgatttgtgataccaagtctgattcaaagtga

SEQ ID NO: 3415 - DNA, 3330 bp, Saccharomyces pastorianus
atgatgaaaaaggacatcgaagtgtactgtgataatgctatggtttccaaaaatgtgcaagatattataagcgatactgatcagtcgtactcagttggaatcactgaggatagcttatggacattattaactgggtacactaaaaaggaatcaactattggaaattcagcatttgagcttcttcttgaagtcgccaaagcaggagaaaaagggatcaacacgatggatctcgcccaagtgactggccaagatcctagaagtgtgaccggccgtatcaaaaaaataaaccacttgcttaccagttcacaattgatttacaagggtcatgtagtgaaattgttaaaactgaaaaagttcaatcacgacaagggcgatgataatccctatattaacatcagagatcacttggcgacaattgttgaagtagtaaagagatccaaaaatggtatccgccaaataattgacctgaagcgtgaatttaaatttgataaagagaagagactatctaaagcatttattgctgctattgcatggttggacgaaaaggagtatttaaagaaagtgcttgtggtgtccccaaaaaaccctgctataaaaatcagatgtgtgaaatacgtgaaagacattccagattctaaaggctctcccacctttgagtacgacagtaatagtgcagacgaggattctatatcagacaacaaggcaggcctggaagatgaggactccgtcgaaggattagacaatttcaacgcgactgatttattacaaaatcaaggtctagtcatggaagatagtgagaatgctgaaaaaaacagaattcttttaaatcgattctttccattacagaatcagacatatgacattgcagacaagtccggtcttaaaggaatttcaaccatggatgtcgttaatcggattacagggaaagaattccagcgagcttttacaaaatcaagtgaatattacttagaaagcctagataagcagaagcaaaatacaggggatttcaggcttttccgtatatacgatttcgagggaaagaagaagtttttcaggctatttacagctcaaaactttcaaaaattaacaaacgcaaaagacgaaatctctgttgcaaaaggatttgatgaactaggtaagtcttatttggacttgaagacccttaacgaagataattttgttgcactcaataatacggttagattcaccaagaacaatgaacagcaagatgtattcttctggcacggtgacttgaagattccaccaactttgaaaaaaattccgaataagaataagcgtaagagacaggttaaggaaaatactaataatgctgttgctgaaaacagcaacaaggtttcggcacccaaaagaatcaagatcgagcagcatctcggcaccaagcatgacgtgacaggtactgaagataattcaagctctaacagaaagggctttataaaaggcaaggtggtcaatttcggcggcttttctgccggttctttgcgttcgctgcaaaggcagagagccatcttgaaagtgatggatgcaatcggtggggtcgcgtatttgagggagcaattttacgaaggcgtttccaaatatatgggttctccaaccacgttagataaaaagactgtccgaggagatgtcgatttaatggtagaaaataataaattaggtgcaagaacagagccaatatcagggcgaagaattatttttctgcctagcattgcagaggatgttattcaaagctatattttgagggagaaagatagcaaaaaagcaacctttactgatgttatccatgatacagatatatactttttcgaccaaacagaaaaaaatagattccatagaggtaagaagtcagttgagaggattcggaagttccagaaccgccaaaaaaatgctaaatctaatgttataaacgaggctgctgctcctaagagaggtacgttagccattgcatcagatgataaccgtaaaagcaaagacagaaagttatcagcgagaaaaacgccattggtcactgtaaccaataaggtaatcaagaccatatatcacgccggcactaaagaaggtgttcaggccctaatcagggctgttgttattactaaaagtattaaaaacgaaatagggtgggacgagataacgaaactatttcctaataactccctagataatctgaaaaagaaatggacagctcgcagagtgagaatgggccatagtggttggagagcttatatagacaagtggaaaaaaatccttgttatagcaattaaaggtgaaaagattttgctgaaggatgtagaggaactagatctttccaaactgctcggcgtttgggactcctttgatgagaaagaggtgaagagatcgctttacctttataagagctatgaagagaataggaaaaaattcactttgattcgtgacgatatatcggtgcattctaacaatgatcttgctatgtcgtctatgattcagagagagatatcttctttgaagaaaacttacacaataacggtttctgattttggtcccgaagacaccactaagatccgaagtgacgattacatccgtacagtgattcgatcaattttaatcgataattcttcaactgctagaaatgaaatagaagttttgaaagatgtcgaaaaggaatcaatagataatgtcattatggacatggctaaggaaaagcaggtctatctccatggttctagacttgaatgtacaaatacactaccggaagttttagaaagtaaagggaattacacagacttcgaagttgctttaaaatataggactaagtttaatgagttgctggaagctggaaatggtatcgtcatcgatcaagaaccgtctgacatatcttcctggatattgattgatctaatttctaacgacctattaaatatagatataataccaatgataaggaatgttcggccattaacttatacttcgagaagatttgaaatcagaacgcttacccccactttgattacatatgctaaatctcaagcaaaactaaacacaccgaagaaatcgattgtcaagattccactcggcaaaccattttcccgtttatgggtggacggttctggtgccattaggccaaaaatgtggaagcaggttgttactatcgtcgtcaatgaagtgaagtttcatccaggaataacattaaataggttacaagttaaatgccgtgacgtactttcgctcgatgaaatatcagaaatatgtgactggctttcaaaaagacaagtattgatgaacatgaaatatggtggtttctgggtagatcatagttggtattctatattttaa

SEQ ID NO: 3416 - DNA, 903 bp, Saccharomyces pastorianus
atgactgaggaagatgttagacgcgtagcgatcactatatatgcgaaaaaatgtgcagaagctgaggaggtgctgatgtcaccgctagtattcgacatgcatgacatccagcttctgcggaagtatggtatatgtggtgtgctgtctggaactttgcccactgcagcacaacagaatgtgttcttgtcggtgcctctgaggctcatgctggaagacgtgctgtggcttcaccaaaacaatctcgccgatgtgaagataataagacaagggggcgatgagataatagcaggaataacgccagaaaggggtgccaaactagccaaactggtggaagaccgcttaactaagtcgttcgattatcagacgaagtttaagaaggaccaacacattgcaaaattaaagaaaatcggtattatcaacgacgagacttccgcagaggaactacagcggttggacaaatctaacaacaacgaccagctgatcgaatcttctttatttattgacattgccgacaattcttctatcctaaaggacgatagtattgctttgaatagcctatcttgtgatgatattcgtaatttgttgtttaagcaatacgagcggtcagaaaagatgcagacatactttttgtacaaggcattgagagatcaaggatacgtcttgtctccaggtggtcgttttggtgggaaattcatagcatatcctggtgatcccctgcgtttccattcgcatttgactatccaagaggcgatcgattatcgtagcgagccgatcgacttgatatctatgataagcggtgcaagactaggcactactgttaagaaactttgggtcatagggggtgttgaggaagagacgggaagcacacatttcttctcggtggaatgggcaggtttcggttaa

SEQ ID NO: 3417 - DNA, 2181 bp, Saccharomyces pastorianus
atgagtaataaggaacagcatgttgatggggcttcagaaagtgctgtcaaggagatcaggtctatagctgctacgcgtgacggtggttacgtgcctccgttgatgacgtcgaagttgggcgtggactcttctcaatctcatgcgctgctgaatgatccgaccctaatagaggacttttcagatattatcaagaacaggcctaccatgggaagccagcaggcttcggggaacgaggattctgagagcatgggtgggagtgttgttgtgacgcccacatccaataagagctcacctttcaactcgaaactcagtatactaggtaatgcagcagaaaagacccatgcgcctttgcgacataaagacgacgacgacgatgtcgaggaagaggtggaggtggaggcggagaaacatacacacgaaggtagtggaaggggtcaacgacattcaaaagagaactccacagaactgcccggctcttacgattactcggattcagaatttgaggacaatttggagaaaaggctacaagatatcgaaacggaccctacggatagtggtgataatgaggaggaggtggaggaggagcagcattctgtggtagacgatattgcgaaccacgaactcgctgacatggacgattttagcgatggtttgaagtacgccatttccgaagacgaagacgaagaaggagaagaaaactactctgacgattacgattttgatagaaagttcgaagacgcggacttcgaaggtgaaagcggtagcttggacgaagaaaacgacgattatcaacccttgccgccaccaagagaactagatcctgataaattatatgcactttatgcgtttaacggacatgattcctcgcattgtcaactgggacaggacgaaccgtgtatattgctgaacgaccaagatgcctactggtggttagtgaaaaggatcacggacggtaagattgggtttgcgcctgcggaaattctggaaacattccccgaaagattggctcgattgaattgctggaaaaatgaaaatatgtcttcgcaatcggtagcttcgtcaacggattccaaggatgactcccataagaataacgagagtgatgcagacagtatgacccccacaccagcattgaagggatacgggaaaggtaacaagtctgttagcttcaatgatgttgttggttacgcagataggtttatagacgatgcagttgaagagaaatcctcggatagtgacgaagatggtgataacgagggtgagaaagacgacgaccatggtgatgacgacgatgatgatgcaaaagtaagacaccgggatgaattcactgaggctaagctgaactttaccaaatttgaggacgatgatatgagcgatgtagtgagcgatgtttccttcagtacgtctctgaatacacctttaaacgttaaaaaggttcggagagctaataataaaaacgacgtcctactcaaacctgtttcatcactagtaatgccactatcatccagtaatgaagacaaagatggactcaatgctaaccaagacgtaaaggacgagaaatcgaaaataactgatggtgagttcgatactgatttgaaaaaagttttcgaagcccctcgtatgccatttacaaacggaatggcgaaatccgattcccaaaactctctttcaacaattggtgagttttcaccttcgtcatcggaatggacgaacgattcaccttccgcaccagcggtggtagaggaaatcagtggtattccatcatctagagcaataaaggacatttcacaatatattcacccaagtttgaaaattcaagagtcgtcgaacaacgaaaacgtacaagatcaagcacaagacaagacgcaagataagcccaccccggaagctaccggagaaaagaacccccaagctgaagtggagcaacccaaagaggatacagaaaagcaatcaagcgtatcgctacattcatcatcagaggaagatttttacatggatgaacaaagagtgatatcttcagcaagcgtaaatagttcattttccggattaagggtaccttctaacaccaatgtatccgatccaacttctaagccacactccctggttcagcatctctatgctccagtttttgacaggatggacgtgttaatgaagcaattagatgacattattcgcaaatga

SEQ ID NO: 3418 - DNA, 213 bp, Saccharomyces pastorianus
atgaaggggaatgtctcctatacacattcagattcaccaaacagcaatggttcaaactcgcaagccaccggcacttctaatggtgcgtctgaatcatttagatttggtatggacccaactgtggaggggtattatattaaagcagcggaagtccaaaaacaggctctacgggagtactggaaaaaggagtatccagatgtcgaagtaccttga

SEQ ID NO: 3419 - DNA, 543 bp, Saccharomyces pastorianus
atggagtcccataacggcggtatcaatgacgatgtcaaactagacacattgaacagaggtatccctgatcagcctgatgcacctttaatttcggaagtcattgttcttcccgtggacgtttttaagtcgtacttcacctatttattatacgaaaaggctcacttttcaccagtagtgtttactttcgtggcactcgtgttcgtgatttttttgttcataataacccccccccacgataacaaggtttgcgatatcattcttctcgcatcgatggttgtaaatttcagttgttttgtgattgaactattacttatgagttatatgccactctgttcaaatgcgaaaataaaactgttgttggaggtaatagcgcataaaccaccagtagggggggtagaatggaagtttattacatacaatatgaaccaatatctctatgatcagggatcttgggggactccatacttttttcattgtgaatctgactgctatcgtcttttcattgtgaatctgactgctatcgtcttttcaaaacgcttatga

SEQ ID NO: 3420 - DNA, 735 bp, Saccharomyces pastorianus
atgcagtcagataatgatgtcaaactgaacacattgagtgaacctagtgcgcctttgatcacggagaatgttgctcttcccgatgttattttcaagtcccattttctctacctattatacgaaattgctcacaataaaccgttgatgattagtttcatgatacctatggttcccattttattggctttgacctttcactacgttgccgtttatattgtagcttcggtgctgtgtttctttggtttcatcaatattatttgtgtactaggaaccttcttccatgcgccaatctctgataaagaattcaaaataaagcttttactggaggtaatagcacgcaaaccagcgttaaagggcgaagaatggaggactattacatacaacacgaatcaatacttgtttgaaaatgatctatggaaaactccatactatttctataacgataaggagtgccatagttttttccaagaccttgttaaaacaggaagacgagttgttgcgtcggagggtccttcaaccaacgataataacaatacactgtcggatccttcaaccaacggcactgacaatacagaggatacaccaccagccgaggcttcgaacaatacagccaaatcgtatacttatagttctgacccgattctggaagcgtattttattaaagcagtggaagttgaacagcaggctcaacaagactattggagaaagcaatatccggacgtcgatatgccttga

SEQ ID NO: 3421 - DNA, 678 bp, Saccharomyces pastorianus
atgaccaaggccttccagaacggccgcacagaggccatccgctccgtgacgttgcagtccaaacagtttgttaagtcgctgctggaccaggacacctcggaccagaccaagatcgacctcctgcacgccgcgtgtgccgcgcactcaaagatcaccgcagagtgctcccgcgggctcggccaggaccgacacctatacgcgctctactgtatctggaaccggtggtacaaggacaagttggccctgcccccgctcttccaggacgggtcctgggccgcgatgcagaacaacgtgttgagcacctccaactgcggcaacccgtgtctcaagagcttcggctttgggcccgtcaccgccaacggcttcggcatcggctacatcatcagggaccactccatctctgtagtcatgtcctcgaggcaccgccagaccgcgcgcttcgcctcgctcatggagaagtcgctgctggagatcgaccgcctcttcaagcgccagttgcgggccgcaggccatgccgtccacgacccagccgcccaacgggcagagaacgaacagtacctcacgggcatccgcaaggaccgcgaccaggcagacccttctgcggcacacgccaaatccgaggacatgaagtatttgctgtccggctacgactacttcgacgtcagcgtctccgggtga

SEQ ID NO: 3422 - DNA, 1347 bp, Saccharomyces pastorianus
atgccccccacccccaagctgcaaagactacccgtcccgccgttacaggacacactcaaccgctacctggaacgcgtagagccgctgcaggacgagcgccagaaccgccgcacgcgccgcacagtgctctccgcggagaacctggacgccctgcaaacgctacacgaacggctgcaggactacgatgcacggctcgcagccagcaacccagaatcgtcgtacatcgagcagttctggtacgacgcgtacctgctgtacgacgccaccgtcgtgctcaacgtgaacccgtacttccagctgcaggacgacccgaccatcaaggacacgccggagacggccgcgcagggaccctaccgcgcacataccgtgcaggtgcgtcgcgctgcacggctagccacctcggtgctcaagttcatccgcgagatccgccgcggcacgctacgtccggacacagtgcgcggccgcacgccactgtcgatggaccagtacgcgcggctattcgggtccagccgcatcccgccgggccccggtgagccctcgtgccacctgcagacggacgccacctcgcaccacgtgatcgtgatgtaccgcgcgcagttctactggttcgacgttctcgacgcgcgcaacgagcccatcttcgcgacgcccgagcagctcgagtggaatttgtactccgtcatcatggacgcggaggccaacggcggcggcggcggcggcggcgccgctgcctccgccacctccacctccgccgcgcccttcggcgtgttcaccacggagtcgcgtcgcgtgtggtccaacatcagggactacctgttccacgcggcggaccgcaccaactggcgcaacctcaagctgatcgactccgcgctgttcgtcatctgcctggacgacgtggcctttgccgcggaccagcaggacgagctcacacgttcgatgctgtgcggcacgtcgcatatcaacctcgacccgcacgacctgcgcggcacgcccctcaacgtgcagacaggtacctgcctcaaccgctggtacgacaagctgcagctgatcgtgaccaagaacggccaggcgggcatcaacttcgagcacacgggcgtcgacggccacaccgtgctgcgactcgccacggacatctacacggactcgattctgagcttcgcgcgcggcgtcactaagaacgtcctggacatcttcggcggcaacgattctgcggtggcggcggcagcgactccgccgccgccgccaccgccaccaacctcattaccatcccgcgcaagctcgagtggcgcgccgacaatttcctccagtcgtcgctgcacttcgccgagacccgcatctcggacctga

SEQ ID NO: 3423 - DNA, 3471 bp, Saccharomyces pastorianus
atggaacaactcgacaccccctccgtggtcatcagcaagccgctgctgaagctgaaactcctcgatgccctgcgccagggaagctttccgaacctgaaggacctgctacaaaggcagttccagcctttggacgacccgaacgtccaacaagtgctccatctcatgctccactacgccgtccaagtcgctcccatgaccgttatcaaagaaatcgtccaccactgggccactaccggcaccacctttttggatatccatctcgatctaaatgaacaggattctaacggcaacaccccactgcacatcgccgcgtaccaatcccgtggtgatatcgttgccttcctcatggaccagccaagcatcaatgactgcgtgcttaattactctcgtctgcaagccatcgaaatgtgcaagaacctgaacatcgcgcagatgatgcaagtgaaacgctccacatacgtagcagagaccgcccaggagttccgaactgcgttcaacaatagagactttggccacctggagtccattctcgctagcacccgaaacgcagaactgctagacatcaacggaatggacccagagactggtgacaccgtcctgcacgagtttgttaagaaaagagacgtcattatgtgccgctggctgctcgaacacggcgcagaccccttcaagagagaccgcaagggcaaactgcccatcgaccatgtaaggaaagtcaacgagaacgacaccgccaccaacaccaagatcgccatcgacatcgaactaaggaagcttttggaaagggccaccagggaacaaagcgtcattgacgtcacaaacaatagcttgcgtgaggcccccacttacaagggttacttaaaaaaatggaccaactttgcccaaggttacaaactgcgctggttcatcctaagcagcgacggcaagctttcatactacatcgaccaagcagacaccaagaatgcatgccgaggctctttaaacatgtcatcgtgctccttacatttggactcctctgaaaaactgaagtttgaaatcatcggcggtaacaacggtgtcatcaggtggcatttgaaagggaaccaccccatcgagacaaataggtgggtctgggccatccaaggtgctataaggtacgcaaaagacagagaactcctgctacacaacggaacatcctcatcctctgcttccctgagctatggcttgtcgcctaataaagaaaaattacattttccaccaaagcggatggccaagagcccgcatatccccaaatccaagctggtacaagacacgggtaccggcgatgataaaccccacgcggatcccttgcccttgatttcttccagaagcgaaagtacgtgtgagatcacttcaaacccacattccaggaaatccacagtttcatctgcaaagtcatttgcaccattttctgccatggacgatgaccaagactctggtgaagattccgacgaggaccgtaattcttcatacgcagtgaataatgatggcgaaggtgacgacaacgatagtgaagaagatttaaacgccatttatggaccatacgtacaaaaactgcgtatgcttcaaagatcgatttccattgaattggcatctttaaatgaactgttgcaagatgaagaacaagtacacagcgaatactggaacaccgtcaacacttctattgaaaacgtttctgagttttttcaaagattaaatcgtttaacttcccaaagagagaaaagaatgattgcccaaatgaccaagcaacgcgacgtcaacaacgtttggatccaatcggtaaaagatttggaaatggaactggtagataaagacgaaaaattggttgcattagacaaagaacgtaaaaacttgaagaaaatgctgcaaaagaagttaagcaatcaaccacaggctgaaaacgaggttaacgatgattccgacgatgggaattcaatgttaaaagggtctcaggaatcaacaaatacactcgaggaaattgtaaaattcattgaagctacaaaggaaagtgacgaggattcggacgcagatgagtttttcgacgcagaagaggctgcctccgatgaaaaagccaaagaatcagaaatattacccacgaatgagaaacctccggttaaagaagaaccacaggaagaagctactgaagatgaaagcctggttgtgatcagctctccccaagtggaaaagaaaaatgaacttttaaatgaggggtcatttgtcggttatgaagatccggtaagaactaaattacccatggacgaagataatcgcccgaaagtgggtctctggtccgtattgaagtccatggttggtcaagatctaaccaaactgactttaccggtgtcgttcaatgaaccaacatcgcttttacaaagagtttccgaggatattgaatattcccatatcctagaccaagctgccaccttcgaagattcatccttaagaatgttatatgtagcagtattcaccgcatcgatgtatgcatctaccacaaacagagtttctaaaccatttaaccctttacttggtgaaaccttcgaatacgctagaactgatgggcaatatcggttttttactgagcaagtttcccaccatccacccatttccgctacttggaccgaatctcctaagtgggactttttcggtgagtgtaatgtcgattcctcattcaatgggcgtactttcgccgtacaacatttaggtttgtggtacattaaaatccgtcccgatcgtaataatggcgtttcagaagaaacgtattcctggaaaaagccaaataatactgttatcggtatcttaatggggaaaccacaagtcgataacagtggtgatgtcaagattacaaatcataccactggtgactattgtatgttgcattataaggcacatggttggacctcagccggtgcatatgaagtcagaggtgaaatatataacaaaaataatgaaaaactatgggttcttggtggacattggaatgattccatttatgggaaaaaagtgacctccaagggcggggaattaactttggatagaataaagacaacaaactccactactggtggaccgaaattagatggatccaagtttttgatctggaaatctaatgaaaggccctcagtaccattcaatttaacatcattcgcattgactttgaatgctttaccggctcacctgttgccatatttggcgccaacagatagtcgtttaagacctgatcaaagggctatggagaatggtgactacgataaagctgctgaggaaaaacatcgtgtcgaagtaaaacaaagagttgcaaaaaaagaaagagaacagaagggagaagagtacaaacctaaatggtttattcaagaggaacacccggttacgaagagtttgtattggagattcaatggtgaatactggatgaaaagaaaaaatcatgacctgaaggattgcgcggatatctattaa

SEQ ID NO: 3424 - DNA, 2298 bp, Saccharomyces pastorianus
atgcgaagaatacccatattttgtagcaccttaacaatgcccacgccttattactgcatatttttggctgttctcacattcgtagctaatattgtctctgcaagtacaacggcatgcttaccaacaaacgaaaggaaaaatgggatgaatatcaacttttatcagcattcattgaaggattcatctacatattctaacgcggtttatatggcttctggatatgccaataaggttcaaataggatccgttagtgggcaaactgacatctccatcaactataacattccttgtgttagttcatccggaacttttgcttgccctcaaggagatgttagtactaaaagaggctggtcgtgccaacgtaaggcttgctctaatgaccaaggtgttgcctactggagttcagatctgtttggtttctatacgaccccaacaaatgtaactctggaaatgacaggatactttttaccaccacagactggtacctacacatttagctttgcaacggtggatgattcagcagttttatcagtcggaggtgatgtcgcatttgaatgttgtgcacaagaacaacctcccatcacttcaactgactttacaatcaatggtatcaaaccatggggtggaagtttgcctcctaacatcgaagggtcagtctacatgtatgctaattactactatcctatgaaagttgtttactcaaatgctgtttcttggggtacacttccaattagtgtggaattgccagatggcactactgttagtgatgacttcgacgggtatgtctattcctttgaagatgacttgtcccaggccaactgtgccgttccagaccccccaaactataccactacaggaataatcaccaccacaacagaaccgtggaccggcgcgtatacaacgacagacactcagacctctactgttacaggtcccaatggtttaccaacggatgaaaccatcattgaagttaaaacaccaacaagtgtcagctcttcaattgccacatcgtctgatgcaaccagttctgctaccacatcgtctgatgtaaccagttctgctaccacatcctctgacgtgaccagctctaccgccacatcgtctgatgtaaccagttcaacttcttccacatcttctgctgtgactagctctgctgccaagtcaggaatcatcactactacaacagaaccatggactggtgcttttacaacaacgtctactgagatgtctactatcacaggtaccaatgggttaccaacggatgaaaccatcatcatagtcagaaccccagccagcgtcagctcatcttccgccgcatcctctaacgtgactagctctgccgccacatcagacacaattacaggctcgaaggatctaacatctatagtttcttcgaccaccacttcaaccgactctggctcccctaagccttctggatccacagctacggtaacaaacgaacaaactactttaatcacagttacttcctgcgagtctggtgtgtgtaccgagtctgtatcatcggctatcgtttctacagccacaactacggttagtggcgtgactacagaatacactacatggtgtcctatgtctaccacagagccaacaaagccaactacgttgattacagttacttcttgcgaatctggtgtctgttctgagaccacctctcctgccatcgtttctactgctacgaccactgttagcggcgtcgctactgaatacactacatggtgtcctatgtctaccacagagccaacaaagcaaactactttagttacagttacttcctgtgaatctggtgtctgttccgagaccacctctcctgccatcgtttctacggccacaactgtcgtcaatgacgctgttacagtgtacaccacctggtgcccattaacaaccaatacagcaacggttagcggaagtactaccaccggcgttactggtaactcagtaaactccgaagctgctgaaacgaaaaccgtgacccacggcaacggtgtgccttcgatttcagaatctggttatgctgaagcacatccaactactactgctcatgcgattggctatagcagtagtgttgcttcagtcccaggggccgctaacaccaaggaccatacaactacttacttaaacactgtctcgcaacaacctcgtagcacttccataagcggtgtagtaggatctagtaccgtttctttagaaatgtcaagctacgctggtattgccaacggtctactggctaatagtgctctaagcgcgttcattgcctccatgctgctggcaattatttga

SEQ ID NO: 3425 - DNA, 615 bp, Saccharomyces pastorianus
atgataaacccaaaattctctatgtctcaccgttatatgtttttggcggtatttgccttcctggctctagttaatgtagcttcaggaagcacaacggcatgtttgccagcaggcgtaagaaaaaacgggatggatgttaacttctacaagtatacattgaaggactccaccacatactcctacccaggatatatggcttacggttacgcctccgggcaaaaattaggctctgttggtggtcagacaaaaacttcgattgactataacattccttgtgttagttcatccggaacttttgcttgccctcaaggagatgctactactacgagaagaggctggtcgtgccaacgtaaggcttgctctaatgaccaaggtgttgcctactggagttcagatctgtttggtttctatacgaccccaacaaatgtaactctggaaatgacaggatactttttaccaccacagactggtacctacacatttagctttgcaacggtggatgattcagcagttttatcagtcggaggtgatgtcgcatttgaatgttgtgcacaagaacaacctcccatcacttcaactgactttacaatcaatggtatcaaaccatgggttgga

SEQ ID NO: 3426 - DNA, 1881 bp, Saccharomyces pastorianus
atgttcaatcgtttaaacaagtttcaagctgccgtagctttggccctttactcccaaagtgcgttgggtcaatcctttggcaacagctcttccactatcacctctgcctctaccgcaagtgcttccgctaccgtctcactttcttctagtgacggtactgtttatttgccatctactacaatttctggtgaccttacagttactggtaaagtgattgcaacagaagcagtcgaagttgcagctggtggtaaactgaccttgcttgatggtgaaaagtactccttcacatctgatctaaaggttgatggcgaattgatcgtagcaaagtctgaggctacttacgaaggtaccgctttcgacgtctcaggtgcaactttcgaagtttctggtaacttcagtgccgaagaatctgctgctacttctgcatccatctactccttcactcctggctctttcgatagcaccggtgacatttctctaagcctatcaaaggctaaaaagggtgaagtcactttctctccatactccaacgctggtgttttctctttgtcaaacgctattctaaacggtggttccgtctcaggtctgcaacgtagagacgacgacgaaggatcaaagaacaacggtgaaataaatctagacaacggaagtacttacgtgattgttgaacctgtctctggaaatggtacagttaacattatctccggtaacctttacttgcactacccagacactttcaccggtcaaactgtcaactttaagggagaaggtgttctagccgttgacccaaccgaaaccaacaccacccctattcctgttgtcggctacactggtaagaaccaaattgccattacccaagacgtcagtgtctcctacaacagcgaaaccggtgttttaactgcaaccaagggtaacgtccaattctctttcgctatcggtaccggcttctccagttctggcttcagtgtctccgaaggtctcttcgcagaagcttatgcttacttcctaaactacgatggtgttatcgcttctaccggtgctacatcatctgtttctgccacatccaccaccccatcatcctccgcctctggttcagccacttcagctagtgtctccacctctggtaaattcaactccacttctgtctctgactcagttacccactctggtgcttcatccactgcctccggttcagttacctactctggtgcttcatccactgcttctggttcagttacctactctggtgcatcatccgttgcctccggctcggttacctactctgctccatcttcagaaaccgcatccgtctacaccgaaacactaacttacgcaaatgccacaagcactgtcgtagtttcctgttcaaagacaactgactctaacggcaatatctacactattaccaaaaccgttccatgttcttccaccaccatcgccaccatgacttcttgtgatgacaatggatgccatgttgttccagcaccaacctccactggtgtcactgcaaccactgtttcttcaaagtcttacactaccatcactgtcactcactgtgatgacaacggctgcaatgttaagaccgtcacttctgaggctcctaaggaaacttcagtcaccactgccactaccattgctccaaaatcatacacaactgccactgtcacccactgtaacgacaacggctgtaccgtcaagactgtcacttctgaggctccaaaagccactacagtagttaccaagtctggctctccaatttctccagctacaacttctcaaacccacaccggtatcatcgttcaatctgaaggtattgctgcaggcttgagaaccaatgctttgagcgctttggttggtgcttttatttttgcctttttttaa

SEQ ID NO: 3427 - DNA, 3117 bp, Saccharomyces pastorianus
atgggcctcatcaagaaggtgacccattggtcgtacgataatctgattgattatctttctgtaaaccctacaagagatgaagtgtccctttataaagtcgatccggaaaatgaatctgatgagtctattatgaagttacgcaccgtcaaagatttcggtagtattacttgcttggactattcagagtcagaaatcggtatgattggggttggtgaaaagaatggatatttgagaatttttaacatttccggatcaaatttctcgtctttgacaaatcaagtgctaacgagctcaaacgccaataatgatggttctacagcaaatgcaggcgttagcaaatcaatgcaggcagaaaactccgttggctccatttcaaatgcaaaagacaccataggatatacggaatcggaaaccaactatgacatacgtgtgcgagccaaaaagcaacggtgtataaattcactgggtataaatacaaacgggcttatagccatggggcttgatcgaaataagcatgattcatctttacagatttgggacatgaattaccatgatgactcgcaagaaacgatcaacccaatgtttagttactgtacaaacgaaagcatagtatctctaaaattcctcaatgatacgagcatattggcttcaagtacaaagtttttaaaggagattgatgttcgatctcccagtccgatttatcaacatcccactcgattgacgtatgatatcaaattgaacccattcaatgattggcaattcagtacttacggagatgatgggactttagctatttgggatagaagaaagttgtctgaccagattacactcggtaacttgaatgttgcatcgcctttattgacatttgaaaaactggttggatctggcgcagcttcaagaaaatacatgaattcttgctttaggtggtcatgcattagaaataatgaatttgcaactctgcatagaggtgacaccataaagagatggaggttaggctattatgcccttgaaaataacgatactgaggctaatggtcgccaggaggaaaatgttgagaatatatttgtttcctcggtgcacgatacgaacacaatgtacgatagggtcgccactttcgattttattccaaaaggtaattgtggcacaagtttaatctgtatgagacaatctggcacaatatacagaatgcctatagcagaaataagctccaaggctattctaaataatagaaactctctcttattatctaatttcgagaactctgaaatagaagaaattagagtcaccaatgagcacgaaaaatccaatctagaaaatgtgaaaaccgtcaaaaaaaatttgtcttttgaagatttagacgttagtgacgattattttccatctgaacatgatgaacaaaataacgagattgaatattctgagttgagcgaagaagaaaatgaagaagaaaatgacgtccttggtagtaagcgtgggtttgaactattctggaagcctgaaaaattgttagaaaaggacattagtgtaataatgagaacaagagcgtcattgggatacggtttagacccaatgaatacggtcgaaatgatcgactcttctaaaaatctacaaaataacgcctatataaggaatacatggagatggattgcaatcgcgaaagcctctgtagatgatggtacaatggtttctggtgatcttgatttaggatatgagggggtaattggtatttggaatggtattaacggaatatcgaatcaagacagatataggcaagagactattctctctgacaaacagctcaataaagaaatggaaaaaatcatcaagttaagaaggaagaatagagaccgcaacactcctattgccaacgttgccgattcaccgaaatatgtacagaggagactttgtctgataatctcaggatgggatctttccaggtccgattacgaagacaaatataacataataatgaaaaatggccattatgaaaaggctgccgcatgggcggtattttttggagatattccaaaggctgtggagatattaggatccgcaaagaaggaaagattgaggttaattgccaccgctattgcaggttatttggcatataaggaccaaccaggcaataacgcatggaggcagcagtgcagaaaaatgtcctctgaattggacgatccttatttgagggtcatttttgcatttattgcagacaacgactggtgggatattctttatgaacctgctatatctctgagggaacgactaggtgtggctctaagatttttgaatgatgcagatttgacaactttcttggaaagaacgtcatccacggtgatcaaaaacggtgaattagaaggtttaattcttacagggataactccaaacggtatcgatctgcttcagtcttatgttaataaaacaagtgacgtccagagcgctgcactaatatcgatttttggctctccacggtatttccgtgatcagcgggtggatgaatggatacaaacttatagagatatgctcaaatcctgggaattcttctctatgcgcgccaggtttgatgttttgagatcaagactatcgagaacaaaaactggggtgttgactgccgatataaagcctcgtcaaatatatatacagtgccaaaactgtaagcaaaacattaacactcctcgtgcatcaccgccttccagtgcgacatcgactggtggtgggaactataaaaatggagaaacctatagaagaactaatagtgattacaaaaaattcaatactggtaactccgaaacgccaacggtcgatgaaaaaccaagacataaatactcttgtccacactgcggatctcccttcccaagatgtgctatttgtctcatgcctttgggaacgtcaaacctacccttcgtcatcaacgggacacaacagcgggacaaaatacggccggaagacttccaagatgatgctaaccgggaactagtgagcaggaaattgaaactgaacgaatggtttagtttttgtttaagttgcaatcatggtatgcatgcgggtcacgctgaagaatggtttgacagacacaatgtctgtcccaccccaggttgcacttgtcagtgcaacaagtag

SEQ ID NO: 3428 - DNA, 288 bp, Saccharomyces pastorianus
atgttgttcaaaccgaaaacacgggcaataccatcaccgacggcaagaaccctaccggtttcgttcaagttggcctcatcggacacgcccttgattctttcctctaaaatggaggaaacttctgtgggttgcgccttggtggaagccaatcttctggcggaggccaaagcagcaacaccagcggcaggtcttgcagctctggcggagtgcagtaaagttctcgacagagaacggatagcagcagtacgagctaacatcattgtatgtgcgttattattgctattgtga

SEQ ID NO: 3429 - DNA, 1431 bp, Saccharomyces pastorianus
atgacacttgaaacatacacgacctcaaacaaactatttcgtctgtatatgtctgaatcggtagctgttataggggcagggttagtaggctgtcttgctgcattggcattatctaaagagggatatcaagtcacactttatgactttagacatgatccaaggttggacaccactcaaaataaaaacttgaaatccatcaatttggcgatctctgcccgaggcattgatgcactgaaatcggtagattttggtgcgtgtgaacgcattttgcaagatatgattcccatgaaaggccgaatgattcatgatttgaggggtgagcaggaatctcaattgtatggcttacatggagaagccatcaattccatcaatagatctgtattaaataataaactattggatgaattagaaaagactacagcagagctaaaattcggtcataagttggcccgaatcgaatggaccgatgacaagcaaatatgtcattttgctgctgaggaagattcgaaggtaccaaatatagaaaaattcgacttcatcataggttgtgatggtgcttactctgctacaagatcacagatgcaacgtaaagttgagatggattattcgcaagaatacatggatttacgttacattgagctttatatccccgccaccaaggtatctaagcaggagtatggagggaattttgccatagcgcccgaccatttacatatttggcctcgtcacaggttcatgttaattgctctggccaacagcgacggctcgtttacttcgacattctttgggcctaaagatcaaatttcagatttgatcacttcagagtcacgtgtgaagaactttctagtcgagaactttcctgatattgtaaatattatggatctggacgacgctgtaaaaaggtttatcacatatcctaaggagagtcttgtttgcgtgaattgtaaaccatacgacgttcccggtgggaaagccatcctactaggtgacgcagcacatgcaatggtaccattctatggccaaggcatgaattgcgggttcgaagatgtgagaattctaatggaactgttgaaaaagcactcaggtgattgttcaagtgcctttgttgagtatagtcaaacaagacacaaagaccttgtttctattaccgaactggcaaagagaaattacaaggaaatgtcacatgatgttacgtcgaagcgtttcttgtttaggagaaagctcgatgctctattcagtgtcatgatgagagaaaaatggatacctctgtacacaatggtatccttcaggtccgatatttcgtactccaaagcgttagaaagggctgagaaacagacccgaatcttgaaatttttagaatctttggcaatcgggatattatccgtcagtagtttcaagcttttcaagtttttggccagagagcggtcctag

SEQ ID NO: 3430 - DNA, 2370 bp, Saccharomyces pastorianus
atgactacccaattaaggtatgaaaataatgacgaagatgaaagagaagagcacaacctctttaccaatagatccacggtgatggcaaattttgaagagtggatcaaaatggctacagataataaaatcaattcgcgaaatagttggaattttgcattgattgattatttttatgacttggacgtcctgaaagatggcgagaataatattaatttccaaaaggcatcagccacgttagacgggtgtattaagatttattcttcaagagttgattcagtgacaacagagacagggaaattgctgagtggattagcgcaaaggaaggcaaacgattcatctaatggaagcgacggtaccaacggaaatggtcaaggacttgaagatgacgacgatgaagaggcaaatgtgcagatcgatccattaactggtatgcccatttcgaatgaccctgatgcgaacaatacaaggcgaagagtttacaatcgtgttttagaaaccaccttggtggagtttgaaacaattaagatgaaagagttagaccaagaactaagcattgacccattgtttaagaaagccttggtagactttgatgagggcggtgctaaaagcttattattaaacacattaaatatagacagtaccgcaagagttatatttgacgcttccatcaaggataatcagcaaatgactcaagatgaagccattcaagatcaaagtcaagaagacgatccaatcgaagcaaacagtgtagtgaacagtgataatgagcacagccagtcactacttagtagctgtaacgattcaatgctaaacatttcagtcgcgaatgctccctcaatggaggatgagattttatcccttggtatggacttcataaaatttgaccagattgctgtttgtgaaatttcaggatcaattgagcaacttaggaacgttgtcgaagacatcaataaagcaaaaggtttcatagagaatgtgaatacgaaattcgataactttttgacggaagaagaactacaagaggctgtcccagataatgccgaagacggtatcgatgaacttgatatgggcatgcagcaggagctagaatatcctgacgataatcatgataatactccccaagatgaggagggtgatcaagatgatggaaaaagcgataccgtaggaggcatatttgaaaaagatctaatgacatattttgatgagaacctaaatagaaattggagaggaagagagcattggaaagtacgtaatttcaaaaaaatgaacacagtgagtaaaggagctgatgcattaacaaaaacaccagctcctgtaggagattctacgagtaaaaacatcgaaaatgacaagttaacggatgctaagaagaagagcaaacaaaaaaagactttagaaattgattttttccaaaaggatgatgggtttgaagataagatttttggacccaagggacgaacaaagattgatatgccaataaagaataggaaaaacgattcgcattatttgctaccagatgattttcatttttctactgataagattacaagattatttatcaaaccgggacaaaagatgagcctttttcaacataagagacattcggcgggcgatactagctcaagggttcttgacaaaagtacggcctctaccaatgctacaaacaatgatgcacctgctattgcagatgagcatttttgggcaaataactatgaaaggatagaacaagaacaaaaagaaatagaaaactctaaggaagttggcgatgtggttggtggtgcactggataacccattcgaagatgatatgggcggtatcgattttaaccaagcttttgaaggcgctgacaacagcgaggaagggagcgtgaaactagacttacaggatgacgaagaacataaattccccattagggacaacaaggtcacatattcaagggtctcaaaaaaggttgacgtgagaaggttaaagaaaaacgtatggaaatcgataaatagtttgatacaagcacaagatgccaaaaaagaggatacacttcctaaagaggatgaaacttctaaagaagtcgaaccacccaaaacagacgaaccccccaagacagacgaacctcttgaagaagatgagcgtcccacagtggacgagccttccaaagaggacgagcctcgcaaggaacttaaattttctgaaattatccaaggtataagtaagatgtactcggatgaaacgttaaaggacatctctacgagtttttgtttcatatgccttttacacttggctaatgagcatgggttgcagataaccagcacagacaattacgatgacttgatagtgaactatgaggatctggtgacagtacaaacagcgtcatga

SEQ ID NO: 3431 - DNA, 969 bp, Saccharomyces pastorianus
atgaaagtaatgatctcttttctttgtactccgaagcttctcaaagccttcggacttacgagatccttatcgccgaaggagaacagcttcgggaaaaaagtgcatataagaaaacaaggtattctgttccttcaacattggcattgcaaaacagatggtcatgcatccaaaatggctagaataataccacttttgtttaaactggtcaatagagcagtaatcttacccacggtggggtttacacttggcgttggcgcgtttgtgaaagcatggccagatgatgccggtggcctatcattgaatgatctaaaggcgcctttaaagctggccagcgcagcaaagagtcgacaacctatggtgctgcagagaacggacatccttgcacaagttgaagaaagcgaaatctacaaaaagttggtcaacgaagataatacagagcatattttattcagcgagaaaatacctagcggacatagagaataccatgtcggacaaggccttttgtttggcaagggaaagcttgaaatcgatccgttagttttccatgatgtggaccgcggtgaagtgaccgtgatttatcatttgggcactgagttggggaacagggaaggtaacgttcataagggcctactttcattgctattagacgaagcactgtgttactgcggtttcccgctgttacccagcaaaagaggtgtaacagcaaggctgtcactagagtttcttgaagacatacccgtggacacaaccattatgttaaaagcaagtgtcaaagagtgcaagggtagaaaatgtgttatcgagggacatttagaggagttcccatcagaaatggcctctggaaaagtgggtaaaggctggaacttattcagccccaaaaatgaagcagtcaaaaagtttgttaaagccaattgcgttctcgttgaacctacttggttcaggtacttcaattggctagacatgttttga

SEQ ID NO: 3432 - DNA, 303 bp, Saccharomyces pastorianus
atgtctagccaattgaagtacctgaaccaagtaggttcaacgagaacgcaattggctttaacaaactttttgactgcttcatttttggggctgaataagttccagcctttacccacttttccagaggccatttctgatgggaactcctctaaatgtccctcgataacacattttctacccttgcactctttgacacttgcttttaacataatggttgtgtccacgggtatgtcttcaagaaactctagtgacagccttgctgttacacctcttttgctgggtaacagcgggaaaccgcagtaa

SEQ ID NO: 3433 - DNA, 510 bp, Saccharomyces pastorianus
atgcgagattctcatattcaatcattcttcaggttaacgtttcttgaatctgttatactaacaaaatgtttccgtttgcaaatcttttttgctcgttttttctatttttttaatcagatggcctccttacctcacccaaagattgtcaagaagcacaccaagaagttcaagcgtcaccactctgaccgttaccacagagtctctgaaaactggagaaagcaaaagggtattgactctgttgttagaagaagattcagaggtaacatctctgaaccaaagatcggttacggttctaacaagaagactaagtttttgtctccatctggtcacaagattttcttggttgctaacgtcaaggatttggaaactttgaccatgcacaccaagtcttacgctgctgaaattgcccacaacatttctgccaagaacagagttgtcattttggccagagctaaggctttaggtgtcaaagtcaccaacccaaagggtcgtttggctttggaagcttaa

SEQ ID NO: 3434 - DNA, 228 bp, Saccharomyces pastorianus
atgaatgatacgaagctattgtccaactgggctaagctcgaagaacgatacaaggacgtcatggtctttcagaaaataaaagtgtcttactccgcgatgccgagccagaaggcatccgataggcaaggttcgacatcaacatcacctgctagagagcaaggtctaaatccaaccacgttacttgtaatgaccctggtcgcgttgcttttgaactggttatactactaa

SEQ ID NO: 3435 - DNA, 1377 bp, Saccharomyces pastorianus
atgccatcagacccacgttcaggggtcttgactctgctccatacagcatgcggtgcaggcgtattagctatgccgtttgcattcaagccgtttgggttaatgccagctttgataacactgacgttctgtggagtatgttccatgtgtgggttgctattgcagacgcgaatagtgaagtacgtacctaaatctgaaaacgtttcatttgctaaactcacacaactaatcaacccatcgttgagtatagtatttgattttgccattgctgttaagtgttttggagttggtgtctcttacttgattattgtcggagacctgatgccacagataatgtcatcgatcttataccgtaatgatgataacaccggggattcgcaagagcatcactggttcttggacaggcgattatacatatctttagtcataacgtttgtcattgctcccttatgcttcaagaaaagcctaaattctctacggcatgcttctatgattgctattgttagtgttgcttatttgtgtggcttgattatttaccattttctaaatcggtcccaattagagagaggccaagtctattttatgacaccccaccaagatgcccaatctcattcatctctgacaacgttgccgatttttgtgtttgcttatacttgtcatcataatatgtttagtgtcattaatgaacaagcagacaagagcttcaagatcctcagaaaaattcctattgttgccatttctttggcctatattttatacatcgttattggtggaacaggttatatgaccttcggtgataatattgtagggaatattatcacactatacccgaactccatatacaccaccatcggaaggctggctatgctactactcgttacgttagcattcccgctacaatgtcatccctgtagatcgtccataaaaaacatgattgtttttattgaaaacttaagaaagggcacgacgcatgataccacgactggctttattcctctagacaatctaagtagtgaagatccccaagaaatagcacaacaagacaacgagcaatcaaatctgccaggtgaatcaataagacaaactaatgtcatcactctttgtatcttgatattttcatatttgttggccatttcaattacttccctggccaaagtcctagccattgttggagctacgggatccacatctatctcttttattttacctggtctttttggctacaaattaatcggctcagagtttaccaacaggaatgacagagtgccgacaagtgtaaagattttcaagtatttaggtctattcctatttatttggggtatagcagtaatggtaacttctttatttgctaccgcatttttaggatcatcatcccattga

SEQ ID NO: 3436 - DNA, 348 bp, Saccharomyces pastorianus
atgaactgtgctgacaacagtggtgccagaaacttgtacgtcatcgccgtcaaaggttctggttctagattgaacagattgccagccgcctctttaggtgatatggttatggccaccgtcaagaaaggtaagccagaattaagaaagaaggttatgccagctattgttgttcgtcaagccaagtcctggagaagaagagacggtgtctttttgtacttcgaagacaatgccggtgtcatcgccaacccaaagggtgaaatgaagggttctgccatcactggtccagtcggtaaagaatgtgccgatttatggccaagagttgcatccaactccggtgttgtcgtgtaa

SEQ ID NO: 3437 - DNA, 498 bp, Saccharomyces pastorianus
atgaccccgttgattgagagcttataccagaagacgttcaagttaccttgggatccaagaccaggcgagtttacaccaagagaatgtgtagaagatattttgcaaggcggaaacggatgggctaagaatgaaaagggcataaatctaatcgatctgcaggcattgaagttgaacgaattagaggaagactattacaacccgaattacggcaaaagcgcagcgagcaaagcaagcaattggcctccaaatccaaacgatgatggttacagtagcatggataaaagagagtatttggaaaagaaacaaaactggagtcacatgtcacgtgcacaacgtgcgaagctgagaactcataatgacgacgatcacgaaaattcagataatgacaagaacgctaacgatagtagtgacgttatagaagacaacaaccccacagactttttgacagacagaataagagataacaagagctggtctataaccagtccctcgggataa

SEQ ID NO: 3438 - DNA, 1236 bp, Saccharomyces pastorianus
atgcccctgttggtcatgtttgagagcgtgctgtgcaaggtaatcgtcaggaaagtggcgtacacagagatcgactatgaggcgtacatggagcagatcgaaactattcaactcgatggcgtactggactactcccaggtgaggggtggcacgggcccactggtgtacccagccggccacgtcttgatctacaagctcatgtactggctcacggagggtatggaacatgtcgagcgcggccagacactgttcaggtacttatatctcttaacactggccttgcaaatgacgtgttactaccttttggacctgccaccctggtgcgtggtgttagcgtgcctttctaagagactgcactctatttacgtgctgcggttgttcaatgactgcttcaccactcttttcatggtcgtcacagtcttgggcacaaccttggcttccaggtgtgtccagcgccctaaagtaaggaagcttctcacgctgatggtctctgtgacctacagcatggctgtgagcatcaagatgaacgctctgctgtacttccccgcgatgatgatctcgctgttcatcctcaacggcacgagccttttgatgaccctgttggacttgctcgggatgatcgcatggcagatcgcagtcgcagcaccctttctaggccactccccgcgaaagtacttccagtgtgctttcgatttcggcagaaagttcatgtttaagtggagtgtcaactggcagatgatggacgaagaggcgttcaacgacccgctgttccaccgagccctcttggtcagccatcttgttgccctcactactttgtttgtcacaaggtaccctcgtgtcctgcacgatttgtgctcctccctacgccatccgctaaggggcagcaccgctgccaccacaaatcctgtcaagaccgtcccattcatactgatcacgtccaactttatcggtgtgctcttcgcaagatcgcttcactaccagttcctttcctggtatcattggacgctgcctgtgctgatcttctggtcgggaatgccctgcttcgttgggccgatctggtacgccctgcacgagtggtgctggaactcgtatccaccaaactctcacgcaagcacactcttggtggcactgaacgccgtgctactgcttgtaatggtcctgacgcagctatcaggctcaagcacaccaatcgaaaatcactcctgtaagaagctcatggagaagaaacgtaattag

SEQ ID NO: 3439 - DNA, 447 bp, Saccharomyces pastorianus
atgctcccatctaattcagcggctccgacaaacctatcatcgtcgtcttcaaacaattccacgctgaccaaccccaccacggcaacctcggcgtccaccaacttaatcaacgacttgcccacgggacctactgccaattcgctaattccagatttgcattccacaccaaccatacctttcttaccaaccaaccaaacactgctaatgtcctccaccgcacctggcaccattggcaccaacatacacccatcgcaatcttcaccatctccatcgctacgggacaatttcacctccgtgccagtgaacatgtcctcaactgcgtcgctgttaatgaatgattcttccttggggtggggatccaaccacatgaacgtatcttcatcttctcaatcggcatcatcaagaccatttggcatttggaataatgacatgagcgtctggagttga

SEQ ID NO: 3440 - DNA, 444 bp, Saccharomyces pastorianus
atgccaggccagatcatcagcgttccatttttgtcacagaccgaggacatggacaagtacctgctggagtaccgcagcctaaagctgatccgccagtccagcgactccttccaacctcgcaacgctccccctcaccagtcgaactaccactcgcattataaccacatgaagtataataatacaggtagctactactataacggcaacactcataaccaggcaagtctacagcctatgaacaggcctattccgtcgtcttcttatggaacctatagccataacaggcccaatgacgtaacatttatgaatgctcagaagaagcacaacaggttcaacaccaacaacacagtgaaccaacagaaatacaaacaatactcgcaaatatccctccaaccccgtgatcactgcccatttaaagcaaacatacccacaactatactataa

SEQ ID NO: 3441 - DNA, 1353 bp, Saccharomyces pastorianus
atgatgttgagtgtaaactattatccaaagtctatcgaattcttattgaatatcgcgaactccatggataaggggaacttagcttgtcagtatgtggcaaatggatttttggagagtgacgaaagaaagcaatactacgataaacgtatcctagtttacgatctggttttcgaaactttaattaaagtagatgaactagctgaaatgagaactccatccaagacccaaaaacaaatctccatatctaatgacgatgaagtgaaactgagacaaaaaagttacgacattgccctcaagtataacgacaaactattccattatcatatgtatgattggtttgtatcgcaggacagagaaaataggttattagaaattgaaactccattcatacttccttatttaatggaaaaggcaggtagttcactaaaaatctctaatgttctctgggtttattattcaagaagatctaaattttttgaatccgctgaaatcctttaccatttagccacgtcgaattttaaaattacactatttgaaagaatcgaatttctttcacgtgctaatggcttttgtaatagcgtgtccccattaagccaaaaacaaagaattgtacaactagctagtcgaattcaagatgcgtgtgaagtcgccggtattcaaggtgatatattatcgcttgtttattcagatgcaagaatcgatcccacaattaaggacgagttgatcaaaacgttggatggtaaaatcttgagtacaagcgagctgttcaatgattttgctgtgcccttgagttatcatgaaattgccttatttatattcaaaatagcagatttcagggatcatgagatgattatggccaagtgggatgaactgtttcaatctttgagaatggaactcaatgctaccggaaagaaagaagactcaatgaacttcatcaacctactgtctaacgtattgattaaaattggtaagaacgttcaagactctgaatttattttccctattttcgagctattgcctattgtttctaattttttttatgaaacacttcccaaagagcacatcgtaccgggttcaatagcgacgatcttcattacagctggcgtttctttcaacaagatgtactatattttaaaagaattaatcgaaacatcagactccgataatgccgtattcaataaagaaatgacttggttaatccacgagtggtacaaatcggatagaaaatttagagatatcatttcctatgacgatattgtaaatcttaaggaatataatatcgaaaatgatccaattgaaaagtacgtcaagaacactggcaataacttaggtatttgtttctacaaagaataa

SEQ ID NO: 3442 - DNA, 2205 bp, Saccharomyces pastorianus
atgcatttattaagctcatatccaattgccggttccaatccgcttatgagagcgggcgccataggggccacctctggtagcatcaatcctagtatgtccaacacgaatgagcacattcgtgtttctgggatggggacttccaagccactggaactggcggggaagtacattgatcatttgcagaataaggacactagcacccccgtactcgatgaaagatcgtactataacagcggggtggactataatttcagtaaagaaaaaaatggtttgggagcgtttactcctttcgaaagacaggacatatttgacattccagatgaaattttacagggggtttccacttcagaaacaagaacagatatgggtatttttcccgaattgaaccgatgttggataactatcgatgataaactgatactctggagcattgacaatgacaacgagtaccaggtgatagacgtcatgaagcacactatccgtaaagtggccttggtaagacccaagccgaacacttttgtgcccactgttaaacagttgcttttgatatgcaccacgatggatctttatatgtttgccatttccttggacaagaccaccaatgaactaagtgtgttcaatacacatttatctgttcctgtgcaaggaattgatataatagacatagtgtctcatgaacgatcaggtagaatttttttcgcaggacagggcagtggtcagaacatttgggagttgcagtattcgggctcagacgattggtttaatagtaaatgtagtaaaatttgtttgacgcagtctactttatctagtcttttacccactaatttgctatctcaaattccaggagttgatttccttcattcgttttttgaagacaattccaacagtagtggcggtttcgcccaagaaaccattacacaattaaccatcgaccaacaaagaggtatcatttattcattgtcttctaaatccactatcagggcatacgtaataacagagaaatcgttagagggacccatgtccattgaaccagcctatatcagcaggatcataggtactactacagcaagagccgcaccaattctgggccataaatacttaaaaattgttaaaataagttctgtcacgccagaagaaagcaacaatttatttttggtagctttgacagtaggcggtgtgcgtttatactttaacggttccatgggtagattcaacattgaagctttgagactagaatctatcaaattccctcctagttctgtgacccccgaagtcattcaacaagaactactacatcaacaacaagaacaggcaaagagaagttttccatttttttcaaacttaatgtcttcagaaccagttctcttgaaatttcaaaagaaatcgtctgtattactggaaactacaaaagcaagtaccattatatcccccggcatatttttctctgctgttattaagtcatctcaacagacaaataaaaaagaaaacctttccatcagtggcgtatctgcagcaactacttcatctacagccgccagacagccaccagctactttgcaacacaaactttttgttagtgtaccagactatggtattctaaaaacccacggtaagtatgttgaaaatgcttcgtttttagaaaccacgggcccagttcaacaaatagttccattatcaggactattcaacgcaactacaaagccacagggctttgccaacgaatttgctacacaatacacatcagagaatttacgagtggcagtcttgacaaatacgtctgtggaaatctacaaatatcgtacccctgatgaaatttttgaggacctaattgataatccactgccatttgtgttaaactatggtgttgcagaagcttgttccacagcgttatttgttacgtgcaaatcaaacaagtctgaaaaattaagatccaatgctttaactttcttgacaatgggtatacccggcgttgtagacatcaaaccagtctacaaccgttattccgtgtccactgtatcctctttgttatccaagccttccttgtccaccacaacaacaagtctccaacagtcattaaccagtttcaacaaaccttccactacaaataaagaagattttgatttagatgatgtgatactatctccaagattctacggtattgcgctattaatcacgaggctatttcgtgacataaggggaagtccg

SEQ ID NO: 3443 - DNA, 297 bp, Saccharomyces pastorianus
atgagctgctttcataatttgaacaccttcagcttgaaaatggtgtcgttaatcgattgttcttcatcaccaattgggtccgtcttggatccgtcgtatttagcaatatcggatctacaagtcttgcttagcatatcgaaatgctccttgacgatggcctcaaagtcaatggtgtctttaactagttcatattccactagaacgtcgtcagtggcttccaacccacacttctttcttaacttttggattctattgaccagttctcttgcgagaccttcagtcttcaactcagaatag

SEQ ID NO: 3444 - DNA, 438 bp, Saccharomyces pastorianus
atggtttccgaagcagaaaaatacagagcggacgatgaacaagaagccgaaagagtgctggctaaaaatcagctcgagtcatacgcattcactttaaagaacaccattagtgaaccaggtttcaaagaaaaggttagcgaagatgactcaaagaagctagaggcagcttcacaggaaactatcgactggttggacgcttcgcaagcagccgcaaccgacgagtacaaggacagacaaaaggagttggaggccattgccaatccaataatgaccaagttttacggtgccggtgccggtgcaggagcaggagcaggagcaggagcaggtcctggaggccctggggcaggcggccccggcggtttccctggatccatgccgaatccgggtgctacagatggtggaggcgactccggtccaacggtggaagaggttgattaa

SEQ ID NO: 3445 - DNA, 1377 bp, Saccharomyces pastorianus
atgtccaaagctgtcggtatcgatttgggaacaacttattcgtgtgtcgctcatttttccaatgacagggtagaaatcattgcaaatgatcaaggtaacagaaccactccatcatacgtggcgtttactgacaccgagagattaattggtgacgccgccaagaatcaagctgcaatcaatcctcacaacacagttttcgatgcaaaacggttgatcggccgtaagtttgacgatcctgaagtgacgactgatgccaagcattttccgttcaagatcatagctagagaaggtaagcctgtcgttcaagtagaatataaaggtgaaacgaagacctttacgcctgaggaaatatcttcaatggtgttgatcaagatgaaggaaactgctgagaactatctggggaccgctgtgaatgatgctgtggtaactgttcccgcctatttcaacgattctcaaagacaagccactaaggatgcaggcactattgcaggtatgaatgttctgcgcataattaatgaacccactgcagctgcaattgcttacggcttggataagaaaggtagggcagagcacaacgtcctgatttttgatttgggtggcgggaccttcgatgtttctttattgtcaatcgatgaaggtgtctttgaagtcaaggctactgcaggtgatactcatttgggtggtgaagacttcgataacagattggtgaaccatttggccactgaattcaaaaggacgacgaagaaggacatttccaacaaccaaaggtcattaagaagactgaggacagcagcagaaagggcaaagagagctctgtcttcctcctctcagacatctattgaaattgactcattatttgaaggtgttgatttctacacctcactaacaagagcaagattcgaagaactgtgcgctgatttattcagatcgacattagaaccagtggaaaaagtgctgactgattccaaattggacaaatcccaaattgatgagattgttttagtcggtgggtctactagaattcccaagatccagaagctggtttccggtttcttcaatggtaaagaacccaatcgttccatcaacccggatgaagctgttgcctacggtgcagcagttcaggcagctatccttactggcgatcaatcaacaaaaacacaggatcttcttcttctagatgttgcgccattgtccctaggaattgaaactgcgggaggtattatgactaaactgattcctagaaactcaacaattccaaccaagaaatcagaaactttttcgacctacgcagacaaccaacctggcgttttgattcaagtctttgaaggtgaagaactagaacaagggacaataatctgttgggtaagtttgaattga

SEQ ID NO: 3446 - DNA, 837 bp, Saccharomyces pastorianus
atggtggaagaacagaatcattcaaagttcgaaaatattgttcgcgattacaaagaacggcaaatgatggtttcgtatctcagaattgacgaagatgatacctggtataatctaaccgagtttgtgcgaatggataaaatccgagagttaataaggcaaggtgaaaataagttctcttacgttgattcttcaatgactactttgcaagaaaatgaacttctaaaatccagcttgcagagagctggttccacaatggaaagtgagaatgaatatgaatcttcccgttgctttgattacacggtggctaagtttaagtccagagaagctataagaccaggtcatgaaatggaggatttcttggataaatcccattatttcaatgccgtggtactcgaaggagcgttccaaaattcgtctaacgcgtattttggagagttgcaatttgcgttcttaaacgccatgttttttggaaattacgggtcaagtctacaatggcatgcaatggttgaactcatatgttcaagctcatcagtgcccaataaaatgcttaaaaaactagaccatctcttgtatttccagataaagaccttgccagagcagtattcagatatcttgttgaatgaacgcgtgtggaatacttgtctatattcctctttccaaaaagaaaatttgctaaccacgaaaggtataatggaaaagaaatatcctcatctagttggtaaagatgacgaagatgaactcatttccaacgattctgaagaagattttgaagaagatcctgatgaagatgacgaatacaaacctaccattgccggtggtgtttattatcagaagtga

SEQ ID NO: 3447 - DNA, 303 bp, Saccharomyces pastorianus
atgaatagcgtaccatttacatctgttcccgttgaagttactattggtatcgaccaatattctttcaatgtagaggcaaatcaaccattccagggaattaaggatattcccattgaccacgtccacgtcattcatttccaacatgcggatgattccggtatgaggtatggttactggtttgacggtaaaacgggaaactactacattcaatacgatttcaatgatgtatttacaaaatggtggaagaacagaatcattcaaagttcgaaaatattgttcgcgattacaaagaacggcaaatga

SEQ ID NO: 3448 - DNA, 285 bp, Saccharomyces pastorianus
atgtctacagggttcaagcccacgttactgactcgaactacaattttgtttttagggataggagttttgatcttcttttcatatgaaaactccataggacctgttttggaatggaaagcaagcgacttgactggaatgaacttgacatgtctcagcggtctagcaactcttttcaaaactggcacgtctatgggtatttccttgggagcaggcgctgtgtgttccacaatcatcgcctgcagcttagggtcctggttcgctagaatatttttggccattgtttga

SEQ ID NO: 3449 - DNA, 981 bp, Saccharomyces pastorianus
atgaactccgagtctagagaggatacggctattaatagcatcaagttattggcagggaactctcatcctgatttagctgaactcatatcaaaaagactgggtatcccactttccaaagtcggtgtgtaccagtattccaataaagaaacttctgtcaccataggtgaaagtctccgtgacgaagatgtctacattatccaaactgggataggcgaacaagagatcaacgatttcttgatggaactattgattctaattcatgcttgcaaaattgcatctgcaagaaaaatcaccactgtcatacctaacttcccatatgcaagacaagacaaaaaggataaatcccgttctccaatcacagcaaaactaattgctaatctgttgcaaactgctggctccgatcacgttatcaccatggaccttcatgcctctcaaattcaagggtttttcaacattccagttgataacctatatgcagaaccaagtgttttgaattatattagaacaaaaactgatttcgataatgccattttggtgtcacctgatgcaggtggtgctaagagagtggcagctttggctgacaaattagatttgaattttgcgttgattcataaagaaagacaaaaggcaaatgaagtctcaaaaatggtgcttgtcggtgacgtcaccaataaatcatgtttattggttgacgatatggctgacacttgcggtacgttggtaaaagcttgtgacactttgttggaacatggcgccaaggaagtcatagccattgttacgcatggtatattctctggttctgcaagagaaaaattaagaaacagcaggctatccaggattgtttgtacgaataccgttccagtggatttagatttaccgattgctgatcaaattgatatcagtccaactttcgctgaagctataagaagattacataacggtgaatctgtatcctatttgttcactcatgctccaatatag

SEQ ID NO: 3450 - DNA, 2250 bp, Saccharomyces pastorianus
atgatcagaagatggtttacgataagcaagtcgggaaagaaaaagaaagacaccagtgatacaattacagaagaagtagaaaagaatgattttaagccagtgagctacgatgtaaatgatgaaacatgtgacagtacgccctctgacaacccctccaatacccaacttgcccctaatctggacataaaagagacattttcaaatgaagataataatttgcagctttcctccggattagagtgtaattccgaaacatgtaaccatgagaatgggagttacagccaggacgaaatttttaatttgtcgatggcaaagactacgactacatgcgaagaagtcatcgtggaagaaagcgaaccacctatattggctacaatagcatccgaatcaatgccctatggagacggctccaataaggtatttggatatgagaattttggtaacacatgttattgtaattctgttcttcaatgcctttacaatctatcctcattgcgtgaaaatattttacaatttccggaaaagccaagggaatctattcaatctagaaaacatgacatgaaaggcaataaaccaagaatattcaccgaggctagttttgaaaaaagtgttgtaaatactaatggtcatgtacccaactctagatcacaaagcactgatgaaggaaagcctactcccatgaattccattagttcaaatgcaacagggcattcagagaagaagagcaaattttttaaaaactttggcgggaagcatgcacaagataattataaaaaagaaggaagcactgcatcattgcctgttcctaaacccttctctggtttgcaagacgctcctccattgatagtggaaacacctaatgagcctggtgttccaagtagaatgagctcagagaacgtcacagatagacccccagatgaccctcgtaatattatcgttggtagaacattcaccaatgaaaacttctcgagaggtagtagtaatagtaataatctcgatccgaaaggagaaagcaataacagcctgctctatccactcgataaaagagatactagaaggtcaagttcttcttctcaaatatcgcctgaatacagaaagaagtccgctcttattcatggaccaatcgttaatgttgaccatagcttaaatgaatccggtaaagctaccctatattcaagtttaagggacatctttgaatgcataactgaaaatacgtatctaactggtgttgtatcgcctagttcatttgtcgatgttcttaagagggagaacgttttatttaataccactatgcaccaagatgctcatgagttttttaattttctgctgaacgaattgagtgaatatatagagcgtgagaatcaaaacatggccaatagcaacagtattaataacagttgtggtttgaataaaaccgcaaatttcatcaataatctatttcaaggtactttaactaatcaaatcaagtgtttgacttgtgataacataacatccagagacgaaccttttttggatttccccatagaagtccagggcgacgaggaaacagatatacaagaaatattgaaaagctatcatcaacgagaaatgctaaatggatcaaataagttttattgtgatgaatgttgtggtttgcaagaagccgagaggttggttggcttgaaacaactgccggatactttagcgttgcatttgaagaggtttaagtactctgaaaaacagaactgtaatatcaaactcttcaacaacattcgctatcctctaacattgaacgtttgctcttcgatagactctgaagtttgtcagaaatatcaattggccggaatcgttgttcacatgggcggtggacctcagcatgggcattatgtttctttgtgtaaacatgagaagttcggttggttgctattcgatgatgaaacagtagaagcagtcaaagaggaaaccgtgttagagtttactggtgaatctcccaatatggccacagcatacgttttgttctacaaagcaatgcatctagatgcttttaataaaaatggcagtgttaatatatcaaatgaacatgaggagaatataaacgacttaatcaaatacgatgactggctaagagttagctacgataatcagaaaaaaaaagaggaggttattgcaccagaagaagtggacactgctttagacgatagttgtgtttctactactcctgttaagcattctaggaaaaaatcaagaatgtttagtttcaggaaaagttga

SEQ ID NO: 3451 - DNA, 3471 bp, Saccharomyces pastorianus
atggtgaaggagaattcagattcggaccaagaccaagactttagttctgctcacatgaaaagacagttggagcagcagcagttgcaacaacagcagcaatctccgaacaaaaaacaacgaatgcctcatcatgatgacagccaccaaatcaaccataggccggttacctcgtgtacgcattgcaggcagcacaagattaagtgcgacgccagccagaactttccccacccttgctccagatgcgagaaaattggtcttcactgtgaaatcaacccccaatttaggcccaaaaagggctcacagttacaattattgaggcaagacgtggatgaagtcaaagccaaactagacacccttttggccaatgacggcgttttcgtccattttctacagcacatccccatgggcaatagcattttgaataaactaaatttacgtccagctccgactccaggcactattatcccaaacccagattcttctccctcatcgggctctcccacttcttccacaactcaacgtgacagtaaggtttctgtgcagacgtatttatccaaggaacctcaacttctacaagccaatcacagtaacagcaagaacaagttcaagacaagtaatgagcctgcttcccgtacaacactgcgtgcgtcttctttagccgcaggcgtgaagaataaagtggagacagacgcaaataaactcccacctttgttaaatgattcagccttgcccaataattctaaggaaggtttgcctcctgctttgcaaatggcctattatagaaacaattccgcaaccaacacacccaatggtcccttttctccaaaccatgcatcatcttctcctcataatacaccggctaccgccacttccataatgaataaggggccctctacaatcatagctcacgctgatacaaataaaataccaaataaagcgaaaacacctgtggtggcgaccaccaccactatgccgttattaccatcgccgcatgcgagcgtagatgagtttgtgctgggcgatataagaatctccattgacaaagctaacagattacaccatgtattcgtgactaggtatctaccttatttccctattatgtactccaataatgccaccgaattatactctcagtcgcaattactcttttggaccgtaatgttgacagcgagtctgtccgatcctgagccgacaatgtatagcaaattaagttcgttgataaaacagctagccattgaaacctgttggatacgaacccctagatctacacatatctcacaagctctactaatattatgtatttggcctctaccgaaccaaaaggttttggatgattgttcttatcgttttgtgggattagccaaatcattatcctatcaacttgggttacataggggtgagtttatttctgaatttacaagaactcaaacttcaatgcccaatgccggaaaatggagaactagaacttggttgggaatattcttcgccgaactttgttgggcaagtatccttggcttaccacctacttcacaaacagattatttattagagaaagccttatcttgtggtgacgaagaaccagacaaaaatagtaataatactaataataacaactgcgctaatgttaatgatgatgagaatacgactaatacaaatgatgagtcgcccagtgaaaataaatacaaattaccagaaagatttagaagattattaagtttggcaaattttcaagctaaactatctcatattattggttcttccacttctagtccagatgggttactagaaccaaaataccgtgctgaaactttatccatcttaggtaaagaattagacttgctagcgaaatctttaaaatttcaaaatgatgacgttgtaaatatctattttctttatgttaaattgaccgtttgctgttttgctttcctacctgaaacacctcctactgaccaaattccatatgttacagaagcttacttaacggccactaagatcgtgactttattaaataatttgttggagacccaacaattaatcgaactgccgatttacatcagacaagctgctacattttctgcgttaatactattcaagttgcaactaactcctttactccttgacaagtatttggactctgcgagacaatcagtggtcactatccatagactttatagaaatcagttaactgcgtggaccacgagtgtagaaaacgacatttccagaactgcaagcatgttggagaaattgaacttcgttttaattacgcatccagaagtgtttgtggaggaggatggtatcatttccagaatgagatcccatttaacaggttccttattttatgatttggtttggtgtgtgcatgaggcaagaagaagagagatggattccgaatacaataaacaagcattaaaaagagctgctgaaaaaaggaagttttcttccaatgacatttacagtgatccttcatctacaggtgggattatggataggaaactttacccattaccgttatataatcacatttcaagagatgattttgaaactgtgacaaagaccactccgagcggaactacagttacgactttaattcccaccaaaaatgctctaaagcaggctgaagaacttgccaagacgaacaacagagactctgatggctctatcatggaaattaatgggataccgctttctatgcttggagaaacaggcagcgtgaaatttcaaagtttattcgctaatacaggtaataataacgattacaataacagcagaaccgttttagacgcgtctaccattataccggtgccctttaattcaggctatccattaatctctaacaccatttcgaataacgatccgcgaaatacgaacctggactaccacaatatcggacttaatgcaattcctgataacctttctatgaaaagatcagtaagcactcccgtgagtcatctacctgcatccgttccaggaatcagaaacccgattgcgggcttatcaaatactgttaaattggctatggaccaccagggccaaagacagcatagtaatctacaaaatgttgccgtgaactataacaacaatcaatttgacaacgcaaatcccatcgaaagatcacaaagtagtatgtctcactctcgtacgcccgttgcttcgaagtcaaataatatgacggatctacattctgtggtctctgatcccggttcttataagaacaacggatatccgcctttgagtttgtttgcaaataacgccaataacaatagtagtaggggaaaccagcaattcgccacaggtggcaatgctgtaactcccctcaactatcaagccacggatggcgaaaacaatgccaagactcccggaaacaaattgtcggatttctttcaacagcaaagtgcaggttggatagaaggtaactccagtaatgacgacttttttggatggtttgatatgaacatggagcaaggattttaa

SEQ ID NO: 3452 - DNA, 165 bp, Saccharomyces pastorianus
atgcgtacacgaggtaaccggcctatggttgatttggtggctgtcatcatgatgaggcattcgttgttttttgttcggagattgctgctgttgttgcaactgctgctgctccaactgtcttttcatgtgagcagaactaaagtcttggtcttggtccgaatctga

SEQ ID NO: 3453 - DNA, 681 bp, Saccharomyces pastorianus
atgctaggcttatgtgcatggtacctattaggagcagagcccgcctttgaaaaagatgaaaatgaggccttccaatgggccttacgcgcagctaatgcaggcttgccaaaagctcaatttacccttggttacttttatgaacatggcaaaggttgcgaatgtaacttggaatacgcatggaaatggtacgaaaaggctgctgaaaaaaatgacaagagggcgattaataagctaggttccagagaaggtggaattgccgctgccagtaagaaacaacataaaaagaataaaagtgtcagcactttaaacttattctctactacagacaatggattaggcaacgaagggtcgtttgcgaagccaagctcaaccgtttcttcaaagtccgagacattttttactggaaattccaaacgagattctgagccacagggtttgcaaatcaatatgaataacaatgttaagaaaggtccttcgcctatcagaacaccacaaaaaggtgctggacagtcgacggagataaagccaaatgggcagctattgaatatggataacttgggtggtgccggtagaagtccatccggaaccaatcttgaacgaaggaaatcaaataatttacttctgaaggacaagaaggataagcaaaacaaaaagaagaaaaaagattgtataattatgtag

SEQ ID NO: 3454 - DNA, 1395 bp, Saccharomyces pastorianus
atggcgacttcatcgcagatgcatccctataagaagcatttaatgcaatcacagcatttaaactttgataacatgggcacacagtttcaaagtagcatgaaggaggcgaattctgatctgtctggcaagaaagaaaatagtcgatacgatcacaatcaaaaattaagcagtgcagctttacctaaacggacagcaaatcaatttatacccaacgagcattccaggacatcgtccgcgcctttagcatcaagcagcaataataatagtcatgagggagcagatcttgccctagcacctccaccgcatcctcgtcttcatagttcgcacagtaattctgtcacttccctaggaagtacgccaaccaattcgtcatcattaggagcactaagacaaacaagttcgaacacatctctcactatagaacaaaaaaataaaagaactcgttctgtggatttgtcgcatatgtatttgttgaacagtagcaatgacacccaaatgactgctaccaatgaatcagtagcagatctatcccaccaaatgatcagtcgatatctgggggggaagagtaacacttcgttggtgccaaggttgaaaacgatagaaatgtacaggcagaacgtcaagaaatcgaaagacccagaagtgttgttccagtatgcccaatatatgttacaaacagcactgaccatcgaatcttcaaatgctctagtctcaaatactgaagaagaaaatgtcagtcagtcagccatgaaaacacaatttttaaaagaagcccagagctacttgaaaaaactaagtatcaaaggttattcagacgcgcaatacttactaggtgacggttatgcatcaggagcctttgggaagattgaaaataaagaagcatttgtactatttcaagcagctgcaaagcatggtcatatcgaaagtgcatatagggcatcccattgtttagaagagggtttaggcacaacaagagactcccgtaaatccataaattttttgaagtttgcggctagtaggaatcatccatcggcgatgtacaaattagggctttattccttctatggtaggatgggccttccaaccgatgtcactaccaaactaaacggtgttaaatggttatcaagagcttcagcaagagctaatgaattgacggcggcggcaccatatgagctagctaaaatttacgatgaaggattcctggacgttgtcattcctgatgaaaaatatgcaatggagctgtacattcaagcagcaagcttagggcatatcccttcagcaactttgttagcacaaatctacgagacaggtaacgatacagtaggacaggatacgtcactttccgtacactattacactcaggcagcgttaaagggagatccgtggcaatgctag

SEQ ID NO: 3455 - DNA, 198 bp, Saccharomyces pastorianus
atgacgttgggaacattcggcatgggcatcacaggaacatgttggagctgggacgtctcatcgttccaggagctgaaactgcgcttagaaagacgtgccaacaacgaaactgtggtgacaaatatgcctctcgataagagcagtcagcaggtagtggacgccctggtcgagccacagaatcagtccttttgtaaatag

SEQ ID NO: 3456 - DNA, 237 bp, Saccharomyces pastorianus
atgccagtgagtggaaacgacaaagctacggtgaggagcgaagatgttgcacacttcatggacgaatataagaagaggaggaagactcagatggctcgatttttcggggtcaccatgtttacacttctaacttgcagaatggctatgaaaaaaatgacaacgacaaaaggtatgcacacacatttacttccagttgttccctacaagatcccattactaacctatcccattctatag

SEQ ID NO: 3457 - DNA, 633 bp, Saccharomyces pastorianus
atggaaacaatggcagggttaagtaattccaatatagcgctatgtgcgactttcaccgctatttctttcgcgataggttatcagctaggtctattgaaatcgtccccaaccaagacttcccacgtttcttcattgccagggaagaaattggtcacggagaaggtacagaatgatactgacgaagaggaaagtgagagtgaaagcgacgaagagagtgatgaggacgaagatattgaatcaaacttattaaacgacgtacctggagaggtcagaatggcattggtgattcgtcaagatctagctatgacgaagggtaaaatcgctgcacaatgttgccatgcagcattgtcatgtttcagacacattgcgacagaccccacgcgtgtttcgtacaacccgatcatgactcaaagatggctgaacgcaggacaagctaaaatcactttgaaatgtcctgacaagttcacgatggacgagttgtatgcgaaggctatttctcttggagtgaacgctgcagttattcacgatgctggaagaacgcagattgctgccggaagcgctaccgtattgggcctagggccggctccaaaggccgtattagaccaaataactggtgatctgaagttgtattga

SEQ ID NO: 3458 - DNA, 1338 bp, Saccharomyces pastorianus
atggcagcaatgggcacgcaatggaggacaggtttattgctggagctgattcgcaggcgaccagggcgttgtccaagttgcatgtggagtggcttattcaaatcctcgagcagaagaagttctggactctggagaccgctttggacacgatactgcaatatgacgtcaagctccacggaatctctgctgaaatactatgatattgggttgaacctgacggaccccatgttccatggtgtttacaatggaaaggagtaccatcctgcggactatgcaagagtgctggaccgcgctgcccagagacacgtgaaagtggctcttgtgacgggttcatccattgtggagtcccaaagtgccattgaattgatcaacggcgttaagggccgcagcccgctgaagctgtaccatacaataggtgttcacccatgctgcgtcaacgagtttatggatgttggccaaggggataagcctggctctaccattgataatccttctatggatgaaacgtataatgagtcgttgtataacaaagttctcagcgacccttcttttgcacagggcaaactgaaacagctctctgagttgatgaaccagcaagcgaatgctcctgaatccagttttcggtcgattggcgaaatcgggctggattacgacaggttccattacagctctaaagaaatgcagatgctgttttttgaagaacagttaaaaataagttgtcttaacgacaaactcggcagctacccattgtttctacatatgagaaatgcatgcaatgattttgttcgcattctgcaaaaatttattaccgggtttactgacgataaagacatttttcaattacagggactggatgcgtcgtcatcgaacagaacttacaaattccacccagaccggaagctggtggttcattcattcacggggtctgagtcggatctgcaaaaactactgaacatgtcccccaactgcttcatcggcatcaacggttgctctttaagaagcgaggagaacctgcctgttgtaaaacaaatacccttagaacgcctgcttttggaaacagacgccccatggtgcgagattaaaaaaacgcatgcatccttccagtacttggccaaacagcaagaggtcaacacctttgagtatcctgcatttaagtccgtcaagaaaaacaagttggctgataagttggacgcagatgaactttacacggtgaaaggccgcaatgagccctgtaacatggaacaagtagcaattgtcatatcgcaagtcaaggacatagatcttccaacactggcagatgctacgtggaaaacatcctgcagaattttcggagagtga

SEQ ID NO: 3459 - DNA, 816 bp, Saccharomyces pastorianus
atgaaactgtttagcggttcggattcatacaagtttgaagaggcagcagacctttgtgtccaggcagcaactatttaccgtctgagaaaggagttgaacttggcaggcgactcatttttgaaagcagcagattatcaaaaacaggctggtaatgaagacgaggctggtaacacctacgtggaggcttacaaatgctttaagagtggtgggaactctgtcaacgccgtaaattcactagagaatgccatccaaattttcactcaaagaggacagttcagaagaggagctaatttcaagtttgaactgggtgaaatcctggaaaacgatcttcatgactatccaaaggctatcgactgttacgagttggctggtgaatggtatgctcaagatcaatctgtagcattatcaaacaaatgttttatcaagtgtgcagacttgaaggctcttgatggccaatacattgaagcaagtgacatctattccaaactgatcaagaacagcgtgggaaataggttaagtcaatggagcttgaaggagtacttcttgaaaaaggggctttgccagctggctgctactgattctgtcgctgccacgaggactttacaagagggacaaagtgaagacccaaatttcgcagattcaagagagtcgaactttttgaaaagcctgatcgatgcggttaacgagggtgatagcgaacaactaagtgaacattctaaagaattcgacaatttcatgagattagacaaatggaaaatcactgttctcaataagatcaaggagtctattcagcaacaagaagatgacttgttataa

SEQ ID NO: 3460 - DNA, 1638 bp, Saccharomyces pastorianus
atgtttccaagattgcaagcaatgtttgatgatctttctcaaagaaaggcaactttcgataacgctgaccaagagttgaaggagagaaatattgaatatgccaataatgtaagggagttatctgaaagacaaatgaacctagctatgggacaactaccggacaataccaaagacattatctcaaaacatgtttctaacaatgatactacaagtaaagaagtagccccaagagaaaatgtacacgaagacactgtatccgaatttgttgatacgacggttgagaactcaaatttgaatgtcaatcgagtcaaggaagacgaagaaaagacagaaagaaccgaaagcgatgtatttgatagagacgttcccactttaggttcccaaagtgataatgaaaatactaccacaaataatggcaccgactcaggcactgaaacaagaaatgttaatttgactgagacattaagtgacagattcgatggtgatctgaatgaatatggtattccaagaagtcagtcattaacatcttccattgccaataatgctccccaatctgttagagatgatgtcgagttaccggaaacactagaagaacgtgatactaccatcagtaatgctgcaaacagcgacagaacggaaaacttatcacatattcccggcgaatgggaagctactccagccacagcttctacagatgttttgagcaatgaaagtacagaagttatcgaaaatggcagtactactaagatggcagattctaatgaagatggtgaatctgagagttctattcaagaatcaccaagactatctgctcaatcccttccaaatggccagtcaaaatccaagtcaattaatgaagaattcccaccaattcaggaattacacatcgatgaaagcgattcatcgtcttcagatgatgaattcgaggatactagagaaattccttctggtgcagtgaagtcctctgaaactccatctaatccccaggcttcatctggtttgtcggaacagggactacaaagtccgctccaggactattctttttcacataatgagaccaacactcagagagtgatttcaccctccaaagacgaatttgatgacgaatttgcagggttggagcaagcagcggtagaagaagataacggtgctgattctgaatctgaatttgaaaatgttgctaatactggatctatggaacaatttgaaacaatacaccataaagacttagatgatgagttacaggcaaatgcattcacagggaccttaactagctcttccaatccaagcatcccaaaggaacaggttaaacagcaatctaccactgatcctgctcaagtaagcaatgatgaatgggacgagatatttgctggatttggtaactcaaaggctgaaacagtcgtcataccagaatccaccattccaaaacatccagtcccattaaaggccgattctactattgattccggtaagcaaacgaatcccataattaaccgaggtgttgctaccacaccaaagtccctagccgttgaagaactaagcggtatggggttcactgaagaagaagcacataacgccttagaaaagtccaactgggatttggaagccgctacgaatttcctgcttgatagcgcttag

SEQ ID NO: 3461 - DNA, 2424 bp, Saccharomyces pastorianus
atggcgtctattacattcaggactccattgtcctctcaggaacaagctctttacaaccaaaaattccatcaattggattctgaagatcttggggtggtcactggcgaagcggtcagacctctctttgcgtcttctggacttccagggcaaatactatctcaagtctgggctatggtcgatatagataataaagggtttttgaacttggatgaattttcggctgctctgagaatgattgctcagctgcaacaggttcccaaccaaccaatttctagcgtcctctatgagaatttaccagtacaactggctaccttctctacagattcgaactcgactcctatgcacaccactagcggaattactaatgcaaatgctactgatgttcctcctttatctgccaacgatattgctaagttctcacaattgtttgagaggacagcaaagggtgctcaaactgtggcaggcgacaaggccaaagacattttcttaaaggcaagattgccaaaccaaaccttgggtgaaatttgggctctttgtgatagagatacttcaggggtgcttgacaaatcagaattcataatggcaatgtacctgatccaactttctatgtctcatcatccaagtatgaatccattcccaaccgtattacctactcagttatgggattctgttcgattggaagctactaatgccaaccagcaaaatagagctacccccataagtgccaattctacgggtgtatcatcattaacaagacaatccactatatctcgtctatcatcaggcgccttcagtaacgcttcttcagactggtctttgagttttgaaaagaaacaacagtttgatgcaatctttgactccttagataaacatcatgctggttcattaagttctgccttgttggtcccattcttcttatcatccagattaaaccaagagacactagccactatctgggatctagctgacattcataacaatgctgaattcactaaattgaaatttgccattgccatgtttttgattcaaaagaaaaatgctggaattgaattgcctgatgttattccaaatgagctattacaatctcctgcacttggactctacccaccaaatccatttcctcagcaacaaagtacacctcaaattgccgttccttcaagagcaagtaagccatcgttccaggatatgccgcatcaaaaatctgctccaatcattaatactcaaccaacagcaccacaagttcttcgccaaaattcaaataacggctctttgaacgatctgctagctttgaacccttcatttagctctccttctccatcaaaagcacaaccactggtccaaaacaatacaaacaacagtttctcatatgacaataacagtggccagactgcgccacaacaacagccacagcaacctccacttttatctcactcctcttccggattgaagaagtttactccaacttccaatttcgggcagagtataatcagggaggaaccggaagaacaagaactgccaaaagaaacccaaagagccattagcactcagcagcctccaccagttccaaagcatgccgcaagtccagttcagcgtgctgcttctgtgactcttccacaagttccaaacttttcaggcttcagcatgccaacaagcgccatcacaggcgctgcagtaggtacagctgctttgggtgcagctgctctttcaagctcttccaataagactatccagaatcatgacttgtttgcagacggtgaggcttctgctcaattatctagtgcaaccactgaaatggccaatctatctaatcaagttaactctttgtcgaagcaagcaagcatcaccaatgaaaagaaattaagagccactcaagaattaaaacgtgtcaatgaaatgaagaattctatccaatccaaactaaataatttacgttccaaccatgagcagaatgtcacgcaaaccgaacagcttgaaacacaagtcagtcagattaataatgaaaacgaaactctgaagcaacaactagccgtttcagaagccaattaccatgccgctgagtccaagttgaatgaattaaccaccgacttgcaggtgtctcaaaccaagaacgcggaattgaaagagcaaattactaacttgaattcaatgactgcatctttacaatcccaactaaatgaaaaacaacaacatgtcaagcaaaaaagatcaatgatcgatgttaactctaaacaattggaactgaaccaaattacggtagtaaacttgcagaaggaaattgatggccttggtgagaaaattggtgtttacttaactaagcaaaaggagctaaacgattatcaaaagactgtcgaagagcagcatgctcaactgcaaagtaaataccaggatttgtctaataaggacgctgatctagcagatcggtga

SEQ ID NO: 3462 - DNA, 534 bp, Saccharomyces pastorianus
atggttttcataacacgttacttggatcttttaacgttccattgggtatccctatacaacgctttcatgaagatattcttcatcgtttctaccatctacattgtggtcctactacaagggtctaaaagggctaacactatcgcgtacaacgaaatgatcatgagagatacattcaagattcagcatttgcttattggaagcagtgtaatgagtctttttttccatcacaagttcacatttcttgaattggcatggagtttctccgtgtggttggagagtgtggccattctgcctcaattgtacatgttgtccaaaggtgggaataccagaagtttgaccattcattatatttttgcaatggggctatacagagcactgtatattcccaactggatttggagatacagtaccgaaggaaagttagacaagattgctctcttcgcggggcttttgcaaactctgttgtactctgatttcttttacatttattacactaaagtcatgaagggcaaaggtttcaaattgccaaaataa

SEQ ID NO: 3463 - DNA, 1641 bp, Saccharomyces pastorianus
atgaaaatttgccgtgaactagaaaagaaagacccagacttcaaaatagaaaaaattatttcgagagaaagttctgtgaatttcacaccaattgatgaaaacaaattagagaaagacgacgatttggatgaggaagccgacgaaaatgatgtaaaaaagtatatggaaatgacaatgatcaacccattcaaaaatttaggaagcgacaagaccttggagctgaagaataatatggaccaaaaaagatcatcaagcacaaatagtgttgttattcatgacgacattgaaaaggacaaaaagctgtcagaaatgactaaaattgtcagtgtttatcaattagatcaaccaaactcagtaaaagaagaagatgatcaagatatggaaacttcgttaaagtcagatttgaatttaagtgaaattttccaaaacggcaatgatgcggagaaaagattaaaagaggataatgagccaacggttaaatttagtacggaacctccaaaaattataaatgagcctggaaagcctgctgtgaaaaagcacattgaaactgaaaatgaaaatggaagtgaaaatgaaaaacttaacttggaaactatgtcaccaataaaaatagatagggatgaaaatatggatcgaaaacaaaaaaattccttgaaaagagaaagggacccggttttaactgaacaagatatcaactccaagaaaataaaattggaaacggggaagagatcagagaaagtacattttcctatcatgaatgactttccaaaggattcattaactctatatgaaattagtcatctactaatggtcgactcaataggcaactcttcgatggactttgatgtttattttaatcatatgttaaaggctatcaacagaattaaaagcggatcattcaccatgaagcatgtaaattacctaatcgaacctttaataatctgtttccaaaatacgaagatgataaattggttgttaagtgaaaacggctttgatgaactattagctgtggctgtcatgcttctgaaagctacagatgacaagccctcgataccatcgaaaatatccagtaaatccattattctcgtccataatctcttagtctggaaaaagtttttgaataaagaatgtgggaaccccgacgatgatggagtttcactaagaatatcatttgaagaagtatgggatcaaattcttttaatgctcaacaaactatcagactacgggaatgaaatctacaagctggcacaagagtttagagacaacctaatgcagtcacattactttaaaaaacattctgcaacaagaatcctaagtatgctggttacagagatacagcccgagactgccggtgtgaaagaaacgtttctaatcgagacgctatccaagatgttgttatctcccactattcgcacgcaattaaagaaatctaatatatctgagattattcagacgatgagctatttcatcactgggagcgataacacctcgtggaacttcaccagtgccatggtcttagcacactctttgagacatttacaatccgtgctggattgcaatgaacaagaaaccgaacagttatttgattgtctgccgaaggatgtctttagaatgattatgttcatcgcctcaaacgaataa

SEQ ID NO: 3464 - DNA, 2946 bp, Saccharomyces pastorianus
atgtcgtcctttaataacgaaaccaacaacaacagcaacactaatgcgcatccgaacgaagccttcccgctgtacaccgtgttcaaggacgattccgtacccatcgaggaaaaactatcgctcctcacgcggttcaaaggccacgtaaagaaggaactcgttaatgagtcgtcaatccaggcctatttcactgcgttactgttcgtttccaggcactacacctaccgctcatacccgcgcttaataaccctatcgcactcatccctttgctacctcatcaaacgtgtagccatgcagtctcctgaacagttcaatgacatgcttgttgaagaattactaaaccatctaattttcgaactgcccaacgagaaaaagttttggctgccttctatcaaggccatcgaagccatctatctggtgaacccattgaagatccaagctattctcgcgagtttcttacaaagaccaaatgaaaatcaaagcgaagacgatttgaacaggataaagtccactctactgaccatcgatgaactgatccagattaacgagaaaaacaactcaaaccatttgcaattactacgattcttcatgctttcgttcaccaatcttttgaacaataatctaaatgaacacgcaaatgacgacaacaacaacatagtcattgaacttatatttgatataatgtacaaatacttgaagaatgatgagggaaactcacaagatttgatgagtggattccttaatgatttagaattggggaagttcaaacaaaaattcttgagtttaacaaaatctcaagaccaggatcagtcacaggaagacaagtccgcgttgtttgacgaggattatgaattccaactgttactaaatgaggcgaaattgccgcagttgtcaaacaatctaagcaacaaagatccatccgcgaagaaaaattatgactctttgaatctattacaacaggacttggagggtttgctggtcccgtttcaaaacataaaggaaactgaacaaaactggaaatcaagacagtcaaatgtagtcgaactagacaagatcatatctggaaatgttcctaaggacaatccagaagaattcgtcaccataatgaaagaagtgcaactaatagaactgatttcaagagcaacttcatcactgagaacaacattgtcgttagccgcgttgcttttccttaagaggctaatacatatcttgaatgatcatttgcctctatcaatactagaccagattttcaccatcttcaaaaatttattgtcctccaccaaaaaaatttcctcacaaactgcatttcattgtttgatcaccttgatcatcgatataaaccattttcataataaactattccaattatccttcttactgataaatgaaaaaactgttacaccaagattctgctctgccatactgttgcgaagtttcttggttaagttcaatgacactaatctctcatctggtaactctaatacgacttcgccaacttccaagttggaaaataatctgatatacattgaagaatggttgaaaaagggaatttcagattcacaaactaccgtaagagaggcgatgagattgaccttttggtatttctataaatgttatcccgccaacgctaaaaaactactcaactcttcatttaccccacagttgaaaaaagcaacagaactaacaatccctgctcatctaaacataaactatcagctttcaagagtgccatccacagcgtccgctacagcgtccgccacgatgtctcgtttatattcccagtcttctaatagctcttcaagaagagtcagcttattagaacaaaagagacacttcccaagttatgctcaaccaacacaatcttcctccacctctctactcaaccttcctgcggttgctgctggcggtggtgttattgctaataagctctcgaataaatttaaaaccaatctgagatcaacaagtgagtattcgagtaaggaaaatgaaaaacgatcacgtcatcatgatacatcgaaccccactacaaacaccaacaccaataacggtaataatccggtcaaaagaaaagttagcgcccctccttcttcaattgctagttcaaaagcaaatgaaaattatggtgttttggaggatttttcctcaaaccaaatcgatttaactgatgaactatcaaatagttactccaacactttaatgaagaaatatatggataaaaacgacatttcaatatcatcttcaccgaaaccttcgaaaataagtaacaaaaccggtgaatacgaagacttttacaagagattcaatgatgcttcttcttcaacccagtttaaagatatgtttcaatttttacaaaaagaattattactggctccacaacattcatcgtcaccaccgtggactaaaaaactggaaatatccaaaattatgaaaaaactacaccaaattatgattaagtcaccacacgatttaaaaccgtttttaaacataccgaactttataaagcaagttcctttaaattatcttctcgaactatactctattaacaattttggttgtgcggagatactaaaaaatgaaaccgattctgaaagcccttctcagacagctaatttgattatttctatcgtggaattattcaattttataaattccaataattgtactcccgattcaaaattgtattatatgaaatataaaaccacattcttcaattataactttactttattacttgagcttttccgcggtttgaacaacacaaatgatggaactttgaggttatgcataaaggatttaatacctaaaactttaactagtcttttcaaaatttatggtaaagaatttgactatacactttattccaatttaacttttgagatctacaaatttgataaagagggctttagtactttgttactgatttcgagattgtatctaccaagatga

SEQ ID NO: 3465 - DNA, 345 bp, Saccharomyces pastorianus
atggcctcctccttcttatccctagctttaaacaagtcgattgaaccaacagttgcaatgaccggagaattaacactcacgggtaaagttttacgtattggtgggttaagagaaaaagccgtggcggccaagagatccggtgctaagaccatcattttccctaaggacaacttaaacgattgggaggaacttccagataacgtaaaggaaggtctggagcctctggctgcggactggtataatgatatattccagaaattattcaaggatgtggatacgaaacaaggtaattcagtgtggaaggctgaattcgaaattttggacgctaaaaaggataaggactaa

SEQ ID NO: 3466 - DNA, 3108 bp, Saccharomyces pastorianus
atgctgagagcaagaaccgcaaagactcttggcacagtggcaaggaccacgagggccatccagtattaccgatctgtcgttaaggctgctgcgctccctcaaaagaggtttgcatctactttgaacgtacacgacgtggcgaatgtcaagccaaaccacattattaagactccagcatggcaggagttccaacatcaattgaaaacccccaggtacacggagcagctcagacaactggaagaccagtttgccagggatacgttggctgcatactcttacagaagtatcctagcgaaggatgatagtgccaaaaaggacgaggatgataagatagtacccgaagagaaggacaaggacaacgaggttgagcccacacgggatgatgaaactactactaacaagagtccggaaagtgaagtttccaaaaactctaaaagctcggcatctgggattggacagtcctcttccagtcgatcggatactggagatggcaatccaaaacaaaaaccgccaaagccagaagtgccagaagtctacccgcaaatgctagcattgccaatagctaggcgccccttatttccaggtttctacaaggcggttgtaatatcggatgagagagttatgaaggccatcaaggaaatgttagaccgtcagcaaccctatatcggtgccttcatgctgaagaattcagaggaagataccgatgtgattatgagtaaagacgaagtgtatgatgttggtgttttggcccagataaccagtgcctttccaagcaaagacgagaaaacgggcaccgaaacgatgaccgctcttctgtaccctcacagaaggataaagattgatgagttatttccacctaacgaagagaaggaaaaactaaaggagcaagcaaaagaaaaagatgtggaaacagtcgtcactgaagctgctgaagttaaggaagatcaagcagaaaatgctaatgccggcggcgcgcccaagctggaagacattgttgtggtaaaaataccagattcagaattgcagcagcagcagcagcacaaaaaaatagaagcttcagaagaagagcctgacgaattggacgatgctcacgaaggtgatgatgtgaaccccacagagtttctaaaggactacaatgtgtcgctggttaatgtcttgaatttagaagatgaaccatttgatagaaagtcacccgttattaatgcgctaacatctgaaatcttgaaagttttcaaggaaatttcgcaattgaacaccatgttcagagaacaaattgccactttttcagcctctattcaatccgccaccacgaacatttttgaggaaccggctagattggccgattttgctgctgctgtttctgctggtgaagaagacgaattgcaggatatcctgtcgtccctagacattgaacacagactagaaaaatcgttgttggttcttaagaaagagttaatgaacgcagaattacaaaacaaaatatctaaagatgtggaaacgaagatccaaaagagacaaagagaatactatttgatggaacagctaaagggtatcaagagagaattgggtatcgatgatggtcgtgataaacttattgatacttacaaggaaagagtcaagtcattgaaactgcccgaaagcgttcaaaaaatctttgacgatgaaatcacaaagctaagtaccttggaaacttccatgtccgaattcggtgtcattagaaactacctggactggttgacctcgatcccttgggggaaacattcccaagaacagtattccattccaagagccaagaaaattttggacgaagatcattatggtatgatagacgttaaagatcgtattctggaatttattgctgttggtaaactattaggtaaagttgatggtaagattatctgtttcgttggtccaccgggtgttggtaagacgtcaatcggtaaatctattgccagagctcttaatagaaagtttttcagattctctgtcggtggtatgacagatgtggcggaaattaaaggtcacagaagaacgtacatcggtgccttaccgggtagggtagtccaagccttgaagaaatgtcaaacccaaaatccactgattttgatagatgaaatcgataagattgggcatgggggtatccacggagatccctccgcggcattattggaggtacttgaccccgaacaaaacaacagtttcctggacaactacttggatatccctattgatttatcaaaagtgctgttcgtttgtacagccaattctttggagaccatcccaagacctttgctggatcggatggaagtcattgaattgacagggtatgttgccgaggataaagttaagatcgccgaacaatacttggttccaagtgccaagaagagcgccggcttggagaattcacatgttgatatgacagaagatgcgatcacagcattaatgaagtactactgcagagaaagtggtgtgagaaatttgaaaaaacacattgagaaaatttatcgtaaagcagccttacaagttgtcaaaaaattgagtattgaggactccccaacatcttcagatacacaaaaagacaccgccaaatccaaggaaactgcttcctcagaagataaaacaagcaaaaatgtggaaagcttatcaaagatgagtaaagacatcgattcaaagaagacgagcgatgacatagaggctttaaaaacttctgataaaatcaatgtttccatatctcaggacaacttaaaagactacgtcggacccccagtgtacacgacagatagactatatgaaacaaccccaccgggtgtagtaatgggactagcatggacaaacatgggtggttgttcactatacgttgaatctgtccttgaacaaccactacacaactgtaagcacccgacctttgaaagaacagggcaattgggagatgttatgaaagaatcatcaagactggcttattcattttccaaaatgtacttagcacaaaagtttcccgaaaacagattcttcgagaaagcttctatccacttgcattgtccggaaggtgccacccaaaagacggcccatctgctggtgtcactatggcctcctccttcttatccctag

SEQ ID NO: 3467 - DNA, 309 bp, Saccharomyces pastorianus
atgacatggaggcaatggttgaatagcgcattgaagcgtagttatggcatttttggtgaaggtgttgaatactcgttcctgcatgttgacaataaggtagcctatattagagtaaactatgcagataaagatacactcacatcatccattagtacatacatatctaccgaagagcttatcggcgcacctttggcagtgactatcctacaagagtcacccaatttggaacggttagaaattaccgacgatgaccgtatatggttgaaaagagcagtagaggaggacaaggaagacggtgcatgtatatag

SEQ ID NO: 3468 - DNA, 1434 bp, Saccharomyces pastorianus
atggttttgacttggcagtgccgtgatccagaaaccgttcttgtagcacgtgagagtttggccccccgtatactttatctgtttgaagatataccataccgtacctgcatgaagcacagcgcctgcgagttgcgctggtgtttcacgctgaaacctaaattcttttactcgaagtttttttctgcattctcctggtttccagatgatgcggttttttacacggcattgaaacgttggcagaaaagcaacataaggtgggaccattttacataccatatcctcttgttctcgagaaagtatatatacgtagcaggatccgtagacatccatctaaaccaaggaaaaagagagttcgagccacacaaaaaaagaatgccaaagagaatagtatacaacatatccagcgacttccagttgaagtcgctgctgggcgagggcgcatacggtgtggtgtgctccgcaacgcacaagcccacgggggagatcgtggcaatcaagaagatcgagccattcgacaaaccgctcttcgcgctgcgcacgctgcgcgagatcaagatcctgaagcacttcaagcacgagaacattataaccatcttcaacatccaacgcccggactcgttcgaaaatttcaacgaggtttatatcatccaggagttgatgcagacggacctgcaccgcgtgatctccacgcaggtgctgagcgatgaccatatacagtacttcatataccagaccctgcgcgcagtgaaagtgctacacggctcgaacgtaattcaccgtgacctgaagccctccaacctgctgatcaattccaactgcgatctgaaggtgtgtgacttcggactagccaggatcatcgacgaggcaggcgcagacgacccggaggccacgggccagcagaacggcatgaccgagtacgtggccacgcgctggtacagggcccctgaagttatgctgacctctgctcgttactcccgggcaatggacgtatggtcatgcggctgtattttggcggagctgttcttgagacgcccgatcttccctggtagagactaccgccaccagctgttgctgatcttcggtgtgatcggcacaccgcagtcggacgaagaattgcgatgcatcgagtcggcgcgtgccagagaatacataaagtcgcttcccgcgtacccggcggtgccgctgcagaaactgcttccaagcgtcaacgctcagggcgttgacctgttgcagcgcatgctcgtcttcgacccagagaagcggatcacggccaatgaggcactcgagcacccgtacttgcagacataccacgacccaggcgacgaacccgagggggagtgtatcccgcccagcttcttcgagttcgacaactacaaggaggcattgaccaccaaggatctcaagaagctgatctggaacgagatcttcagctag

SEQ ID NO: 3469 - DNA, 1317 bp, Saccharomyces pastorianus
atgatcattaagagagccccccatcaggtggggaagcccattgcgaaggccatcaaccagggcaggatcgagttcttcgataagcacttgtccatgttcccacaggacttgacgtacgggttctacaccaggggaagaaccgacaacaaaatcctggattataccatcatcgaggccaccgcgatcaaagaggacgggtccattgtccccgggccctccgtcggtgggtctccggaattcatctcggtcagtgataaagtgatcattgaagtcaacacggccacgccttcgttcgaaggtattcacgatatagatatgcccgtaaacccacctttcagaaagccctacccgtacttaaaggtcgatgacaaatgtggtgtcgactccatcccggtcgaccctgagaaagtggtggccatcgtagagtctaccgtgcgagaccaggttcctccaaacactccctccgacgagacgtcgagggcgattgccgaccatctggtcggcttcttcagagacgaggtcaagcacggcaggctgcccgaaaacttgttgcccttgcaaagtggtatcggtaacatcgccaacgccgtcatcgagggccttgctggcgcccaattcaagcatttaaatgtatggaccgaagtgttgcaggattcgttcctggaccttttcgaaaacgggtctttggattacgccaccgccacctccgtgagactgactgaaaagggtttcgcaagagcttttgaaaactgggagcactttaagcacaaactgtgtctgagatctcaagtcgtctccaacaacccggaaatgatccgtagattaggtgtcattgccatgaacaccccagtggaagtcgatatctatgctcatgccaactccacgaacgttaacggttcccgtatgttgaacggtttgggtgggtccgctgacttcttgagaaatgccaagctgtcgatcatgcacgcaccctccgcaaggcccaccaaagtggaccccactggtatttccacaatcgtgcccatggcctctcatgttgaccaaaccgaacacgatttggacatcctggtcaccgaccaaggtttggctgatctaagagggctatcgcccaaggaaagggctcgtgaaatcattaacaagtgtgctcatcctgattatcaagctttgttgactgattatttggacagatcagaacactatgccaagaagcacaactgtttgcacgaaccacacatgctaaagaatgccttcaaattccacacaaatctggctgaaaagggtaccatgaaggtcgacagctgggaaccagttgattaa

SEQ ID NO: 3470 - DNA, 2736 bp, Saccharomyces pastorianus
atggtaggtgttttccttccgagattggaaggagaggcgttttatgggctgagcatgagtgagggacaacttccaggctcgaacgtattaggctcgcaattaggcgtcggtgtgcaaggtgctagtctttaccgtccgcaggaacactacgatgcgaagaaaccacaatggctaagaccggtggatgatactctgcccgagcggatgctggacctccatgtagtggcgaaaggcgtggtttgcgacacttctgtgcggtatgtttccgacgacaagattctgcaagaatcagatgacgacgacgacaatgatgatgatgatctcattactagtgatctagatgaagatatggacgatgtgcaaaacacttctgttgtggtgaaccccgttgtacctgtggtaccgaaacacgtgcattttttcaagaaagtcgatctcgacaatgatcacatgttcagcgttaactgcgacgcgcctgtttcactccaggactacatcccttccgacttgctgcacaatttgaaccggaacggtcgtttgcagaggcaggacgccttcttttgggaccccaccgtggctaaccgaatggacacagagtacatccaaaccgcatcggatctaagaaactatagggacggtacggaaattatagcctacgcctccggcaaaacagactccgtgctcaatatagccgtcttagcacggcaacacacgctgcttttgaaccggaataacaatgtgaccagcatcgagctgcattcgccaatcaagagcatcaagatcccaagagcttccgaatccattgggcggaggtcaaacctggtgggagtggtcactgagaactctttccaagtctttaggatcgaaagtattcattcaagatcgtgcgatgtcataatcactagctcggaaccgctgtactttgtcgagatagacgacatccaaatagtggatttcgcattcaatccttgggacttgcaacaattcgcagtcattgacatacgggggaactggaatatcgggatgataccgaaaaagttcgatgaagaaagagggaaactacaaataatagaaagcctgcatggtacgatttttgacccggaggagttgtcgtcgtggaaaagaatcgaatggttctcgcagttccaaaaaatactagtctttgatagatccaaaatgttcgagatcaatttcgtcaacgattggcaaacagaagtcgtccaggcgaagacatggtcaagcatacgagactataagagaatagacgacaaaaacggcgtcttgctcacctctagagaaatcataattataggagcctcagaggcaaacggccccgttagaagaatatcctggaagcacgacctggacccagatgatacgacgctcaaaatcaccattcagaaggtaaacaaaaccgactatctgctcctggtggctttcgtatattcgatgcgccataaccatgtctacatccatgccttctctcaaaacaaaaaattaaatgccaccccaagcttatttcaatccttgggacattcagcagtgcttgaactttcgggcgggacccccagtggtatagaggtactttcaacattggaccggatagacgatgaagagggggagcacgcaaatgatcacgcttgtttcattacagatttttccatcaaattgaggaagtcgtccaagatataccattacactctatcgaacattcagacccctgaacccgatgaacaagaaaaattcatcgtgacagattctaccgaatggacgtggcttttcgataaggttgacagccgcgaaagtgagagcattggggcactgaccgctcaaattagggagaaagaaaggaagcatgcctctcgcatccaaaatctgatcgaaaacgaaagtagccatgacgaagataaatattttcaagacttgggctatcacttatccatggctacaaatgaactactccaatcttggcagaggaacagagatgaatcaattcgtgctgggtctacgagctattctaaattggaaaccctaatcgaggattcgacttcctttaccagcatacctgaattttcttcattattagatcaatttttccaatattatgaagaccaagatgttacctttatagatttcaatcaactgctacgctttttcttacatgaagatgttccgaatttggatattttctacaataaacttttgcaatgctgggttctggtatccccgcaagctgaactctatacaaaggagatagtaaaggatattgtttggagtttagttaggcttgaaaaaccgtcgctgttcgaattgatagaaaaggaaatcagccaatcattgagtaaaccttatcaggacatcattgattcatgggatgtaaatgatttgaatgaagaggatgaatcaagtgatttcaatttagacagtcaattttcgacaacacagtttaatgatagacctccttttaatatgagttcgcaatctcagattccaacgattaaatcttctcaaaataatggactcgcaaggaaaaaaaggattttaaagacacattcccaaaagagtactccattgtcacaatcaagccaaaatttgagcattttgccggactccatgactcctgcgtttacattaatgcaacctccctcttcacaaatatcgtttgtgaatgattcacaggctcgtagctcgcaaaaagccaagaagaagaaaaaaagaattcgtggctttggataa

SEQ ID NO: 3471 - DNA, 1185 bp, Saccharomyces pastorianus
atgcttaccaaaagaacactaccgctgcgtatcctatttccgtgcagacgaacttcgagcgatgtttctcgaccggcacagcccttgaacgtgctcttctttggcagcgacacgttcagcaacttctctttgcaggcgctcaacgaactacgccagacaaatggcgaccacgtcgttggaaagatccaagtggtgaccaggtcgcccaagtggtgcggtagacagaagtctattttgaaatacccgcccatcttcgacatggccagcaaactccagttgccacgcccgattacatgcgacaccaaacaggacatgctagcgctgggcaagttgaccagtcacagccgcccagggagctctgcggacggcggcccgttcaacgcgatcattgcggtctcgttcgggaagttgattccgggggacctgatccgtgcggtgccgctggcactgaacgttcatccatcgctgttgcccagacacaagggcagcgcaccgatccagcgcgcgctgctggagggcgacctgtgcacgggagtgactgtgcagacgctgcacccggaccgatttgaccacggcgccatcgtggcacagacgaagccgctggccgtcgctgcgctgctgcgcgcgggcaggctcgccgccgcagacacggccgcagacggcctgccccggagaactgccatcctgctggaacagctgggcgccgtgggcgcccagctgctgaagcagacgctgtgcgagcagttgtacctgccacagaaccgcgtgcacgcacccgccgccgcttacgaggccagctacgcccgccgcataacgaccgaggacaggcgcatccactgggcgcgcgactcggccgccgagctgcttaataggctcgagacgctggggcccgtgcacgcgttcaaggaggcggcagctaaaggagccgcccatcccgtcgtgcttaaacgagtgttgctacacgcgtgcagtgtggcgaaggactccaagctacacagctgcgagcccggcgccttcgagtacgaccagcagcaagactgcctggtcgtcgcctgccgcggcggctcgcagctatgcgtaacgcgcctccagttcgagggattcgccgttgagcgcgccgggcagttcgtcgctcgcctgcagaaaagatgcggtaccctgggccagcacctcatgttccagtaa

SEQ ID NO: 3472 - DNA, 552 bp, Saccharomyces pastorianus
atgagcggaagcaacatggggtattacgacgtactggcagggctcgcagcactcgaaaagtcgccgcaggtggtgttcactgcggctgagctgcaacagctcacacagcggtccagcgctgacgacgatagcgccaagaagagagagaataccagtgggaaagtatctaaaccaaagagagtgggcatgcatgggtatttgggcgggaaggtgtcgctcgccgatgcagcgcaggtggaatatgaggtgggccactcgctgctcggcagctacgtgccgaagcagcagctggaggccctctccagcgtcgactttgcccaccacttccaccgcacgttggagtgcaagaccgccctggagacgcacgacgtttttcttgctggcgcaggccagctgtcgctgcccttccaatcgcccatggacagtcccagcgacagcgatctcaaaaggaaaaggaaagtgatgatatgcaaacggtgccaattgcggtttgtgggccctcatagacggtcccagctgagagagcatgcctgtggagaccaagccagttaa

SEQ ID NO: 3473 - DNA, 648 bp, Saccharomyces pastorianus
atgaacgcctattatgctagataccacaacgtctctgcaccatggaatggtgatattgaaaccggcatcgaacgtttgacgaagatgcttgagttagtcgaagagtctttgaccggtaagaagaatggttttagcgtcgatgatgccgcccaagctttaaactgttctcgtgaagagtttacaaaggattacttgacaacattcccagtcagattccaagtcttaaagctataccaaagggccaaacatgtttactctgaatctttaagagtattgagagctttaaaattaatgactaccgcaaagttcgccactgatgaagattttttcaagcagttcggtgctttaatgaacgagtctcaagcttcctgtgacaaactttacgaatgttcctgctcagagactgacacaatttgttccatcgctttagcgaatgggtcttacggttctcgtttgactggtgccggttggggcggttgcaccgttcacttggttccaggtgggccaaacggtaatgtagagaaagtgaagaaggctctcgtcaacgagttttacaaggttaaatatcccaacattactgacgctgagttggaagacgctataatcgtctctaaaccagccttgggtagttgtttgtatgaattataa

SEQ ID NO: 3474 - DNA, 624 bp, Saccharomyces pastorianus
atgacgaaaccttactcagaaaatgtgccagtcgccgaattcaatgccaaaaccgaggacctgccaaaaccattggttgaaaaatgcccaactatcactgaaaaatttagtagtgcctacggtgctaaaccagatttcattgccagatctccaggtagggttaatttgatcggtgaacatatcgactactgtgacttctccgtcttgcctttggccattgatgttgatatgctttgcgctgttaaggtcttggatgacaagaatccatctattacattgaccaatgctgatcccaagtttgctcaaagaaagttcgatttgcctttggacggttcatacgttacgatcgacccttctgtctcagactggtccaattatttcaagtgtggtctacatgttgctcactcatttttgaagaaacttgccccggaaaggtttgccaacgcacccttagctggtttagaggttttttgtgaaggcgatgttccaactggcagtggtttgtcttcttctgccgctttcatttgtgctgtttctttagccgttgttagagccaacatgggccctgattatcacatgtctaaacaggatttaatgcgtattacagtcgtggcagagacataa

SEQ ID NO: 3475 - DNA, 111 bp, Saccharomyces pastorianus
atgaacccttacgccaaggtttttgctgctgaaaagctaggttccaagaaggtcgaaaagaccggtaccaagccagctgctgtcttcactgaaactttgaagcacgattaa

SEQ ID NO: 3476 - DNA, 2811 bp, Saccharomyces pastorianus
atgtcgcaacatgccccaatcaatgtatacgacgaaatatctagtccttacgaacgcccaaatattgttacttcaatgggtggagagaattggcgtgaaactaggaggaattgtaaaccagatagtagaaagatcaccaagcaaaggaagaaggcttctcgcgcttgtgaccaatgtagaaagaaaagaatcaaatgcgaatacaatcaacataccagagtttgccaggggtgctttgaggtaggtcaagtttgcctctttgtcagagttccactgaaacgtggcccaaccaaaaaaaaaactcaggaaattgcaagtgacaagatgagctccgtaaataaccttcttaactacagacccaggactcattcatatccagttagcttggaaagcgttcgtttaccatcactttctcagaatttttcttttcccacaacaaacagtctttgcgtgtcacctatgcctgctcaatcgcagcctttctggaaagtaccgtacgatgacgttcagcgtagaagctcccttagcatattttcctgcgactcgacatcatctatcggagctcaggaaaattatcattctgatcaggattccaccgtcaagcaacggggacgcaaaaatacggggaaaggtatcataacaccagtagaggacaaatacgagaattcgccaggtgcccgcagtcaacatttagattttccccaattccaagaacagcgtgctaaaccattccttaataattgtggctttgggaatcctagaacaaatagtctttcctgtccaagcgatggcgcattatcaaaaagaaattcacgtggcagtgagcggtacatgctgactccaaatagtgtacattcagctgaaaaagaaagattaagctcgttgaccattagaagcttagacagtaaattcgacatagatgacaatatccataaatggcaaaataattcggcctgggcgccagcgtacatattatcagatcctagtcgtcctggtggtgaaagaaaagttctttcgaacagaaatgccgatctagaatcggccgtttttagctcgtccaatgacagcgccggcggacagtttagtgagatttcctttttgaaacttatagacatctactatgacttctttcacatcaatcttcctatagtaccaataaataagagtaaattgatcagcctgttcgtccccattatgcaaccaataaatcaccaaatcatgaaaattaataatgaaatcattcgatgttttaaagatgcgctagaggttttggtattcagtgcaataaaacaaagaaaatcgtcaacatcttggccccatgacaatgcgtgtgattttcaaaaagggttatattacgcccaaaacttcaggaaatgtgtaaatgaatgcttccaaagtataatgactgtcaaatccaaactaaaaataaattccacagtgattccctccagagtcaagtttatttacttttcgacgattgttattttaaattacatcttagttttgaccggtgatgaacattcgtctttattaggcccctctgtgggggttttcaacgagtttcaatctcataaattatttctgcctttgaaaaatattacctcgatgccgctgttaaattcaaaccaaaacattaataataaacaacttgattgtgccatattgttccaacgactgtatatccttttgagtattttggattccatacagagcttccgactaggtcaaccgaaactaatcaacttgaaattcggtaatcccgttgattcgtattttagagctgccacaaataatgaacatcttgttgagcaaaatccaactatcttggataatatactacgaaatttgaaactcggcggattcatgacagatttcgtttttggcaggaaatctttgcagataaacagctctcagaatatattaaccacagctgaggtggtttgggaaaatattacaaggaaaaataacgaacctgatgatatgacaggcaagttccaaactttgttgagagaaaaagagaatttaataaaaagattgataaatatgaagcaaaaagatcagctgttagaaaattgttgcgatccaaatgtcaagactaatgctgttgcagagacagtgtgcttgatgattaatctggtatcagatatcttagtttctatcgttaatacgaaccctgaaaatttggttgactataccctaaaagtcgttccaaatatacattcggctctgggcaaggaagaagaaccaatgtcaccaaaacagtccaatattcattctctttgtaatagtaaagccagaaattatgccaatgaaagtacaccatccattcatgacgcagagaatgggcgtgtcgctaggaagtggacaaagggaacagtatcagttttcattttgccaatagtggaggaatgttataatatcgttcacttagttggatccataccttctacactaataaatttatacatccgtaacgggaatatggccactgagacgaatgccaagataatgatgctgtctacagccttgagcgaattagtgcaaattactgaattatccagcaagcttggaccacctgagcgaaagattagtatcaccaacaaacacatcaatgcagatatcgcgagaagtagtaaggatttcagatcggtaatgaaggatttgtatttgggaagacatgctgtaaaaaacgctatacacgttgtgccgccggaggacgaaagtacgaaaatattgagtgatttttccaatatagggtggaagctaatggatgattcagaattgggttgttgccatcgccccactaactaa

SEQ ID NO: 3477 - DNA, 1515 bp, Saccharomyces pastorianus
atggattcaaacgtcgctggtgccgctggtcaaattaagactatgaagggtaaatgggggttgaaacttttcaatccactagtcgcgtcgcaaaattttgaatacaaaatttcgaacattttagataaaccattggaaagtgtcttcggttatatctcggttcttcccggtgctttatccgcatacagatacagagctctgaaaaatcatgacgatggaactggacccctaaggtcgtacttccttggtgaaactcaagaaggtagggaccatgatgtctttacggcaaatatgtatttggctgaagatagaattctttgttgggaattggttgccaagagagattccaaatgggttttgaaatatgtcaaagaagccactggtgagactgatgttcctgaagacgtttctgagtttatttctcaaagaagacgttggctgaatggtgcaatgtttgctgcaatttatgctcaattacatttctatcaaatttggaaaaccaaacattccgttgtacgtaaattcttcctgcacattgagtttttttaccagtttatccaaatgctattttcctggttctccattgcaaactttgtccttaccttctattatttggctggctcaatgaatctagttattaaacacggtgaggctttgttcatttttttcaagtatttgatcttttgtgatttagcaagtttgttcattatctctatgggtaataggcctcaaggtgcaaaacatctcttcattacgtctatgattatattgtctatttgttccacatattcattggtttgcgggtttgtatttgcctttaagtcactaacttctggtacggaatcacacaaaatattcgttgatattgttatctcactgttgtccacctatggtctttactttttctcatccctcatgtacctggatccatggcatatgtttacatcatccatacaatattttttgacgcttcctgcctttacatgcactctacaaatttttgccttttgcaatacgcacgatgtttcgtggggtactaaaggttctacacaggagtctaaacaattatctaaggccattgtggtgcaaggtccagatggtaaacagatcgtggaaacggattggccacaggaagttgataagaaatttttggaaataaaaagccgcttgaaagagcatgatttcgaagagtcaagtggtaacgaaaagcaatccaagaatgactattacagagacataagaaccagaattgtgatgatatggatgttatcgaatttaatactaatcatgtccatcattcaaattttcacaccacaggatacagacaatggttacttaattttcattttatggtcggtcgctgctttagctgcctttagagtagtcggttctatgggcttcttgttcatgaaatacttgcgtataatcgtaagttacagaaataaagtagaagatagcggatcttgggaagtttccaaactggatttgactaaagtcttccataaaaaaggttaa

SEQ ID NO: 3478 - DNA, 966 bp, Saccharomyces pastorianus
atgacaagaaacccgttcatggtggagccttcgagtggctctcccggcaggcgtggggcttctaacctttcgaggttttatacaaacaccagtagtaacccccggtgggccaacggcagttcggagagcttggaggagggctatgaacagtcaaacgtctttcagggtcttcctgtgtctccttccagggccgcgctaaggtattctccagaccgtcgccataggactcagttctatcgtgacagtgcccataactcccccgttgctcccaacaggtatgctgctaatttgcaggagtctccgaagagaccaggtgaagctgttatacatctgggcgacggcagcaacctttatcctcgcgagaacacagacttaccggtagacccctaccttgtgtctccccaacaacagcccagcaacaacctatttggtagtggcagactgtattctcaaagctcgaagtatacaatgtctacaacctccaccacggcgccttccctgggagacgacgagaaagagaaatacctcacttccaccacatcatatgatgatcagtctacgattttctctgcagacaccttcaatgaaactaagtttgaactgaaccatccgacaagacaacagtatgtaagacgtgctaattctgagagtaaaagaagaatggtttcagacttgcctccccccagcaagaaaaaggcacttttgaaactagacaacccaattccaagaggattgctagacactttgccccgtagaaactccccagagtttacagaaatgagatacacggcttgtaccgttgaaccagatgatttcttaaaggaaggttacactttgcggtttgcggagatgaacagggaatgccaaatcgccatctgtatcacaatgtataacgaagatcagtactccttggcaagaacccttcattcgatcatgaaaaacgttgctcatcttttgcgaacgtga

SEQ ID NO: 3479 - DNA, 2010 bp, Saccharomyces pastorianus
atgtctcccgtacaggttgtcattttcgttctaacgaggattttcctactattttttaggttgattaaaataattgtaacccctattcaaaaaccgcttggttacttattcggtgattatttcgaggaattagatcgtaaacacgggttcaaggaggaatggtatattatcccttactttttgaaaggtgtattttgttatattctttctgtgagaagacacaggttccaaaactggtacctgtttattaagcaggtccaacaaaatggtgaccatccagctattagttacgcccgtcccttggctgaaaagggtgaatttcaattagaaacttacacatacagtgaaacttacgatatagtgttaagactatcccatatcttgcattctaactataatgttcaagccggtgactacgtggcaattgattgtactaataaaccccttttcgtattcttatggctttccatgtggaacattggtgccattccagctttcttgaattacaacactaagggtactccgttggtgcactctctaaaaatttccaatattacgcaggtgtttattgaccctgatgccagtaaaccaattagtgagtcggaagaagaaatcaagaacgcacttcccaatattaaactaaattatttcgaggaacaagacttgatgcgtcaacttttgaacccacaatcacccgaattcttacaagaagatgacgtaaggacaccattaagtctaactgatttccaaccttccatgttaatttacacgtctgggacaacaggcttgcccaaatctgccattatgtcttggaggaaatcttctgtaggttgtcaaatgtttggtcatgttctacatatgaataacgaaagtactgtttttacagccatgccattgttccattccactgctgcattattgggtgcatgtgcaatcctgtccaaaggtggttgcattgctttatcgcataagttctctgcgagtacgttttggaagcaagtctatttaacagaagctacgcatattcaatacgtcggtgaagtgtgtaggtaccttttacatactccagtttccaaatacgaaaggatgcataaggtgaaggtcgcttacggtaacggcttgagacctgacatttggcaagatttcagaaaaaggtttaatatagaagttatcggtgaattttatgccgcaacggaagctcctttcgccacaaccacgtttcaaaggggtaagtttggagttggtgcttgcagaaactacggtaccatcattcaatggtttttgtcgtttcaacaaacactggtgagaatggatccaaatgacgattctgttatttataggaactctaagggtctctgtgaagtggcccctgttggcgagccaggtgaaatgttaatgaaaatttttttccctcgaaagccagaaacctcattccaagggtatcttggtaattccaaggagacaaaatcaaaggttctgaggaatgttttcaaacacggcgatgcctggtatagatgcggtgatctgctgaaagctgataagtatggactatggtattttcttgatagaatgggtgacacttttaggtggaaatccgaaaatgtttctaccaccgaggtagaagatcagttaactgccactaacaaagagcaatacgcgcaagttgttgtggttggtatcaaagtacctaaatatgaaggtagagcaggttttgccgtgattaagttagtcgataactctattgatattgccacaaagattcggcttttaaacgattcattaagccgattaagtctaccgtcttatgcaatgccattgtttgttaaatttgtgaatgaaatcaagatgaccgataatcacaaagttttgaaaaagctttatagagagcaaaaattaccaaagggtttagatggaaatgacaccattttttggctaaaaaattataaacgttatgaagtcttaactactgaagattgggaagccattgatgctcaaacaataaaattataa

SEQ ID NO: 3480 - DNA, 717 bp, Saccharomyces pastorianus
atgagtagaaagtgggcacaagacaaaatcaccatgagcaatagccttgccggcattgattcgaatgcgagaggtattggatcacttgctgggaagtctcctgaacgtataactgaggagggagagagcatatggaatcctgaaattattgacccagaacagatcctttggccgtataatttagtcctctttcctgaaggtacaaatctcagtgctgatacccgacaaaagagcgctaaatacgctgcaaaaattgggaaagaaccattcaagaacgttttattaccgcattctacaggattaagattctcattacaacagttaaaaccaagtgttgaggttctttatgatataacaattggttactccggtttaaaaaaagaggaatacggtgagcaggtatatgggttcaagagcatttttttagaaggaagatatcccaagttagttgatattcatatcagagcatttaatgtcgacgatattccattgaatgatgaaaacgaattctcaaattggttgtataaaatctggggtgagaaagacgttttaatggaaaagtactattcgacaggttcgtttataactgatgccgaaataaaccattcggttactgatagcttcaagataaaccttattgaaataaccaagatattgatactaccagctttgacgacactttggttagtctataaactcttcgtcttgtttttctaa

SEQ ID NO: 3481 - DNA, 360 bp, Saccharomyces pastorianus
atgctgcataacaagataaatcgaaatattaggaaagttgtcgtcccaggtatttctttattagttttcttccaggggtgtattgttcttttgttccttcaagtaacttataagactatttattgtaggaatgctataagaaggcaaagtggtcttaatgaaaccaaaagactgtttattgtcttattatcatccattttgcatgttgtcgcgccatctgctgtgaaaattactacggagaatgccactattcccaaagggacgttttttaaagacttaaaggaaaatagaattctctcccatctaaaaagcaattcagtggccatttgtaatcaccaaatacacagattggatctttaa

SEQ ID NO: 3482 - DNA, 1272 bp, Saccharomyces pastorianus
atggtcatattatctgggtgtaatgttattcttttgactgtactgctgcctgaaactttaagaaaacaagactctaaaagtgccattgctcaaattttggcagagaggcgtgttcaaatagatcgcaataaatatggggaaggacaagaaaattatcagccagaagaagaagatgaattggaacaaacagaaaatcgaattgcctcactatccactgagaagcacaactatgttagagaggtagatggtcaagattctttagatttagaaagtccaggtagccatgttgcgtatgatgggccatcaagggaaaatcaattgcaacgaatttatacagaggcgagtagaagcatgtatgagtaccaattggacgatagtggtattgatgcaacaacagctcaagttacgagaatcaggtcaacagatccaaaattagcaagatcaattcgtgaaaacagtcttagaaaattacaaaccaacttagaagaacaagtcaaacaagtactatccaaaaatgggagcgaaattgctcctaaggaaatatccgcggtgagaaagtgctgggacacctttttcgtttattttattaaacctcttaaatcgttatacttcctacaatacccacctgtggcacttgccataacattttctgcgatttccttttcaaccgtatactttgttaacatgacagtggaatataagtattcaaggcctccttacaattttaaaccgttatacattggtctcctgtatattccaaactcaataacttacctttttgcctctatttatgggggtcgttgggtagacatgcttttgaaaaggtacaaagagaaatatggaattcttgctcctgaagcccgtatatcgtggaatgtggttacatctgtaatatcattccccatcgcacttttaatctttggctggtgcttggacaaaaaatgtcattgggtaacaccgctcattggaactgctctttttggatatgccgctatgatgactattggagctactctttcttatctggttgattctttgccaggaaagggtgccacaggtgttgcattgaataatctcatcagacaaatattggccgcaacagctgtatttgtcaccacgccgatgataaacggtatgggcactggttgggccttcacgatgttagcctttatcgtcctaggtgcaagcagtgtactcgttatattgaaaaagcatggtgattactggagagagaactatgatttacaaagactgtatgataaagttgactga

SEQ ID NO: 3483 - DNA, 567 bp, Saccharomyces pastorianus
atgcaaacttcaagtagacagtcggatataggatctttgagaagtaatgactcggacacttcattatctgataaccaagttagaatgcatggcggggatagcagcagcagcagtccgcacagagggggcactgactatgccgatgaaaaggccaatttggataccgcgacatcgaacggtcatggtcagaacgggaaccagctagatagactcaagaataaggattatgttgttccaagaaatgaacgtagggggctgctaccccaacttgccatcatacccgaattcaaagatgcaagggactatccgccaatgatgaaaaaaatgattgtctttttaattgcattttcttcaatgatgggccccatgggtacatcgattatttttccagcgatcaatgcaatcacaactgaatacaaaactccagtaatcatggtgaacgtatcgattggtgtatatttgttaagccttggtgttttcccattatggtggtcgtccctgtccgagttggaggggagaagaccactctacatcacctctttgcatgctgttgcattagcatcggta

SEQ ID NO: 3484 - DNA, 1719 bp, Saccharomyces pastorianus
atgctgagaaattgtttaaaaaaactgggaaattatcgagcaaaatgtacaataaagactttacacacgcctgtttacaagacgaaaaatcttcaggtactcagagatgtactctccggtataaagctgttggataaaataatatcgtcatcctcttacaacaagacattaatatatgaacccaaatataaatcaaagccgcaagtcgttagttcacaggacaccatgagactgcagaacgttcttcgagagttcttggattcattacaggtagatgaggttactaatacagaacttcaactagatagctctcgaaagttgggaaaagttggtcttcagctattcttggattgcactcgcgataacttgacactaaattcgacatctttggcatcttcattactggagtattattttaaatatcccgaaagagaagtagttagtggtatcgaaattgggttacaatatattaggggtttcctcgagcaaaataaaataatggtgaaagggcaaaacgatatcgatgccctagtggaccagtttactatgtcatctttagatagtcaaagcgtaaagaatgtcttacgagccgtcaattaccaactattctcagacgatattgttcgagtcataaatggcaataaaacatacgatgagattgatgtctccaaaggttggaaatatcccaccggtatattagataccaatgaagcgtacctaagatctctagagttgcctaacaagaaattagtttccgttgataagaaaatgctggttctcatgtatgacggaacactacgagacgccagtaagattttacccactataacgtatgcgcgaaacttgaagaagtctgttcttttgattgtcagtggagattgcacaggtgatgcactgacatcgattacgatcaacaataacaggaataagagagaaaacaacgagagccgaacaattatcatgaagtactcagaaaaagcaaacaaaaacctagccttacaagaaaaccacgatttcataaaattcttacggttgccttgtggatatgatagcatttactctcccgagtacagtccattggtgccaagcaaaatgtgtgcagacaaatattatggcaatgttgagtctatgaaggcaaccacaggtgaggcgtttttatataatgcaattgatttcgaatcaaaccaaaacgaagcttcacagtctttcctgcagcagacagttaccttaaaaattggcgggcataatgaagtcgaaatcgaccagagaagaaacacactggaaaacttcttgaataacagcttatgccatgggctagccaaagggttcattcccagccatggtatatctttactaaaggcggttccaggcctgagcaggctgaaagctaacgaacccgattttatgaccaagctgggagtagatgctgtattatccgccgttgttctcccatccgaggttgcgtttaagaatgcgtgcggatataattattacgaaattagcaatctaatagccgaaactataaacgaaaactcattccaactagccaaattttcttctacttcaaacctggtggatactacaaaagctgggcgcttagagccatggaacaaaatggactcatgtttggccagcatagcaacgttcatcaaattgcttaccagctgtaataccattgtcacttgtatatacgaaaagcccgaaaaacgcacagcctag

SEQ ID NO: 3485 - DNA, 1950 bp, Saccharomyces pastorianus
atggaaacggttttgcaaccaaaggcgaggccatttgagtctttaaaaagaaaacgtttcagagaatggttaaggccgtcaactgcgcgtggatctcttatacaatctgacacgttgaatttacatgaattctcacaatctaattgcaccaacccattttccgattcaaattctgttcgtggtctgctggtcacaacaccaaccaaatataagtgtcaggatgaagggaacattttctcccgaggagagaacaaatttgaaacgttgtttagtaatagaaagttttatgagttcaaagataatttgaaaagaggattcaagaaaatgcgtcatcgaaaaaacgaaaatgagaacgaaaataaatgctctacagacggaaaaattgcaaaactggattcagataattttgagaaatccgaagattatacaccttgctttaacaaattcagtacaaagccgcaagattttgaaacgcaattcgattatgcaaataaaaatcaaggttctaataagacttacctagataatgagtcctgttggaatttaagtgaaagattgattccttttaataatttgaagtatgaagacttgaaacattttgaagagaacttgcaaagcttagctcctgtaacctttaccccaattgagtcaaacgaatcgcttgttgggtcagattctacacgtggcacgaaaagaagcattcgcaacgattctagcaatattgcttccgaaaaaaggatatgcttgaagcaatacttaaatgaaccaaggtctgatgactctatggaaagcacaccctccatatacattaccaaggaagttcaacaaagaattgaagttttaagctccacagattcatttttcattgagaaagtagattttacttctaatagtaaagctgacgccagcatttctgatgacaaaagctatcatgattccatacaaatggacgaagaacctataagtaatgttaagagtgggaacgaaaaaaacattgacattgctgaccctaatagcaatgcagaaagcgcagctgaaaagccaacggaggtaagctcagtcttaaaggatagggatatagacgctgcgagtagtagctattcagatgaagcggggacaacccctgaagtgattgattcagacgaaatttctgacttatccggaacgagttcaagtgatggtagcaaagtttacaccatcccaacttttcgaggccttagcaagcaagtaaacatttcccaaattctttcaaactttaagaaagagagtttgactcaagataagttaacacatttaatcaaaaatcatcaaaataagaagaagcgcataggattcaaaaataaaaaattctacgatgccttcaatccgtatcttgacagccaagaggagattgaattggctgacattgaaaatacctcaccagttgatatagatcaagatattaaggatagcagtacttccagtgtaaggtttgatcataactcgtatctgttgatttataagaagtctaagaagtcgagcagaggtgggagtcagggtagttatgtgaccgctggaacaaggtcaatcttaaaggcaaagaaaaattttcagcatgatgaggaatctcaaagagcttcaaagtgtgatacagtgggggttgctcagtttttacattatttccaatacacagagtataaaaggcaaaggaatgaagctgaaaattatagactaagaggagaacaattgagcaaatactattctgaagaatatcctcctgatattttgagcgtggagggtgataactccatcaatgataaatcagagattatctcaagtatgagagccacagaaagaaatattggtagacaattgaaaggagtaggcagtcaaggagcgcaaattatttcgcttgatgaggatgtactgggctcaagtgaaaaaaatctgtttacagatattactccatag

SEQ ID NO: 3486 - DNA, 234 bp, Saccharomyces pastorianus
atgcaccgtaccatcgtcatcagaagagcttacttgcattacattccaaagtacaacagatacgaaaagagacacaagaacgtcccagttcacgtttccccagctttccgtgttcaagttggtgacatcgttaccgtcggtcaatgtagaccaatctctaagactgtcagattcaacgtcgtcaaggtctctgctgccactggtaaggccaacaagcaatttgctaaattttaa

SEQ ID NO: 3487 - DNA, 1647 bp, Saccharomyces pastorianus
atgcaagcattgaaaattttagaaaaggccactcgtctgattccacaaagtatggaccttttaactgcgtatattaacctccaaaactatgatgatgctaagaaaactttgaattgcagtaggaaggctttaccacaggaaccagagatttgggtcttagctgcgctattagaagaaggtaacaatcctaatgtaggtgtgaataggttggtcgatttactgaagaagggtttatcagaactttccgaaaatgggtacaaaataactttatctacatggttcgatcgagcagaagctttgagtgatacgcctaattcaaaattgacatgcgaggccattgtttatgccttgatggaattgcttaaagaaagtaccggtgatagtgatggattgaaaaacgttgatgaaacactggaaaagatggcagattcaatggtaaaaattgctgtcttgaaaaaacttattcaatgggatccttgtgacatagcgctatggtctagactaaagactgttgctgaaaaccagaatgaaatcgagcaatttttagtgttctttcaagaattattattttcatccaaggacagtgattatacgcgatcagtcattatagaagaaagccccagtttgtttatgatgtatgtgcacgaatattggagggcacataagggagatatcgaacagacactaaatgtagtcaaccaaattataggttttgtaccgaaccatttagacgtgcgcttctttaagataaaacttttgggccaatcgtcacaatttgataaaatgcaagagttcttccttcagtcttttaaagccttgagtgattcccatgtaaatggcatagaacgtttgtattataaatacgttaattttctacggtatcaaggacttacgggccaagctattgaaattttgaaagaaaaatgttcaactggttttcgtaattgtcacaagtttttcttacagctgggtcaaatttaccattccgtcggcaatatcgagttagctagacaagcatatttatcagggacaagggaaatccccaactgtcctttgttatgggtatcgttatcaaaaattgatgaaatagatctcaaaaatccaataagggcaaggtccattttagatagaggacttttgaaaaacggtaatgacgcattattttacatcgcgaaagttcaaatggagataagacttggaaacttagatcaggcagagttgctcacaattcaggcattacaacattttccaaacgatgcactagtttgggttgaacgaatcaagttgttgaactatgggaagaaaagtttatcgagaaagaccatttttcaagacgcattgaaaaaaacgcaaaatgaccatagggttcttttggaaattggaatatctttctacagagaaactcagtatcaaacatcatcaaaatggttagaaagagcaatgaggaaatcccccgtttatggggactcatgggtttggttattcagaacatacgcaaaattgaaaaaagatcccgctgagctttataagttgtttgaccaatatgaaccaatttacgggcccgaatggatagctgttgctaaacatgtaaaaacgcaatattatacaccaagagcgattctatcgcacttaattgacaaaaaataa

SEQ ID NO: 3488 - DNA, 2349 bp, Saccharomyces pastorianus
atggcagaagcgctactagaaagcattactgttcctgcagttgtttcaaaagatgaatgcatttactgctacgaatccccttataatgagccattagcccctaacgcatcgcctaaacattccctgaatatatgtctgagctgtttccaagccacctgtggtagacacctcccgctacatgcccaagttacaaagcatgcttgcgattctgttcattctaattacttaaccattgttaaagtggaaaaacccaaacaggaaaatgtagaagaaggcaatattaataaaaaaatgaaactacaagtcattgagaaatcagaagatgagactcatgacactttttggagcttgcaaagtttttgtagcgagaattcagctacaaatgtacttttagaatcaacaaatacgaatgtatcttccgcagccttggaaaagattaaccagatactgagagcaaagtcacaagatttcgaagataagaaaaattcttgggaattagaaattagaacatgccctcatacagaaaattttcaagttcctactaagcctgaccgcgctgtgaatttgaacctatgctcttcatgtgatctcactcagaatctttggttatgtctacactgcggtaacattgggtgtggtagagagcaaatcggtattgaaggccattcgcatgctttggaccattaccgtaacaataataatcatcccttggccattaagctaggctcattgagctcttcgacttgtgatttgtattgttacgcctgtgatgatgagactagattcccagacaatgtcaacctaggtactgcactgaaaatatacgggatcaatattcaagaaaagatagcagatgagaagaccctagctcaactacaaatagaacagaacgaaaattggcaatttagaatggttgattccagtggtaaagaactcaaaaagcttccctcaagtaatgagtacggttgtgggctgatcaatttaggtaattcatgttacttgaattcagtcatgcaaagtctactgaatggtggcgttccaagctggtctttagattttttaggaaacgaattcccattggatgttgtgtatcctggtaataatttgaaatgccaatggattaagcttctaaatgctatgaaacttgaaccagaactttacgcaaacggcattaaaccttctgctttcaaaaaatgcatcggtcaaaaccatgaagaattcagctccaatagacaacaagatgcaatggagtttttgactttccttttggattccttggacaggaagtttttctcggataattcagcaggagcctcaaatccaaacgatttgatgaggtttatgatggaggatagattacaatgtaataagtgtggtaaagtcaaatactcttatgaaccagcagaggctatacagcttcccttgaaggaaaacgatgaatctcaagatgttctagagagaataaaggcatattttgatggccaaacaatcgaattcaaatgcgccaattgcaaggaatcagtcacggcaaataaaaagcctggtttcaaatctcttccacatacacttgttttgaatccgataaggattaagttgcaaaactggattcccgtcaaaacgagtaatgaactttcgctaccaggcttaactgacaaggaagatgtgcttgatgtttcttcgtacttatcccaaggatttaactcacaaacagaaaccttattgccagatgatgacgaaagcgatacaaaatttaccccaaataaatgtggcatctctcaattaattgaaatggggttcactgaaaattctagtgcacgtgctctattcaacacgggaaatcaggacgctgagacggctatgaattggttattccaacatatggacgatcccgacttaaatgatccattcattgcccctcctctaaactctaagaaagacaagacagacgttgatgatgattcgttagcttcaatgctttctatgggactaagtccaaagctatgtcgtaaatctctgataatcaataatggcgatgtcaaccgtagtgtagagtgggtttttaataatatggatgataatggagagttgcctggttctgaagggcaatctgagcaacaacagcagcaacaaaaggatctcggatattcgactactagtccttacgctttaactgcagttatctgccacaaggggaattctgtacactccggtcattatgttgtctttatccgtaaaatggtagaaggtgagtggaaatgggtcctttacaacgatgagaaattggttgtcgctgaaagtatcgaagatatgaaaaaaaatggttacatatatttctatacaagatgctaa

SEQ ID NO: 3489 - DNA, 3039 bp, Saccharomyces pastorianus
atgagaaacgaagtggaggtgatgaagaaactgaaaggcgctgccaatgtagtacagtattacgattctaatgcttctcgtcgtcgggatggtgttcaagggttcgaggttcttttgctcatggaattgtgtccaaataaatctctactagactacatgaaccaacgattgtcaaccaagttgtcggagtcagaaattgtgaaaatcatgtacgacgttgctctttcaatctcacagatgcattatcttcctgtacccttgattcatcgtgatatcaagattgaaaatgtcttggttgatgctgagaatagttttaaactggctgatttcgggtctacttcaacaagttttccaattgtgacgacccaccaagacattgctcttttgactcaaaacatttacgtccataccactcctcaatatagatctccagaaatgattgatctctaccgatgcttgcccataaacgagaagtccgatatatgggctttaggtatcttcctttataaattattgtttttcactacgccttttgagatgacaggtcaatttgccattctgcattccaaatatgaattccccgtgaataagtattcatcaaagctaattaacttaattatcataatgttggcagaaaacccaaatttgagacccaaaatttatcaagtgttgtaccatatatgtgatattttgaatgtcgaagtgccaatcgaggataaatatcaggaaggtgcgtatgactttgctaagtataccaagtttcagaataagttacaaaatgttcaaatacagttgtaccaactacagcaaaaaaaaatcatgcagaacaataaattgagtgagtcagaagaaaacctgttgaatgatatgtttctttcctcttttgaagtttcatctaaacttccaatgaatgctagtgatggtactgtgataaccggaagaacatcatcccaacccatcagtaaaaaaactgaagaaaaggaagaaggctcttccgaaaagaaaaagtccaccgtgtctgaagacaaaacatcaagaaatacttccagcgttactaattccagcacgcttaatgttcctcaggaagttaatacaattcagtctccaggaatagcagacaagtcgatttttgatgataaaactcctggagagttatattatccaagtgtgagcgaattagatacttatctagacaaagaaatagtgaagcagccaagtgacccgagtgtatctgatcaaaaccctcatttgaatacacagtcactcccacaaagacagaagagtacaagctcatattcttctggtgggagatcgatgaagagtacatcttacggggcagcaaccattggatcagacgaggcgttgacaaacgaaaaaaatgtagggatcaataaaatgaaacagcataaatcaaacaatcccttcccaaaaatgaatgttgcttatcattctacaaatgaattgagtaatgatgccagtaatttcttcttggaagaacaacagcaaaaccaaagatctcaacaagcacaaaatcagcctagcgcacaagggcaaacttatccagaagaagctcaatatcaatctagggtagaacaacaacagcaaccacagcagcaagaccagcctcaagcgcccgctaattataaccaaagagcgttttacactggaagagatagagccggtcaatccatgcagttgggtgcaactgttgcaggtgatagcaatagaagggtcaacttccagaatatttctcaaaactatgttgctaactctcaatcaggatatcttccaggtcaaaattcctcagtaaatccgattggaagacctatcattcccatgaaccagcaacaagcgcagcaaattcaagcgcagcaattacaagctcagcaaattcaggccacgcagcaaattcaagccaagcagcaaattcaagcgcaacagcaaatgcaaattccaagtgctagtaaaaatgccagttacgtttcaggcagagcaaaccaaaccacggatgataccagaaattcccaggtaggtgagcctacggttacaatgggcaatactctcaatgagccaatgcattcgtcgaccaacaatgaaggtcttctgattgagctatcgcctttgaaagaagatgcaagaaaggaaccttttgaagataaaaaagtacctcaacccggggctccggaagacgcagggattaaaggaagtaatggtctgaacaattatcgaaatggtgttcttaatctaagtttgaatgaaatggacttgtcacgagacgatactggtgctgcagtttcttcttcattttcttcgtcttcgtcatcatctttatcaattcaaccggctaaactttctggacgtaaaggaacgagcaagaagaagaactattccacagacgatttggacgacagtatggtctctagtgaaagtattgatattgatctggacgatgcaagaagaggtaaagcgtctgaaagaaggccgctgcataatgaaagaaatcgtaaagaactaccaagagcaaccgatgctaaaaagccgaatcaatttgaggacaaggatcacagtgcatctacgaggcagccccgccaaccgttggatttgaacttccaggaagtaaacctctcctctccaacattaactcaagagcacagaaataaatctgactcaccagctccgcaatcacatcactcgcacagagttccgcctcattcttccaccacaataagtgaaaataagcgccacagcacaggtcatgaatcaacccgatcaagcggtaagcatgatatgcatagaaccaattccaagccaagacacgacttggaaagatacaggcaatccaaggatagggacagcaatagcagcatcacgatcagtacatcgactccatcggaaatgaggaagtcctttgctagagcccgccaatcactggacctcgagagaattcgtcgtgaagcgacggcaaataacggatccggaagtggtggcagtggtgggaaaagacggtctattttctcagtatttagaagtgagaaatga

SEQ ID NO: 3490 - DNA, 291 bp, Saccharomyces pastorianus
atgtcgactacgaatggcacttctaggagcgtttcagcaatgggaaatccggcagttgagaggtatactccgggaaaaattgtctgcgtggggacgcataaagtcgagattgtaaattatctagcagaaggtggctttgctcaaatttacgtggtgaagtttttggagtatttgaatgaattcgataatacagcgagtctgcccttaaagattggagatgtcgcatgcctaaaaagagtgttggttcatgatgagaatggattgaacgagatgagtaacgaagtgaggtga

SEQ ID NO: 3491 - DNA, 741 bp, Saccharomyces pastorianus
atgtcggaagtcgaaagcgcatataatatgaacacggcctatctggcgtctttagtactgatcgtatcagctatatatgtcgttagactagtgacgatcctgccttttttccacacccaatcaagggtaaggaaggagacacgagatgaggctagtgttttgaggacgcagaagttatcaaagaagccgctcaaaattttcgtattcctggggtcgggaggccatacgggcgaaatgcttcgtcttttacagaattacaaagaccttttgctagaccaatcgattatatacgtaggctactctgaccaggcctccaggcagaaattttgcagccttgcgcagaattttccccgctgtcaagtgaaatactacgagttcatgaaggcccgagaagtgaaggcgactcttttgcaaagtgttaagactatcataggcacgttggttcagtctcttgtgcatgtgattagaatcaggctttccatgtgcggctctccgcacctcttcttgttgaacgggcccggaacgtgctgcatcatcaccttttggttgaaaaccatagaactcgttctacttttcttggattcttcccacatcgtctacgtggagtcgttagcaagaatcaacactcctagcctgacggggaagatactgtactgggtggtggacgagttcgtcgtccaatggcgagaattaagagacaactgcttacccagatccaaatggtttggcatactcgtttga

SEQ ID NO: 3492 - DNA, 2769 bp, Saccharomyces pastorianus
atgcagataccaaaattcgaaaataaaccgttcaagcctccgagaagggttgcatcaaataacagctcccaacttaagccaaccaaaaccagctcaactcccatatctagattaaatgttacgacccactcaaaaagaaatgtcccagcagagacacccctgagtgttgctaaaaagcctaagattctagtctcaaatcaaaaagtcagctattttactatcatgtataggaagccgaccaccaaaaagcacaagacttggagcggcgatggttatgctacattgaaacctgatagcaccaagatgacattttataatgaaacaggaaagcttcttgggtcaagtgctttaccaaatgactcgggttctatttttgagacatttttcaaagtgggttctaatgaagtgcagttagattatgagttgaaggatagaatagaaatagaaaatgccaaacaaactttatcacaagcaaccggaaattctagctcggccgccatagatacaacaaccatagtgccttccgcgaacaatattagtggcaaatttcaaatgcctttgtctcaactatttacgttgaacactgtgaaaaggttcaagtcagtaacaaagcaaatgaacgagcatatgactgtaccaactaacaacgttcgaaatcttcaagcaaagaaatattatccagtgttcgatgttaataaaattgataatcctttagtaatgaacaaaagcgaagatgctgaagtcgacgtgatcgttgatcctttgttaggtaagtttctacgtccgcaccaaagagaaggtgtgaaattcatgtacgattgtgtaatgggtctagcgagacctgatactgaaaatcagattattgattgtacttctaaaagtttagtcttggaaaacgactcagatatcaacggatgtctattggccgatgacatggggttgggtaaaacattaatgagtataaccctgatttggacactcataaggcaaacgccctttgcatcaaaagtttcacgttcgcaattaggtataccattgagtggcctctgtaaaaaaaccctagtagtttgtcctgttactttgataggaaactggaaaagagaatttggcaaatggttgagtctgtcaagaatcggcattttaacattgagttcaaaaaattcacctgacatggataaaatggcagtcagaaattttttgaaggtgcaacgaacttaccaagtcctaattattggttatgaaaaattgctaagtgtttctgaagaattagagaaaaacaaacatcttatcgacttgttggtgtgtgatgaagggcatcgattgaaaaatggcacttctaaaatcttgaatactttgaagagcttagacgtaagcaaaaaacttctgctcacgggcactccgatacaaaacgatcttaatgagtttttcactatcatagatttcataaatccaggagtcctaggaagctttgcttctttcaaaagaaaattcattgcaccaataacaagggcgagagacaccgcaaacagatataatgaagacgtgttggagaaaggggaagaaaaatcaaaggagatgatagagattacaaaaagattcattttaagaagaacaaatgcgattctggaaaagtatcttcctcccaaaacagatataattttattttgtaaaccgtatgatcaacagattttggctttcaaagacattttacaaggagcacgattagattttggacaattaacattcagttcttcgctagggctcataactctactgaagaaagtttgcaactctcctacattgatcgggtcagattcatactacaactcgcatataaaggataccaaatcccaaggaagttacagtcgttccttaaattctggtaaattaaaagttttgatgacattattagaaggtatcagaaacagtacaaaggaaaaggttgttattgtatctaattatactcaaacattagatataattgagaacttgatgaacatggcaggaatgtcacactgcaggcttgatggctctatacccggcaaacaaagagattccattgtcacatcttttaaccggaatccagcaatattcgggttcttgttgagtgcaaaatctggaggtgtggggttgaatttggttggtgcttcccggcttatattatttgataatgattggaacccctcggtagatctacaagctatgtcgaggattcatagagatggtcaaaaaaatccatgcttcatataccggttggtcacaactggatgcatcgatgagaaaattttacagaggcagctaatgaaaaacagtttaagtcaaaaatttttgggagactcggaaacaaaaagtaaagggtcctctaatgacgatcttttcaacaaagaagatttaagggatttattttctgtcaatataaataccaaaagcaacacgcatgatttaatttgttcgtgtgagggtttaggagatgaaattgaggaacttccagaaaatgaacaacaagaagtcataaaaccggaaaagcgtagtcccacaacatggactagcgccttggagttacaaaaagaaatgaatgaagtagacaccaaagacgttgcaaaaaagtcacagtccatacggcagtgtcttgcaaattataaacatatagatccaacaaggcaagatgaattatttgatgaggttattacagaatcttttgcagcattgaaagacgatatcacatttgcattcgtcaagcctagcgaaatatgtcttatcgaagaatga

SEQ ID NO: 3493 - DNA, 2931 bp, Saccharomyces pastorianus
atgaatttaacaaatctgttcagatcagtcctcaagtaccgaaaaacaaatctgagcttacttttgttgatcacctatgttgttattgcagtactctacgttttcgaccatgagtattataaatttaacttgccaaaaaaagatgaacaacccgaatttaatgaactgttagaaacggcatggacagatttacaaactattacagcttctttccatccgtatacgtctagagataatgacaaagttcatgattacttactaagcagagttcaggagattacaaaaaatgtttccttcgcaagcatttccgatgataatgatagtaaaagatcgatactatttcaacagcgggacgttttcaatgcgtcctctgatatctcaagagtgatttattttgaatcttccaacattttagtcaagttagagggacaaaatcccgaccaagaaggattacttctatcagctcatttcgattctgtgcccacaggccacggggctacggatgacggcatgggtgtggcttctttattggcgaacctcgaatatcatatcaggcatagaccggacagaaccttaatcttcaactttaataataatgaagagtttggcctgttgggagcatcggcgtactttaatcatccatggtccgttctaactaaatacgtcataaacttagaaggaactggtgctggtggtaaagcagtgttgttcagaacatccgatacttcaactgcaaagatatatcagcaatcggttagagctaacccatttggtaactctatttatcaacaaggtttttatagtggatatgtcagaagtgaaacggactacaaggtttatgaacaaaatggcatgagaggttgggacattgcattttataagcccagaaatctttatcataccatgagggactccatacagtacacttccaaggcatctttatggcatatgctacatacctctttgcaattaagttcgtacgtggtgtctaattcactagacacggaggatcaaacacctgcttgttatttcgattttatcggacagagtttctttgttatgagttccaagacattattttactggaattgtgtatttttgttaatttcacccattgtcgtaatcggcctgtatctaatttcccgggataggatgacttggaaatcctattcttggctttcgtggatgcgctttccactttcattgttattgggtattgttactgaaaagattttctccaacgttgtaacacgtataaaccctttaacgttttcgagaaactacttttggcctctttcagtgtttttcactgaagtactcttggccaattacattgtaatcaatttattgaatcgcttttccccttgtaacgatatgaaaagtttatcaatcaacgaactgtttatcatcttatgggtcactttattgtttacgtcgaaaatgttgtatagttctggatacaagtatacaggcctttatccactctcggtattgtttatactaactactggggctgctatattgaggctgttaggatctgcattgaggccaaaaggaggaaaggggcatggcagagaatttatggatcaccactctggttatagctctcactctcaaatagatatcgaagaagaaaaccacgaggacactcaacagttccaaaatcaatccgcatcgctgcaggacgaacaaacgagtatacaagaggataatcgatcaaccactctttctggggcgccacttcacgttaacgatgatcaggacactgattcagaaccaccacaacatgatgaaagggcacctttattaaagagatccagtcacatcaataacctaccaaatactatagaagcttcttcaaaaccaaaatacatcgactatgcatggattatacaatttttagtaattgtaccattatcgtcattcattctgttcagtagtgtggatgctattatggatgcgctaaaccaaactgtccaggaagggaataaagctacacttgacataattaaatttgggatgaagggtagtattttaatcgcactaccaattttaccttttttttacaaagtcaactatatgactatattattgactgtactacttttcttgatttccatatcaaaaacacttttggaaccaccgttcacaaataacaatccattaaaggtaagattctctcaaaatattaatttgtcccatggcgatgatgctaatgtacatgtcctaggaagagaaggaaattttttgaaaccaatgcttgaggatttaccaagtataaagcacagcttcacaccaataaactgtaatactattgcaaatggaatggagctttgcacgtatgacggaatgaggccaaacttattgagctcaaattggaaaacgaacatcagtgacatgctgaagatccatattctacacgatagtcgaaattcaactaacagatccccttacgaaccaatagttgcggagctgcttctggaggtgaaggagaatagagcatgcacgttatcgtttaatggtaagtcccatgaaaaatcgcctgttagagaagttacagtttaccaaggcagaagttctactttgcagggctcaaatacttcaaaaacgatcaaatgtagttctggcatagatgaattgcaattgcataaacttgacttcgatcaagaaagttatcgaatcggggtccagtggttcccaaaaatcttaaccgacaacaatatagaagatgataatctggatacaaaagacgagctatccgtatcgattagttgttattggggagagtatgactcggattcagttgtgaatggtactgctgttaggaaagtcccagcatttgacgaattattgaattatgcaccaccagctttttcatttacaaacgagcaaaaggggctagtgattgttcaagacgctgtaaccttataa

SEQ ID NO: 3494 - DNA, 1062 bp, Saccharomyces pastorianus
atggattatggctattttcccccttcgcaacacatggaagaaacaaatggtgtggatttctggatagatagtaatgtcgaatttacgcagtataaaaggcccaactcttctacgtccacacttacaagagtcttaacggacactactaatatatcgaataacagcggatctctgaaaaggaaaacagtcaagcacaaaaaattctcgcaaaggaaaatattcaacaacagtgagtattttgacttcgacaagggaagttctgactgtaaacacgttttgaaaagtatttccaagcaactaattttcctcccaagatgctttcaacatcacagtatccgaggttggatgaaagaccggtactcagagtttggctacaagataaagagaaaccaacattgccctccatctgcatgtgtacagacactttacaacacgaacaggtgtgataacgggctgtttactcccagtgatttagactctctgatcttatataaattcatgagatactccgacaataaaaaagagctgatgtgcagattttgccagggcagtaattgggtagttgcagaaaactttctaaagcatctattttttgcgcacgggatttcgtctgaattcaagccacacacactgtaccaatttgagtctaagcttctgaaaatccaaggaaaaaatgtcaatttcaagatacaagtttcgaaagagtcgcagttcagcaaaaaaatcctgagctcactcgtcgtatccgtcatcccctctcccttggcatattatacacagacgttgaatggggggtttagaagaatacacgtgaaatgcccctgctgtgaaagttggattcgtttaggttggtgcgaatacgatgagattatcaaggattcctaccaggatttcgagtcgcttcgaaatctcaatgcaaattacgacgggatgtcgtatatccaaacccgcaatcgggaagagattgaaggaatatacgaaaactatttcacccactatatcctatgcgatttggcaaggttccgaaccaaatgtctatatgttcaagttataacaaaataa

SEQ ID NO: 3495 - DNA, 156 bp, Saccharomyces pastorianus
atggaggatctgcacgcgtgtgttggccagatacccaatagcgacctcctgctgctgttccttgcggatagtacgtttccctacgggttgttggtggtcaagatagaaaaggccttgagggaactgaccgatttgtatggttacagactaggttaa

SEQ ID NO: 3496 - DNA, 222 bp, Saccharomyces pastorianus
atgcttcattttgaaaacgtcaaagtgttcctggagaacactttgaagccatacgatctcagctcggtggatttcaagacttcccacttacagtcctcgatactgctaaccgccacaaatggtggtatactttcctatgcgacctcggacagtagcgtgccgaaaaactcgataaacgaaataaactcggtcaataatttgaaaatgatgagcttgctgatc

SEQ ID NO: 3497 - DNA, 975 bp, Saccharomyces pastorianus
atgcaagaattgactattttgacctctgcttctttcggttctttggaagaagtcgactccattaacttggtcactttgcctgccatctctaccttctctaccgatttgcagaccgccaacaacatttatgtttctgacactgcattggaaagtgtcgaaggtttcgccactttgaagaatgttaacactttcaacatcaacaacaacagatacttgacctctttccaatcatctttgcaaagtgtctctgactctttacaattttcctccaacggtgacaacaccactttggctttcgatgatttggtttgggccaacaacatcactttgagagatgttaactccatttctttcggcagtttgcaaaccgttaatgcttctttgggtttcattaacaacactttgccagctttgaacttgactcaattggccaaggtcggtcaaagtttgtctattgtttccaacgacgaattatccaaggttgccttcaccaacttgactgccattggtggtggtttcatcattgctaacaacactcaattgaagaccattgacggtttcagtaaagtccaaaccgtcggcggtgccattgaagtcaccggtaacttcaccagtttgaacttgtcttctttgaagtctgttagaggtggtgctaatttcgattcttccgccagcaacttctcttgtgacgcattgaagaagttgcaaagtaacggtgctattcaaggtgactccttcgtttgtaagaacggtgctacttccacctccgtcaagatgtcttctacttcttccggatcttccaagagctctgccacctcttccgcttcttcctctgatgattcctctaacgctcaagccagtgtttcctcctccacttcttcatcttccaagaagtctaagggtgctgctccagaactcgttccagctacttcattcatgggtgtctttgctgccgttgccgttgccttgctatag

SEQ ID NO: 3498 - DNA, 333 bp, Saccharomyces pastorianus
atgggccccgccgattctccatatgccggtggtgttttctttttgtccatccatttcccaaccgattacccattcaagccaccaaagatctccttcacaaccaagatatatcacccaaatatcaacgccaacggtaacatttgtctggacatcctaaaagaccaatggtcccccgctctaactttatcaaaagttctattatccatctgctctttgttgacggatgccaacccagacgatcctttggtgccagaaatcgctcacatttacaagactgatagatccaagtacgaagctacagccagagaatggactaagaaatacgctgtataa

SEQ ID NO: 3499 - DNA, 192 bp, Saccharomyces pastorianus
atgatatctaataagtacttagcaccgaatgtcaaatctacgggttggtccatttccaatttgatgcttgtttcaggatgttccatgtcaacaaatggttttattatgacggatcctgaaccgatatcaccatccgctacgaacttgattgtttccttagtgatcatgatattaatagaatcgctcagttga

SEQ ID NO: 3500 - DNA, 237 bp, Saccharomyces pastorianus
atgataccatcttccttacattggaaattgaccaattggacacagtctttgaaaccgtcgatgattcttttgaaaagggatgcttcttcgaatttagcttctaacatttttttgtctttcaactgtactttatttgtttgctggttactgacgttgacaaaaagaaggatggggggcaacgagaatggcgagaagaggaatggaaggaaggctaaagcaaaaaagtatcttatataa

SEQ ID NO: 3501 - DNA, 111 bp, Saccharomyces pastorianus
atgatggagtccggtgtgttgtcagcaattaacgttaaagtgtcggtgttgttaccgcaacgtagaatcttacttagcgaggtcaaatccatacccagtgtgacaggatga

SEQ ID NO: 3502 - DNA, 1308 bp, Saccharomyces pastorianus
atgaaggttcaggatcttggagccaacaaggtgggactagaagacaagagtttgctagcgaatgaatctagtataattagcgcattcaccagaagaataataaaggaaaaaagcggtaactaccaggtgctgaaaagatctattgatgggaaattgatctaccctgaagctactggagtatcttccaatagaggtaataagctgttgcagaagagtgaagtggttaccaggagagatttgaataattctaagcccattattgagcagaccgtcttttataacggttcagagcatcgccttttacaaacaaatattgcggctgataataaaactaacaggagacgtaaaagaataaaattcacacccgacatcaacgttgagccagtctcaattggtggtgaaaacaacaccaacgaaagcaacgaaagcgacgatggcatcactgatgattatgacggcgatgaagatgaagacgacctatcaagattagtgaacattaaggagattttgaccccaattctttcgcttggggacgtaataaaccataaaacaatctcaaaaaccttttcaagcttaattttgaagaacctggctacccaaattattctaatgattgaaagggagcaaatgtcagttgttagatattcccagtttttagaagtgtttttgggtgatcatccagaaccgatctatgaatccaacttatacctaccgccttacaatcataacttaactttacctgaggactgtaaagcaaccggattaaccggaaatagtccaaagaatagtatcaacgaaactaatgtcaacaccaccatgactacagaggatgaatactccaataatgaaacggaagaaactaaagatcaagaccctttttttgccctaccaaaactagaacaatctaatgcacttctatcattgctaccatcatcatccggatccgtctctatttcgacgttaacagcagcggaacaacaacaattgaacgacgaaattgaatcagctagacagctatcacagatcgcattacaaagaaacaaagaattcataagaaacttgcaaaaaattagaaaatccgtgataaaggccaatagaataagggggaggatattaagctggagccgagagttcttgggcatttcagacgatgatattactattccagtagcgctgcgtgttgtcaagagagggttgatcagtgctacaacaaacaagacaacaaatttcgaagaagaaattgagaatggcatggaagatggcgtggctgatgataatgaacctgacgatgaggctaatagagcttga

SEQ ID NO: 3503 - DNA, 2490 bp, Saccharomyces pastorianus
atggcggatcagcttgtcgatcccgcgttacgggtttccttgattcaaacgatatcaggaatttcagttcttttaggcactgttacattagagcagtacattctgccgttattgattcagactatcacagattcagaagagttggtagtaataagcgtcttacaaagtttgaagtctctattcaagacgggattaataagaaaaaaattctatatcgatatttcgaaaacaatctcccccctactactgcatcccaataattggataagacattttacactaatgataatcatagaaatcattaataaattgtcaaaagcggaagtctactgcattctgtatccaataataaggcccttttttgagttcgatgttgagtttaattttgaatcaatgataacctgttgcaagcaaccagtgtcaagatccgtttacaatttactgtgtagctgggctgttagagcctcaaagtccttattttggaaaaaagtctccacaaatcatgtagattcctttggaaacaatagaattcaatttataacaaaggacttctcgagcaagaactatgggtttagtaaaaaaggcgtgaaattggactcttctataaaaggcgttaagtcgccatctactgttcattcctatgataataaggaaatcccgttaacagccgaagatagaaattggattgataagtttcgcgtcattgggctaacagagaaagacatctggaaaattatagccctaaggggttatgtaataaggactgcaaagatcatagcgacaaacccagattttctatatagcaacaagcgccaccacttgctaatacaaaattcgcccccaaatctaaaccttacaaatgtcatgccgaggaatatattttttgatgtagagtttgctgaacaatcgacaagagattcccaagatcctagtatagaaaaccagcaaatatatacaaacgatgaaagtgagcaaactagcaataagttgagcgtcaatagtgctaagcagctatccacgatcatggacattaatgggtcgttaatgttcaagaataaatccattgctactacaacttcaaatctaagaaatgtttttgttcagttggaaccaacatcctatcacaaatattcaacaaatcacggaatgaatgataatgttgacgtcaaaccagaaaggcaagtaatggttagcaacagttatgatggagacgttgagaccatacaaaaatttttgtcaacctttaagattctaccacctttaagagactataaagagtttggacctattgtagaagttttggaaaatccagatatgagtaaactaacaggtaagctaatagctacactaatggaaaacgaacccaattctatcacggctgctactgtatcctgtggagaagtaccgtatttagtaacgggttcagaccagggtgtggtcaaactttggaacttaagagaaattgcactcggtgaggtttactcctcttccttaacttatgattgctcctcaagcataactcagttgactataattccgaagtttgatgcttttgcagtttccagcaaagacggacaaatcattatattgagggttaatcattacaaacaagaaaatgaaacaaaattctcaaactgcgaatgcattagaaaactcagcttaaaaaatttggataaacacgaatatggtacgagaacgagagcgtttgtgaacgatgagaaatctgtattaatagttttaacgaacttatcaagggtgatgatatttgacattaaaaccttagaaagaatacaagtcattgagagttctccaagacatggtgccatttctagcatctgtatcgatgaggtttgctgtgccttggttttggggacaacaagaggtattattgacatatgggacatccgcttcaatgtcatgataaaaagttggtcattcggggatcacacgcccattactcatatagagacatgtgggttttacggggaaaattccataatcgtcgtaggcggtagttcaaaaacatacctgacaatttggaattttgttaagggacattgtcaaaccgcgttcataaactctgatgagcaaccatccatggaacacttcttgccgcttgaaaaagatttggaagatttagggttttgtggagtcaagtctttacatgcattgagtacaatttcagtatcaaataataaaatctttgttactgacgaatctactagatccattatcatgtttgacctgaaggaattatcgctctctaaggcagtggtcagtccatcaagatttgacgatgtctttattccaacacaaattacggccaatcttactatattattgaggaaaaggaaaccttccagcacccacccaggtgacgattcattataccatcatgatatcataaatgcgttggctacaattcaggtcgatcaaatacctctattgattgtttgcgataattctgggcttattggaattttccagtaa

SEQ ID NO: 3504 - DNA, 1944 bp, Saccharomyces pastorianus
atgggggcacagctatccctgttggttcagacgtccccttccattgccattttttcatacatcgatgttttagaagaagtacactatgtttctcagctgaactcatcaagatttttaaaaacatgcaaagcactagaccctaatggcgaaattgttatcaaagtgttcatcaagcccacagatcagtatagcttacagccttttcttcaacagataaaggcccaatcgtttaagctgggacagctaccacacgttttgaactatagtaaattgatcgaaacgaatagagccggctatatgatacggcagcacctgaaaaataatttatacgataggttgagtttgaggccgtatttacaggacattgaattgaaattcattgctttccaactgctgaattcgttaagagacattcataatctaaatattgttcatggtgatataaaaacagaaaacattttagtgacaagttggaattggtgcatattgacagattttgctgcatttatcaaacctgtatatctgccggaggataatccaggtgagtttttattctattttgatacttcaaagagaagaacttgttatttagctccagaaagatttaactccaaactttatcaagacggccattccaaaaatgatacgttaaccaaagaaatggatgtatttagtcttggttgtgttatcgctgaaatatttgctgaaggcagacccattttcaacctatcacaactattcaaatacaaaagtaacacatatgatatcaataaggaatttcttatggaggaaatgaaatctgtcgatttaagaaacatgattctagacatggtccaattagatcctggaaagaggctatcgtgtgatgagttattaaatagatatcgcggaaatttctttcctgattatttctacactttcacttacgattatttcagaaatttagtaactatgacaacaagtacaccaatcacagatagtgcttttactaatagtacattagaggataacctgaagcttctcgatgaaactaccgaaaaaatttataaggatttcccgcaaatctgtcattgtctagattttcctctaaccaaaggcaaggacaagataaaagcagattcattaacattcacatctgatgtcatagatagagaagatagtcagctacttaacgccaacttgtacttccccggaaaccatcatctagttttgcagaaattcacccaagtatcggaaaaagtaaaatcggttaaagaagaatgtgctttacttttcatctcgtatttatctcatagtctaagaaatattgttttgaggactacaaaattaaaaaatttagaactattagcagtatttgcgcagtttgtttcagatgaaaataaaatcgatcgggttgtgccttatctcgtgtgctgttttgaagatagcgatcaggatgtgcaagccctatctttgttaacatttacccaagtactatcatctgtgcgaacactggaccagttgaacgaaaacgtattcgtagactacttactaccaagactgaaaagattactcattaccaatagacaaaatagtaattatctaagaatcgtattcgctaattgtttgagcgacttagctgttatcatcaacagatttcaagaaattacttttgccaagcactataataacaactcaacagataacaatttggaaattatggaaagcgccactaaatattcagcaaaactgattcaaagtgtcgaagatttaacagtactttttctaacggataatgatacaaacgtaaaaatggcacttttgcataacatcttaccactttgtaaattttttggcagagagagaacaaacgatatcatattaagccatttaataacctacttaaatgacaaagatcgcgcgttacgggtttccttggattcaaggatatcaggaattcagttc

SEQ ID NO: 3505 - DNA, 135 bp, Saccharomyces pastorianus
atggccctcttgagtttattcaaatcacttaatacaagtatcacatgttttccattctttgaaaaaaaacgtatcttcctatacaattccttcttctgtgatgtatattgttcaaaaaattcctgcgcatcgtaa

SEQ ID NO: 3506 - DNA, 813 bp, Saccharomyces pastorianus
atggacgtagagaacgtcactatactctggaatgtcttgagtggcactgtcatgcaacattttgagttgatggaaaatagggaatcttccgctactgctgaaaactcaaacaatagtggcgaggattcacttggtgttgatgtcgagtgggtagatgatgacaagtttgtcattcctgggcctaaaggtgccattttcgtatatcaaattacagaaaaggcacctataggtaaattgattgggcatcatggttccatcagtgtcttggaatttaatgacaccaacaaacttctgctaagtgcgtcagacgatggtactctaaggatatggcatggtggtaatggtaattctcaaaattgcttctatggtcattcacaaagcatcgtatctgcgtcatgggtgggtgatgacaaggtaatatcatgctcaatggatggatctgttcgtatatggtcattggaggagaatacactactggcgctttcaatcatggatggtatccccatttttgttggaaggctatcacaggatggagaaaaatacgcagttgcattcatggatgggcaagtgaacgtctacgacctaaagaaactaaacagcaagctactgaaccgtaagcaacaatcgttgtatggcggcaatagttgcactaccacgggcagcagcattacaattccacaacccattcctctctacgctagctaccaaagtaaccaggacaacgattgtgtctttgacctgtcgtggaaccatacgggggacaaaatttctgtagcatattcgcttggggaaggttcagttgtagccatataa

SEQ ID NO: 3507 - DNA, 612 bp, Saccharomyces pastorianus
  modified_base (558)..(558): a, c, g, t, unknown, or other
atgagtgttacgagtgaagaactaaattatctaatctggaggtactgtcaagaaatggggcatgaagtgagcgcattggcgctacaagatgaaacaagagtgttggattttgatgagaaatacaatgagcatattcccataggtacactagtaaatctggtgcagagaggaattctgtatacggagagcgagtttctggttgataataaaggcgatatcagctctttagatgaacagcatctttctgaggactttaatttggtgcaagcactacaagttgataaagaaaaatttccagaaatctctactgagggaagatttgccttagaaaatgattccgagaataataattgtggcaagaatgactcaggcacgactgatggactaagcctaggctctgatgtggcatctagcggtactggtgatagcctagatggatttgtcaagacgttgaaggagattacgaagctagataatattgtttcctccatttggaatccattgaatgcatccattcttgcatacggtgaaaaggattcagttgcaagattgacccanaataatagagactctagaggatccccggtaccgagctcgattgtatcatgtata

SEQ ID NO: 3508 - DNA, 117 bp, Saccharomyces pastorianus
atggcttatatggctacaactgaaccttccccaagcgaatatgctacagaaattttgtcccccgtatggttccacgacaggtcaaagacacaatcgttgtcctggttactttggtag

SEQ ID NO: 3509 - DNA, 3093 bp, Saccharomyces pastorianus
atgggattttgggaggataacaaaggttctattacctcagggctgaagagcgctggaaagtatggttaccaaggaactaaattcgtcgccaagtcaggatacaaggcaggaaagaaacactataatactagtaaatcgcaaagggaaaagaaaaatggcaaaaacaaaagtgatgaagagatcgaaagtgacgaagaagaatacgaaagaaaaccggccgatataagaactttgaaaaacccgaactctttccctcctccacctttaaaagctggacagagaacgtatacaggacagcaacagcagcagcagcaaatgccaggcgaagaatcctatggtgcttctcaagcagtatatcaagctcaacctggtgtttctccaatggggcagtcacaatatgcgcagccacaatacgcgcagtatccacaacagcaacaagctccggtggcacagcagacgcctacatatggacctcaagggcaacaagtgccgccgtatggatcatattctaattcgactagtttccagtctttgccgcagcagaatcaacctcaaaatccaattcaaagtcaaacatccttgaactctgggtcccagcaaaacacaggttttcccgcacaaagcccagggtatggatatcctcagttagctagtccaacacaaccacaaccactgctgcctcaaaacaataatcagtatcaacagcagcagcagcagcagcagtccccacagaatccagctattcggtatgggtcgcaaggcctacccaattatggacagccccaatatccttcgaatccacagcaagtgggtcagtcacagcagcagccaccatcccagtttggtcaacaggtcttaccgccgcctgtacaacaacagcagcatcaattccaaccccaggccggtcaaccaggcttgcaaacccctggacagtcttcttttaatgcctttggtcaacaacaacaacaacaacaacaacaacaacaacaacaacaacaacaacagcccctaaatcaaaacactgtttcaggaccatatagtaataacgaattcaattcagcaagtgcgtacggccaacctatgccaaacagcataaacatgcaaggaacaaaccaaaattatggagccccacccatgcagagtcaacccccaatcggtggacagccacctatacctgagaggatgcaaccgcaaccgcaagcacttccaccaagaaatgcttaccaggccgaaccatctattgattcctcccaatccactcctcattttgaagtcgcaccgtatgatcctgatgcacctgctcctaggcccaaaattgacatgcctatagtggatgttagtaaccttcctccgcctcctacgcatagagatagaggggcaaccgtaaaacgagaatcgacaccaagtgtcggaagcttaccagacactaataagaaaactctgccaagcgtgacttcttcgcctgcaatttcattgttacaaaagaacccagagcctattgccataagcaatgggcctgagcctattgtcatgagcaatgagccagatcctgctgtcatgagcaatgaaccagatcctgctgtcatgactaatgagccagagcctactaaggagccagattctagcgccaaacaaagtgaagagaatactactaagccttccattttaggacattatgatgttcaagtaaactttgctccacctccgaaaccttttagacataagcctaattccgaaccttctgaccattcccggaaactctttaccccagaacaaaaagcaccacaacttccttctcgaaataattccgaactttctgaccaaccatcacggacaaagtctaactccaccgaaccagtgtcaccagcaagctcagggggagtacatgaagctcctatttctaattttctgcctccaccgaaaccgttcagacacactgaaaaccaacaaggccaaggtgctggattgccgtctttcaaaaagaagaatgacatttcacaaacaccctctcgcgaggaaattgaaaatgtcaaaccgccattgcagcctaaatcagactctcgatttcaacctcgatccagaccagttctcatggagacacagtctattgaaagctttcaaccaccaccaaagccatttagacgtccacaaaaagaacggtcattttctagtgataatgacagtactactgataatgacagcgccaatagagttgacgagagcgaagcgaataacagtcgtggtcgtggtcgtatagtaaagcatgatggcgctcatgatgcacatgatgctcatgctagatacaaaagtgagaattctgatgaaaaagatcatgatgagtattctcagaatacgtccgctggatttggaagaaaaaaggtctcagcacctccacctccacctccacacaagccccagagattaggtgaggcagctgtagcaacggaaattaagaatgtcaaaggcttaaatacccatgaaaagtcaccgttttcaccccctgcggtcagcttgccttcaagacctcctatgcaagcgtcagaatctattaagaaagcacctccacctgttgtgaaacccaaacctaagactctctctttgaagaataatgagcctccaaaagaattggtcaggaaaaacaccgcagatttggtaaagggggctgggcaagatgaaaagttgaatagcattacaaatgaattatctcagtttaaattgaggaaaacgaatgtaaatttggaagatttgggtaactcaaaaaaactgaaagaatcgagtccgattgattcagatctggatgagaactatgtttctgcatcgggatctgtttccccaccaaggccaccgccttcgaggtcgagcgctatcaaggttccaccgcttgttctaaagaagaatgacaatttgaagaaaaagccaccaattgttcctaagaaaaagtcattgctaacagcccttgaaccgagacccatcggcatggaaaaagctggttcattggacaattctgatgacagtgatgatttgaatccctttgagagatataaacgaaacgttgttcctcaagaagaagacagactgcataagcaaaaataa

SEQ ID NO: 3510 - DNA, 336 bp, Saccharomyces pastorianus
atgagatcattgggtctttcgcccagtgaagccgaagtcaacgatttaatgaatgaaattgacgttgatggtaaccaccaaattgagttcagtgaatttttggccctaatgtctcgtcagctcaaatccaatgactccgaacaagaactcttagaagctttcaaagtattcgataagaacggtgacggcttaatctctgctgctgagttgaagcacgttttgacatccattggtgaaaaactgactgatgcagaagtagacgatatgttgagagaagttagtgatggctcgggggaaatcaacattcaacaatttgctgccttgttatctaaatag

SEQ ID NO: 3511 - DNA, 708 bp, Saccharomyces pastorianus
atgttccctctaatcgcctcaaaaaatagaagacccatttcccttactattagcaaattatttcgaacaatgagcattgttaagggcaaaccagaggaagccaaaatagttgaagcccgtcacgtcaaagacacatcggactgtaaatggattggtttacaaaaaatcatatacaaagatccaaacggcaatgaaagagagtgggatagtgctgttcgtaccactagaaactccggtggtgtagatggtattggtatattgacaattctaaaatacaaagatggcaaacccgacgaaattttattacagaagcagttccgtcctcctgttgaaggtgtgtgcattgaaatgccagccggtttgattgatgctggtgaagatgtcgacaccgctgcactaagagagttgaaggaagagactggttacaaaggtaaaattatttcgaaaagtccaactgtattcaatgatcctggtttcaccaacaccaacctctgtcttgtaactgtcgaagttgatatgagtttacctgaaaaccaaaagccagtgactcagctagaagacaatgagttcattgaatgcttcactgtcgaattgcacaagttcccagacgaaatggtgaaattggaccaacaaggctataaattggatgcgcgtgttcagaatgtagcacagggtattctcatggctaaacaatacaatatccaataa

SEQ ID NO: 3512 - DNA, 669 bp, Saccharomyces pastorianus
atggaaaacaacaataaactaacttgccctgtttgccacatcggtctcagtatcgatttgtctcaacctgctttagaagtagacatggaatccttcaagaaacaaagtattgtgagtcgcttaaacatgagcggcaagtggcagtcgtcgacaaaaatcgaagcgttggtggaagaactatacaaattgagaagcaacaaaagaacaataaaatccattgtattttcccagtttacaagtatgttagatttagtggaatggagattgaaaagagctggtttccagacagtaaagcttcaaggtagcatgtctccgacgcaaagagacgaaacaatcaaatactttatgaacaacattcaatgtgaggttttcctcgtaagtttgaaagctggtggcgtggccctgaatctttgtgaagcttctcaagtatttattttggatccatggtggaatcctagtgtagaatggcaaagtggtgatagagtacatagaattggtcagtaccgacctgttaagatcaccaggttttgcattgaagatagtatagaatcaagaattattgaactacaggaaaagaaggcgaatatgattcatgcaacaattaaccaagatgaagccgcaatcggtagattgaccccagcagatttacaattcttgttcaataactga

SEQ ID NO: 3513 - DNA, 1581 bp, Saccharomyces pastorianus
atgcaagaaggtggtttcattcgtagaagacgtacaagaagtaccaagaaaaatgttaactacaacgaactaagcgacgatgatgcaggtgtgaaaaattcgaaatcttcggatctgaaaagggagagagaagacgtagtggacatccaagacgtcgaatatctcgacgatgccacactggtaaagactcctgacgagggcgacgaggaccgcatcatagatctgacggcttccgataaagaacggaccgccactgatgatgatatatttttgatcaagagtgaagacgataagataatagaacctaagaacgagctagacggctccgatgatgacgaacccctaacgaaaaaaaggaaaaccgctagcaaaaggaagaaaaaacccactaccaaaaggaagccacccaaagtgactccatatgaaaggaacactttgcggttatacgaaaatcatcctgaactgaaagatgttttttcagttttgaaacaagcgcccccctacgtagcccaaaggtcagagcaacccgatggtatgaccatcaaactgctgccctttcaactggaagggcttcgttggcttatatcccaagaggaaagcatctacgcgggcggtgtcttggcagacgaaatgggtatgggtaaaactattcaaaccatcgctttgttaatgaacgatctgacaaagtctccctctctagtggtcgccccaactgtggcgctgatgcagtggaaaaacgaaatagaacaacacaccaagggacaactgaagatttacatataccacggtgcctcaaaggccaccaacattaaagacctaaaggactatgacgttatactgaccacttacgcagtcttggaatctgtgttcagaaagcaaaactacggattcaaaaggaaaaatgggcttttcaagcaaccttccgtcttgcataatatagacttttacagagtcattctggatgaggcgcacaatatcaaagatagacaaagtaataccgccagagcagtgaacaatttgaaaactcaaaaacgatggtgcctatcgggtacccccttacagaatagaattggtgaaatgtactctctgatcagatttttgaacatcaaccccttcacaaaatacttttgcaccaaatgtgactgtgcctcgaaggactggaaattttcggatcgcatgcattgtgaccactgtaaccatgtcatcatgcaacacaccaattttttcaaccatttcatgctgaaaaacattcagaagttcggtgtagagggccccgggttggaatctttcaaaaacatccaaacactgttgaagaatatcatgctcagaagaaccaaagttgaaagagcagatgatttaggactcccccccagaatcgtcactgtcaggagagatttctttaacgaagaagagaaggatctctacagaagtttatattctgatattaagagaaaatataattcgtttgtcgaggaaggtgttgttcttaacaattatgcgaacattttcacccttgatcacaagaatgaggcagctggcagaccatcccgatctggtatacaacagagtaaagactctacc

SEQ ID NO: 3514 - DNA, 156 bp, Saccharomyces pastorianus
atgtgtgttgaagctttcagtgaatacccaccattaggtagattcgctgtcagagacatgagacaaaccgttgctgtcggtgttatcaagtctgttgacaagaccgaaaaggccgctaaggttaccaaggctgcccaaaaggctgttaagaaataa

SEQ ID NO: 3515 - DNA, 678 bp, Saccharomyces pastorianus
atgtccaaccaaggatttctgacttttgccagtcatgttgatgcaaacaagttcttaaccaagtacaccacgacagcactgaagattcagggacgtaaagtcaaaatagcggcggcccgtacgaattcgttattggggctttcaatggaaatgcaaaataaagatagtggtaaaagcccccattcgaccttgaagaaagtgctaaggtccagaaaactcaaatccaaattacgcaacgatgacacttatgcaaagaaatgcaagctaaaaaggcaaataagacgtctaaaacataaattgagattgaaagctatagatgatagtgaatttagtaggattgtcaaagagtttgaagcccgtagactacaggaaatggagtcccaacgagaaaaaccaaaagaattgcaagatttttcgaaagaagccagaatctcaaacacaatagagaatccaccgaacaaagtcttgcttgtacaaaatttaccaagcggcactacagatgcgtcattatcacagatacttggaaacgaagctctagtcgaaatacgattagtcagcgtccgaaacctagctttcatcgaatacaagactgtttcggatgctacaaaaatcaagaatcaattgggtcccgtttacaaattgaaagacaacgatgttaccataggatacgctaagtag

SEQ ID NO: 3516 - DNA, 534 bp, Saccharomyces pastorianus
atgttgaagttcatattcgggaagcggtttgcttccacggggtcatatcctggttcttcaagaatcactttaccaagaaggcctgcaaaaaaaattcatctggggaaatctcgaccggccatttatcaccaattcgatgttaaaatggagttgagtgatgggagtgtagttgttcgcaggtcacagtatccaaagagcgagattagattgattcaagaccaaagaaacaacccattatggaaccctagtagagatgatctggtgatcgtggatgctaattctggtggtagtctggataaattcaaaaagaggtacagttctatgttttccgtaaatacagcatctgctggttctggttctggagagcctaccgttcccgaagggagtgaaaaagaagcacaagttaaaaaggaagaggaaaaggaagttgttgaagaagcatttggtatgggtgactacctatcgctactagacgatggtgaacaacagattaagtcaggtaaattggccaataagaagaaagataagaaataa

SEQ ID NO: 3517 - DNA, 861 bp, Saccharomyces pastorianus
atggggcctgggagaaacacatatattaaatttggaacagaccctagaagttctccagaatatgcccaatatcaaactgaatattttaagattgaaagaaaattgttgtcttctccaagagtgaaaaaaaatgtacccaaaccaccacccttagtatttgaatctgacacaccaggcgatattgatagtaggtttaaatttgacggggaaagaataccgtggtatttgatgttacaaattgatttgttaatcagtgagccgaatatcgcagaggtttttagtaatgtcgagtacttagataaggcaaatgaattgacggggtggttcaaagaattagacttggtaaaaatgagaaggatagtgaagtacgaacttggttgcatggtccaagggaattatgaatacaacaaatataaattgaagtactttaaaacaatgttgtttgttaaagaatccatggtgctagaaaacaagaattcagaggaagacaacacgggagttaacgacaatttagacgcagacggggatatagatatggatgtcggtactcaagggtcatccgcggtttcaatcacgaacgtcgatattgctgttggcgatgatgatgacgataatgacgctataactgaggagccagatgatgccgccttagaaaatgaagaaatggataccaatcaaaacttgaaggtaccggcaaatgcagacgatgatgttgacgcagatgaagaagagcaagaaggtttcgatatcaaaacagcaagtttccaagatattatcaacagaatagctaggcttgatcctaaaacggccgccactatgaaaagggatcttaagggatttgtcaatgaggccaatttgtag

SEQ ID NO: 3518 - DNA, 834 bp, Saccharomyces pastorianus
atgtcatcggatggtacagaagaacctcttgcgaccctttcggcaattccggattctaccgctgatcaagcaccgccggtaatagcagatgaatttacattagatctacctagaattccaagtttggaattgccgcttaatgtctccacaaagcacgctagtatacaaaaagccataagaatgtgtggagggattgaaaaagtgaaggaagccttcaaggaacatggccctatcgaatctcaaaatggcctagaactatatttaaacgaaggttacgatagagacggctctaaaacgtattttaacgaacaccctataattggcaaaagagttccctttagagatgaatctgtaatactaaaagtcacaatgcccaagggaaccttagccaaaaacaataatagtcttaaagattcaatcacttcgctgaaaaattctaataaattgagagtcactcctgtttccatagtagataatactattaaatttagagagatgtcagattttcaaattaaattagacaatgtcccctccgcaaaagagttcaaaagtagttttggttccttggagtgggataacttcaaaaattttgtcaattctgtaccagataatgactctcaacctcaggaaaatatcgggaatttggtcttggaccgtagcgttagaataccaagtacggacttccaattaccaccaccacctaaattatcaatggttgggtttcctttactgtataaatataaagctaatccattcgcaaaaaagaagaaaaacggtgttactgaagtcaagggaacatacatcaaaaactatcagttattgtccacggtctaa

SEQ ID NO: 3519 - DNA, 546 bp, Saccharomyces pastorianus
atgtctttcgaccataagccgcaacacataggtgaattgatacgtataaacgataacggaggcaccgtttcccttggcagagtgggcggagtattggctctcagcagagcatttagcgatttccaatttaaaagaggtgtcacatatccacacagaagaacaaaactaacaaatgttactcaacacctaaccggcgggactccgccgcaagaagcgcaagtcactgccgaaccagatgtactgatgcataaaatcgactacactaaagatgagtttttagtgttagcgtgtgacggtatatgggatatttataataacaaacaactgatccattttataaagtaccacctagtgtcaggaacgaagttggatgctataataacgaaattgcttgatcacggaatagcgcaggcaaatagcaatactggtgttgggttcgacaacatgactgccattattgtggtactgaatagaaaaggcgaatcgctacaagattggttcaataaaatgaagacccgcttagagagagaaagaggtttagtgtaa

SEQ ID NO: 3520 - DNA, 1062 bp, Saccharomyces pastorianus
atgctgttcaattccaagctggtaagcaggttcatttggagcagctgcgccggttttattttggcatcccttacaataccaatgatagcgggccaggctgcgccatcaagtcagcatgaaattttgatagcatcaaacctgatcaaaaagccatcaacttcccaaaataagactccaatagttcaagccagtccagacaacaacgatggaaaggcagatgatgtaacgttgtctatacagaattatcatcatcaccatcctcatttgtggtggccgcgatcaacggaccaccattattggtgtgtcctgaggaaaaatcaatttgcttattacaagacccaagatgaaagagaagccataagtgtcataccgagattcgagatattaaattttaagattagcgagcttgacggaatattgattgtttacacaccatccaaggatttaatgttcaagtttccaccagggcagaatgagcagactgacaaagaactaatgcacgactggaaaattgcgcttgagaaatttttatcgagtccaagtggaagtgaaagcgttactacaggcagtgattatgacgaagatgaagacgaggatgatttgattgtagtcgatgaaaaggcgggtccttctagcagaaagcattcttgtagtttgacgatggatgaacaactgtctcatgaagataaaaagttctataggatgtttgatcccaggaatccagagcaccaagtctgttctggaattctgtatactagagttaagaagaagaaaatatttaatagagccaaatggcaaaaattcaatgtggaacttactaatatctcatttagcctatactcctttaaaacaggaaagataaagaaaagtatcaaactgaataaaattgttgactgcatcgaaattgacaatagttccaagaacaagagcggtgatacaaatttcgctttaattacgtttgatgaaaggttgtcgttcaaagccgctaatgatcaagatatggtggactggataataaatttcaaaagcggcatccttataagaaaaaaaataaaaagctag

SEQ ID NO: 3521 - DNA, 3108 bp, Saccharomyces pastorianus
atgaacaacctgcaggttgattctttaaaaatgtgctatgaatcaattttcagggttttcgaatattgcaaaaaatgggtaactcagtttaaacaaaattatagtagattacaaggtacttttatcataaaggacacaaaaaccgttaacatgctttcaagaatagaaagattcctggaaaccactccctcggttttactagcccagcgttctttagagacggattcattcgaaagatccgctttatacctcgaacaatgttaccgacagaatcctcatgataagaatcaaaacgggcaattactgataagtttgcaagttacgtacgaagaaatcggagacattgattctcttgatggtgtgttaagaacttttgctaccggaaacttagtttccaaaattgaagagttacagtattcggaaaattggaaacttgcgcaagattgcttcaatgtgcttggaaaattttcagatgaacccaaaactactactaggatgttaaagtccatgtatgatcatcaattgtattctcaaataatatcaagtttttctttacattcatcagatggtaagatctcattagcttcagatgtaaaagaatggtacagtataggtcttgaagccgcaaatttagaaggtaatattcaaactttaacgaattgggtagagcaaatagaaagcttaaaaaaggttgatgatagagatgtgcttttacaatataatattgccaaagctttgatcactatttcaaatggtgagccattgaagactcaaaaatatatccacaattcctttagacttgttggaactaattttataaccgcatccaaggaaacgactctgttgaagaaacagaatttattaatgaaattacacagcttatatgatctcagtttgttatcttctgctaaagacaagtttgaatacaagactaacaccactatacttgattatcgaatggaacgtatcggagctgattttgtgcccaatcattacatactttcaatgagaaaatcatttgaccaattaagaatgaatgaagaggcaaatacggatttgggcagaacatttttcaccttggctcaattagcgagaaataactctaggttagacatcgcatctgagtcattgatgtattgtttggaaaagaagttacctcagtcggagttggagtttgctgaaatattatggaagcaaggtgagaatgatagagctttaaaaatagtacaagaaatacacgaaaagtatcaagaagattcatctgttaattcccgtaatcgcgccactgtacttttgaagtttactgaatggctagatctttcgaacaattctgcatcagagcaaattataaaacaatatcaggatatattccagatcgattcaaaatgggacaaaccctattactctattggcttatactatagcaggttacttgagcgtaagaaagcagaaggctacatcactaacggccgcttcgaatatagggcaatatcttactttttattggcattcgaaaaaaacacagttaaagtaagagagaatttgccgaaggtggtcacgttctggctagacactgctgctgcatcaatttcagaaactccaggaaacagaaaggaactgttaagtaaagcaacggaggatatatgtagccatgttgaagaagcattgcagaattgccccacatacatatggtattttgttttgactcaattactgtctagattactacattctcatcaatcatctgctcaaataataatgcatatccttttaagtttagccgttgaatatccatcccatattttgtggtatatttctgcccttgtgaattccaattcttcaaagcgagttcttcgaggtaagcatattttggaaaagtataggcaacattcgcaaaaccctcaggatttggtgtcttctgcattagatttaacaaaagcattaactcgcgtttgcctacaggacgtcaaaaccgttacaagtagagcaggaaagtctttagaaaaagatttcaaattcgatatgagtttggctccatctacaatggctgttccagtaagacagaacttagatataatctcacctcttgaatccgattcaatgagaggttaccaaccgttcagatcagttgtcactataattaggttcggatcatcttataaagtgttttcctcgttaaagaaacctaaacaattgaatatcatagggtccgatggtaacatttatggaatcatgtgcaaaaaagaagatgttagacaagataaccaatatatgcaatttgcaacaacaatggatttccttttgagcaaggacatagcttcaaggaaaagaaatcttggtataaacatatattctgtattatctcttcgagaagattgtgggatattagaaatggtgcctaacgttgttactttgagatcaatcctttctacaaaatatgaaagtttgaaaatcaagtacagtttgaaaagtttgcatgatagatggcaacacactgcggccgatgagaaattgaacttttatacggagcaagtaggaaagtttccaccaatactttaccaatggttccttgaaaacttccctgacccaatcaattggtttaacgctagaaatacctacgccaggtcatacgccgttatggcaatggtaggacacatattagggttaggtgacaggcattgcgaaaacatattgttagacatacaaaccggtaaagttcttcatgttgattttgattgtctattcgaaaaggggaagagattacctgttccggaaattgtcccatttagattgacaccgaatctactggatgcattagggattattggaacagaaggaacattcaagaaatctagcgaagtcactttggccttaatgagaaaaaacgaagttgcactaatgaatgtgatagaaacaattatgtacgacagaaacatggaccactcgatacaaaatgcactaaaagttttaagaaacaagattcgtggcatagatccacaggacgggttggttttgagtgttgctggccaaaccgaaacattgattcaagaggcaacttcggaagagaatctaagcaagatgtatattggttggcttccgttttggtag

SEQ ID NO: 3522 - DNA, 3846 bp, Saccharomyces pastorianus
atggaatcacacgtcaaataccttgatgagctcataatggccataaaggacctgaattcggggatggggccgcaggtgcagatcaaaaaagtgcccgtggacccgccttcttcccaggagtacgccaagagcttgaagatcctgaacacccttgtaagaaatctgaaggaccagagaaggaacaatattatgaagaacgatacaatctttgcgaaatccgtttccgctctcgccctgctactggagtacaatcccttcctacttgtcatcaaggattctaacgggagtcttgagatacaaaaactgatagacgacttcctaggcatatccgttctgaactatgacacacaccataggatatggttcatgagaagaaagctgggcaactggtgtaaggcttgtgttcagttttacgggaaacccgttaaattacaactttccacacatttggaaaacatcataaaccgttacgagcaatctttgacagaagttctgcaggggaacacagagctcgccaagttttatgacacgttgaaaaacttatacattctcttgtactggttcacgtctgaccatagtacatttgggaactcaataacattcttggattcttctttagggttcaccaaatttgacttgaactttcaacggttgataaggattgttctttacgtattcgattcctgccagctatcaactttagaatacgctgaactccaactcaaatacgtgtccctaatcgtggaatatgtgtgtaacaggacaatagccaccggcttggatacaccatcgttaatcagcagtgagcaattaaaatttgcactgaccacaatctaccgctttttggataacaaatgtggcctgctggataatgatcccacaatggcaaaggcgattcttcgactttactccctttgcatttcaaatggtttttcaaaatgtttcatagaccacttccccattgaacaatgggcagacttttcacaaacgcaagtcttcccgtttacccaattgactaacaaggccctttcaatcgtttatttcgacctcaaaagaagatcccttcccgcggaatctctgcagtatgacgataagtataagacttggatttaccaattggagcaggactcgaatttgaaaaatgttacctcctcatttgacgatcgatataagcaactagaaaaactaagactactagtgataaaaaaattcaaaaataaacgaagagaaactttgcttgagtatcgtgttaatcaattaagtcctggattttttcaaagaactaaaaatgacttcaagttggtcctaaacgaagtgtcagtatccattcaaacttgcttcaagacaaataatgtaacaaaactgacggcatggactgtagtcctcggaagattagcgtgccttgaatcacaaaagtcaatgtccaaccattcaaatcattcaaggaatttggataactgggacgtttgtcatttatgcgatgttgaaaaaaccggaaacccatttgaacgaataaatccagatcgaccagaagccgcaaacaaatcagaagtttttaaaatactttactcaaactttctaaatcatgcaaacgtggacgaatttagtgaatccttgctgagcggcatcttattttctttacaaagaactttcacccattttcaaccaccaaaacttgtggatggggatgatcgaatgaacaagactttcgagctagtacaaaaatgtttcatgaatacgaatagatacttacgtttattgagtaccagaattgtgcctttactcaacatatcagactcccataattctgaagatgaacacacagctacgctcatcaagtttctgcaatcccaaaagttaccaatcgtgagagaaacttcagtgatggcttggacacaattgacattgacaacttcaaatgacgtgtttgatactctacttttgaaactgattgatattttcaattctgatgattatagtcttcgaataatgatgactttccaaaataaaaaatatggccagaattttgaaaaaacaccctatcaactattatcgccgattttacctgtactactaagacagctggggaaaaatcttgtggaaagaaaggttggatttcagaatctaatcgaattgttaggttactcttcaaaaacaattctagatattttccagagatatatcatcccctatgctattattcagtacaagagtgacgtactgagtgaaattgccagaattatgtgtgatggggatgcaggtttaattaaccagttgaaagttactctattgaaaaaaaatagtaggcaaattttcgcagtggctttggtgaaacatggacttttttctctagatattttagaaactctctttttgaatagagcgcccacctttgacaaaggatatatcacggcataccttcccgattataagacattagccgaaataacaaaactctacaaaaataatgttactaaagatgccagtgataaagaaaacgcaaatatgattttatgctctttgcggtttttaataaccaattttgaaaaggataaacggcatggctcaaaatacaaaaacgtgaataactggacagacgaccaggaacaaacgtttcaaaagaaattacaggacaacattttaggtattttccaggtattttctagcgatatacacgatgttgaaggtcgcactacttattatgaaaaattaagagtaatcaatggtatatcattcttaatcatatacgcaccaaaaaaatccataatttccgcattagctcaaatcagtatctgtttacaaacaggacttagacttaaagaagttcaatacgaggcctttagatgctggcatttgttggttcgccatttaaatgacgaggagctatctaccgttatagacagcttaatagcatttatacttcaaaaatggtccgaatttaacggaaagcttcgaaacatagtatacagtatactggatactttaatcaaggaaaaatcaagtttgattttgaaattaaaaccctacactactttagccttagtaggcaagcccgaattaggtattttagcccgtgacggtcaattcgcaagaatggtaaataaaattagaagcactacagatcttatctctatatttgctaataatctaaagagtagtaacaagtatgtcataaatcagaatttggatgacatagaggtgtacttgaaaaggaagcaaacagagagatccattgatttttcatccaaaaaaggtggacaaacgtccgatataacattggtactgggtgctttattggatacatctcataagtttagaaacttagacaaaaaactttgtgagaagtgcgcgaagtgcatcagtatgattggtgtattggacgtcacaaagcatgaattcaaaagaacttcttattcagaaaatgaagtttacgatcttaatgataatgtccaaaccatcaagtttttaatatgggtaatcaacgatattttagttcctgcattttggcaaagtgagaatcctagcaagcagttatttgttgcccttgttattcaagaatcattgaagtactgtggtttaagttcagaatcctgggatatcaatcgcaaagacttatacccaaatgaagctaaactatgggaaaagttcaattccatctcaaagacaactatttatccgcttttatcttcattgtatctcgcacagtcttggaaagaatatgtaccactgaactacccctccaataactttaaggaaggatataaaatatgggtgaaaaggtttacgctagatttattgaagacaggtacaactgaaaaccaccccctgcatgtattttctctttga

SEQ ID NO: 3523 - DNA, 1518 bp, Saccharomyces pastorianus
atgaagttttcaaaccttgcgtcagtattactaattgctgtcagctacaaatatgtctccctttgtgaagctttttcactttttgaggatggcgttacctttcctaattttggtaagcaacctaagctcgcacagaatattcaacaatcacttaaggcgaaccgcttaaactcagatgattctctaactaccacctttgtctcgcctatggatacggattatagtttgaggctgagaagcgtagatccctctaaattagggattgatactgtcaaacaatggtctgggtatatggattataaagactccaaacatttcttttattggtttttcgaaagtagaaatgatcccgctaatgacccaattatactttggttgaatggtgggcccggttgctcctccttcactggtttgttgttcgaactagggccctcatcgatcggcgttgatatgaaaccaatccacaatccttattcgtggaataataatgcttcgatgatatttttagaacagcctttaggcgttggattttcatatggtgacgagaaagtttcctccacaaaattagcaggcaaagatgcttacattttcttagagctattttttgaagcttttcctcatttacgttccaatgattttcatatcgcaggggaatcttacgcaggccattatattcctcaaattgcccatgagatagtcgttaaaaatcctgaaagaacctttaatttgacctccatcatgatcggcaacggtatcaccgatcctttaatccaagctgattattatgaaccaatggcatgtggtgaggggggctatcaccctgttctttcatctgaagaatgtaagaaaatgagaaacgctgccggccgttgccgtagattgaataaattatgctatgcttctaaatcgagtatcccatgcatacttgccacaacttattgtgactctgcccttttggaaccttatgcgaagactggcctcaatgtctatgatatcagagggccgtgccaagacaatagtactgatggtatgtgctataccggtcttcggtatgtcgatcagtacatgaatttccccgaagttcaagaaacattaggatccgacgtacacagctattctggttgtgataatgacgttttcacaggatttttgtttactggtgatggtagcaaaccatttcagcaatacgttgcagaacttttaaatcacaatattccggtattgatctatgcaggtgataaagactatatatgcaattggttgggaaatcacgcgtggactaatgaactggagtggatcaataaatctaggtatcagagaagaaggttgagatcatgggttagtgacgaaactggtgaagagtttggacaagtcaagaactatggcccctttacctttttaagggtatttgatgcaggccacatggtgccctatgatcaaccggaggcaagtttacaaatggttaacagctggatttccggtaaccatgaattttccaagtccttttcaaaactctaa

SEQ ID NO: 3524 - DNA, 1437 bp, Saccharomyces pastorianus
atgtcggttgtgaacctattggcgaatcaccttgaatatatgccatacattcattcatattttgtatcgagattagcccttatagaatcccatatctattactcatgcttttccatcagaactactcttgacgacacgcttgatgaaattatcgagaacgttttcgagaattgcaaagcactggacagaatgcaggatgatctacccattatactttcattggaaaattacaaacaaaacatgaagattttagctttagagttccccaaactggactttgaaatgaattgctgtacaacaattcttttacatctcaggtggtatcatcaaaagataactttgaacttgtttgttatttccattatcaaagacaatttagaccaatgtgcaagctctcgccatgatgtaattgaaatacttagaacatcaaaattaaattttaaacaaaattgcattgcagtactgaatatattgcaggattttgactattatcctactatccagaacgaattcttgtatttttccctcacgacggtattttccatgttcctatatttatctgagagtatgaaaaatgatgaaaacgctttagaaactggttacataatcgcattacttagggatacgcatacccgtatgctaggatcagaggagaattatcattccatatacaatttgaaatggcagacatctctttttttttataccttttttttacgaactacaatggaaaaattcaatctctcaagtaagtatgcgaaattctatgagtttgatccgaaatattacgatgatatttcaaagaaattggccaagcatgcaagggaatcaaaagacgatatggtagagctcttaaaaacttccttcataaacaaaaaaaagatgactacattcggcagttttgttacggaagaccaagaccaaatgaaagtgtcatttaatctctttaaggaaataacaatgcatgatttgaacttcttgaaagtgtcaagcattccgaaattatggggatacagtactgcgagtgcgagtaaagactttagtgatagtaacgatagcaactctacctctaataaaaacaccaaaaactcgaacgatgaagatgatgctaatgataatgacaacaagaatgatgatgatgatgatgatgatgatggagaaaaagaagaagaaggagaagaagaagatgatgatgatgatgatgatgacaatgataatgacaatgataatgatgttgacgattacgacagatccctattcccaacaggtttcactacatccatagacgagacatattctgagcagggaacaaatgaaaataatgatgaaaacgcgatgtcaaacaaattatttggaaagatcgaagaatacttggaccatggtgtattcttttatgaccgggatttcttttttaggaaactgggcgcaaaaatgtga

SEQ ID NO: 3525 - DNA, 1554 bp, Saccharomyces pastorianus
atgggctcagtttttccaagtggtcatactatgggtgacacaaggaaatcaacctttgaatggagtaatagcatatcgcagaatgatcaaagaaccgagaacgctggaagctctataggctcagtggtccctgccatacccccggcaccatcaaattttcagcctgacctaggtgcccctattacctcgccccagctgagtccttttttggaccaccgtttaagacaacaggccatggcacacatgatttctgccgataagaattttttggcttataatatggactctttcaaaagcagagtgactaaggcatgtgactattgccgaaagagaaaaattagatgtacagaaattgatccgaattatggtagatgcagaaactgtatcaagtataacaaagactgtacgttccattttcatgaagaattgaaaaggaggcgccaagagacttcaaataataaagatatcggaaagccagtcaagaagcacaaatccgataaggaaaacgcatttggcgacgaaaattttgatgcagtggcgccagtaagcagtacttcctctacggacagcatgctcagattacaagaaccaattaaacctcaagaaagctctggggtttatgctgcaagcggagcaagtgatagagacgatgaagtatctgagcataatcccattgatgagaaagtgttgggggaaatagaactaaatcatagaaaggtttctagaaaagtttttgtgcttgaagaagtctgcaagaatatgaaggaaatgatagagaaattagcagaaaatactggaacagacgttgtcaatagagagtttatgaaacgaccaaaaagaaaacaatattcgaaggccttgttaactaaacaaaaactgttgcattttagacagaatatttctccacatttaactgacgaagaatttgtagcaccaataaatgatatgtttacaacaacttttaaatactctattttgcaaaccaaaatggcactggatttttcttttcgatctgcctcatctccgtcgaaagagaatatcttgtatccgttaccttctttggcgattgcgaagcgcctgatcggaaatataagatgcccgtcattagcttctcttctccacataattgatataaaccagtgtttgagacttgccgacacatattatagcccctccaaagggaatcttacttcgtcacaagcttttttgtttaatatatgcttgtgtattggagctactgtgacgaacttcaaagagaaacaagagctcattggtgaaaacggtcatgaaattttttattttgagaagtttgaattgtggaaattgaggtcgttcaccttcctcaattccgtctactactaccataaactgggtgtgacacgggttgacatgacgacattaaaggcattgcttttactagtgaagtttactcagcaaaaaatcagcgcctcgtcagccgttaaggtactttctgtggcaatcaaggttgcattggatttgcgactcaatttgcactctacctatgaagatctagagcttgatgaaataatttaa

SEQ ID NO: 3526 - DNA, 762 bp, Saccharomyces pastorianus
atggacaaattggaacatagagaaagccaaaggttgagcacttttagttttccaaacacaggaagtcaatccagtacttctatcaaatcacttggtagcccactccatggaagatttagctcgctttcttcaaacgaatctcagtttgatagtggcaagcaaccacaagagtatgaaaagaatttttattttgaggaatctcaaggtgaagccatattcaataagttgaaaacctactctttaccaggagacaaggatggggtgaaagcaaggagagactcttccatatgtccaaaaagagccactgcaatatcccctctaagaatggacagtaatgagttaccgttacatttacgttcacaatcacacgaattcatgaaaccatcaggaagaagaaagagctatcacaggaagagtcatgcaatctcatttagcaggtcttataagccagatttcattgacgactacgattccatctcaaatacgacctctaactcaagaaaaacctcaatggcgagttccattttagatagagaattacactcttcattggatacttcatacactcatcaagaatctcccaaaagtacgatactaaacacaaatgaacaattaagaaggaacgtaagcggcaatttcggcaatttggaagaatttgcaataagaaatcaaatcaatattaagggtaagatattcgccgataaaccagaaactggagacatcctgcaaccattaattgatttggatattggcaacgaatga

SEQ ID NO: 3527 - DNA, 156 bp, Saccharomyces pastorianus
atgagcgctccgattttgatcgaagcatgtgaacgtattacaaagttgattgatgaggaagaaaacaggatcaaaagaatcaactcctttattgccttgaaagatatgacagcctgggctaatgcagatgacgaaatgcaggacaagctatggtga

SEQ ID NO: 3528 - DNA, 696 bp, Saccharomyces pastorianus
  modified_base (568)..(568): a, c, g, t, unknown, or other
atgaaattagaacgcataagcagtaatggctctttcaaaagaggtagggacattcagtctcttgactctccatgcacaagaccttcgaaaaagatatcaccgagtgcatctttcacatctcttaaacacaaaaggcctttcaaggatattgtaagaaaatataaaggacatctctatcaaaatgattgtatttccagctctagcaaagtgaaggcaacaaggcctgatttgtctctaaaaacaagccaaaacttccttcaaaacaatttaccaaccacacctgtaaagaaagcctgtaatgaatacatcttaacaccggaagccacgccactaaaaaatacccctattgaaaatgcatgggcttcctctagaattgtttctgccaccagtctttcaatcgtgacgccaactgactttaaaaatgaccttgtcgatgaattctctgaattgaggttggtgcagccctcgattgttcagcatcgaccaacacatgcagtctttgaaattcctgaaatcgtagagaatatcataaggatagtggtttctttggagtctgctaacataccanaggaaaggccatgcctacgaagaagcccaaatcttatgaacactctttgcttatgtataaagatgaggaaagggccagaaagctggacgcaatctcagctgcggaacagtcacattgccataacataa

SEQ ID NO: 3529 - DNA, 2241 bp, Saccharomyces pastorianus
atgattgcaccagactctcaaagattattcggttcctttgatgaacagttaaaagacttgaaactggactcagatgataccgagagcaatagcatcaatagcacctttgcccctatggagtcctctcagcccagcaccaataacggtgccattggtgcgggcataaacgctgttcccgggtccacgtttaggtctaatacacctctcttgggtaaccgacatgcgcttagtagaacctcttctctaatggactctattggtatacagcgtgcagcctcgccgtttgcgcctgccaaagagccctttattccccagaacccaggggtcgtgggtacctcgttttggcacaatgaccatcctgaatcgcgggttggtacgcctgttcaacaaatccctctattgcaaagaaacgagtctacttcttcctttggatatgccgctaatcttggaatgaatttgagcacgcattctttggctgttgatattactccgttgggaacaccaacgattgctcaatcccatgccattttattcccgtcatctgatatacctccagctctggacgtaaatggcatacctcaatttcccacgccaatttcgatcgagtccagttggaaatatatagatacacaggggcagatacatggtccattcactacccaaatgatgtcccaatggtatatcggtggctattttgcttcaactctacaggtttcaaggttaggcagcacgcccgaaacactcggaataaacgatgtatttattaccttgggcgagttgatgataaagcttcaaaagtacgacacggatccatttagtacttttgataaagttcatgcgcaaccacccattaccgaccctagcaacacaaatctgcctgcatattcaaacgaagctattgctacaactgctgataccatggaaactaccgacaacgatattttcaaaccattgactcataaaaacatctgggatatggacagcggcactacagtgcaagaaggtgatattgaattaggttcaacagtctctacaggtcaaacgaagggaaaacccaaatcggaagttaaacccaagaatataatcgaggctagaaaaagcgaaaaagctgaatccatggccaaagtattattggaagagcaagagagacaaaatcaagaaattaaaagaaaagaagagattcgtttgttaaaaaagcagaaacaaaaagaggaacaagagttactgaaaagacaaaaggaagaaaaggaaatgttgaaaaaacggaaagaaagggaaaccttggaagcagaaaaacagaaacaaattgaaaataccataaagaatacacaagtccaaacagtacctctcaaaactccaaaagatctgccttcattgaatgatttaaattttaaaccaacaccatgggcttccaaagtcaagacgaatactccagtaaataatataaccaaaaacgttttgggtaataccgagaataagaaggaagcacctctgaatttacaactgaaaattaccaaggaagaaaaggaaaaacaggaactgaaatctgtgttaaactgggccaacaagtcaagcacagtaccaaattcaactattgatattaaatcacagtttcaaaaaacttctaaaaatgcaaaagaaacgccatcgccaaaagattttgaagacccaaattttattgaagaacagaaaaaaatatgggaaagagttcaaaactcttctaagcagccaaagaccactacttctgcaactactacgacaacatcttggaccacagtaacatcaaagacgaaaaaccctgctggtacagctgtacctttagtgtcaaagtccaatacagggttaaacccttcaacgacgataacaagcagcaccgtcgctacttcaacgactactacatttgccagtatgaacagtatctctcctcgtcaagaattcatcaagtggtgtaaatctcaaatgagactaaactctgggataacaagtaataacgtattggaactgttattgagtttacctacgggaccagaatccaaagagttgattgaagaaactatttatgccaatagtgatgttatggacggtagaaggtttgctactgaattcatcagaagacgcgctgaatgcgaaaggcaaggcagtgacccattaagttggaatgaggcgttggctctttccggtaatgatgatgatgactgggagtttcaggtcgttagtaagaagaagggtagaaagcattag

SEQ ID NO: 3530 - DNA, 213 bp, Saccharomyces pastorianus
atgcactgtccgtcaggggaccagcacagttctgagaatggccttgcatgcgacgtgaccagcgtctgtgatatggcatttttggagacattgtatattagaatactaggtccctgcgttatggccagaaaccggccatcgggtgatattttcgcagaagtagccatcaagccatcctccgtcgccacagctgcaatgaattggaacatatag

SEQ ID NO: 3531 - DNA, 1434 bp, Saccharomyces pastorianus
atgagacgtgtctcgaaagtcgaacgttatcttcagaacactcgactaacgaataaactaacagaaaaagatatgtcagaagtttcaaagtggccagctattaacccacttcattgggggtacaacggtacagtttcacatgtcgttggtgaaaatggttctgcgaagttgagtttgaagaacgataagcagcaagtcgaatttaatacgtttgttaatgaatacgtcccgattttgagaaacggggcccactataaactaagtccttacttgttcacaggtattttacaaactctatacttgaacgctgctgatttatcgaagaagtttcctgtcttttatggtagggaaatcgtcgagttctcggatggcggtgtctgtactgctgattgggtcatgaattcctgggaaaaggaatataatttcgaccaaaacactatgaaatttgatacgaagaagtttggtctcgacgagaaggcgacgcacccagagggatggcctcgtttacaaccacgtacgaggtacctgagagacgaagagttgaaagagcaaaggaaagtagatcttcccctagttgttgtcctccatggtcttgccggaggcagtcatgaaccaatcataagatctctaactgagaacttgtctcgtatcagtaacgggaaattccaagtcgtggtgctaaacacgaggggctgcgcgcgttctaaaatcaccactaaaaacttattcacagcttaccacactatggatattcgtgagttcttgcaaagagaaaaagaaagatatccaaacagaaaattatacaccgtaggatgctctttcggggctaccatgttagcaaactatttgggtgaggaaggtgacaaatcgcctttatctgctgctgttacattatgtaatccatgggatcttcttctttcggcacttagaatgactgaagactggtggtcaaaaaccttgttctctagaaatattgcccaatttttaactagaactgttcaagttaacatgggcgaattaggtgttccaaacggttctagccctgaccatacacctacgactcaaaatccatcttactataaattcacacccgagaatttggaaaaggcgaaacgctttaagtcgagtcttgaattcgatgagctgtacactgcaccagctttgggattcccaaatgctatggaatattatagagcagccagttcaattaacagggctgataaaatcaaagttcctactttagtaatcaattccagagatgatcctgttgtaggccccgaccaaccttattcatttgtggaaaagaaccctaatattctattctgtagaactgacctaggtggccatttagcttacctagatagcaacaacgattcgtgggttacgaaggcgatttccgaattcttgaataagttcgaggaattagttttatga

SEQ ID NO: 3532 - DNA, 2694 bp, Saccharomyces pastorianus
atgccggggcttatagtaattgtctttatcaaaaaagaataccagaacctattagcacctagggaaagtgcatttcaacaccttcattccagataccaagtcgaaacgcataagcttcttaacgctatgtctgaaggaaaacagcagtctcaaaacaccaataaaccacgcaaggctcctacagatcaagacgatgatgcagccacagttgtacctcccatccttacatattcacggaacgaaggccagtttttagctagtgatgctcatagaccagccgatgatcagtccacattgtttgaagaagagggagagcgtagggaggatgacctgttgccgtcattgcgtgggtctaactcaaaagcacatttgatctcttctcagctcagtcagtggaactataacaacaacagagtactcttgaagaggtccattttgaagacgcaagtttttgtggatcaacttcaagaggaaaacaatattcgtcccatttttatcgctgccaatgatgagcgtgaaaaattgcatgttctacaactgaatattaagatcgacggacattataatattaaagaaaggaacggttttaacatggagaaaaaagctctatccaaattatttcaatctcaaatcggggccgtagcaaaccacttaaacgccctgaaaaaaagagtggatgatgtttcctctaaagtgttcatcacaggtgacgtgaatactggaaaatcagctctttgcaactctttattaaaacggcgtttactgcctgaagatcaacttccatgtaccaatgtattttctgaaatactagaggcccgagaaaacgacggaatcgaggaagttcatgcaataccgctatatatagctcccaccctcaaggaggctgttgacatgtattcaatacaaaattcaaagacttacgagattcactctttgaaagagctctccgatttggtgccccagaacgaaaagtatgcattattgaaggtttacataaaggacgataagagacccgcctccacgagtttgctaagaaatggcactgttgatatatctttgattgattcgcccggtttaaatatggattccttacaaactgcggaggttatgtcccgacaagaggaaattgatttggtcatttttgttgtcaatgcagaaaatcagcttacgctatccgccaaagaattcatatctttagcttctcgtgaaaagaaattaatgttttttgttgtgaaaaaatttgacaaaatcagagacaaacaacgttgtaaagagctaattttaaagcagatccgtgatctctccccggaaacacacaaacgcgcagccgattttgtccattttgtttctaaaaacggggatgaaatagcaggttatcatggaggtgacgacagtgaagataatggtgatgaggaacccgataatgacccatattctaacaacgatccagatcccgattttgacagtctagaagattctctacgtaatttcgttctgaagaaaagatctctttccaaattactacctgccaaaacgtacttgtcgaaattgttgagcgatataacatcgatttccaaatcaaacataacaatgtatactgaagaaaaagaaaaaatcaaccaagaactagaaacattaaggcctgagatcctaaccgtccaaacaaagtgtaacgatttgaccaactgtgttgataaaatggcagaagaaaccattgcgttggcctataataatactaaagaaacacttctcagtgctttggatgttccattacacgaatatccaaagtatcaaggtcttgcccagatttatgacttcattttcacaacagaggattttatagtaaaccaaattgatgaagcaataaatttgagcgaagtatttgctaagcaaaagacagacgtgctggtgaagaaaatatatgaagttggtaaatccgagcttggtgatgattttatgtgcgaacgtgttttcaaaagtgaactaatgtttaagaaaaaaaaacacttaatagggaaaaggctaagagtttctctatcgataactgatttatttgctccaagttggaagggatttctgtcttatctaagttggcagaaacctagcacggcaccaatctatgatatagaggaacaaacacaagaaaaacaaaatgggctaatgaaaactttgggattgaaaaactatcctctgacacaatattggtcaagaccatcattacttttcacatcaaaaattcccacactgactttatactttttgggtagtacaaaagtagtaggcaacatcgtattaaacggtatcaaattatcatcatggaattcactcaagaaattgtcggttcccatcatagtagtgggttccctgctaggaatcacatatctaattcatgacttgcctcgtgctctaccaatgaatctttctagcaaatacaaaagaaagctacaagaggtagaatacattcatcttaacgcgcaaagaacttcaaacgaagtacgcgatgttttacgtgtacccacccgtgaaatcctaaggtcatgcgaaataatcatggacaagaagcaagtcaccaagaaagaactggaaagcaaaaacgaaaataacacactatctatcaaattcttcgactccctatacgaagggacaatggctcaaaaatcaatagtcgaagaaataaacttagatattgattag

SEQ ID NO: 3533 - DNA, 525 bp, Saccharomyces pastorianus
atgaagcaaggtgttttgttgccaaccagaatcaagttgttgttgaccaagaacgtttcttgttacagaccaagacgtgaaggtgaaagaaagagaaagtccgtcagaggtgccattgttggcccagatttggctgtcttggctttggtcatcatcaagaagggtgaacaagaattggaaggtctaactgacaccactgttccaaagagattaggtccaaagagagctaacaacatcagaaagttcttcggtttgtccaaggaagatgatgttcgtgatttcgtcattagaagagaagtcaccaagggtgaaaagacttacaccaaggctccaaagatccaaagattggtcactcctcaaagattgcaaagaaagagacaccaaagagctttgaaggtcagaaacgctcaatctcaaagagaagctgctgccgaatacgctcaattgttggctaagagattgtctgaaagaaaggctgagaaggctcaaatcagaaagagaagagcttcttctttgaaggcttaa

SEQ ID NO: 3534 - DNA, 882 bp, Saccharomyces pastorianus
atgcttcagaaatctagcagaatcgttccaaactacgcttatgagatgaacctactaaaaccttcatattttaactctcccacaaagtctttgttgatatcaatcaatagacaacgactatttacaacttcgcggttgactttaaataaggaaagtgaacccacagaaaagaaagacaaaagcaaacagcaggatttcaatcctaggcatttgggggttgcatcagaagtattcattccttcagcctacaaaaatcttcctagcgtatttactcatccccttattgttgcgaatgccttagtcagaagactttacatttttggcttaaactctgttcaagttgcgttatttcgtttccaatcgggcattaaaccatctttcttactctggaaaaacaaagctattgagacgtatgttaatgtaaatacatcatttgctcgtaaaaatctatcggaaataaaaggatctgtctcattatgggttcaagaggccctagaagccagatcccgtcaactgccaagcaatgccacattagactggcaattgatcaagttcaatgctgttccgaaattggtatccatacaacccatcatggtccctggaatgcccctagaacacttacaattaatatataaactcgatacaaaacaaagactaatcaacgtcaatcaacaaaccaagaaaagcgagatattggatcgtgatgttgtggactatgttgcctttttatgtgatgcgacaaccaatgatatgatattgatggggtctttatttgaaaataagccgaatgataaactaccaaagagtcatgaagatgacacgaaagttgccatacatagaatgaaggttaatggagacatatatcgtttgccttcccactag

SEQ ID NO: 3535 - DNA, 165 bp, Saccharomyces pastorianus
atgaatgcatactcaaatcagtcccttgacatcagcggcagaactacaagaaaattaccattgatgtgtctttccgaatacttccggacatttcctgttgaacataatgagttcgtcgtggcattagccatgtcagcgcgaaagctgggcagtgcgcggaaatag

SEQ ID NO: 3536 - DNA, 1656 bp, Saccharomyces pastorianus
atgaaatacgttgttgatctgcaagtgcgaggatcgtctttatgtgttatacggcgtatgtttaaagaggaacaaagttcttcgtcacagtctagtttagactccaaacaagataacagtaatgaaaggttagaggggtttttaaatctgctaaagatggttgttaggagaaagttggaaaccatcccaaacagccgcttgaaggattcgattataacagggcaagagttgatgagagagggacaagggagcattgaaattaaagatccaccaacagatgctcagcagcatttgattagaagtttagcaaaagttttattgcatcagttttcaagcacaagtacctctacaatggcagtgaacgagggacaggataatttatttttatccctatttgttagaaaaatttcgatcgagccagtgtcagtctctcatgctcccactagattgaactttcatgaaaaattgaatttggaccaacatatagattctattttatgttctgaggagattgaagaatcaagaacataccaagtcggggcggttgatgaattcatgctccatcccttttgttgcttggaagagtacaaagactcaaaaagtggtaacatactgtctgcagaattcgacaagattgacttagaagtggatggagaagacaattttgaaggggagactttaaactcctgcaccaattcagtagaaaattttaatattccacttacgaagcagacactcgatctcgtaagcatatcatttcttccaagtaccaacttcgaaggccaatgggagtcattgtatttcggtaacaatattaaagagaggctctatagttatgcaaccatttccctcaaaatagcaaatttcaaacaaaacggaaattcaaatgaagaagacgtcagaaccttaataacaaacaataaattacttcttgttcacggccccccaggaacaggtaaaacaaccttgtgcaaagccctttgtcaaaaactatccgtgaggagagaattctctgaagcttccaataccatcgatacaaactataaggggataataattgaattatcttgttcacgcatcttctctaaatggtttggagagtcatcaaaaaacatatcaataatattcaaagatattgaggagcttttaaaggttaatgaagagcgcgggattttcgtatgtctcttggtagatgaggtagaggcaatagcatgttcaagaacaaacctactgaatagaaatgaatcaacggacggtattcgtgtcgtgaacactttactaactcaacttgacaggctgaaaaaatatcataactttctaacattggctacgtctaatctgctggattcattggacgatgcctttgttgaccgggcagacgggatcttttttattggaaacccaacagcggagggaatcttgcatattttaagagtgtgtattgaagaaatggtatctttaggtataatttcgtttcactctggatcttccggaacctcattctttgagaaatatcaagaaattttaaagaaaattgcaataaaatgctcggtatgtccttttaattatttttacacaattttttttttcatttacaaccattttttactaaccattgtcatcaaagatgaatgcatactcaaatcagtcccttga

SEQ ID NO: 3537 - DNA, 444 bp, Saccharomyces pastorianus
atgttccaacgtgacttcagaaagcatggtgccgtccatctttctacttacttgaagatctacaaggttggtgacattgtcgatatcaaggccaatggttctatccaaaagggtatgccacacaagttttaccaaggtaagactggtgttgtttacaacgttactaagtcttctgttggtgtcatcatcaacaagatggttggtaacagatatctagaaaagagattgaacttgagagttgaacacatcaagcattccaagtgtagacaagaatttctggaaagagttaaggctaatgctgctaagcgtgttgaagccaaggctcaaggtgttgccgtccaattgaagagacaaccagctcaaccaagagaatcccgtattgtttctactgaaggtaacgttcctcaaactttggctccagttgcatacgaaactttcatctaa

SEQ ID NO: 3538 - DNA, 396 bp, Saccharomyces pastorianus
atgattgaattgaatggaccgcaagaacacccaaagaacaatataagagcgaaaagagtgaccaagcttcaacacctagacaagaagagagtacgagatcaaattgaattgctcactaaaaaactagataaaaaccaagaggaaacacgcctactggctaagttgagagatgatttacaagcttctgacgaacgtttaataggttatgaagggaataatagtgaacttggtgtaaggagtatattctatgataaagattggaatccgaagggagctgcaccatcaaattacagaaatattccgtacaatcctggaactttcgaaaggcgaaccgaagttaaagtcagactaaggaatcttggaaatattgtcttaccaggcgaaagctcaaaatag

SEQ ID NO: 3539 - DNA, 465 bp, Saccharomyces pastorianus
atggccttatggcggatcaagcttgtcgatctaaggaccacagaaggagaagctaaggagcactgtcaaaaccacacaggtggcgtaaattcctgtaagtttaattacaggaactctctagtattagcatctgcagattcaagcggaagactaaatttgtgggatattagaaaaatgaacgaaagcccaatcactaccatggaacatggtgcttccatttccactttggagtggaatccaaatttcagtacggtgttgactacagctggccaagaggatgggctagttaagctatgggatactgcccgcgaagagactatatttacacacggtggccacatgcttggagtaaatgatgtctcgtgggatgtgcatgatccgtggttaatgtgcagtgtggcaaacgataattcggttcagatttggaaacctgcggaaaacctcgtgggacaagaacaaccttaa

SEQ ID NO: 3540 - DNA, 867 bp, Saccharomyces pastorianus
atgagccagggtgccgaagaaccagcaggtgaagcttccaatatccctgtcgatttgcaagaaagatattcgcattggaagaagaacactaaactcctttatgattacctgaatacaaattcgacgaagtggccttctctaacatgccaattctttcctgatttagacaccacgttggatgagcatcggatcttattatcctcatttacgtcttctcaaaaacccgaagacgagactatttatattagcaaaatatccactttaggtcatataaaatggtcatctctaaataacttcgacatggacgaaatggaattcaaaccagaaaactcaaccagactacccccaagtcacttggtcgatgatatcagcattttcttcccaaatggagattgtaatagagcaagatatttaccacaaaatccagatatcatagcaggcgcatcttcagatggtgcgatctatatttttgatagaacgaaacatggatccactagaataaggcagtccaaaaattcgcatccgtttgaggccaagctattcggctcgcatggagtcattcaagacgtggaggccatcgatacttcctcggcagacgcaaatgaatccacatcattggcctggaacctacagcaggaagcactcctactgtcttcccattccaacggtcaagttcagatttgggacattaaacaatattcacatgagaatcctctaatagatacacccttagtatcaatagagagcgatgcgagcggtgtgaatgatgtaacgtggatgccaacacatgattcactatttgctgcttgcactgaaggaaatgttgtttcgttattggatccctataatgagtcgtatgatgcggcc

SEQ ID NO: 3541 - DNA, 1128 bp, Saccharomyces pastorianus
atgggtgttgaagggttaatagaagaaacggagagctggacctgcgagcccctttccggaaggccgctagatgagattgtaaaagatgctgagaatgctggtgacttagtgacttatattcgccaaccagaggtaagtttggactttaaattgaagtttattgctgtgcacgaagagttcttttctgtgcaactaccagaccggcaatcaaggataagaacatgtcataacctgggtgataaagggatacagaacgaaattgtattcgtttttgtacctgggttaggtggcaacttggaacagtttgagccactgctcaagctactagattcggagcaaaaagcttttttggcgtttgactcgcctggatttggtcaaagttccgaatgggaagactatccaatgttaaaagtagtggagcttattttcgttcttgtatgtgacgtattcaaaaaatggcctaccagtgggtcaagcgatgatgacacaaatccatttaatggccgcaaaatcatcctcgtaggtcattccatgggatgttttctggcatgtcatctttatgaacagcacttggcaattctcagtgtggtggagaagtttgttctattgacgcctccaaaagctcatattgagcagctttccaagaatagacgtcttttccaatgggcgctttatggcatcttcaagctgccatggttatttgacatctatcgaaacaaattcgatcaagtaaagggtttggaaagttccggcatcaagcagtatttttatcaagataatgatgatgttaagttgaagtataggaaactttggcaatttaaaaataatattagcaataaaagcagaaccatcttaggttatttgcttggatgggtaactgttgattgggacaaatttagtgttatgttgacacaatcggatataaaacaggacattatattgtttggtgcggcaaaagatcctgtagcccccatcaagaattttaaatactatgaggatactatcaataaagaataccttcgtaaagtgataattttaccagactgttcgcataatttatgcttggatcgcccagaattagtatgtaagatgtttctacaggaagtgattaacgaggtcgattcatag

SEQ ID NO: 3542 - DNA, 4344 bp, Saccharomyces pastorianus
atgcaacaagttgctgaagaaccagtcttagtcaactcgagacagggaacatggaccaattttgtcaatttagccgatttagcagcgttagcagttcctgcagggttcagggatgacggcctacccaacggtgtcactttgattggtaagaaattcacagattatgcactattaaacctggcaaaccgctatttccagaaggcatttccaaacgattcaagaagctgtggtgttttcacagaccggaaggtaaaatcagtatatgacagtttgaaaggccctgactacgacccatctacctctataaaattagccgttgtgggtgctcatctcaagaaccttcctttaaattggcaattggagaaggtcaatgcaacatatttatgcacgacgaaaactacaaagtcgtatcaactttatgccttacccaagaacggtcctgttttaaaaccaggtctcagaagagttcaaagcgacgttggatctcaaatcgagcttgaagtatacagtgttccaacgaaccagtttggcgctttcatatctatggtccctgaaccattaggtatagggtctgtagagttagaatccggtgaatggataaaatccttcatttgtgaagagtcaggctataaagctgagggtacggtcgacatcaccaagtatggtggatttagagcatatttcgaaatgctaaagaaagaggaatccgaaaagaaaaagctgttcgatactgtgttgattgccaatagaggtgaaatcgctgttcgtattatcaagacattaaaaaaaatgagtatcaaatccgttgctgtttactccgaccctgacaaatattcccaacatgttaccgaagctgatatttccgtacctttgaatggtactactgcagcacaaacatatctagatatgcaaaagattatcgatgcggctaagcaaacgaacgcacaagccattattcctggctacggtttcctatccgagaatgcagacttttctgatgcctgtagcaatgctggcattactttcgtaggcccttctggagacattatcagagggctgggactgaaacattctgccagacagattgcagaaaaggccggtgttccattagtgccaggttctttgctgatcacctcggttgaagaagctaagagagttgcagcagaattagaatacccggttatggtcaaatcaactgctggtggtggtggtatcggtttgcaaaaagttgattccgaagaagatattgaacatatatttgaaactgtccaacatcaaggtaaaacattttttggtgacgctggcgtgttcttagaaagattcattgaaaatgccagacatgtcgaagttcagcttatgggtgatggttttggtaaagcgattgctttgggtgaacgtgattgttctctacaacgtcgtaaccaaaaggttattgaagaaacccccgctccaaatctaccagagaaaacaagattggcattaagaaaggcagccgaaagcttgggatccttattgaactacaagtgcgctggtactgttgaattcatttatgacgaaaaaaaggacaaattttactttttagaagttaatacaagattacaagttgagcatccaattacagaaatggtcacaggtttggacttagtcgaatggatgataaaaattgctgctaatgacgcgccagattttgattccacgaaggtcaaagtcagtggtgtttcaatggaagcacgtttatatgctgagaatccattaaagaatttcagaccttctcccggtctattagttgatgtggaatttcctgcttgggcaagagtagatacttgggtaaaaaaaggtacaaccatttctccagaatatgatccaaccttagccaagattattgtccacggaaaagaccgtaacgatgcaatttttaagttgaacaaggctctggaagagacgaaggtatacggctgtgttactaatattgactacctaaaatctattatcacctctgacttttttgccgaagcaaaggtgtcaacaaatatcttgaattcttaccaatatgaacctaccgcaattgaaatcactttgcctggcgcacacactagtatccaagattacccaggtagagttgggtactggagaatcggtgttccaccctctggtccaatggatgcatattcatttagattggcaaacaaaattgttggtaatgatcacagaacacccgctatcgaagtgactttaaccggtccatctatcgtgtttcattgtgatactaccattgccattactggtggtactgctctatgtacactagatggtgaagagatctctcaacacaagccagttgatgtcaagagaggatcaactctatctattgggaagttgacaagtggttgtagagcatacttgggtattaggggtggtattgacgtgcctaaatacttaggctcttgttccacctttactctgggaaatgttggacgttataacggaagagtattgaaattaggagatgtattattcttgcctagtgatggaaaaaagaattctgaattagaaaataacacccttccacagggtattcctcaatcattgatcccacaaatttccgaaactaaggaatggaaaattggtgtaacatgtggtccacatggttccccagatctattcaaaccagagtcgattgaagaattttttagcgaaaagtggaaggttcattacaattctaataggttcggtgtccgtttaatcggtcctaagcctaaatgggcaagaagtagtggtggtgaaggtggtatgcatccttcaaacacacacgattatgtttactcattgggtgcgattaatttcaccggtgatgaaccggtaattattacttgcgatggtccttccttgggtggttttgtttgtcaagcagtcgttcctgaagcagaattgtggaaagtcggacaggtcaaacctggcgattccattcacttcgtaccattatcttacgagtcctccagattattgaaagagtctcaagacgttgcaattgaatcattggatggttccaaattaaaacgcttagactctgtatctatattgcctacatttgagaatcctattcttgtccaaatagaaaaaagaagcaatctttcaccaaaggttgtatacagacaagcaggtgatcgttatgttctagtggaatatggtgacaacgaaatgaactttaacattgcctacagaatagaatgtttgattgctcttgttaagaaaaacgaaactgttggtattgttgaaatgtcccaaggtgttagatcagtcttgatcgaatttgatggttataaagtaacccaaaaggagttattgaatatcttagtagcatacgagactgagattcaatttgataaaaattggaaaattacttccaatataatcagactgcctatggcgtttgaagattctaagactttggcctgtgttcaaagataccaagaaacaatccgttcatctgctccatggttaccaaacaacgttgacttcattgccaatgtcaacggtatttcaagaaaagaagtttatgatatgttatactcagcaagattcttagttttgggtttgggtgatgttttcttagggtcaccttgtgctgttccgttggatcctcgccacagattcttgggaagcaaatataatccaagtagaacatacactgaaagaggtgctgtcggtattggtggtatgtatatgtgcatatatgctgcaaacagtcctggtgggtaccaattggttggtagaacgattcctatctgggacaaactatgtttggccgcttcgtctgaagttccatggttgatgaacccatttgatcaaatcgaattctacccagtttctgaagaagatttggaaaaaatgactgaagattgcgataacggtgtatacaaggttaacatcgaaaagggcgtttttgatcatcaagaatatatggactgggtcaatgcgaataaagattctatcaagtcattccaagaaggccaacttggtgaaagagctgaagaatttgccaaattgattcaaaatgcaaactctgaattaaaagaagttagctctgagaaacctgatgaagaagaacagtaccctgaaggtgcagaaatagtatattcagagtattccgggcgtttctggaagtccatcgcatctgtcggagatgttatcgaggcaggccaaggtttacttattattgaagccatgaaggcagaaatgataatctctgctcccaaatcaggtagaatcctaaagatttgccacgggaatggtgatatggttgattcgggtgatgtagtggctgtcttagaagccattgcatag

SEQ ID NO: 3543 - DNA, 768 bp, Saccharomyces pastorianus
atgacagtcagttctgatactgccgcagcaatttcattgggttggtccgtccaagattggattgacttccacaagtcatcgagccctcaagcttcactaaggcttcttgaatccttactagattctcagaatgttgcgccaacagataatgcatggatatcgctggcctcacaagagaatttattgcaccaatttcagattctgaaaagtagaaataataaagaaaccctgcctctgtacggtgtgcccattgctgtcaaagacaacatcgacgccagaggcctgccaacgactgccgcctgtccgtcatttgcgtacgagccggtgaaagactccaaagtcgttgaattactgagaaacgcaggtgcgattatcctgggtaaaaccaatctagaccagtttgccacaggcttggtcggcacacggtctccctacgggaagaccccttgtgcctttagcaacgagcatgtgtctggcggttcctccgccggttctgcatcagtggtcgctagaggtatcgtgcccatcgcattgggaactgacacagctggttccggtagagtcccagccgcgttaaacaacttgatcggcctaaaacccacaaagggtgtcttttcctgccaaggtgtggttcctgcctgtaaatctttagactgtgtttccatttttgcgttgaaccttagtgacgctgagcgttgcttcgagatcatgtgtcaaccggacctgaaaacgatgaatattccagaccctacgtctccaatccgttaa

SEQ ID NO: 3544 - DNA, 159 bp, Saccharomyces pastorianus
atgatgagccaaagtaatgaagacgagtcgatacaagatgactcaaacatcttggatattgcacgtttcggtaacctaatggatccatataatggacttcttgaaaagatcaataacataaatgaaaaactctctaatgaattacaaccaactctataa

SEQ ID NO: 3545 - DNA, 687 bp, Saccharomyces pastorianus
atggatagagacactaaactagctttccggctgaggggtagtcattcgaggaagacagaagatatcgatgatgatgcaatcgtgttcagaacgctgaatgtgctatatcgggagaccgaatctcctgtccgatctcctgctcaccgcatgttgtcttcgccaagacttgcaaacccttttgaatttcccaccgatgctggtgatacaaaggcacaggaccgctctgaacatgaatatcaacctgcggaagatgaagactatcctatggctaaccctgaaagcgagcgcgctgataacgaaccgcagcaatatgtgagaaacgatgaagagcttaccactgagtataatttcgaagatattcccattagacagttatcgtcatctatcacttcagtgaccacaatcgatgttctatcatctttgtttattaatttattcgaaaatgatttgattccacaagctttgaaggatttcaataaaaatgatgatgaccaattcagaaagttattgtacaaattagatctgcggctctttcaaactatatcagatcaaatgactcgagacttgaaagatatactggacattaatgtatctaacaacgaactctgttaccaattgaagcaggtgcttactcgaagagaagacttaaaccagcagatcatatcggtgcgaaatgaaattcaataa

SEQ ID NO: 3546 - DNA, 201 bp, Saccharomyces pastorianus
atgaaaggtaaaaatttgattggtaaatatgacgttgaagacccgttcattgatgattcagaattattatgggaggaacaacgtgctgccacaaaagatgggttttttgtttattttggtccattaattgaaaagggacactatgcaagcttagaacgtgcaaacggtaccatgaaaagaggtggtgtcaagaacaaatag

SEQ ID NO: 3547 - DNA, 279 bp, Saccharomyces pastorianus
atgcaaccggatactagagttcaaatcttgaataacgataacaacattaagaaagaacctgaaactgacaacgaagactctttgagtaaaattttaaacagaaggacgaataagaaaataccaaatattgctgaagagttagccaagaacagaaaccacgccaaaggtgcctctccatcgcccatcctagtctcgacattttcttcttcagctccttcttcggggcccccttcctcgtctacaaactcggtagatataccaacagcaaaccgatttagc

SEQ ID NO: 3548 - DNA, 558 bp, Saccharomyces pastorianus
atgcgatatcgcttcttacaatatgtatccagagtttacgaggatttccaaaaggtgagagaaacgtatggtgacttatcagtactaccaaccaagaatttcttagccccatcagagccagatgaagaaattgaagtcaccattgaacaaggtaagactttgattatcaagttacaagctgttggtgacttaaacaaaaagactggtcaaagagaagtctattttgaattgaacggtgaattaagaaagatccgtgttgcggataagactcaaaacatacaatcagttgctaaaccaaaggccgatgtacatgatacccaccaaatcggcgcaccaatggcaggtgtcatcatagaggttaaggtacataaaggttccttagtgaagaaaggtgaatcagttgccgttctgagtgccatgaaaatggaaatggttgtctcttctccagcagatggtcaagttaaagatgtcttcattaaggacggtgaaagtgttgaagcatcagatttgattgttgttttagaggatgaaactctgcctccatctaaagaaaactaa

SEQ ID NO: 3549 - DNA, 2916 bp, Saccharomyces pastorianus
atgagcagcaagaaattggccggtttgagagacaatttcagtctactgggcgaaaagaacaagatcttggtcgctaacagaggtgagatccctatcagaattttcaggtccgcccatgagctgtccatgaggaccatcgccatatactcgcacgaagaccgtctctccacacataggctgaaggcggacgaggcatacgtcatcggcgaagagggccaatacactcccgtgggtgcgtacttggccatggacgagatcatcgcaatcgcaaagaagcacaaagttgactttatccacccaggttacgggttcttgtctgagaattccgagttcgctgacaaagtggtgaaggcaggcatcacttggatcgggcctcccgctgaagtcatcgaatctgtgggtgacaaggtttccgccagaaacctcgcagcaagggccaatgtccccaccgttcccggtaccccaggtcccatagagaccgtacaggaagcacaggacttcgtcgataaatatggctaccctgtcatcatcaaggccgcctttggcggtggtggtagaggtatgagagtggtaagaaaaggtgacgacgtgggtgatgcgttccagcgtgctacgtctgaggcccgcaccgcattcggtaatggtacctgtttcgtggagagattcttggacaagccaaaacatattgaagtccagttgctagccgataaccacggtaatgtggtccatcttttcgatagggactgttccgtgcagagaaggcatcagaaggtcgtcgaagtggccccagctaagaccctgccgctcgaagttcgtgacgctatcttgacagatgctgtcaagttggccagagtttgtggctacagaaacgcaggtaccgccgagttcttggtcgacaacgaaaacagacattatttcatcgaaatcaacccaagaatccaagtggaacatactatcaccgaagaaatcactggtatcgatattgtgtctgcgcaaatccagatcgctgccggtgcctctttgccccaattaggcctgttacaggacaaaatctctacccgtgggttctccattcaatgtcgtattaccacagaagacccatcgaagaatttccagccagatactggacgtttggaagtctaccggtctgccggtggtaatggtgtcagattggacggtggtaacgcctatgccggtgccactatctctcctcattacgactccatgttggtgaagtgttcatgttccggttccacttacgaaatcgttcgtaggaaaatgatccgtgccttgatcgaattcagaatcagaggtgtcaaaaccaacattcctttccttttgactcttttgacacatccagtcttcattgacggtagctactggacaacgttcatcgatgataccccacaactgttccaaatggtttcctcgcaaaacagagcgcaaaaactattgcattatttggcagatttggccgtcaatggtccttccatcaagggccaaattggtttgcctaagttgaaatcaaccccaagtgtccctcatttgcacgatgctgaaggtaacattatcaatgtcgttactacgtcgccaccatccggatggagacaagtgctactagaaaagggaccagctgagtttgctagacaagtgagacaattcagtggtactctattaatggatactacttggagagacgctcatcaatccctgttagccacaagagtcagaacccatgatctggccacaatcgctccaactaccgcccatgccctagcaggcgcctttgctttagaatgttggggtggtgccacttttgatgtcgctatgagattcttgcatgaagatccatgggaacgtttaagaaaattaagaaccttggtgcctaacattccattccaaatgttgttgcgtggtgccaatggtgtcgcctactcctccttaccagataatgccattgaccatttcgtcaagcaagctaaggataacggtgttgatatattcagagtctttgatgcgttgaatgacttggaccaattaaaagttggtgtagatgccgtcaaaaaggctggtggtgttgttgaagctactgtttgttactctggtgacatgcttcaaccaggtaagaaatacaacttggactactatttggaagttgttgataaaatcgttaagatgggtacccatatcttaggtattaaggatatggcaggtaccatgaagccatccgccgctagattgttaattggttctttgagaactagatatcctgatttaccaattcatgttcatagtcatgactctgctggtactgcagtagcatccatgtctgcatgtgctttatctggcgccgatgttgttgatgtagccattaactcgatgtctggtttgacttctcaagcatccattaacgctttactagcttccttagaaggtaacattgacacaggaattaacattgaacatgctcgtgaattagatgcctactgggcagaaatgagactgttatattcttgctttgaagctgacttgaagggtccagatccagaagtctaccagcatgaaattccaggtgggcagttgactaacttgctattccaagctcaacaattgggtcttggtgaacaatgggcagaaactaagagagcctacagagaagcgaactacttattgggtgatatcgttaaagtcactccaacttccaaggttgttggtgatttggcgcaatttatggtctcaaataaactaacttctgacgatatcagacgtttggctaattctttagatttccctgactctgtcatggatttctttgaaggtttgatcggtcaaccatacggtgggttcccagagccattaagatctgatgtgctgagaaacaagagaagaaagttggacatgccgtccgggtattag

SEQ ID NO: 3550 - DNA, 1605 bp, Saccharomyces pastorianus
atgagtggtgccaaaagaaagagatctgaggtcgctgaacaggtggcacaacgatggaagagtttcaggtatagtgcagatgctggaaaaaaaactacaaatggtaaggacgatgacgactgtgtcataatcgatgaatcagaagttatcgatttgactaagtcggaacaagaggcggaggaaaaggaaacggtggatgacacgacaaacaaggcaactttcaaactaatcaggtcagatttctatgaaggaaaggcttccatggttgaggccgacgatttgatcactttgaaagatatattctgtgacgcaagactcaaaaaaagcatactcttcagtttccaatatgagctcgattttctgctgagacaatttcaccgaaatattgagagtataaccattgtgggccaaagggggacgattgtacccgtcgaagcaagttctatggatgcagcgctgtcgctagcacttcgcaagatcaagctgatcgagatcactatgcccccgtatgcttctcaccacactaagctgattataaacttttacgataatggtgaatgcaagatatttttgccctcgaacaactttaccgccatggagaccaatctccctcagcaagtgtgttggtgcagtcccgttttacaaatagaagaagagcagtcgttagtaccgtttaaggccggcttgatagactacctccgctcatatcatgtgagggacatcgacgagctaattttgaaaagcgtggaatccgttaactttgcaccgttaagtgaattggagttcgtgtattccacgccgtccaaattccagccgtcaggattgactatgttctacaataaacttcaggagctttcagtcggtgcggagactagtgatgctatagagcattatttgtgccagacctcatccatagggacgtcgctttcaagagcgaaggacgaaaatttatggacacatttgatggtccctttgttcacgggcatcatacctgcgctagtagagggcaccaagaaagtgcacgtaccggcgacggaatccttattgaccgcctatgcgcagaggaagatcaagccgtatattgtctttcccactgaacaagagttcaccacgagtccattaaagcgggctagttccgggtggttccatttccagtatctgcaaaaaaagagctattatgacatgctacgaaaccgattccgagtcttctacaagcaagacccagcaatggttaccagagcacgtggtaccacgcccgcgcactccaaattctacatgcattccaccacgaagtcgaccgaaccctgcgatgcatcgcgagtgttccacgagctggactggtgcctctatacctccgcaaacctcagtcagactgcatggggcaccatctcgaggaaaccacgcaactatgaggcaggtgtgctttatcacagtagcaggttggcggatacccagaaggtcacgtgccgcagcttcgcacgtgagcgccgggcgaaaggagagggtatccaaagtcacgtggcagtaccttttacactacccgttgtaccgtacaacgctgccggcgacgaatgcttttgttttgcccgtcacgagaatgaatag

SEQ ID NO: 3551 - DNA, 285 bp, Saccharomyces pastorianus
atgactacaggtttaatacgatgtgggatctgcgagaaagagattgactacacatctgaaaaaaaagtcttaaaaccgttcgttgcactttgcgataatgaaaaatgcggatgtattagtcatttgaaatgcctgtatagatactttttagatgatgaacagttgataatgggaaaaagaaacttgatacctaaaggaggtaaatgccccaactgcgagaaactctggcaatggacgacattggtcaagtattctacaagaatgaaaatagcatacggaaagtag

SEQ ID NO: 3552 - DNA, 633 bp, Saccharomyces pastorianus
atgtcacagcaaacaacacagcatcagtttcctcagttttattgctgctatctgctacaatcgatcaacaaaagacagtcgttttatataggatcaactccaaacccaatacgacgtttaaggcagcataatgggaagctgacagttggtggggcatacagaactaaacgtgacggttcaagaccctgggaaatgataatgattgtacgaggcttcccaagtaaaatcgcagctttacaatttgaacatgcgtggcaacatggatatcaaacgcattatatagctgagaacgatcgaatagtaaagcataaagcaggtggacgaactctgcaccataaaattgcattgatgaagttactactacggcatgagttcttccaacggatgaacttgactgttgaaattttcaatttaaagagctggggaatttggaagcaagataaatttaaaattgaaaatggatcaattgaaataaatgttcagatatgtgagaatgctcttaatgaaccaaagggaaacaccatagacgatctcatggatcatagtgacgagaatctgaaactgatagagattgtttacaccaaggttcttgcaactgaaaagacgacatttgaatcttttgaggaaaaatga

SEQ ID NO: 3553 - DNA, 1710 bp, Saccharomyces pastorianus
atgtcgtctattgggtaccaccagtgcagatggaactacaacgatgaaacggatgttctcaccgtggatgctcagatggacgctaacgagattccgtacgatttcatttggctggacttggaatacacaaacgacaagaaatattttacatggaaacggaactctttccccaacccaaagagactgttatcgaaattgaacaagctgggaagaaacctagtcgtgttgatcgatcctcatttaaagaagggttacgagattagcgacagtgtaattaacgaaaacgtcgccgtcaaggatcataatggcaacgactacgtgggccattgctggccaggcaactccatctggatcgatactatgagtgagtacggtcagaaaatctggaaatccttttttgagaaatttatggacttaccagccgatttgacaaatttgttcatttggaatgatatgaacgagccttcgatattcgatggtccggaaaccactgcaccaaaggatttaattcacgacaatcataccgaggagagatctatccataacctgtacggtttatccgttcatgaagccacttatgatgcggtcaaatcaatctactcttcatccgataaacgtcccttccttttaacaagagcattttttgccggctctcaacgtacggcggctacatggactggtgataacgttgctacttgggactacctaaagatttccatacccatggttttatcgaacaacgtcgctgggatgccatttatcggagccgatattgctggctttgctgaagatccgacacctgaactaattgcccgttggtatcaagcaggtttgtggtacccattctttagagcccatgctcatatcgatactaagagaagagagccttacctgtttgatgaccctttgaaatctatcgttcgtgacaccattcagctgagatatttcttattgcccaccttatacactatgttttataaatcaagtaccactggatttcctataatgaatccaatgtttattgagcacccagaatttcccgagttatacgacatcgataaccaattttattggggtgactcaggtttgttgattaaacctgttacggatcctggtcaatcggaaattgaaatgatttttccacccggtgtcttttacgattttgaatcaatggcctctttcgtaaacactggagccgacccagcagtgaaaatcattcctacaccactagataagatcccatttttcattgaagggggacacatcattaccataaaagataagtatagaagatcctcaaagttgatgaaaaacgatccatatgtcctagttattgctccagatgtcaaaggtcatgctgtaggtgatttatatgttgatgatggagagacttttggctatcaaagaggtgaatacgcaaagactcggttcgttttagaagacggtcatatcctaaaaaacgttccaagtcatactccagataatctgatggacattcacaatgacgtgttgagaaatacaaatattgaaaagattatcgttgcgaagaacgaactacaacgtgatatagcattgaaggactccgtgacaatcaaacaaggtggtgaagaacgatcattccccactaaactatcacatgaagatgacaataagattatcatcatgaacccaatgctcgatataaccgaaaactgggaactaatcttttag

SEQ ID NO: 3554 - DNA, 885 bp, Saccharomyces pastorianus
atggtccttttgaaatggctggtatgccaactggtcctcttcgcgtcactgtcgcatgcgtttaccgactatcttttgaagaaatgtgcgcaatctgggttttgccatagaaacagggtctattctgacaacatcgccaagtcgcatcactgctactacaagctggacgcccaatctattgctcatgacccgcttcagaactccctttctgccaccataatcaaaaccataccaagactggacggcgctgacatagccgttgagctgcccttttcgctttcttttctacaagaccactccgtaagattcactatcgatgagaaggagaggaccgttgccagcgggggctctctactcgcctcccaacggtacaatgaaacctggatgtacgccttcgacgagaagttccacgacgaggcgaacaagaccaacttcccagagctacgctttgccaagcaagaacactccacagactcgctttggtcgagactgtcctcattcctcacccattcgaactctactacggacactatccatttgcaaaatggtaacatatcgctggaaatcctcaccgagcccttccagctgaaaatctactggcagaatagcttaagacttatagtaaatgagcggaactttctaaatatcgagcaccaaaggtctaaagaggaaaattttgctcacgtgctcccagaggaaaccactttcaacatgttcaaagacgatttcatgtactccaagcacgacactatgcctctggggcccgaatcggttgcgttggatttcaccttcttccaatccacaaaacttttcggtctaccggaacatccaacttccctacggcttgatggacacttcagcatgcggagccttaaaggctgttaa

SEQ ID NO: 3555 - DNA, 417 bp, Saccharomyces pastorianus
atgactatcctgcttttccccagtgctaaacacgacaacgctagtccaaacgcccaccctgaagacaagggccatcatcacaacaacaagaaggactgcgccatcgagcacttgaaggcgcgtctcaacgacgcctctgctgccgcctgcagctatctgcacgccttcgtcctcaaggcccaggacgtggccagagtgtgccttctagaactgcaaaacccggtcgtcctggtcaacctggtgctgcactcctccgtgctgtgctacctgtgtaacggctacgcaaaccataacgtgcggtttttgaagggcaagcccaactccaccgtcttgaccacaaccgccggcgccctggggctgttgaccctagacggcctgatctccaagaaatactattccagattcgacaagaagtaa

SEQ ID NO: 3556 - DNA, 972 bp, Saccharomyces pastorianus
atgtcagacacagagacgaaggagaaggatgcaaccaaccccgaggacgccgaggatgactatatagaggacgaagacgaggatttccagccggaaggcgagaagtccggggacggcagcgacgacgaagatgacgatgacgacgacaataacaataacaacagagaccgggacaacgcccgcggcaaagtcgactactcgcgcatagagagcgagagcggcgggctggtcaagacgagaagggcccgccaggaggaggaggagtatgcgaggacgcacaagtacgaggcgctggcggtcgagtcgatcccggccaaggtggacagcatctgggaggagctgcagcgggcaagccgcgaccgtctttccagcagggcgggcgaggtgggctcggtgctgggcagcgaggccacggcggcaacggcaacagcagcagcaacagcaacaacagtttcggcgcccagcacagagtcgcagtcgcagtggcaggaggacaagattctgatcgagcgaagctacaagtttgccggcgagacggtccacgaaaagaagtgggtggcccgcagcagcgcggagggccaggagcacctgaacagtctgaagttcaagcagacagcgccgacgcaggacaagagggccgtcctcagtgccagcgccagcgccaacgccagtggcgctggcgagagtcggctgcgcttgcggcgaccgctgaagcgcccgccgctgctggagcagatcatctcaggcgggctgcggcccaagctgacgacgctggagaagtcgcagctcgactgggccagctacgtcgaccgcgccgggctcaacgacgagctggtgctgcacaacaaggacgggttcctggcacggcaggagtttctgcagcgggtcggttccgcggaggacgagcggtaccgggaactgcgccgccagcagctggcgcagcagcaacagcaggaggacggtgggccctag

SEQ ID NO: 3557 - DNA, 297 bp, Saccharomyces pastorianus
atggacttttactctcatccagcattacaagctgcaacggcttccggtgcatttgatgaatttgctgctgaggctacatcttcacatatgccagttgacggtagaatggttttgtacctgaaaattgttaaacgttactctccatattgccgtgattctaggcaattagccagattgacgacgggtactgctgtcaaatattccgttttacaagaggttttgaaccaatttcaagccttagttgtcaatgatattcctattcctgaattacataatttgaaaccaacatgtgtttga

SEQ ID NO: 3558 - DNA, 150 bp, Saccharomyces pastorianus
atgggctccgttgacgatgcctccaattcagaaattttacagagatggatggatttgatccgtaaatcagatgaaattggccaaagattcatcgccaatgccgatggggctgctttaagagatgccactgttacatggactcaaaaatga

SEQ ID NO: 3559 - DNA, 615 bp, Saccharomyces pastorianus
atgatcaattactttcatccaaatttatccgttggcatgattagagcctctctatctgctagtgaaaatgacatggctttgaaattatttcaaaaattatgtcaagaatcaactgagatgaaatacggttatttgatagaaacccatctttcctttattggtgaatgtaaggatttgaacgtggctcaaacattttttgacaaagccctaaacgatgaaatgccatacaagatagacttacaagtctcttatgtgaagtcctttttaagaaacatctggagccaaactcgcgatttcaaccatatctatcaaatttggtacaaatcctctttgcattatggtagaaatgttaaccatggtatctcttcatctttgaatgatacattcttcgacatttttttcgagaattatgctgttgataagatgcaaggtttccaaactttacaaaatgttattcaaacctataacaacatcaagcatatagacgaaccattcttcaacatcatcttagccaaatgtactgtctggcatgatcgcagtattttagaatacatagataagagctacgaggcctatcacatcccaaagacaatcgttgcttatagaatttattga

SEQ ID NO: 3560 - DNA, 966 bp, Saccharomyces pastorianus
atgaagtttaacagcacaattgcaatggaacaccatgagcataattacgccattccatacactcctgctaacttcaatagtccagccgtgggcccataccataaccaggtaaaccaggccaaccaatttgtccctcattttggtggcaacatggggtctaacaataatcatcacttggctcacaataacaacaataacaacaatcatcacttggctcacaacaataataataacaacattcatcataacaatcgtaatcaccataacaataataacaataacaacaacaatcgtaatcatcaccaaaacaaccataatcataacaagtataacaattccaaccaaggaaattcgattagtccagattccccatggtttcacaaagtttgtgcttttgaggattgcgtatcacagacgctttacatgtcccaaactccaagacgtcagaacatgaaacatcattcagagcatccaaattccaatgctaatccgctattctgggattctataggaagggcaatggggctgtatcatgacttgctcactactccagaattgaactctgatcgtgtctccaaactggtacatttacttcacaacgggttgagagccaacagaaatcaattgacaagactgaataagaagcctgattacgattcgcaatcgtttcacaaagaaatgaccaactatctttgtaaatcgctcagagaaatctcagaagatgtccttaacggcaaggtagaattgaacgaatacggggccatgcatttgatcactgcgttcaaggaacttttgttgtttgaagaagctgtcgatatttggaaggccgcgattaatggccaaaatgcctacacgtctaacatttttttgaatcaagagtcgtcggtgttatactaccaatattatatgacaatggtgtttcttatccagaaattcaagccctttacgaaaaatcttcttccatga

SEQ ID NO: 3561 - DNA, 714 bp, Saccharomyces pastorianus
atgacagtaacggtaacggataaaaaggcatgctctacttcaattgatgtggagaagacacgtttaaccaccacctggagcccccaagatcaaatccccgagtttgtgagaaatgagctttccaaaccccacccaaactacatcctggcgtttttaaacgttgtgcaacaattaaaaatccaaaagaggaccggttttctcgactttggcatcgttgaatgcgagagtatctcggaccatatgtacagattaggcataatcactatgctcatcaaggacccgaaagtcaaccgtgacaaatgtgtccgaatcgcactagtacacgatattgccgaatccttagtaggcgatatcaccccagtcgaccccatcgggaaggaggaaaaacaccgtcgtgaatgggaaactataaaatatttatgcaatatcttaatcaagccatacaatgagatcgcggcaaaggaaataatggacgattggctgtcttatgaaaacgtcacttcattggaagctcgatacgtgaaagatattgacaaatatgaaatgctggtgcaatgttttgaatacgaaaggcaatacaaaggaaggaaaaatttcgatgatttctttagagctgtaaccagtgtcaagactgacgaggtgaaaagctggactgatgaccttgtcatacagcgccaagacttttttgctaagttgcctcaattgaacgaataa

SEQ ID NO: 3562 - DNA, 1098 bp, Saccharomyces pastorianus
atgttcttttacattccatttattttttacaagtatatggtcattaccacctctggcggtggtcaccgtgatatatcagtagtcgaagataatggtatggactctaatattttccctcatgataagttgtctgagtatttgagcgctatcttgtgtttggaaagcacagttttactgggtatcgcggatgatttattcgatttacgttggagacacaagtttttcctgcctgccatagcagctataccattacttatggtttattatgtggactttggcgttacacacgtgttagttccgggcttcatggaacattggttgaaaaagactagcgttgatttagggctatggtactatgcttatatggcctcaatggcgatattttgccccaactcaatcaacatcctggcgggtgttaatggtctagaagtcggccaatgcatagtgttggccatcttggcgttattgaacgatttgctgtatttttctatgggcccaccagccacaagggattctcatagattttctgctgttttgatcattccattcttgggcgtatctctagcgctgtggaaatggaaccgctggcctgctacagtgtttgttggagacacgtactgttacttcgctggtatggtgtttgcagttgttggcatactggggcatttctctaaaacaatgctcttgttattcattcctcagatcataaatttcatttattcctgtccacagttattcaagttggtgccctgtccaagacacagactacccaaattcaatgaaaaagatgggctgatgtacccatcaagagccaacttgaaggaagagccaccgaaagcttttttcaaaccgattttgaggctattatatcgttttaatttgattgacctagaatttgataacaacaatgaaataattagcacttctaatatgacgttaataaacctaacgctggtatggtttggccccatgagggaagataaattatgtaacaggatcttacaattgcaattctgcatgggtattctagcgctcataggaagacatgccataggcgctattatctttgggcacgataacctatggaccgtacgttaa

SEQ ID NO: 3563 - DNA, 180 bp, Saccharomyces pastorianus
atgttgcggcttctatcattggtactggtcacatgcttaatctatttttacaaaaaccagggtccttctgcgcttgtcgctgccatgggatttggtatagcagggtactttgctacagatatgctaattccacgtgtggggaaatcgttcattaaaatagtctgttcggtaaggatctga

SEQ ID NO: 3564 - DNA, 1833 bp, Saccharomyces pastorianus
atgattggaaaagagtcagatctccaaaacatacataataacagtttttctttagctttcaaaaaccatccaccaaacttgaaagaaggaagaattaaagtcggatcaagaatcgttttgtatctttctaagttgcgtatttgtgaggtaaagggtgaaagattacagcaagaaatgacagtagttcacgtgatcgatgttgaaagtggtaatttacaatcgctaaccaatgcaattgaacatttagggtaccaagtacaactggtaaaatcaccagaagatttcaatataaacgaaatatcgagattggtcttaccaggtgtcggaaattatggtcatttcgtagacaatttgtttagtcgaggatttgaaaagcccataaaggaatacatcgaatcggggaaaccaataatgggtatttgcgttggtttgcaagcgatgtttgccggttctgttgaaagtgctgggagtccaggcttaaattacattgatttcaaattatccaaattcgatgattcagaaaagcctgttccagaaataggttggaattcttgtatcccttccgaagacctgttctttgggctagacccatacaagagatattattttgttcattcatttgctgccattttaaatttggaaattgaaaaatcgctacaaagtgatggttggaaaatcgccaaggccaagtatggctcacaagagtttattgctgccatcaacaaaaaaaatatctttgctactcaatttcacccagaaaaatctggcaaagctggtttagatgttattgaaaacttcttgaagcaacaaaatcctaacattccaaactataccccagaggaaaaaaagctattaatgaatgactattcaaattatggtcttacacgtagaattattgcgtgtcttgatgtgcgtactaatgatcaaggtgatctcgtggttactaaaggcgatcaatatgacgtacgtgaaaaggacgttggtaaagatgtcagaaatcttggtaaacctgtacaattagcacagaagtactatcaacaaggtgcggatgaagtcacgttcttgaatattacttccttcagagactgccctctaaaggacactccaatgctagaagttctgaggcaagctgctaagacggtgtttgtgccgctgactgttggcggaggtattaaagacattgttgatgttgatggatctaggatccctgctttagaagtggcaagtctatacttcagatcaggtgctgataagatctcaatcggtacagatgcagtttacgctgctgaaaagtactacgaattgggaaacaaaggagacggaacatcaccaatagaaaccatctctaaagcatacggtgctcaggcagtcgttatttcggtggatcccaaaagagtatatgtaaattcaccaacggataccaaaaataaagtcttcaagaccagatacttggggcctgatggacaagattattgctggtaccaatgtacaattaaaggtgggagagaagcaagagaccttggtgtgtgggagttaacaagggcttgcgaagccctaggtgctggtgaggttttactgaactgtatagacaaggatggttctaattctggttatgatttggaattgatagaccacgtcaaagaagcagtcagaattccagtcatcgcttcaagtggtgctggtgttcctgcgcattttgaggaggcttttctgaagactggtgcagacgcttgtttaggtgcgggtatgttccatagaagtgaatacaccgttaatgacgtgaaggaatacttattagagcacggcttgaaggtcagaatggacaaagaatga

SEQ ID NO: 3565 - DNA, 531 bp, Saccharomyces pastorianus
atgctaacgcgttcatatttaattaccaaaaaaatgaatttctcgagaagagagatttcatataacacaccaagccaaaaaattaagatgaccaccaccagtgaccaaatattgaagatccaattacgctcagcatatgcaactgtgcccaccaagggctctgccactgctgcgggatacgatatctacgcatcccaggatatttccattcccgccatgggtcaaggcatggtccccactgatatatcatttaccgtaccaaccggtacctacggtaggattgcgccaagatcaggcctagcagtgaaaaacggtattcaaactggtgctggtgttgtcgacagagactacactggtgaagttaaggttattttattcaatcattcgcagaaggatttcgcgatcaagaaaggtgatcgtgttgcccaattgatcttggaaaagatcgtcgaaaacgcacagatcgttgtcgtggactctttggaagagagtgcgagaggtgctggtggctttggtagcaccggcaactag

SEQ ID NO: 3566 - DNA, 471 bp, Saccharomyces pastorianus
atgaaccatatattgacaaaaagatggtttgtattcgcagtcgtattcaataatatatcttggaataatgattgtaattggcccgtattattttactactacagaatgagcaatcaagcactttatgagaaactcgaacaaacaaggacgatactgtccgtgaagcttgcagaattgataaatatgactacaatagctgatagagatgacgatgacgatgactcgtttgcacaagagaactcggaactcgcgatagccactggcagtgtcatgatggtgaacaaccagaccatgcagctgatcaaaaacgttcaagatttgttgagcctgactagatcgataaaggaaaaatggttactgaaccaaatacctgtgatgggccattcggagaaggcacgtttcgatgagaaccagatagaacagctattggacaattgtataaaatcttttatagcggaagaaaccacataa

SEQ ID NO: 3567 - DNA, 159 bp, Saccharomyces pastorianus
atgggtgctgttttcagagctgataaacagctggttaaatttcaaacgaattattatcgagaggaacagaaaagaagagaaaagattttagacgaggctgccgacagaggtttgtttttggaagacgatagtttgagctcttctagatcaaccacatga

SEQ ID NO: 3568 - DNA, 2193 bp, Saccharomyces pastorianus
atgagaaaagcaaagttaaaaaagggccatgaaatgtacacgaaaattaatgctgaagcaatcttcaaggttaaaaaaaaaagcaagtatcaagtggggagtaagagtttctctttactcatgtcaattcaggatactgtcgccaagtatacggatgtcgtgcataatttatcaatcaattattcaaacaggttggttataaaatcagaaaaactggctcaggttatcgctaactcaaaatctcccatgcaatttgaccattcggctttcgacggtcaaacagtgatatataaatgcatcaaaaaggaactgtttctcagcctcaaaactttgttttccaaagttaccccaaaaactgatatacagctgttcctttacccatattacatataccaaagccatttccaagctttaggaggtcagatcaagagatattgtggtgtaaagaaatacgatgagttgaagtttgcagctattagtcatttagaaacaggggtggaaaacaattatttaacactattagcaatttgggtagtctctttggatgagtttattagaaaagaacaaagatacagtgatgacagaggatccgactttcaaatattttataaactgatggttgaatattcctcttggaaatgggcatcggatagtaaaagacagtatcagttcatgtctcagtttcaagctaaacccaaagaatgtttaaagaaattttacgagtgttatgatcttcaaaattccgtggaccccttggtagaattgattcagccttgggaaagggccgtatttgccgccaacattatagattcgtttactggagaggaaattagaatcagtggtgccgaattattttggacattcagaaatcttgtattttcttctatttcgtcttttgctcttagattaagtgaccttcaaagtatattcaatgcatttaaaccttacggaaaggcgacactagttcaagatttcgcgcacgtacggtctctgaaatggcgtaaggatgaaacgattgaaaggttggttcgtgctttgatttttaacgatatgtttccctacttcactctggagcaaaaagagaagtttgaaaatggaatccttttcttacgtttgttaaggaaaaactttcaggagagcattattggcattaaagattttcatgtccaagtgatgaaatacctaaactctcaactaaaaaataactataacttattgctgatgacttcgaacaatcaagatgctatcaaaaatctccatatggttcccgattttttggaaaacgataataaaatcaaagtgtctctttcttcttcagatggatatacgcatacggctgaaaacaaagaacccttggggcaacacaagttttatccaaagatttactcaattgaacaaaatcctatatttgacacatatgatacatatgagtctcataaaatatatgctatagtttcattattgcgatattatttacctgagagtagaaagtttttccagacttattatctaccaagccttttcaaaaggatcttgtactacaatacaaagttccctaacctgtatcttatgaagaattgcttagagcggtcaattatagaatctcttacgatgttggatccctctttggtccatacgataaataatttagttcaatccagtatagaatcacttcagaatgtaacactaacaacggacaacaaaacaccctcaagtgtcattcttttgccacaaaaagatttcaagtcgctttgtgaagtaaacaaaggtttcaatgagccattttggcctaatgattcatatgcgaatagctggcccgatttagcaaacaagcatatggagcgaggtcaaattttgcacgatacgtttgcattccatatttttgaaatcgagctaccaattatcgttgatggtacaaagaatactcacttaaagctcgtttctaacatgtgtaccgccagcatattattcctatacaatgaaacggattacctaccgtttgcaaccatccaagaaaaactaggtgttttaccatcaagcaaacggaatgagatattattaaacaatttgaataggttagtgaaactgaagctgcttttagtaacagaggacaaagaaggacaaaaggtgtacactttcaatttgaattatgaaaatactggtcaaaacacttcgagaataagacttatttaa

SEQ ID NO: 3569 - DNA, 1254 bp, Saccharomyces pastorianus
atggacacagcaatgaccattcaattacagaaatacacgatatggacggaaaacctggttctaaatacaggtgtaacaatatgccccttagactccatcaaatccatgaagtcccttgccggatccatttccaatgaacgtgatctttacagctttttgaacaagtataaccaaaccgggaagcattcacttctaatcaacaaaaaccttatccctgtatcatacaaaaagcatccatccatgaaccaaggccaaaaaaacaaaacccttccaaaatttgctgtagacccttcaagaaactctattccgaagaggatgatttccacccataatgagtctccatttctgagcggtaataacaacaacaatgccgctaccaacacaattcctaatgccaacacgccctcttttaatacaaacaaacaactaccacctactataacaccctcctctaccaacaccgcggcaggggccatgtcaccatcttcttctattgtaacaagcgatactacgtcatccatgacaaaaactttggatcctggtaacaggagccctcaagtcccagaagaactaatcaattctttggattctgatcgtcccatttcacatattcaaacgaataaccatatgccacccggtgtcctgaaaaatttcaaaacgttcggtgttccattagagtcattggtagagttcgaacaagatacggttcctgcgatagtgcgccagtgtatttacgtcatcgataaattcggtctcgatcaagaagggatctatagaaaatcagcgaacgtactggatgtcagtaagttaaaagaggagattgataaggatccttctaatgtttctataattttaccgtcaaagccacattctgactcagacatttatttggtggggtcactgttaaagacgtttttcgcatcactaccggataacgtattaccaaaggcgctagcttcagagattaaagtttgcttacaaattgaagatccaacaacaaggagaaatttcatgcatggtttaatatataatctacccgatgcacaatattggactttaagggctctcgtgtttcatttgaaaagagtgttagcacatgaacctgaaaacagaatgaatttgaaggctctctgtataatctggggtcctactattgccccagaaaacccggatgatattaatgacgtaaactttcaaatcatggcaatggaagtactgttagaggtttcagatcaagcttttgaacctgaatga

SEQ ID NO: 3570 - DNA, 324 bp, Saccharomyces pastorianus
atggaggaaactgcaaggagatcagtcgacacttccggaagtgcgaaagtttcgcaagacaatggtgctgttgattcggtgcgcctgttcgatacgccagaaatcaacaaggtcctaaattccgatgtggcaattaacgctttgttgagccgtttgaagcaatcgttgttgacctgcgaagagtttatgaagtacattagaaaaaagtacgtcttcgaagaagaacacgtccaggagctatccaaacaatacaagcatttcttcaacgttgatggctctacgaaatcgtccttaaaaaagatgatcgacggccgattgccagct

SEQ ID NO: 3571 - DNA, 1473 bp, Saccharomyces pastorianus
atgttgtctagagtctctatactggccagatctatggctaccgcccaacgtcgtgggctactaagcagtgccgctcaatcgctggtctccaagcctgtttccgatggagatccagagatgtttgacatcttgcaacaagaacttcacagacaaaaacactctattacgctgatcccatccgagaacttcacctcgaaggctgtcatggatctcttgggctctgagcttcaaaacaagtactccgaaggttatccaggcgaaagatactacggtggtaacgaaatcatcgacaagtccgagtccttgtgtcaagcaagagctctggaactgtacgggttagacccaacccaatggggggttaatgtccaaccattgagtggggcacctgccaatttgtacgtttactctgcgatcatgaacatcggtgaaaggctaatgggtttggatttgccagatggtggtcatttgtcacacgggtaccagttgaagtctggaacaccaatctctttcatctccaaatacttccaaagtatgccctaccatgttgaccacgctactgggttgatcgattacgacaacttgcaagtgttggccaaggcatttagaccaaaagtcattgttgccggtacttctgcatactcgagattgatagattacgccagatttaaggaaatctctcaagcatgcggtgcctatttgatgagtgatatggcgcacatctccggtcttgtggcagccaatgtcgttccatctccatttgaattttccgacattgtcaccacaaccactcacaaatctttgagaggcccaagaggtgctatgattttcttcagaaagggtattaagtctgtcaccaagaagggtaaagaaattccatacgagttggaaaagaaaatcaacttctccgtgttcccaggccaccaaggtggtcctcataaccacaccattggtgcgatggctgtggcattgaagcaggccatgtccccagaattcaagcaataccaacaaaagattgttgacaacagtaaatggtttgctcaagaactaaacaagatgggctacaaattggtttccggcggtaccgataaccacttgatcgttattgacctgtctagtactccagtcgatggtgcccgtgtggaaactattttgagtgctttgaacattgctgctaacaagaacaccatcccaggtgacaagagtgctcttttcccctcaggtctaagaatcggtactccagcaatgaccacaagaggatttggccgcgaagagttctctcaagtggccaagtacatcgattccgcggttaaactagctgaaaacctgaaggctttggaaccaacagcgaaactagatgcaagatcaagactcaatgagttcaagaagttgtgtaatgaatctaccgaagtggctgatttgtccaaggaaatttccaattgggcgggccagttccctgtccctggtgaagtttaa

SEQ ID NO: 3572 - DNA, 597 bp, Saccharomyces pastorianus
atggaagcaaccatcaaagtagtgttactgggggattcatcggtggggaagaccagcatagtaactaggcttaaatcaggtaagtttcctgaaaagcatgcggccaccataggtgcagcgttcgtcaccaagacgattgaagtttctactagcgacacatcaatggagaaacgtattcatatggaaatctgggacacggcaggtcaggaacgctataaatcactcgtaccgatgtattaccgggatgccaatattgccctgcatgtttttgaattaaacaatgcggccagtcttcagtgtgcactgacatggttccaagatttacaggaccgtgcgcaagaaacgcaggttattctggtgggcaataagcaagatttggtcagtgaagagcaatctagcaaagtggaaataccggtagagttgcaaggtgtaccgtatgtttccgtcagcgctaagaccggatacaattttgatgccttgaatgaaataataatcagtttggttcctggtgaccaattcaagacatcgaaggacaatgaacaaggaaataaagtagagttaaataataaaagcagccgtagtggttgcatatgttga

SEQ ID NO: 3573 - DNA, 189 bp, Saccharomyces pastorianus
atgttctccaacatattagccctggcaatctccagtagtttcgttttcttttcaagcaacgcctgcctctctcttcttttcagttccttcttggtaacaggcttctctttcccagcgacttcattgctattagcagctgcagcagacactttcgaatcgaatgtctcaaacggtattggtggtaactga

SEQ ID NO: 3574 - DNA, 162 bp, Saccharomyces pastorianus
atgtccactttattacgcagtttctgttccatcaatctttccgccatttcttcctcggtcaattcttcaggctcctcatcttccttgacttccttcttttccttagtctcttctttttcttgcaaagatagtttgctcataccaagaacctctccgtcttga

SEQ ID NO: 3575 - DNA, 417 bp, Saccharomyces pastorianus
atgttgcgcactgttagcagtatgacttaccaccgttcctatgctggagccatggcgttgttccgtggaaagacaccctgcatggcggttagaaacataactactgagagaatccccagtcctccaaagctaccacgagaagagcaggaggagtttgagaaactgcagaggatcgcctcctcacaggaggccatagaccagtacaacgaacaaatagccggcgatcacacgaaggaaagcttaaactcgccacttttgaccaagaatgacattgggtcattctcacctgagttttccaagaccatacctgagttcgaaggcgacgttaatcccaagaccggtgagattggagggcccaagcaggatcccttgaggcatggagactattcgtttaatggaagggtcactgatttctag

SEQ ID NO: 3576 - DNA, 1488 bp, Saccharomyces pastorianus
atgacagttgccaccaaagaacacagcaagatagaagcaatgagggataaggaaacaaactacatagaagagcttcttacgcaattaaagaacgagcttaataaagatgttctatctggggatattaacgcattattaaggaaatgttcattgaatttggtgactattgccacccttccagacatggatgtcaaaccacttctggcgacaatcaagcgcctgataacatcgaacgtctccgacgatgtactaaactacgactatctgttagatatactggacaaactagtgcccatgattgattttgatgaggtgttagaaatttatagtgccgaggatttaataaaggccttagaatcagagatagatctattaagtgtggcagcatgtaagattatcgagaattctcaaccaaagggtttatttgccactactaatattattgatatccttttggatattcttttcaatgggaaactgggaaatgataatcttactgggtccatcgaaaaagtttttgaaagattaagctcagacgaattaattagacgtcggttgtttgataacaatttaccgttcttaatagatgtgaagaacaagatggaaacagtctcttttgttagattgatcgattttttgactattgagttcccgttcatcaatggtcctgagtttaaagaagctgtattttgctttactaaagaagaagtcctgaaatctgtggaagacatttttgcatttatcgaactagtcaactattataccaagttgatgttagatataagaggacaggataaatattgggccttaaaacacgttgagcaaacattgccaatttttgctaaactttttgaagatacagaaaattatccagacgtcagagcattctctaagaaccgcttgttgcagttatttgcagagatttcccggattgacgaagatgagtttgctttcttcaagactatcgataaagactatctgaagattggatctgaaacgaaactgataaacgagtggttacaattgatcaatccgcagtatttgataaagaaccataaggatctggttgtaaaccgattccgtatcagcggttacagtatggaagtgctgagaaatctcgtaacagacaaagaatgttttgatttaataaaggacaaatttaactctgaaattattctaaaattgccatacttggaacaaatgcaattagtggaagcgttgacgagatttgcatatacttcgaagtttctaatcaatgaattacctaaagtaatgtctagtctaataggcgatgggagcgctaatactattgtagaccaggaaacgatacactatagaaattctgcattgataaatttattaaacatgggtgaaaatgatttgaatatatggtttacacctttaatggaagaatactccacggcgattaatggtaagaaatattccaaaggcggtgaaactaagattgcagatgattacatagcataa

SEQ ID NO: 3577 - DNA, 1923 bp, Saccharomyces pastorianus
atgagtgagattgaaggtaaagagaatgaattagaggtagggttgcctccagacattgtccaagctgctttaccatttttgactactgatgatattaagaacctgtcgcaaacgaacaaatactataacacgttgctagattttgaccactctaaaactttgtggcatgaattatttcacaaggcatttggtacactgagaacaaatgatgaacctttccaatgtcaaaattcagccgagttcaagacttgcacagaaagcattttaagggaagcataccccgatttgtcttggcaagatatttatcagttacgggcatacgatgccaagttttatagttggggttacttaaagcacggaaggttagggtttactggcagttcaaatagtgaattggcagctacatcattaaatggaccaagtccgagatttaaatatggtgttaatatccctacggaagttccgtggttcaacagtagaaccaggtccagaagtggcttttgttctccagaggattcgttaaatgcaatcaagaaagacggagatgaaattatagctcaagtctccagcggggggttttcttttcaaatactgactgaatctggaaatttatatagtactggatccactttctctgggggctgcaaaggaccgggccccactggttcacagcatgattacaatccctttagagaaatgattcacaatatggagaggtcctatcctcgaatcacaagtcgtagtagtgggggtactgtaaacaccacagggacatttcacggaagaagaatgagcaacagccatccatccactgtccatgaaccaggagaaagacactcaacttcagttcaaaccactactactgacaggggacaagcacaagtgcccagtccctctcccggaagaaactacggtggtgtgcccagaactaccatgcctgcgatagggcctcatgataatatttatagcgaaatagaaatgttagagcgaagcgctaccaaagcagttccgggaaataatcatattaggagagtttttgcaagaaactcctttccattgtacagtagtagcgatgataatttggaaacgtttaatgatattcaatatattgctgtaacttctggaagaagccattttttggcaatggacagagacaataacatctactcatgggactccccagaatctgaccaaggtgttaaaatcgagtttgcaaatatgcctagccggataacgaatccaattctgaaaattgcatgcggttggaatttcaattgttgctacatatataaggttgggctagttgcatggagcgaaagagaggctgttgaaaaaggtaagagcttttcttttgcaaaatatgaaattatcccaaataccagtgatattaatggcaattctagggtcattgattttgcatgtctacaagataattgcgttttctatatcaataacgatggcgataaattatggaagtatcaccatgggttgagccaagtggtagatctgaacattgttggtaggttatgtaagattaacgtctgttttgccgccttgatagtatttactgatacccattgttatactttgaagatttcaaatggagatgttgataaagaaagcttaacggaaatagacatagaggaaaaggttatatccgtggcaagtggtgactaccataccgtcgcgctaactgaatctggtcatttgtattcttggggtgtagaaagccaagattgtggatgtttagggctcggtccttctgaaagaatggttaacgaattacacattggcaattgggaagggcaaaggaatatcaaggtggtcaagcccaccaaaatagagttacctgaagaatatatttgtgtcagtgtaaccgccggtggctggcaaaccggagcattaattatcaaaaaaaattga

SEQ ID NO: 3578 - DNA, 1620 bp, Saccharomyces pastorianus
atgcatttctccttgaagcatttggcaatcgctgcgttttatgctactaatttaggctctgcctacgtcatccctcaattcttccaagaagctttcaaacaagaagacccaattgagtatcttcctgaacaaaaagaaacactcgacaatgacaattctgtcgttggcgccaccattcccaagccacatgttccttacttcatgaagcctcatgtggaaagtgaaaaactacaagataagatcaagctcgacgatttgaacgccactgcttgggacctctaccacatggccaaccattccacttcagagtacggacaccccacccgtgtaatcggttccaagggccataacaagaccatggagtacatcttgaacgcctttgatggtatgcaagattactatgatgtctctttacaaaaattcgacgccttatccggtaagatcatctcttacaacctttccgacgttgaaacaggccaaacttttgcaaacacaacagctttcgctttgtctccacctgtagacgggttcattggtaaattagtggaaattcctaatttggggtgcgacgaaaaggattacggttccgtggtcccaccaggcttgaacgaaaagcaaatcgccctcattgaaagaggtaaatgtccattcggtgacaagactaacttggccggtaagtacggcttctctgccgttgtcatttatgacaacgaacctaaatccaagggtggccttcacggcactttaggagaacctacaaaccataccgtggctactgttggtgtccctcacaaagtgggtaaggaattgattgctaatattgcgttaaacattgactactccttgtattttgccatggactcgtacgtggaatggatcaagacccaaaatatcatcgctgacaccaaacacggtgatccggataacatcgttgctcttggtgctcattctgattctgttgaagaaggcccaggcatcaacgatgatggttccggtacaatctcactactgaacgttgccaagcaattgacccattttaagatcaacaacaaggtccgtttcgcatggtgggccgctgaagaagaaggtctgctaggctccaacttttacgcttacaacttaaccaaagaggaaaactccaagatcagagtcttcatggactacgatatgatggcttctccaaactacgaatatgaaatctacgacgcaaacaacaaggagaaccccaaggggtccgaagagttgaagaacttgtacatagactactacaaggatcacgacttgaactacaccttggttccatttgacggcaggtccgactacgtcggctttatcaacaacggcatccctgcaggcggtattgccaccggcgctgaaaagaacaacgtcgacaacggtaaggttctggacagatgctaccatcaattatgtgacgacgtttccaacctatcttgggaagctttcgtcaccaacactaagttgatcgcccattccgtagccacctacgccgactctttcaaaggcttcccaaaaagagagatccacaagcatgaagaactgaccgcattgaatgctgaaaatccacaattcaagtacagagctgacttcttgattatttaa

SEQ ID NO: 3579 - DNA, 1881 bp, Saccharomyces pastorianus
atgccttctgccagatccataggcgatcaaccttccaccatttcccatcctactgttggacaacttcctcaattacccaagctaaacttacctaagtttcaaacgattcagtacgacccaccggaatccaagttaccatacccaacgtattggtcagataaaggagcagacacagatactttattgtatgaacaaataattcagcgtgacaaaattaacaagttctccttagtgagggaaactaacggttacgatccattcagtatttatggattcagtaataaagaatatataagcagactgtggcacacattaaaatattatcaggacttaaaaaacaccaggatgaaatctataactaacacctcacagaagatttcatcagcaagtatctgggggaatggttattcaggatacgggaacggaatcacaaatacaaccacaagagttatacctcaagttgaagttgataatagaaaacactaccttgaagataagttgagagtttataaacaggcaatgagtgaaacaacagaggaattggttccgataagattggaattcgaccaagatcgtgacaaattcttcctaagagatacattgctatggaacaaaaatgatgaacttatcaagattgaagaatttgtggatgacatgatgcgagattatcgatttgaagattcgaccagggagcaacacatagataccatatgtcagtccatacaagaacaaatccaagaatttcaaggaaatccatatttagaattgaatcaggatcgcttgggtggtgatgatttacgaattagaatcaagctggatattgtggtgggacaaaaccaacttatcgatcaatttgaatgggatatctctaatagtgataattgtcccgaagaatttgcagaatccatgtgccaagaactggaattgcccggtgagttcgttacatccattgcacactcgataagagaacaggttcacatgtaccacaaatcgctggcattgttaggctataactttgatggatcagtgatagaagacgatgacattagaagcaggatgctgcccacaattacgattgacgatgtttatagacctgcagcagaaagtaaagtcttcactccaaaccttcttcaaatttcagcagcggaactagaaagattggataaggataaggatagagatacaagaaggaaaagaagacaaggcagatctaatagacgtggtatgcttgcattgaccggtacatcgacaaacagtatgtccatgaacggtgctcataatggagcagcaacggggaacgcttcattgttaccatcaggggagattttgctgccggatatcgcagatattccgagaactttcagaacaccagtaccaagtactctaatgcccggcggtgttgacgtgggaccttcagtggaatcatacgaattgagaaccacgactacatataaggctaagccagatagacccaagccagtcccgcccccttgctacattattgaccacattccaggtcattcgctattactttctatcaaagtgcctaagaaagaggaagcccaagaagattttgcgacgatgattgaaccaaacaatagcaccaatccaatgcttccaaggcctggctccctgaagtccagattgaatagtaatattcgcgctggtgtaactattccgacaggtgcgaaccctattggaaatcacgctactacaagctccctcaatccgacactaccgcctgccattccaaccggagtagccggaaagacagttcctgtacctactccaccaacgctaccctcagtagctccccatggtagtgaccggatactttcaaacaataatggtgatattaataatgatgatgatgatacatga

SEQ ID NO: 3580 - DNA, 762 bp, Saccharomyces pastorianus
atgaataatcagccgcaaggtgggaacagcgtccccaatagtatcggcaatatattcagcaatattgggactccgtccttcaatatggcgcaaattccgcagcagctgtaccaaagtcttactccccagcaattgcagatgattcaacaacgacaccaacaattactaatgagccgcctacaacaacaacaacaacaacaacaacaacaacaacaacagccacaaagacagacttcaccaccgtcacaaacacagcaatcaccacctcctcccccttccgctcctctgcaacaatcacagtccatggctagtcaatctgcaacatctaccccgcctcctcctcctcctcctccagcgccaattaatttgcctccccagattgctcagctacccttggctacacagcaactagttttaaatagattgaggcaacaggccatcgcaaagaataatccgcaagtagtggatgctatcaccgtggcacaacaacaagttcaacgtcaaattgagcaacagagggaacagcagactgcccaaactcaactagaacagcaaaggcaacttttggttcagcagcaacagcagcagcaacttagaaaccaaatgcaacgacaacggcagcaacaatttaggcatcaagtccaaatacaacaacagcagcagcaacaacaacaacaacaacaacaacaacaacaacaacaacaacaacaacaacaacaacaacaacaacaacaacaacaacaacaacaacaacaacaataa

SEQ ID NO: 3581 - DNA, 1695 bp, Saccharomyces pastorianus
atggagtcatcttctatcaaacacatcacgttgaaaaagaaaagggactacacttatgatagcatagaagaaagtaggggagaaagtggaatccctaacagccatgtcggagataatgaagagattcaaaatgcggatgacggtgaagatataccactttcaagaattccaaacctatggataattgaggccacactttttgctaacgttttcctggcaggttttgatggcactgtcactgcatcgacgtatcaaaccatcggtaatgagttcaatcaaatgagcatttcaagttggattactaccgcgtacttgattacttcaacttcttttcagcctctctatggatctttttccgatgcactaggtcgaagaaactgtcttttctttgccaatgcatccttcacaattggatgtctagcttgcagtttttctacaaacatctacatgcttagtttcatgagagctttagcgggtataggtggcggcggtttaattacactctctactattgtaaattcagacgtcattccaagttcaaagagaggaatttttcaagcatttcagaatttgcttttaggatttggcgctatatgtggggcctctttcggtggcaccattacttcgactattggttggaggtggtgttttctcatccaggtaccaatatctatgataagttcattactaatgaactactatgtgtctaaccaaaaggaatatgacgatcaaaaaataaatatctttctaagttcaaaaaaaatcttcaaagacatagatatcacggggtcaattcttattatagctggtctcacactgcagcttctctacctgagcttgggtgctagcttttcctggactagcccacctgtattaatggtactgattgctagtatagtaattattgttttgtttatattgaatgagaggaaaacaactgctagagccattatacccatggagttggttaactcctctttcagtttcgtagtactttcgatcagtatacttgttggttttgccagctatgcatatctcttcaccctaccattgttctttcaaattgtgcttggagattccaccgcaaaagctggattgcgtcttacaatcccgtcattgtttaccccaatcggtagccttataactggtatatccatgagcaagtataactgcctacaatcactactctacatcggtatatctctaatgtttttgggtaacttccttttcctgtttattgaaaaaacatcacctaactggttgattggtctttttttgattcctgcgaacctgggacagggaatcacctttcctacaacactgtttacttttatatttgccttttctaaacgtgaccaagctactgcgacatcgaccttgtatctattccgaagcattggatctgtttggggtgttgcaatttcggctggtgttattcaactatattttgcgagatatctacgcttgaatttgaaagatttattagatgaaaacactatagataagataatcgtcaggatcaactccaattcatcatatattggatctctacatggtgaagtgaagaacacagtaataaagagttttgacgcagcaactaaaaaggcccacttaatgtctacattgctgtcactattggcattgatattttgcgtgatcaaagataacctgaaaaaacctaattcaagaaaatag

SEQ ID NO: 3582 - DNA, 1557 bp, Saccharomyces pastorianus
atgagaaatgctgtcgttatagttgtttttactacgatatcatggagtatcacaaggcataaatcgtcagaagagcgtcccataagtattttgggcacagtcccttctggtttgaatgaagtaggtgtcatgaagatacccgaaggcttgctatcaaacatgagttcagaattgcccgcttcaattataattctagttttagaacatattgctatttcaaaatcctttggcagaattaatgattacaaagtggtccctgaccaagaacttatcgcaattggtgtgacaaacttagtaggaacattttttcactcatatccagcaacaggttcattttctagatcagctttgaaagctaagtgtaacgttcgtactccattttcaggtttattcactggtggttgtgttttactagcactttatgctttaactgatgcattcttttttattcccaaggcaacattatcagcggtaatcatacatgctgtttccgatctattgacctcttatgaaaccacttggactttttggaagactaacccattagattgtgtctcattcattattaccgtttttatcacgatattctcgtccattgaaaatggtatatattttgcaatgtgttggtcatgcgcaatattgttattgaaacaagcattccctgccggaaaattccttgggcgtgtcgaagtcgctgaggtattaaatccaacactgcaaaataacgttagtactgtagtatcactcaatgaatctaataagcaagtaaaaactactgttgatgttttgccaactttagaatataaattcagtacaaagtgggttccgtttgatcatgaatactcgcgagagttgaatcgctgtgccaaaatttgtccgccaccgccaggtgtcatagtataccgattaagtgacagttttacttatgtgaactgttcaagacactacgacattatatttgatcatattaaggaggaaacaagacgaggacagttgataaatttaagaaaaaaatccgaccgaccatggaacgatcctggcgagtggaaaatgccaccttcattgagtaccctatttaaattcaaacgaaattcggtgacggataatgaggatccaccggtatcgaatggaggcattaacgggggatcgcatgagaagccgttactgaaagtaatatgcctagatttttctcaagttgcccaagtagactctacggctattcaaagtcttgtcgatttaagaaaagctgtgaataagtatgcagacagacaggtcgagtttcattttgctggaattatatcaccatggattaaaagaagtttatcaagtgtaagctttggaactacgaacgaagaatttagtgacgaatccataattgctggtcattctagttttcacgtcacaagattttcaagtgatgatgatgcagattatactgatgaagatagccatataagtgcaccatatagtaattatggaaccctgtgtgctgcaactggtacaaacttaccttttttccacattgacattcctgatttttctaaatgggatgtttaa

SEQ ID NO: 3583 - DNA, 888 bp, Saccharomyces pastorianus
atgcttggaaataatatttcacatatgagctcaactgaggtttttgacaaccaggaagacctcgatatcgaagtatttgaatcaaaatacagctcttacaggcaatctgagacaacagcaaacagaatcgattttcaaaatgaggaaagttggaaggtcaatagtaagaggaagtttgagcaaacgaaaaatgagtcctcggacgttttgtatgattctattccaagatatgaagagagcacagttactcttaaagaatactatggccactccataaagaaggggttaactgcgaagtcggcaggaaactatatttcctccctttttcccattgtgaaatggcttcctcattataaccttacgtggtgttatgcggatttagtcgcaggagtcacagtcggatgtgtgcttgtccctcaatccatgtcttatgcacaaatcgcaagtttatcacctgaatacggtttatattcctcttttgtaggtgcctttatctactctttatttgccacatcgaaagatgtttgtattggtccagtcgctgttatgtcattgcaaactgctaaagtcattgctgaagttttgaaaaaatacccgcaagatcaaacagaagttacgggtcctattattgccactgccctctgtttgctgtgtggacttgttactactggcctaggtgtactgcgcttaggatttttggtggagctgatttctcttaatgctgttgctggttttatgacaggttctgcatttagtatcatttggggtcaagttcctgctcttatgggctacaacaaattagtgaataccagagaagcaacatacaaggttgttattaattctttgaaacatctaccagatacaaagttggatgctgttttggtttga

SEQ ID NO: 3584 - DNA, 342 bp, Saccharomyces pastorianus
atgggcaagagcagcatgagaaagacgagccagggcaagaacggtggtgttggcaagaagcagcaaaaaaagaggccaatcagcactgctgagaggaaaagaaccaagttacaagtggagaggttaaacaaaagcagtgaaacaatgataccgacactgctaaatgaggcaagcaaacaagacctggacaacaagaagatcaggtccactctggaagccgagggactggtcaaggaccagatgagggactccaaagtacgagaacagattgagacagaaaagtcaaagactaacgacaacatgctgaagcagattaaaatgatatccgggttttccttatag

SEQ ID NO: 3585 - DNA, 1536 bp, Saccharomyces pastorianus
atgtcctcatgcgttcgccacttcctctctgccccacaagaggccggggcgcctggagactccgccgtggtcaagctgtccaccgactccttcaatgagtacatccagtcgcacgacctcgtgctcgcagagttctttgccccatggtgtggccactgtaagaacatggccccagagtacgtccaagccgccgaggcgctggtcgggaaaaatatcaccttggcgcagatcgactgtaccgagaaccaggacctgtgcatggaacacgacatcccgggcttccccagcatgaagatcttcaagaacaacgacgttaactcgtccgttgactacgagggccctagaaccgcccaggccatcgtccagttcatgctcaagcagagccagccggccgtcaccgtcgtggtcgacctgcccgcattcctcgccaacgagactttcctcgccccaatcatcgtccagtccggtaagatcgacgccgacttcaacgccaccttctacaccatcgccaacaagcacttcaacgactacaactttgtctccaccgaaggcgccaaagatgacgctttcaagctcgccatctacttgccctccgccttggaagaacccgtggtgtacagcggcaagcaagccgacattgccgacgccgaagtcttcgaaaaatggttgcaagtggaagcgttgccctactttggtgagatcgacggctccgtgttcagccagtacgttgaaagcggcttgcccctagcttacttgttttacaacgacgccgaagaactcgaacagtacactcccgttttcaccgagcttgccaagaaaaacagaggccttttgaactttgtcagcatcgacgccaagaagttcggcagacacgccggtaacttgaacatgaaggaacaattccctctgttcgctatccacgacatggcccaggacttcaagtacggtttgcctcaactctccgaagaggcattcgacgaactaaccgacaagatcgaactggaaaccaaatccatcgaggccttggtcaagaacttcttgaacggtgacgccactcccatcgtcaagtcccaagatgtcttcgaaacccaggaatcctccgtcttccaattggtcggcaagaaccacgacgaaatcgtcaacgacccaaagaaggacgtccttgtcatgtactacgccccatggtgcggtcactgtaagagattggccccaacctatttagaattggccgacacctacgccaacgccacctccgatgtcttgatcgctaagatcgaccacaccgaaaacgacgtcgccggcgtcaccatcgaaggttacccaaccatcgtcttgtacccagcgggcaagaagtccgaatccgtcctctaccagggcgcaagaactttggactccttgttcgacttcatcaaggaaaacggtcattccgaaatcgacggtcaggccttgtacgaagaagcccaagaaaaggccgccgccgatgaattggccgacgaattggccgacgaagaagaagccatccatgacgaattgtaa

SEQ ID NO: 3586 - DNA, 1317 bp, Saccharomyces pastorianus
atgtctgctgaaaccgccgctgccaatactgttaccgctccagtcccagaagtacaagaacaggagagtgccaagagcaaacaagtcaacttgacaccggcacctttgcccacttcctccccatggaagctttccccagccgatgtccctgtttcctcgatttccatagaagacttggatgcgacaagaaagaagaagaacaggacacctactccaaagtcatctactgccaccaagtgggttccaatcaaggcctccattactgtttctggtactaagagatccggttctaagaacggtggtaataacggcagcaacaacaacaaaagcaaaaacaataagaatgcatcatcgtcgacatcgtcgagcaccgccaacaggaaaaagaagcatcaccaacacaatgttaagaagcaacaacagcaacaggtgaaaaatgatggctccgaacccgccactgaagaagagtcaaaggacactgcccctcaagaaaatgaccaatctacacaacagcaacagccacctcaccaccgtagtcaccaccatagccatcaccacaatagcaacgggcctcaaagaagaaagtttcataacagtagtaacaccagtatgcctcagaaccaagggttccctccacagttcaagccttaccaaggccacaacccccgccctaccaacaacaaccgtttaaagtaccacaaccacttccatcacaaccaacaccactctcaacaacctatggtgaaattacaacaacagttttatccagtccaaccggttctaatggccatcaacaacattgctagacaaatcgaatactacttcagtgaagaaaacttgaccgtcgataattatttaagatctaagctatcaaaggatgggtttgctccgttgtctttgatctctaaattttatagagttgtcaatatgtccttcggcggtgacgctaacttggtcttagctgcattgagagaaatcgtcgctaacgaatctgcaaccgtcaatgttgccgaaggttctttggtcaccaaggaaactgacactgtcgctgaaactgaggaagtggaagaaccatctcctttagacaaatatttcgttcgctccaagaattggtcaaactggttgccagaaactgttgaaactgaagtcaacattgaaaaagagttagtcggcgacgctttagacgagttcatgatatctttgccaactgcccctcaacaagaagaggaaccaatcactgaatccgttcctcaagaacaagaaaccaacgaggaaccggtcccagctgccgccagtgaacctgaatcctctttatag

SEQ ID NO: 3587 - DNA, 1686 bp, Saccharomyces pastorianus
atggtgagtgatagttgtaataacagcggtgacagtggcgcccattacgaaaggcggaatggcagtggtgcaggtcaccgtaaccgtcccagaagcggtcataacggtgctttagtaacgagactgggtagtgggacgctgcccgtcagggggctgataaatgacaagacgggaaccagcaaggtcaaaggctgcgtggaagcgtttatgggcgccagggcccaattgaacacaccttgggaccgtgccgggtgcaactggctagacggagtggcttactatgcccaattgaggaaaactgcgttctcgaaggagctggatctgctcagggcgcctatgattgatgcgtacttggcggatatgaggcaaaagttcgacgcttcatataaacagtccagggcggccctggaggccaaagtagcacagctggaaagggactggtatgcagtgcacggtgatgtgcatgcgaaactggaaacgctattggaagaccgtcgggtcttgaaacggataagcgacacgattgcgcccaccaggaagaagaagtcgctgcggctgcccgcactgactaaagaggatcgtgccatcagtacctgtccacagaccaagggcatgaaggacacgatctggttcgaagcgatccagaagaaaatgctggcaatggacggtacaatcaagcttctggagacggaacaaaaaatgctggcggacgagaggagctgcgtcaggaagaatttttggcccgcggtggaagcgtaccctggttcaaatgagtttgcgtatttggaaaaatgcatcagactgatggcctcccagaaggttgtatgcttttgcctggacatcgaggccttcgaggccaaccagcgggtggtcactgaaatcgggatttccatttacgaccccagagagaacatggtgccgtcaatggtgccgatcacgaagaactaccatttgatcattgaggagtcgctagaactgagaaaccaaaaatgggtatgcgattacaaagattgctatctgctgggcgaaagctacgtcctgaagctgaaggagtgtgtccagttcatccagtcgttaatcaactactacctggtcccggtgaccgatgaggacaaaacgtggtcgagggcctttgtcgggcaccacgtgagcggcgatctcaagtggctggagaccattggtgtcaagtttcctgggagagggtacgaaggtcgactagaccacacgctatttctggccgaccaccccggcgacatggacgtgttcgtcttggacactgagcagttctacaggaagtcgtacggcgaaaaggggagcagtctgggaaagatcctgcggttgttcgagataccgcatgcgttcctgcacaatgccggcaacgatgcgtactacaccctgtatttgttcatgaagttctgcgatatcaacttcaggagaatcagcgggatggacgatgttctcaaggtgatggcccaggtcaaagtctggggcgaaagagacctgcgggagcccaaagttgtgcccatgtcttatgccatctccatcgatgaggcatccaagaactgggggcaccgcaagggtgttaagaacagcaggaaagacagagtctgccagacggaatttggcgggttgacctacttcgggacaggcaaagatgctttttcaagcacgttgtcgacattctaa

SEQ ID NO: 3588 - DNA, 345 bp, Saccharomyces pastorianus
atggctagaataatggtatcccaagaaactatcgatcacgtcaaggaacttattgccgagaaggaaattttcgttgcgtccaagacgtactgtccatactgccacgcagcgttaaacactctgttccagaaattgaacgtgccaaagtccaaagtcctggtcctgcagctgaacgagatgaaggacggcgtggatatccaggcagccttgtaccagctcaacggccaaagaaccgtgccaaacatctacatcaacggtaagcatattggggggaacgacgacttgcaagagttgcgtgaaaccggcgaattggaagaactcttggaacctatcctggcaaactaa

SEQ ID NO: 3589 - DNA, 555 bp, Saccharomyces pastorianus
atgtcgccgatagtagttgaaataagggagaggaagaatattaaagaaatgaacaagttgatcaggtttcacgcccccatactacgcaggactttcccagacagaagaagcattgcactagcacgatattggcatactagcaagaaaatgagtagcgaatcgagcgacatgaaatggaatgatgggctgacacccttacagctgatggtgctcaaggacaaggccaccgaaagacccaacacgggtgcgtacctgcacaccaaggacactggggtctaccactgtgccaactgcgacacgccgctatactcgagtaacgccaagttcgacgctcgttgtggttggccagctttctatgaagaggtctcccctggggccatcacgtaccaccgtgacgagtccctgatgcctgcaagggtggagatatgctgtgggaagtgcggtggacacctggggcacgtatttgagggtgaagggtggaagcaactgttgaacttgcccaaggattccagacactgtgtcaacagtgcttctctaaacttcaaaaaggaataa

SEQ ID NO: 3590 - DNA, 1521 bp, Saccharomyces pastorianus
atgatggacacgacaacaactgtgatgactacagtgttcaaaagatctagttcagtcgtgaactctatatcttcacacatttcctcttccacgagcgcagcaacaccaacgacaacaacgacagcgacatctctgtattctgcaccgtctaatcttttattctctaatgttgcggctcagccgaaatcgtcctccgcaagtacgattgggctctcgatcgggctacccattggcatattctgttttggattgcttgtgcttttgtgttatttttacgccaggagaaattccatgtctatctcaaacacaccgatgtcagccacgatcccaagcgaaggaggaggtccccatcggcacagtaactggttctcacggatgtttaggcagcctggcaccgagcacaagaatttttattctggcgctaaccgtgatctcgagaaatacaacgatacccaatggatagctggggacaatatgtcctctaagatccagtacaaaatatctaggcctataataccgcaacatatactgacacccaagaaaacagtcaagaaactgtactcgtggtctgacaagaacgtgtcgttggaccccaatgccaatgatggcgaagaggagaaatttgtggacacctttctatacactaaaccaccgaatattttccatattgaatccaagatgccctcgtttagtgatttaccttcccagaaaacagtttcttcaaacaggaaaccccctttgaaaacggccgacaagtggaactatgaatccccattatccagatggtttttgaggggctccacgtatttcaaggactacgccttatcaaagacgtctctaaagacgccagctgtggctccacaactgaaacaaatgaagatactttccagaataagcaaggggtatttaaacgaatcagatctcttgcaggatgagcgatcgcccatcctggagtatcataatactgccttacatccaacctgcagtctaaatgacgtgggtaataccacaccggattcgcaaggcacatcttatcgcatcagcaacatcgatctaatcacagcaaagtctaattcggtgatatacgggaccattggccaacaaacgttggaggtcaacgaccgtatcaatggcaatactagcattgataaacacgagatggtgatacccacaatttcaaaaccacacaagaaaagaaaaaagagaaggcaaagtaagatgtacctgtcacgctccaaaccgttaccgctaactccgaccaccaaatccaacgaggatcccagtatccaactggggagaacctacacagttattcaagattatgaacctagactgacagacgagataagtatctcgctgggcgaaaaagtcaaaattctagccacccatactgatggatggtgtctcgtggagaagtgcactccacgtaatggtcgtgtccacgtcagtattgacgataaaagatacctgaatgaagatagaggtattgtgcctggtgattgtctccaagaatacgattaa

SEQ ID NO: 3591 - DNA, 1902 bp, Saccharomyces pastorianus
atgtcctcgtcgacgtcgccatacgaactgaaggacttgaaaaatagctcgactgaagtacatgccacggagcaagagaacgaaatcgagtatttcgaatccgggtctaatgaccgtccctcgcagcagtcacacttggactacgagcaacacaacacctctgccgtgcgtcggttcctcgactccttcaagagggccgacagggatgaagagcaggaggtagaagctacacagatgaacgatctcacgtcggccatttcgccctcgtctagacaacctcacgagctggagaaggatgagaccactgacaagatagcacctcacacgggccacaaatccgactcgttgaagaagactattcagcccagacacgtgcttatgattgctctgggtaccgggatcggtaccgggctgctggtgggtaacggtacagcgctggtgcatgcgggccccgctgggctgctcatcggttacgccatcatgggttctattctgtactgcatcatccaggcgtgtggtgagatggccctcgtttacagcaacctgactggtgggtacaatgcataccccagtttcctggtggacgacgggttcgggttcgccgttgcgtgggtttactgtctacaatggttatgtgtgtgtccgctggagctggtcacggcgtccatgaccatcaagtactggacgacgtccgtgaacccggacgtcttcgtcatcatcttctatgtcctggtcatcactattaacattttcggcgctcgtggttacgcagaggccgaattcttcttcaactgctgtaaaatcctcatgatgaccgggttcttcattctcgggatcatcatcgatgtcggtggagccggaaacgacggtttcattggtggcaagaactggcacgaaccgggtgcgttcaacggtgtacactccattgacagattcaaaggtgtcgtcgccactctggtcaccgctgcctttgcctttggtggttccgaattcatcgccatcaccactgccgaacagtccaacccaagaaaggccattccaagtgccgccaagcaaatgatctacagaatcctgttcctgttcctggccaccatcatcattgtgggtttcctggtgccatacaactccgaccaactattgggttccggcagtggtggtaccaaggcttccccatacgttattgccatcgcatcccacggtgttcgtgtggccccacatttcgtcaacgccgttatcctactatcggtcctatccatggctaactcctctttctactccagtgctcgtttgttcctaactttgtccgagcaaggttacgcccccaaggtcttttcctacattgacagagccggtagacctttgattgctatgtgtgtctccgcattgtttgccgtgattgccttctgtgcagcatcccccaaggaagaacaggtgttcacttggttgttagccatttccggtctatcccaacttttcacatggactgccatttgtctatctcacgtcagattcagaagggccatgaaagttcaaggcagatccttgggtgaattgggtttcaaatctcaaactggtgtttggggctccatttacgcttgtgtcatgatgatcttgattcttattggccaattctgggtcgccatcgcccctatcggcgaaggtaagctggatgctcaagcctttttcgagaactacctggccatgccgatcctgattgcactatacgtaggttacaaatgctggaacaaggattggaaactgttcatcagagccgacaagatcgatttgaactctcacagacaagtcttcgacgaagaattaatcaaacaagaagatgacgaatatagagaacgtttgagaacaggccctgcctggaaaagggtcctggccttctggtgttaa

SEQ ID NO: 3592 - DNA, 3102 bp, Saccharomyces pastorianus
atggctatggcgaaaccctcgaacagtataggaccctggaggcttggtgaaacgctgggattcggcagcactggcagggtccacctggcgcagcacgagcgcacgggccacaagaccgccgtcaaagtgatttcgaagaccatcttcaacaccggagacgatggcgccggtccttttgcgttgccttgcaacattgagcgcgaaatcgtcgtcatgaagctgttgagccacccaaacgtcctgagcctttacgacgtctgggaaaccaacaacaatctataccttatcctggagtacgcggagaaaggcgagctgttcaacttgatggtggaccgcggacccttgcccgaaagagaggccgtcaagtgcttcagacagattgtcatagcgatctcgtactgccatgcgctgggcatagtacaccgcgatctgaagccggaaaaccttctgctcgacagtgactacaacatcaaaatcgctgattttggcatggccgctctgcagaccgacgcagccctgctagagacctcctgcggctcccctcactacgctgcccccgagatcgtatcgggtctgccgtacagggggtttgctagcgacgtttggtcttgcggtgtgattctttttgccctgttgacgggcagattgccctttgacgaagacaatggcaacgtgagagatctgctgttgaaagttcagagaggccagttcgaaatgcccgatgacactgaaatttccaaggacgcacagaacctgatcggcaaaatccttgtcgtagaccccacacaacgaatgaaaacaagagacatcctaacacatccgctgctgaaaaaacatcaaaccatcaaggactcgcaaagtatcagaaacctgccccgcgagaacacgtacttgtacccgctagcagacgtaaacaaccataccaatgccaccatcgatgactcgatcttgcagaacttggtggtgctatggcacggtacgcctgcagacgaaatcgtagccaatttgaaagccaacggaaccaacacagagaaaaccctatatgcgctgttgtaccgtttcaaacaggaagcaaataaaagaagtcgccacaagatcaaaaaaactaaaaataaaactagaaacgcattgctatcaacatcatcaccatcatcacacaaccggctttccgaatccacgccccgcagacgtacggctaaaaggcgttccgtaaacttttcatccagcaagaagaggtcctctttcatactcgcctccaattccaacaatggttctccaataccttcaagaagcagcaaaagaactccgtttctcaacacggcgtctgggaacgttccgccaatgccagtgaaactcttgaattcctacaagcgaaattccaaacgatcaagcaaaagactgtcctacatgcccaatgtgaaaagaggttcactgacgtcgaactcgctatcaaaatataccggcctgatagacgaagatgattgggagtacatcgaaaaggacacgaaacgaacaagctcggatttcgctacgctgatagacgaaatatttgaacctgagaaattcgaactggcaagaaaggaaaaagccgaattccaaaggaaagtacaagaagccaagagacacaaactatacattgctaagaccgaccaagaaaacggggttgtaactggagaatttgatggaatgggagtgttgaagaaaatcaataataaagtctcatcacccttgatgaactatgagtattcacaacaggaactgttgcaagacataaacaccttactcaccaaccgttgtcaactctccgcatacaccagacccatttcaaaactggatcccggtttgatgcccgtacctgaaacaatgccctacgatataaaggaaaaaacagacctgttattggacacagaaatgaagatattagaaacaatacgcaaatccaaaattctaggcccgtcatcaaacctcagaaaagaggtaccgcaagacagagataggctgccacctgtagaagaatcacccatcgtttcaacaacgcccttgatgtataacaacgatccaaaagaagtctgcaagatatccgatattcaagtcccacatttcacgagaaaatcaaaattttttaccaacacaaataacaggcggtctgtgttatctttgtattcttcgagacattcattcaagggcttgagccagcttctggatagcgaagatcccagtacaaacccgtattcacacaatagtggaccagtgggtgaagaaattgatttaaccgaagatattgccaacatgaagaacatcgacaataatattaataataaaaataacaataatagattatacgacgtttcagaaagcgccattttactaccaggaaataatgataataataacgatgatgacgatgttgttgctgatgatgatgataattatgattatgacaatgacaatgacaatgactcacaatcaattcaatcctcaatgtcgaataacacagaacctactacatttgtgaaacttccatccttaaactctttccagaggaaaaacgccagtggattgggtatttaccagagagagccttccaataagtctttgccagaagttgctactaacgtcgaagacattgatgaagacggagaaaatgagaaaggaaaagaaattcagtacgaaaatgttaccacgagtatatcaaacagcaacataaagaaaaacgtcaacaccaaagatacagtaagagaatcctctaacgtttcattcctgaagaagttctccaagggtaaaattctagagctagaaatacacgtcaaaataccggccgagagactctttgagggcctgcataaattactggaaggctggaagcaatacggattgaaaaatttgagatttgatacccccaatatgattatcactgggaaattagtaaatgacaatatcttatccttaagatccacgctttttgagataatagtcttaccaaacggagacgatcgaagtttgattaaattcaataaaaaaacaggctcaaccaaaactctaaagaaactcggttacgaaattcaaatcgttttacaaaaagagggtgtcttggatagctga

SEQ ID NO: 3593 - DNA, 456 bp, Saccharomyces pastorianus
atgggctcattttgtttggtatgtacgaatgcaagcactaacgctttgatatcttccaaaaataaaacacaaaacaccatgaaacaaactgatcgagaagagcaatgcgattcaatagcttcatctgatttgacgaatttcgatgtagaatccaactactcgaatgattctgctaacttactttgcgaacaatatgcttgtaaactgcctatgaaagatgaatcccaaacaaagttcaggctcacttctatgaatcaaaaatcatacaagcaaagtgctctatacgtacctttgacattcaaagaacgcttttcctcattcaccaaatgcatcaagagtacttgggccaaggttccaagctgcatgccaaatagatacgtcaggataacctttatttttgctttgttaatttcattagctgtttgggtattttacatggacgttcatgtgcactag

SEQ ID NO: 3594 - DNA, 1137 bp, Saccharomyces pastorianus
atgtctgcaagcggcaagatctctgttcccgaaggagtagtcaattggctgttcaaggtcatccagcccatctatgacgatggaagaagaacattccacgactcgttggcgctgctggacaaattccaccgtttgaggccaaggacaagagtattcacacattccgacggcagtccgcagttgctgttgtccatttatgggactgtcggcgacagcctgcccttgatcatgtggatacccagcctgtacccggtaaaaccccccttcataagtatagacttggaaacattcgatgtgagcgcaatcagtagttccttgcccgttcaagcgtacattgactctgatggcagggttgcgctgcccatactcgatcactggaaccctgcgacgatgggccttatagtcgttgtgcaagaattgatgagtcttttgagtgagccatcgcgagatcgggtgcccagcctaccgccaaagcccgacgcaatgcactctccactaaaacacacagtgccccccctaccaccgaagcccaagttcccacacgtgcagccgccattgcagccacctccaccaccgcaaccaccctccagtgcggtcgacctgatggacatggacaatacggatctctcccccaccaaccaccatgaaatgctgcagaatctgcagtccgtgctcaacgagctgtaccgcgaagacgtgcactacgtggcggacaagatactgacaagacagaccatcatgcaagactcggtcgccaggttccacgaaatggtcgcggtcgacaagacccgcctgcaggccgtggaacagaccatcgagcagaccatgcacacgctaaatgctcagatagaagtcttgacagcggaaagggccaccgtccaggagttctcctcaacctcgccgttcgacgacgaggacgtcgacaccatagccgtggcgcaaaccgacgggctcaaccagctgtaccagctggtcgccaaggactacgccctcacggacaccatcgaatgtctgtcccgcatgctgcaccgtggcagcgtacccctcgacacttttgtcaggcagagtcgggaactggcacgccagcagttccttgtgcgatggcacatccaacgaatcacctcaccgttagcgtga

SEQ ID NO: 3595 - DNA, 492 bp, Saccharomyces pastorianus
atggttttaagacaattatattattatagatcaaccaaacatatctaccaaggtatttccatcacttctacgataattttgagcgttttccttatattgagtatattcacatatgggtgttccatatctaacttacccttgaaggattcaggtaaatttggtattttttacttagagcacataaattatctttgggtgatggcaaatttggttaaaagtttcaagtacattccgcaaatgagtatcaattggatggggtgctctacaatggggctatcatcaaagttcgtcttgatatcagttttggcagaatttattgatttcgtaggtaggttatttgtaccgaccagtgctttgttttataagattccgttcaactcaacacctttttgggtgaaattgatacagtttattactctactggtcatactttgtcaagttcaatatctttatgtggggcggaaaccacgactaccaaaagggaaattataa

SEQ ID NO: 3596 - DNA, 747 bp, Saccharomyces pastorianus
atggagcacggattgcatatgcagtcgcatttcaagagtgatgatgtcaacaacgatgttaagttgtgtacaatgaacgaaggcatctcggatgagcccaatgcatctttgatcgcagactatatcactcttcctagcaacatatttacctcaaaatttccccatctattttacgaaatggctcactttaaacctttcgtgtggttatttctagtgctcgcgatttccattttatctgtcgtgtattgccataataatgtcttttacaatcttattgtcttagtggttgttccttatttcatgtgtttgtttgcgctgattgcatttaatcagccgatctctgatgaaagcttcaaaataaaacttttgatggaggtaattacatacaaaccagcggtaaacggaagggaatggagaactatcacatacaatatgaatcagtacttgttttgtaatggtttatggactactccgtactatttttacagtgaaatgacgtgctatgatttttttagaaccctcattaaaggaaggatttccggtactccttcagactcgtcaacaagtgatgccgaaaatacacagccagaggtaccagcagcagatgctccggatgatgcagctaggtctcatattttcagtcctgacccaattttcgaagcgtactatcttaaagctgtagaagtggaaaaagaggcccaaggaaagtattggagcagccaatatccaaataccgatataccttaa

SEQ ID NO: 3597 - DNA, 450 bp, Saccharomyces pastorianus
atgatgacagtgttaccagaagtggaactcttgacgacttcgtccaacaaggacttggtaccagcggcgaacttttcgaattcgaaaacacctggtggaccgttccagacaatggtcttagcctttgcgacagtggcagcgaataattttctagattctggaccactgtctaacccttgccagccagctggaataccttccttgtcagagacaatcttggtgttggcatcagcagagaaagcatcagcaatgacgaaatcgactggtaagacgacttcgacacccttggccttggccttttccatcaactttggaacgatttcagcaccggccttgtcgaagatagagtcaccgatttcagtgttttgcaaaaccttcttgaaggtgaaagccataccaccaccaatgatgatggagtcgaccttgtccaacaagttgtcaatcaattga

SEQ ID NO: 3598 - DNA, 888 bp, Saccharomyces pastorianus
atgacagaaaaagcacaaccctataagaccaaaatgtctgaaaatcatattcctgcttggaagagaattgctctaaagcaaaagagtacagaaaaccaaaatgaagtcaacgagcaaaatcaatctaatatagtagatgatgatccgttaaatattaccacacatttatctaccggtaacttaacaaagaaggagaaaagacgaatcattaatggcgaaaataaattacctaccaaaaaggagaaacgtgtgtccaaaccaggttcgaaaaagaaggaaaaattatcaagagaagaaaagaactcaaaaaagagtaaaattcttaaagaccagctacgttacttaatagagttcttcaaaactaagtcagaaacaaaattcccacactctgttttagaattggaaagtgtgaaggaaaactatggcgattctttaaataaggttatatcagcagaatctggtgttgttgaagtttggaagttttctaaacaaaagcaaaattggctcatcaagcatctttttaatttagatgaaattccgtctgtgtacaatgatcttttgctattatatttcaaggatctacaaggaagatcaaaagatgaactaatatcgaaatgtcaagaaaaactaaaacagtggaatgattatgcagaagatcaagaagaaaaaataaaagcactagttgaaggagaaaaaactagtgaacagtctaaggaggaaaacacggatgacagtaaggaagatgatgaagccgtaaaagaagaacaaaaagttgaggtacaaatgcccaataaagagcttgtgcaaagaagtttggaattattagagacttggaaggatgacagctcgaaaacaattgagctaaaaaacttttctatcgacaattaa

SEQ ID NO: 3599 - DNA, 282 bp, Saccharomyces pastorianus
atgtttctacgtactcaaacacgtttctttcacgctaccgctaagaagatggacttctccaagatgtccatcgtcggtcgtattggctctgaatttgctgaacatacctccgccaacaacaaccgttacttgaagtacagtattgcctctcagccaagaagagacggccaaaccaattggtacaatatcaccgtgttcaatgaaccacaaattaattttttgacagaatatgtcagaaaagggtatgtcttttttttttttgctatttttatggttgtttga

SEQ ID NO: 3600 - DNA, 279 bp, Saccharomyces pastorianus
atgaaggtcaaggctgacagagatgaatcttccccatacgctgctatgttggctgcccaagatgtcgctgttaagtgtaaggaagttggtatcactgccgtccacgtcaaaatcagagctactggtggtactagaaccaagactcctggtccaggtggtcaagctgctttgagagctttggctagatccggtttgagaattggtcgtatcgaagatgttaccccagttccatctgactccaccagaaagaagggtggtagaagaggtagaagattatga

SEQ ID NO: 3601 - DNA, 5748 bp, Saccharomyces pastorianus
atgaccatagaaaatcagatgtatctggagattaaggaaggccaattttgtgtttcaaatgataattacatgatcggcttatttgaaaactttgaatttgaagtaggaaacttgtactttattgcggttataattgatcaaaataaccgaatatctttatatgttgatgggaatttaatcaaccagatcacgttatttgaaaattcaatatttcaattaagtacctgtgaactaggatccatgatttcctctttcaagctttacagattttatttgtgggatgggctactaacagaatcgactattagactacttcagcatatcggaagtaattatcagtatacatttgataaaaagaacaaattttgtggtatattgtcgagttgccaagatgtgttgataacaaaaactcgtttgatgatcaagtcacccacagaaactacatgcacaaaattccttgacgaaattaagcttcttgaaatggagaatattataattgatatgaacccgaataatatgtgtcaagattatgccaaatcctctaatttcacaataacattcaaagaaaacaaggggaactcgaacgatatccccggcatgggaaaatgctatttatatcaaagctcgaacttggttgctaagtttatctctatcgattgcatacgttttgcgtttttgaacatcacagaatgcaatagtatggacgacttacttcgtcacgtatcacatttactgaatcttttgcgtaatactgaaattcttaattgcttcaaaagagactgtggctttcctttatttgcttatactctgaggcaaaaaataacacaagatctattgcagcctctgaatattcagtttttcaatttattcatagaattttgtggttgggattttagagatatctcaaaatccataatttcggatacagaagcctacgaaaacttagtactgaatttagatttatggtacgtggacgaagatgaaagttcccttacatcaggaggattagaaattatcaggtttcttttttttcaaatttcaagtttactggaagcttctatttatgctaggttcaatgctgaaaaatttaagacaatgaaaactctggaaaagttgtgtttgacttatcaagctactacaaagaaagggaagcctacgaacaagtttgatgtgctgtccaatgatgtagtatctgtactgcttgccttgttgaaatacaatttcgataaatggcatttacaatggttgttacatctttcgtattacttcattagagccaaggatatacgttccggagaaattatccttcaaacggtagaccaactcttttcgttcttcttagaccaagacaacgacgagaatgctaaattactttctaaaatgataccgattaaactgatactgatgatcatggatcaattaatgcaaaataatgaatcgaaccccaccatttgcttgaacattctattcaagacaaccctgattaataaatctctcttcaagcaattttacaaaaatgatggtctgaaactcatattgaccatcatatgtaaggcggatgaaactcgtcaggaagattttatctccttacttttcacctactcaatggataactatagcacaactaacgaactcgtctcagatgcgggaagcgacatttttaaagaaaatcacaccaatgagataatcacgaaggaaattatttacttagccatcaatttcatagagtggcatgtggtgaactcagaagccaatgactattcttcgttatcagatctgaacaaccacatatcaagatttatcgaaaatttggaattcttaagcaaggttccgattaacgcacctgtatttgatcctagaactagttatgtggccgtctcattactagatctcttaataactttaaaccaatcaggaaatgtctcagaattcgaaacctcttcgaaattaattacaagactgattaaaaacaatatactatatgctcttacaacatacgcgacctatgattttgaggtttatattaacgaatttttctgtcacaatgcagaatacaagctggttcatcccaaaactgtgataaacaataccagttatttggagctcgcatttatagtaaacattctgccgaatatccttgataccttagtaggtagtgacggtagattgaactcaatgatactaaaatacccatatatgatgtcaaatctcctttatcttcttcggaaattccaacctgatacattgcaaattgtcatgcctgaacagttttatttttcaagttatacatgtcttttgaattgtattagtctgattggtaagtcaacttgccatcgttttaaaaacgttctaaggtcccaactattgcaggacttcaaaatttgcttgataagcctactctattccagtacatccaagcaaataatttgggaagaccaacaatacgagatgctttgtaaatcgctattacagcggaaagaaactttatttgagaatatatactgggcgtgcgataatgagactatcagtttattactaatattcttagccagtagattgcatgaaactggatacgaagaagtgaccttcaattgttttagagtgatagttcaagaaaaaaaaaaaaaactaaaggaattagcaaattactttgacatagaggacaagcatgacgttattgttgccttgactcattttatatcaagcgatagttgtgatctagtgaacttctcaatagaaaattaccctttttttttcagcgatgtacaaaaaaagagatttaagaattctgctaccagttttctatatagaaataccgatttttcagcattaagcataaaacagattaacagccaagttcatgaatggaaacatgcaagattcgaatacataactaaaaacaatcaaaagtgtctcgttctatttcggaaagacaatacgcctttagagtttaaaatcaaaaaatctatatcgaggtacatttccaacttcaaaaccgacagagaagaggactctgtattttatcaaaataatttagaccttttaatttttcatctgcgacatactctggagatacagtcaggctcaaggatttcttgtaaatggtcactggattttgtggaagattttgatggaatgaaaagaaggcttttacctgcctgggagccaaaaaatgaaccacttttcaatgaggaagatacgaaaagtgaaaccattacgagtaataacagacaaaggagggaaagtggaagcattttatcctatgaatttatcgaagatatggaaactcttgacttggaaccgttaggtgatttgaatgaaaacagaaaaattcttagacttttgaaagataacgattctatttccactatttggaattgtagtttaattatcgggttagaaatcaaagagggcgttttagtccacggtaataactacctttacttcgtaagcgattactattttggttcagaagataaaaaaatcctgaaattatcagaagtgtcccaagagttacgagacataaacgttagtctaatcaacggtacggaccctgaaaaagtatcaaactctctcaagcatgaagttttcgtttggaaacttctcgatctcacttttgttactaagaggccctttctacttcgtgatgttgcaatcgagctattatttgaagaaagagttagtgcatttttcagttttaataataaaaaggtgagggatgatgttctgcgggtgttgaataggattcccaaacaccttccagctgatccggttttttcgagtgttctacaagagataaacaatcggggtaatactatagtagcaaagaacggtataggtaaagcaagcattgcttctaaatttaccagtgttttctcaaccaacaacagcctaatagacggatttgaacttagtaaaaaatgggtcaggggagaaatctccaacttctattatttgatgtgtatcaatactctagcgggaagatcatttaacgatttaactcagtatcctgtgtttccttgggtcattgcagattacgaaagtgacgtgcttgatctagaaaacccgaaaacttaccgggatctatcaaaacctatgggcgcccaaagtatgaaaagaaagctgcagtttatggaacgctacgaagcgttggcttctttaaatgatgctggttctccgccatttcattatggcacacattattcatcagctatgatagtatcttcgtacttgataaggctaaaaccttttgttggctccttcctattgttacaaggcgggaactttggcctcgcagaccgtttgttcagctctcttgaaagagcttggtgctctgctgctgccgagaatacgactgatgtaagggaattaacgcctgagttcttttttttacctgaatttttaactaacatcaataaatataactttggtgtagatcaaagtggaaaaaaagttaacgatgtcattcttcctccatgggcaaatggtgacgcaaaggtttttattcagaaaaatagagaagctttggaaagcccgtatgtatcaaagcatttgcatgagtggattgatttgatatttggctttaagcaaaaaggtaagaatgctatggattctgttaatgtattcaacaggttaagctatcccggtgccgtaaacctagataatattaacgatgagaacgaacgtagagctattacaggcatcattcacaattttggccagacgcctttgcagatattccaggaacctcaccaaagaaagttggtctttgatattcgacagttaccgacagaagtatggcataaaatcccaagtaagccgatattcgaaaaattggttttgaattcaaatggaaagaacaggcccgtgagttatgttatacacgatttcaattactttgattctctttattggagaggattcgcttttccaaatttgtttctcaaaacagaggaaggagtagtgtcgttcaagattgttcataaaagttcgtttagaattggcgtagacttcttcgaaaaaacacacatggcacaaatcacttctttcacaaattggaaatctggtcagtttataactggagatgaaactggattaataaaagtttggaaataccataaaaacaagcatggcgccttaggacaccttgaaaagaaaaaagcaatgctagggcacttatatgaagtaaaggaaatatcttgctatttagattacaacatgcttttaactttagatgttagcggcttagtctatgtctgggatatgataaatttcgaactggtaagagaaatatctgctaatgcgaagcggatagcaatatctcaacacaccgggagtataatggttctaactgaaaagaatgtcatatccgttttcaatttgaatggtgaagagtatacttcaaaggcattcgaagcggttaaaattgcaagctctatcgaatttctagattttacaaaactagacaccggttacagacagcatatctattggaaagaaaatgaagtactgttagtcggtttcgaagacggaaaaatagaaatttatgagctccatttgaactctcgtaacgaatgggcgatgaaattgctcaaagagctttctacagggagaggaaaagcaataactagtattaaggcacaaggtaaaacatacctatcccagaaaacacacaaggacccaaaagagcaaagcgaaatagaagtgatttcaggcactggagatggtaggctgacaatctggtactaa

SEQ ID NO: 3602 - DNA, 519 bp, Saccharomyces pastorianus
atgcattcaatcatcaatgctgcttcgaaagtcttgaaactccaaggggatatgaagaagacaacactcattttggaagatatactcatactacaaccaattgaccatgaaattgaagcaaatttagaacacccgttacagcacgaattaatagaaataatacagggttattcactacaggacaaaagaagcattaatagtaaaaaaggtattactgaagatgaaatctgtgaactaagtaaccatgtctgccttgcactctcaagaaagtttgaattaaggaatgatagtaaaaacttcaacatagctcaacccaaacgatggatgcaattgctagaaacattaactgacacaaccggctttgccgtggttattcaaatcattattattttatccaacacttctctaataaataaacaaaacttgggaagcctgaaacaactaaggagccaaatttttgaaatattgttaaaaaaaaaaatacatggaaatgtaaactactacagaggactcttttag

SEQ ID NO: 3603 - DNA, 1824 bp, Saccharomyces pastorianus
atgtttgtactgatagataatgtcctggcctaccttcttgaacaagacgaccaatttgtaaccgtacgcttcgccattcagggccaaatagttacaagaagagtaaacaaaatacacctttccaacgttaccgatgtactcctaatacagttcttaagccacacacagaatcataacaacaatatcgtcccaaaaaaaatcctcgataatatgagaacggccgtacggcagttgctggaagcaactgcttgcgtctccagagaatgtctcctgataaaaagaaaccacgaaatacgaagagcaagaaagcgcctactcagtgactggtacaggctgggtgctgacgcaaaccaggatacccttttggtagtcgcaaactctgcttggaggtttctcgccgtttggcgaccgttcgtaacctcaatccaacacgcaaccaaagaattgtttaagcaaatcgcctattaccttcttcatagcaacgtcgacttccaaagggtcgcggcactaatccaggtcataatgggggaggaccatttgcttttctccatggatgaggccctaaaagaggtagtagaaatacaacaatacctcgataaaatgctcccgctcgacacccaccaatggcaaaagccatccccctttgagtctggaaacctgttactaaactttagggactggacaactgacaatggactgctccaagaattgctacactgctatctccaaaataaagacaaacaagagaaacactctgtccttcgcctaatccaactctggctacaatcctattggctagataccaaccataccttgaacgacattctcctcttttggtgcgaccatttggctgattcggaaatgtatgatatgttatttccggaggttgttcaattgtttgcaggtggggcaagaaccagacaattaaaggtgcaatacattggcctacctgaccatgaactggaaaccagcaaaccagttactgattacacaacattatttgaggaatacaaaacagatagaattgacgaaaattacgagctttctcacacaagcgatctcgaaacattgctcttgcaatggaaacaaggtgagaagccagaaggagaaacatttgatcttgatatacctccatggacactcgcaaagacattgaccctcttggagtcggccctgttcttggctgttgaaacaatagagtttccaaagtatttcaaacacagcaatacaacaatcgacttggtgtttaagttttcaaatcagctatcgtactatgtacttgagacgactatacaacagacacacacaatttcatattggttacatgtcgcgttatcttgcctttatctaaggaacctgaactctctcgcttctattatcaccacgctgcagaaccattcaattgaaagactatcttttccactagacgtcaagttagacagcctttttgagaccttaaagaccatagtacaccccaacaacaactacaatgtttacagaagcattatccaagatattgcacacaatgggctgccgtgcgtgccgtttacttccctgttcataagagatataacattcatccgggatggaaacgaaacattcgccaaagatgaaactggtatcaacatgaataaattccatcaaataacgaagattatagccttcgcccaacatttgcaacaaatgcaatataaaactttgacttgtgcggatcttaatgcaaaaaaccttttggtagctatgactgacgtaaatagcttgtacaacgacaataaagatagagcctaccaagtcagtattgctaaagttcccagacttgtgtaa

SEQ ID NO: 3604 - DNA, 2616 bp, Saccharomyces pastorianus
atggtgaatgataaatcggcgagacgacctagaccttcttttgtctgcattccttgtaaatcaaggaagctaaaatgcgacagactacgccctgtttgcagaaagacatcgaaacaatgtgcatatgaaaacgagccaaatctttcaaaaactccttgtttcacggtggagttgtctgatgaaggcaggaactgtccctcacagaccatccgagaccccacgcaagatatttacactccaacaagtattgcacgctctaatgacgtatctgagacaccaatttccaatagcatatcatgttctttcgtagaaaaaacatcaaaagacatggaactgaaactctggcatccaaaggatatgcttgtcaattctggcggtgtaacttttttcgacgccccctttgcatcacataccttgattgagctagatccatttttgagggctcttacggtctcaattcacggcacaacactagtggatttgcagaataatttacttctgtgctctaacgaggaagttagcttttccaattatttagacaaaataaatggggagaagggagaggctcctcaacaaattcttagcccgttaacttttattgataaagcaattgttaaatgggttgataatgccactgaaaacgggaaaaatacgttttctttcaatttcttccattctgcagttctcatattctgcaattccaatatcaaagtactgcactctttgcaacctgtgatcacagaagcttcatctcttcttccagacaaaaaaatagttgacttactactaaaggtattctacgagaacgtgtacccattctatccatatttagacattcggacttttgaggaggagctccagaagattttaatttcttcctatgatggccgttatgaaatttcggtcacgaaagacagtctatcaaatttgtacgtattgtccctttttctcctgatcatggccaatgccttaagaagtatttattgtgatagagaaaattatccacagataaagttgaatgttctggaagccgcgaagcaatattgtgacacagctcaaaagctactccaccttttaaatggttataagaacacgaatgagaaaagtttttgctgtctgctctatttttatattctagtatatttaaatccgacagcttctgaaactttaaactcatacaccaatttgctgaacattaagtgtttatcggaattagcgcttacgttgggactacaccaagaaccatctaagatttccagatatatcaaggaaatagaccccgatccagatctcttaaacttcaggagaaagctttgggttggactacaatctttaaaattcatgatatctattccagaaggcgtttctaataagctagaaaatgagtacctatcaaattttttagggaccgatgaagatatggtaaagatattcgagaaaaactttcacgaattacctggctacgatgtttcactgttaaacgatattgaggacaaatacgagttccataagattctgaactgtttaatatcgagcgctaccccgattaacgggaacccaaatttgctaccaattacagaaaatttaaagagaacaagagaatatatagatctgaacttttcatcaaagcagctcagcaacactggagtttatggcctattaaacgtaaaacaggtcttttgcagagaagcagtgattgaagtcgaaagtataagaaagacagcgattttcatgaatagaattgttggattactttgtattttgaacataaataacgttttagcagtgcattttgaaaaagaggcgaaaatagattggactaaaaatcaagactactatcacctcttttttctcgattgccttacaacgtatactgaattgttcagggacatcgtatcatatttgaaaggagattataagtggtgtattcccaagaagtattcctattccattaacaaacttatttgtttttccttgatgcgattatgggtttttcaaactagtttatgcttaagattttcctacaagcaacttttaagagaaaagggttctcaatccgttgagatttctaatgaatttaacgacatgtatggtaacaattttgacctggccttacaaaagtctttgaagtatatgaggtaccatttgaaattaactttagatttggcctctaaggagttgatggagtcggattctgaatgttttgtatctctgtcaatgtttaaatacatcgcatatctattggacacaggaaatctagcgacatcaataaacgtattctgggaaagaagctttaataccaacgaggtttcaaaaacaattttaaaacaggttaatatgaaatggggaatcaatatgacaagcccccaatatgtaaaacgccatttgatgaactctcaagcgttaagcagcctaacttacccattcttaaaaaatatcaacatcatacttgagagctccgtagatccagacaacactgaagatatcgacgctccttcggaagctttctctatagatactggcgaacagctttcaatgcgtcaaaccatgaaggaaaattatgatttatttgcagacctcatcaacagtaacttgggcgaaattccgacgttgtag

SEQ ID NO: 3605 - DNA, 1902 bp, Saccharomyces pastorianus
atggaaggctggatgaccgatctttggggcaggacggtatcggggagacggaattcaaatcgagtggagaaaaatgggctcacagaaacctcccagagtgcttcgacttcaccacttaagtttcctcgaagaaaccgtttacaaacagtcggaataggaggcaacgctttatctcctactggaaagcctagtactttagggaatgccagtcccaataaatttattgttcatgaggaacagggttatgtagatatggacagtccttcttctactcccacgaaaactctcacaatgcctcgtgtactggaaactgcaagaaactctgtcgaacttgttgtgaaagatatgagcttggagccaaaatttgagttcgctcacttagaaaacgcattttgtctatctgaaactacaactggtgaagatgaagacattataaagctgaaagaggttaaagaaaattcaagtccttgctctaatgtcgaaaaagttttcaaagattatgatctccctaacatgctaaaagaaactcaactaaaaaatgaggagatcgaaattttgcgccagaaacttgatgaaaaggaaaattttattcaagaattaaagaaaaaagctaccttggatgacactagatttgaaaaaatcaattctttacaaaaagcagtacgtgaagagaacagcgctgcttcaaaaagacttagaattacacaacatagtttacaaacaaaaattgaatcactggaacatcaattacaaacatttaaagatgataataaacagttaaaggacgatagttcgttttacgagaaaaggttgagtgacgtttatagctacatgcaaaacctttctctttttgggaaagaccttggtaaatttatattagaagagataaaaaccagtcaagctccttcgactttccaaagccattttaccaaattttatccagatatcaaagatgtcaaagatcctgaaattgtggaacagtgcgagcagttgaagcaaagaatatacacgttggagaaaaatgatcgtatacgccttgaaaaaataatttctcttttcaaattgactagcgaaagattgcatttcatgcagcaacaacacggtcagaaaatagagtgtctccagaaggaggtgtctacaaaagaacagcaattccgattagagaagaggagatggcatgatgtttttaacattaaggaggaaaacttccaaaaactgaagaacgaattaaaagaaaaattgatacttagtgaaaaagttcaaagaaatgctgaagataaactaaatgagtatatgaaagaacatgaaggaattatcggtaggctccagagtcaatcttcagttattgagaacttgaacactcagatggaagaactagataacacgaataagaaaatgtctgaggagttgatgggaaaacaagacgaagcctttaaatttgaagaaacaattgaatttctcaaagaggaagtacttcaagaaaagctaagcttgaaagagttatatggtgatgcttccaccgaacttaattttgaaactgtgggtaaatcgtttccacatattacgaaggataaatatgattctttgggtcttgatattctgatggaccttacttatgtgcaatcccaaaatctaattaaaaatttgttaatcgtattagatatcccactgaaaacatttttaaaagtcgttccaacaattgttattcaacttagatgtgagcttgcgcttcttacgagatttgctaatgatttaaatttgaaggtttttggtaagcaaatagatttcaagagcagaagaaaaattgcaatgaatgagtttctgaacaatcacgatattgccgaagtaaagcatcccctcaattatgatttgcaagcgctgttaaaatatttcttcacttaa

SEQ ID NO: 3606 - DNA, 2418 bp, Saccharomyces pastorianus
atggggaaaggaaaaggtctacataaagagaggcgcattttaaaaagatacttcgaagaatacccgtcaactagtcgtatcggatccaatttagtatattcaaattacacagttacgtttctgagatacaggccccatccttcagtcgaatttcacaagagtcatccgcacgtccccttaatgagcaaactattgttttgcaaatcaaaggtgtttctacatccaactagtgatgccagagataacatagctggttttctactactttccgtagaacccaaccaacaatctcatcaaacagtcctgcaatatattccggaatccagcttttcctcatccgagatagcaaaactgctcacgtatgagtctaagttgggagtgtgtccaagttctacaccattcgtcattgagaactcaataagttttagtaatctgatcaatacctcttcaggccaagccttccagatttctctttcacagatatactgcatccaatttaggcctccgagccctaatgggtggtatgttgggtctctggttatatatcctctggtagaacaattcacaggatttcaaccccctgttctattttttcatgatcaaatctgcccatcaacaaaggacaagttaataaagctacgtgtatctatgaatcccttcgatgactcaaatgagttatattggggtggcgtggatctaagaaacaaaatcaatgagttaacggagctgaagaaatctaatctagaaacagaattttggttagtaaatcctactttgaatgatttaaggaattttgtctctaaggatctattggaaagttataacaatcagaacaaaaataaagctgatcctagcacagctggtgtaaaactaaacgagaaattgcaagagtggaagtggaacgtaatgagcaaaatagcagacgttactaccaagtcaagcaactttattgacagctggttaaccaataactctacaattcaaaaatcacaaatcgacaacgaatacttgcaaaagcttctgaataacgagaaggttaaacagattgagcaagactatgattctgcgagagtatatttagcaaactggtcactgggagtaaaacaagaagctgaaagataccaaaagcagaataaactatttgattcgtatagaaacaacatcttcaacgatttgaatttgactgatgaattaaatgacatagaaataaataacgccctacaaagacaatttcccctaaccgaggcgaaatggaattcgctttgggatgagaacgatgggaggctgagagtcacagtaaacgaagttaaagatttcatattccatggtgggctagaaaataatgatttgagaggaaaagtttgggggttccttttggagatatacccttgggactcttctcaagatgagagattacaaatcgatcagagtttagctgcggaatatgatcaactaaaactaacctggtcaaaggatttcttacagtttgacgacgaagatgaagaagaatattggaaggatcagatatttaggatatctaaagatgtaagacgttgcgatagaaacttgagtatattccaatacaacactgttgacggactgccaccgttgtctcaagagtcgcctgaaaatgaaaacaacaaagacagtgtggaattagccggcgaggagagcgatgaagctgatgacgagattaaaaacccgcatttgattcatctagaaaacatccttactacttataacgcatacaatacgaatctaggctatgtacagggcatgacagaccttttgtcaccaatttacgttatcatgaaggatgaatggaaaacgttttggtgtttcacccatttcatggatgttatggagagaaactttttgagagaccaaagtggtattcatgaacaaatgttgacccttgtggaattagctcaactgatgttgcctgaattgagcgaacaccttaacaagtgcgattcaggaaacttgtttttctgctttagaatgctgttagtatggtttaagagagaattcgacatgcaagacatcatgcatatttgggagaatttttggacctttttctatagttcacaattccaattattttttatgttggcgatcttgcagaaaaattcacaagctatcttacaacatttaaaccagttcgaccaaatattgaaattcttcaacgaacttgacgggaagttagattggaacgatctgatggttagagctgagctattgtttaagaaatttgaaaaaatgatgcaagttatggaaagagatctgcaaagttcaacatcctcttcgtcgtccacttccggtgtattgccctgtcaaagtgaaagattgaacctgcttctgtccaaaaaacccatcatcaaacgtgaagggaaaagaagcaaggactccattaaataa

SEQ ID NO: 3607 - DNA, 1419 bp, Saccharomyces pastorianus
atgaggtacaaaagaaagttaaacactgcccacgctatgtaccaaggcccaccgcaactgccttctcagggtgtatccatgccattcattgttaacaacaacaatccctatccaaacggcaatatgaactttcctcgcactgcgcagcagagtataccgcccacggtgtaccctccgcaagtaccatttccaggccagtcacaggggagtcagtttccgcaagcttcgccagaccaacaagtgttcaatcagccaccacaagtggcccagcctttccacaactctgcgccaaatactaatctcgctggggctgcgaataatgggaccattccagtgtatacaccgctgacatccttccctcatcccatggcagctgccgcagcagcagctgctgctactgcaccatctccacagcctatatctccggcatctctaccgatgttacgagtgccataccacataagaaaatatttgtccaacctggcgattttgaaattgtatgaagtaataaatgaaatcaacatggcaatgaacaagataagcttgctttcgttttggacggacctggtatcgagagttttcactcctgatgcagtgatcaggtatagtaagaagtccatgactgattatcgggaatttgagtttgttatccctgtgttcgtcataatttgctctacactaggcagatttggcattgtgaaaatggaaatcaaagttctgcaacttaagacacaagttctaagtaattctactattttcttcaattgtccccgcgctacacttatttattattatcctgatggttcctatatcacgcatttcgcacagttaaagggtgcgtttgaccttgacttgaaaatcaattggctggacgtatctatgcatagtttcttccctgatattgaatggaactcggtggagaggcttttgagtgatgaatacaagtcatcagagattgagaaaatattctccaaattgaaacaagaggatgtcaaggaacaagaaaactcattcgcagaaagtaatggaacaaacgtgccccaaaacttcgaagcgataacacagctaagatcttactttgatgtgttcagaaacgtctccgtattcggcactcaagaggggctaatgagaattatgcagataagtacagtcatgtctactttgaaaaatcttcgaaagttccaaatcgaaaagaacatcgatagtcctgtgactgccctgagtgcgtatattgattccgacaagaagggcaccgtgggcgagcccattcactcaaagaggcgacgcaacagtggaatctcccctcacaccactactctgggaccgagtgctaattccaatacgaacaatgacgagcctcttaccagtgatgttaacgataccaacaacgacatgacgaaaaagaagatgaagttctga

SEQ ID NO: 3608 - DNA, 1248 bp, Saccharomyces pastorianus
atgatctttttgtgtttgccagcctggttacctgaatcctaccactggtatcaggaacatcactgctggtgggctcctattacattttatgtattagctcatagaaggtattctggtaactggacgttagtggtacgaagattaatttgtggtataataggtatcttttgggggtgggctgcaaatcaatcgagacatttcggtagcccatatgtgatctgtacatttgccggactaattgtggtcccattcagtatcaactttctagtttataaaaataccaagtcaagtttcaccgcgttaatgtgctttactgtaatcgctttagaaccatacagcaaacccgatagacaccataacttatcgacggctggtatatggaaatgcacttgggttacagggttggctcttatcattgggattttgatgtcggtccccatcaattggatagtatggcctttcagggccagaacagaactaagagatagtatatcatctttattggcacacttaagccaatcgtaccaaacggtggcggaccgttatttgtacagagatgcagatgatgcacccactgatttaacttttgcgttctcccatattcgtgaagtcaggctgactcaaagtcttgaagcgatcagagaacttttgaaaaaggcgcgtcatgaaccaattcttatttcaaatttcagtcctgagaaatatataagtctaattgattcatgccaatttttgttgtccaagattattgaatctagaatctcaggtgcatttttcgaaatatgggaccaggatttcgatatcgaaaccacaagagcgttgttatcgttacggagggacagtgtctcatctgtgatttttgttttttacatcttatccaattgtttcaggtcaaagaacaagattccgcgctatttaccaaacccaattatgtcacgtaagacgctatatcacttcatcaagaagttcagtgaaatgcaggaccaatcacactcgaatataaattcgggatccaattctatggaaaaaaatttattcaaaaagatataccagcaaaagattccaaacccagggcagcaacaactacctctgccttcggttgctaacagcaccgaaatagatagtgaaaagatgcattggaccgaagttcacggcattgcattctcgagagcgtttacggatatatctgaggaattgtaccaggcagcgagctgcgcaaaagatatattgggcgaagaagacttttag

SEQ ID NO: 3609 - DNA, 123 bp, Saccharomyces pastorianus
atgaatgcaatcttaacgagaagacatggccttggtgacaactctcttcaaaccaacttcagcctttctcaattcatcagtagaagcgtcttcgatttgcaaagcggccatagcgtcagataa

SEQ ID NO: 3610 - DNA, 297 bp, Saccharomyces pastorianus
atgaagccacttctcaaggaagaaagttctgtgggctcggtaggctctggtaaatcaaagcagcatcatcatcacagtatgaagaactcttccaaatcacctgattacgattattcttcaaccaactcctcagaacaagctccaagacaccatactcatggcactgatgaaggtgaagaacaagaatatgaaggcgaagaacaagaaggtgaggaacgcactggcaagcaaaatttcatgggcagagtgagaaagagtatttctggtggtacttttggattcagaagtgaaatttaa

SEQ ID NO: 3611 - DNA, 2931 bp, Saccharomyces pastorianus
atgaacatgaacgagcctttgtccaaagatggccaaggcgaagaagaacaaaacaaccacactttcgatggtaagccaggctcctacgactctaactctaacgctgctcaacgcaaaaaatcgttcagcaccactataccaacagaatacaacttgcccaagaaacaaccggaatcaactgccaacaacctagaaactaaggcaaaaaatattcttttgccctggagaaagaagcataacaaggactcggaaagctcgagcgccaacaccggtactaatgatcattccgacgctaatatgggccacaactcaaacgttggctctggtctagatccaaccattgcccccagtactcagcctcaaaccatgtctatttcaagccctaacatcaaaacaactcctcctactacttacggaagcactaatgcaagctccagccctaacgtaaagaccacacctacccacgaacacgcacactcacattcaaagacttcaacctctccaactgtcactcgggcgcacgccaacgtcaacactggacctacagctactgctgccacccacgagcactccctcaccaagaccacaccacccattcatgggcacgccaacatcaaaaccggacctacagccactaccgccactcacaccacacatgagcactcccacgcaaagacttccccacccactcatgtacatgctcacgacagtactacccctaaccctgctaccactaccacacacgggtacgctcatgtcaagactacgtatcctgccaccactggccctaatgcttctgctgctactactacgcacgggcacgcctacgtcaagactacatatcctgtcgcccaaggtcataccaatcctacagtcagtccctccaccaaccaaaaccactctaatgtcaaagctagtccttccgccaatatgaaacattctaatgtcaatcctatcattaagccagattcaaacgttaccagtaatgttgactcgggcttgaaccgtgacactattcctggcggttttccaaccacatcttcgaacacaaatgccaaagctagctctggtgtaaagtccgttaaccctaatgacccaagcatctatacaggtacaacctcatccacggatgctaatgactctaagaagtctgatagtactactactggaactccacacgataccataaaagaaattgcagaaaaggtcaaaatgaacgagagcgaacaaactggtttgaagaatgaccaaatttcgggttctgacccaattccaaggcacaccatggaccccaggaataacaagaagggaattactggtatggcaatgggaagtggtccatccagccaacagccttcatacaatgataatatgatgaacgttcaattccctgaaaagaccaaagtcgaaaagcaaaatatctctgaaaacgctgccgaaaagttcaagaatgaaagagacgatattttgaataaaggtgatgatcacgaaccgcatattatcaagtccaaatcggactctaactggggtccgattgactacaaaactgataatggtaagaacaagaatctacaggacgttgttgtaccctctggcatgaaagacaactctcgtggtgatacgtctgaaaaaccaaataccaagtgggggggacctatggagcctactaggagcgacaacccgcatgatgttgttggttctcaaaacgtcggcggaaacatccctaaaagcaccactcagaacgtcgtgttgccaccagccatgaaggatgaagatttgaacaagtgtaaatttaactcaagaaaacccgatgaatacggattggattatttggacgatgttgaagatgacgacgatcatggtattaacgattacacaaatgcaaaggacgaagaccactataacatgtctgcgcaacgcgaagaaaagccgaattatagtcgttacgaagctgcaaggaaaatcccgggtgccttcaaagttgatgcattatctagctcaattcaaagacaagaagatgatgatgcgttatccccaaagcagaaaacttactactctagcaatgtaacaaaggtagactcaagtcaaggaaaatacgaattctccaacatgtctggcaatagcaagcctactgacttaagtaaaaacacttcaggtccaacaccaacccgtgtcaacctcgttgatcaaattaaaccaagaggagctgaaaacatgtcatctaacggcaagggttctgacactactgcatcaggcaagaccgaaaataccggtatcggttctggtgttgccgcatttgataacagtagaaccgcagacactacatatgctaaatcaggagacgcggttactgctgcttacgacaacattagaaacactggtagcagacgtgtagaatcagaaaacgctgatactacagcatttgttaataccgggaaagcagacatttcacatgccaaatcaagagatgctgatactgcttatgctcaggaaaaaccattgcaacagcagactgcttatgggtccggtagtgacgccacaagtcacgaatcttctagtgatgatgatattgacgtgaacaagaatcggaaggtcttgaagaatgatgcatctgactacaagcgtgaagtagatttgaaaaatcagcgcagaaccaacattggcggcaccgaggccgcaaatgcgtatgctgctgaagttggtaatttcccaagtttgatcgatcctcaagtcccaacttatggattcaaagatgataatactccggatccacaaaaaaaggcatcattatcctccccgaccgaatcttccggcccagaagctgccaattactcgattcacaatgaagccacttctcaacataaggaggcatcattatcctccccgacgaatcttccggcccagaagctgccaattactcgatcacaatga

SEQ ID NO: 3612 - DNA, 369 bp, Saccharomyces pastorianus
atgctcttagtaggtatttccactgaagattctatagccgaggtggaaaaattatccaagaaggttctcaatttgagaatctttgaggatgactccaagaatttgtggaagaaaaacattaaagaggttaacggtgaaattctatctgtgtcccaattcacattgatggcaaggaccaagaagggaaccaaacctgacttccacctagctcaaaagggtcacattgctaaagagctttacgaagagtttttgaaattactaagaaacgatttaggggaagagaaagttaaagatggtgagttcggggccatgatgagctgttcgttaaccaatgagggcccggttacgataatacttgatactgattag

SEQ ID NO: 3613 - DNA, 1320 bp, Saccharomyces pastorianus
atgtccctttcaactataactgtaaaagctttgcgacaactgcttaaagagaaatatacagtagaggatgacctcaatggatccttagctataccaaatatgcgattccagccatcacgtgaaggagaatatcaaccactaagtcaatcatcgcttctcaacactaaactgaagcaaaaaagtaacgagaacacccaaaattacaaccgcatactcatatcgaaactatcatgtgagaaaatttccaatttttcagttcgtgggggaaatattgaaattatgggtattctaatgggtttcactttgggagatcacattgtcataatggactgttttaatctacctgtagtaggaacagaaacacgtgtaaacgcacaattagagtcgtatgaatatatggttcaatatattgatgagatgtataataataatgtcgatagtgacgcacaagactgtaaagaagttcaactcaacgttgttggttggttccattcacaccctggttatgattgttggctcagtaatattgacattcaaactcaggatttaaaccaaagattccaagatccatatgtggcaattgtggtagacccattaaagagcttaaaagacggaaccttaaaaatgggcgcatttagaacagtggaaaatcaaaacggcgacgttaatgcactatcctattatgaactagaaacgattgtcttcgattcagaattgaatcgaacgctattcgaaacaaaattaaaattacattgtgtggtagaggatgatgaatcagaacaaatgtctttaaacagattaattgaaatgatgaaacaatgtaattatttagtggattcaaaaaacgtcagaacaagaatgaaattaactactaatgacaacgttcacgacgaaaacaaaaaaactgttgatgaccaaaatcatttaacaaagtcacagttctactgtaatactcaaaagggggacagtaccggtacgaactcttttgtcagtatgctttcaggagacaataatagtgacgtagatatggaagatcgaaactttaccgaatttgatagcacagatacaagtctgtacacgagtatggaaccaagccttcatgcaaaccgtacagaaacaaataacaggtctaacgaaaacttccacaatttgagaaaccatttcaatatttctcaagacagacataaggaggaatgtaacgatcttttacaaagaaacgtgctagagacagattatacaagagcgaagaaccgcatacttgcttcaaagataaaacaatacgaacgattgcgattttataaggatacgttcacactttaa

SEQ ID NO: 3614 - DNA, 1635 bp, Saccharomyces pastorianus
atgtcaaaattcgaataccccgaaactccttttggtattttctttgttgttgggaatactttcaaaggtttccacattagatttagagatatcgcaagaggtggtattcgtatagtctgttcaagaaaccaagatatctacgatttgaattccaaaaacgtaattgatgagaactatcaattggcttctacccaacaacgtaaaaacaaagatattccagaaggcggttctaagggtgttatattgttgaacccaggtctagtagagcatgatcaaacctttgttgccttttctcaatacgtggatgcaatgattgatatactgatcaatgatcctttgaaggaaaactatgtgaatcttttaccaaaggaggaatttttatttttcggtcccgatgaaggaaccgcaggttttgtggattgggctactaatcatgctcgtgtcagaaactgtccatggtggaagtcgttcttaactggtaaatccccatccttgggtggtattccccatgacgaatacggtatgacttcattgggtgtacgcgcatacgtaaacaagatatacgaaactctgaacctaaccaattcaaccgtctacaaatttcagacaggtggtccagatggtgacttgggttccaatgagattctcttatcttcatcgaatgagtgctatttggggattttggatggttcaggtgttctttgtgatcctaaaggcttggataaagatgaactactacgtttggctcatgaaaggaaaatgatttctgagtttgacatttccaggttgtccaataatgggtttttcgttcctgtagatgccatggatattatgcttccaaatggtacaattgtagctaatggtacaactttcagaaacacttttcatacccaaattttcaagtttgtggatcatatagatgtttttgttccatgcggtggtagaccaaactcaattactctaaacaatttgcattatttcgttgatgaaaagacaggaaaatgtaagattccgtatattgtagaaggtgccaatttgtttattacccaacctgctaaaaacgccttggaggagcatggctgtgtcttgttcaaggatgcttctgctaataaaggtggtgtcacttcttcatctatggaagtattggcttcgttagctcttaacgataacgattttgtccataaatttattggcgatactactggtgaaagatctgcgctgtacaaggcctatgtcgtggaagtgcaatcgagaattcaaagaaacgccgagttggaattcggccaactatggaacctaaaccaattgaacggaactcatatttcggaaatttcaaatcaactgtcattcaccatcaacaaattgaacgatgatctagttgcttctgaagagttatggttaaatgacttaaagttaaggaactatttgttgttgaataaaatcattccaaagattttaatcgatgttgctggatctgattctgtattggaaaatattcccgaaagctatttaaaggttttgttgtcaagttacttatcaagcaccttcgtttaccaaaacggccttgatgttaatattggaaagtttttagaattcattggaggcttaaaaagagaagctgaagcgaatgcttga

SEQ ID NO: 3615 - DNA, 1557 bp, Saccharomyces pastorianus
atgctgtttgatcataaaaatcgcagtgctttaacatcattgaacacccctgatattgcctctttgtcgatatcttcgatgtcagactatcacgtgttcgatttccccgggaaggacttacagagggaggaagtcatagatttgctagaccagcaaggttttattccggatgatttaatcgagcaggaagtggactggttttataactcattgggtattgacgatctgtttttctccagagagtctccccaattaatctccaatattatccactcactttatgcgtccaagctagatttttttgcgaaatcaaagttcaacggcattcagccaagactgttcagtatcaaaaacaaaatcatcactaatgataaccatgctatctttatggaatctaatactggcgtcagtataagtgagtctcaacagaaaaactttaaatttgctaacaattccgtcggaaacgacacattggagcatgctaaggatactattgaaaacaataagactcaaatgagtgattcttgcccaccttatgaattggattctgaaattgatgatcttttcttagataataaatcccaaaaaaactgcagacgggtatccttttgggctccagaaagcgaattaaagctaacttttgtttatgaaagtgttttccccagtgatgatgctgctgccgtagatatttcttctcaagatttgttaaaaggccacattgagtctattagtgataagaccatgtttaaagtctcttctagtgaaaacaaaatactgtacggtcttttaatcaagctagttaaggaaagagagggccctgttatcaagactactcgctctgtggaaaataaagaagaaattagattattggttgcctacaaaagattcactaccaagcgctattactcggctttgaactctctgtttcactattacaaattgaaaccttctaaattttatttggaatcattcaatgttgaaaaagacgacattatcatcttttccgtatacttgaacgaaaatcaacagttcgaagatgttttagttcatgatgtggaagcagcattgagacaaattgaaagagaagcttctttgttgtacgctattccaaataactcatttcacaaagtttatcagaaacgtcaattttcacccaaagaggcaatttatgctcatattggtgctatctttattaaccactttgttaaccgcttaggttcagactatcaaaacctactgtctcaaattaccatcaagcgtaatgatactacccttctagaaattgtggaaaatctgaaaagaaagttaaggaatgaaacgttgacccaacaaactattattaacatcatgtcgaagcattacactataatctccaagctatacaaaaactttgctcagactcattattatcacgataataacaaagatatggaaaaaacgctatctttccaacgtttagaaagggttgaaccttttaagaatgaccaagaatttgaagcgtacttaaacaagttcattccaaatgattctccggatttgttaattttaaaaacctga

SEQ ID NO: 3616 - DNA, 612 bp, Saccharomyces pastorianus
atgtcattaattgccttctgtcaatttttaatgggagcatccatcacaacagcagtttccagacaagtttgggcattttcccgtgataatggtttgccgctatcaaagtacatcaaaaaagtggaccctaaatactccgttccattttatgctattttggctgcatgtgtatgttcattggttttggggctgctttgtttgattgatcaggctgctacaaatgcactgtttagtttagccgtggcaggtaataatttggcatggagcacccccaccgtcttgcgtttgacatcaggtaaagatttgttcagacctggtccattctatctaggtaagctttggtctcccatagttggttggataggtgtggctttccaagtgtttattattgttatggttatgttccccgctcaacaaaagggcattacaaagtccacgatgaattacacatgtgttattggtccaggtatttggattcttgcaggtatctattacaaggtttacaagaagaaatactatcatggcccagcaacgaatttatctgatgaagattacgttgatgccgttggtgttgatgttatcgacacaatcatttccaaacaagagccataa

SEQ ID NO: 3617 - DNA, 1083 bp, Saccharomyces pastorianus
atgacaccaataaggtcggtagaccagttgataggaagcggaatggattcttggaaggataaattcgcaaaggtgcaagttagagagtcagaactgccctcttctataccggcgcagaccggtttgacttttaatatatggtacagtaaatggtcccaagggttgggtgggaatacacgattcgtcagtccctttgctttgcagccgcaacctcattccgggaagactaggggtgacaatgacggcgagttgtttttctgtctctttttcgcaaagggtatgtgctgtcttggctccaaatgtcgctatctgcatcatatcccggacgaagatgatgtgagcaagctatctctaagaacagaagtgctggattgctttggtagagaaaaatttgccgattatagagatgatatgggtggggttggttcgttcaggaagaaaaataagacactctacgttggtggtattgatggcgcattgaatagtaagcaattaaagcctactcagattgaaagcagggtacggtttgtattttcccggttgggtgacatcgataggatacgatacgttgaggacaaaagttgcgcatttgtgaaatttaaacatcaagccagtgccgaatttgccaaagaggcaatgagtaaccagacgttgctactacacagtgataaggaatgggacgacagaaaggaaggaacagggctgctggtgaaatgggctaatgaggatcctgaccctgccgcgaaaaagaggcttttggaagaacagaaactagagtccctgaatatgatggtacgtctacttaacaaaagcaataacaatagtaccgataccacgcccagcaaagaagcgaagaaaagtccagttaagaagatatcgattggtttacctccaggagtaagcgttagtaactctaagaaaagatcactacccatagacaatggaatggggggtgatgactttatagaaagtttgaagaaattaaaaaagggtgctaccaatgtagatgattttccaacaaagtcatctgctagcttgtcaaatggccccttgatagactacctttcctccgatgaagattag

SEQ ID NO: 3618 - DNA, 471 bp, Saccharomyces pastorianus
atgggtaaggacagtaaggaacacaaggaaagcaaagaaagcaagacagtggacaactatgaggctagaatgcccgccatattgtcgtttgccaagccattggcttccaagaaactaaacaagaaagtgttgaagaccgtcaagaaggcctctaaagctaagaacgtcaagagaggtgtcaaggaagtcgtcaaggccctaagaaagggtgagaagggtttggttgtcattgccggtgacatttccccagccgacgttatctcccacatcccagtcttgtgtgaggaccattctgttccatatatcttcataccatccaagcaagatttgggtgctgctggtgccacaaagagacctacctctgttgtcttcattgtcccaggtagcaataagaagaaagatggaaagaacaaggaagaagaatacaaggaatctttcaacgaagtcgtcaaggaagttcaagctttgtga

SEQ ID NO: 3619 - DNA, 567 bp, Saccharomyces pastorianus
atgagtgaacaactttgctatacctatatagagaccgaggtcactggtgcacttttggtgttcaaagaacgaacgcaaagtctagtttttgcttcattaggcaaagatgaatcttttcttataacaaatttgaaagatttcttgaagaaaaatgagaagcaggatgtaaagcacgagttatatgagttgaaagacataggaaaatatggagagttgattgaaaactataaaatatgcctaggaaataagatgccgttaccgccagatgctattccctttgagttcctatttggaacgaaattccaacgtaaggtttggaacgaactattgaaagtggaacatggccatgttgctacatatggtgatattgccaaaaaaatagggaaaccatcggctgcgagatctattggaagagcatgtggcgcaaacaatttggcacttgtggtgccatgccatagaatcattggtagtaataagaagctaactggatataaatggagccttaatttgaaagaacaattgctaaataatgaaaggacatgtaaggtgaaacttaacgaggtatga

SEQ ID NO: 3620 - DNA, 1005 bp, Saccharomyces pastorianus
atgtacaagaaacagtatccatactcatatatcttcaaagattgttctccaaataataaaattctactaggtttccaattgtttacacgattaaatggtgttgacgccttcttatactactcaccgctaatactacaacaagttggtaggggagaaagaaaatctatctatttaaccggattaaatgccttggtatacactgtggcgactttagcatatttccccatggtacttcgaagacggaaggaaaagatgaacgtactattaggttctgtcattatgagtgttttattgttcaccttgtctttcacagattggtttcccaagactacaacgagatatatatcaatattattcgcagtatttcttcttacacactttatcagttgggattctactgggtggattatgaccattgagcttttaccccacttatcacaggccccagtaatactgctaatctctaacttttattggttctttaaatggtttgccagcctaataacacctatacttattgaccgtctttcttggaagttttaccttattccatctttatcttctttcatatccataatcttcgtgttacagaattttcctatcgagactcatgatgagaggctggaatctgctgatgattctgctggcaatgatagtgccaaccatgacgatgtttttggcgatagtggttctgaactttcatcctcgccttctttttctgcgtaccagataaatactttaggaagtagcattaaacaaaacaaccaagcatactcatcgactgaggccaacccagctatatccaaggataacggcataccgagtcagccggacggatctgcacaaaacgtttatttcattacatccgattctggaccatcaaggacgggtgaatttttcagtttccataataaaactgatccaacgattggaaatgttagcaatgctaatgaagagctctcaaacggggaacggaatccacctagcaacacggtggcagcttag

SEQ ID NO: 3621 - DNA, 1182 bp, Saccharomyces pastorianus
atgaaacatcccttaagcatgtcacgctcaaataaaccggttggtcaagaagctgctagttcggcacatatcgatagagcacaccagttggcacaagattttaacagcaaacaagatgatacggcactaacttcattgccacacaagaaccctgacatatttaggtttgagaataacatcacggcccatagctcacgtcgtggttcactttatagggatagtgatgccactgtcattttgccactctctgagcgctcccctagattgtcgatggacgatccataccgccaattattacaacaggctgaaatctcacagctacgaagcaagaaaacaagacattcgagtcggactcttcgagtctcctttatattatttgtggtgttggtttcgtcgttgtcagggctggaccagggtctcatttccggcaacgttatgacactatcgtttcaaaaattcttccattacccattaacctcttcattaggtatcattgtaagcgtcgttaacttcggagcctttatggcgtctttgtttgtttattctggtgtcttggaggtttatagcaggaagaaaatgctccaaataagcacaatgatatactctttgggcgcttttatccaagtttttgctctgaatcaatggtacctactatttggtagatttatacttggtgtgggtatggggtttgcattttccatgataatagtttatcaattcgagttccccctcccatatataagaaaaagaacgcttatttccattcagtgtgtttccaatgttgttgcgtattcattagggatttggattaactgtgcttttagatactggggttttgcatggaaataccccttatcgacacatgtgttcctgggggtagcgctaaacttgatgtcgttatacctagttttagaatcacccacttggctattaaagcaaaaaaaagatgtggaagcattagttttgatatcaaatatattcgatgattgcgactttgaagaaaatcaaagtcagttaaagttcagaactttgaaaagagacatgcttctaaaatcacatctacaaaaaaacagttatccatactcatatatcttcaaagatttttctccaataataaaaattctactaggtttccaattgtttaccgataaatggtgtgacgcctcttatcaatcacgctaa

SEQ ID NO: 3622 - DNA, 1119 bp, Saccharomyces pastorianus
atgaaaaaaacaagaacgatcacagtttttttgatcatgctcgagagagaaaaaaactgtgagtcactgtgcatttctgtcacatttcttaataatgtgacgatacaaatatatacacgtatatatataaatcatatctctaatcttggcgattggcatttggtctaccgaaactcatcacaccaaactaacctcaagtatccaaaaaaaggaaaaatggctcaaacagacaagaaacaatcaggattggctcgtcttttggggtctgcctctgcgggcatcatggaaattgctgttttccaccctgtggacaccatctccaagaggctgatgtccaaccacacgaagatctcttctaatcaagaactgaaccgtgttattttccgtgatcacttcagcgaacccttggggaagcgtctgtttactctgtttccgggtcttggctatgctgcatcttacaaagtgttgcaaagagtgtacaagtatggtggtcaaccttttgctaacgagtttttgaacaaacactacaagcaagatttcgatagcatgtttggcgaaaaaaccggtaaggcaatgagatccgcagctgctggttctttgattggtattggtgaaattgttcttttgccgctggatgtgctaaagatcaagagacaaacaaatcccgagtccttcaaaggtagaggttttatcaagatcttgaaagatgaaggtctgttcaacttgtatagaggttggggctggaccgctgctagaaatgcccccggttcgtttgcccttttcggtggtaatgcatttgccaaggaatacatcttgggcttggaagactactctcaagccacctggtcccaaaacttcgtttcctccatcgtcggtgcctgcgcttctttaatcgtttctgccccactggatgtcatcaagacaagaattcaaaatagaaatttcgacaaccctgaaagtgggctgaagattgtcaagaacaccttgaagaacgaaggtattactgcgtttttcaaaggtttgacgcctaaactactgacaacaggtccaaaattggtcttctcattcgcattggctcaatctttgatccccaaattcgataacttattgagcaaatag

SEQ ID NO: 3623 - DNA, 1665 bp, Saccharomyces pastorianus
atggatggatggaaagaaagacgaggatcaggacaagagcacatgtcagcaaaacgtggcgtggtagaccgtacaattgcatacggtgcgacggccaggagcgatccggagtcggactcatccctgagcgcagagggcgaagatgcagtggtaacgaaggatcatggcagtggcaaggtgcggaagaacacttcgttgaggaagatgaaaggcaagatcaaagacctccggtctttgatcagccgctaccaggagaacgagacattgctggtgtctagtaccaatataatgtcgggtgagatcatggactatgaaattcggctagcgggcttatatgggaaaatgaagagtatcatggacgagaactacgtgctgaaggagacccgagagaaccatgccgcagaggaaaggcaacctgccacaccgtcctcaaccgataaagaacacggcctcgaggagcgtgctttgctggttgagctgaagagagaggtctccgcaaagctaaaggactgcaaaagcatccaaaacacagtgaatgccaaactggatgagattcatgagttctatgagaaatactacggggagttcgaactaaagtttgctgatggggggttccagaaaggactggcggaagaactgggcaatgtaaagctagaattgaagaacgtgaggaaaaattcgcagatcaaagtgaacaacctgcaaatacagctgatcgaggcaaacaagtccctgaacctcttgaaaaaagacatcaaagtgaaggatgactgcctgaactgcatccccgaccttgtgaacaaaaccaacaacgcgattttatcatacaagaagagtatcgccaatcaaaaggaaaccattgaagccttacagaacgagttgtcgcgacagctggaaacgcaaggacaaatggcagcggagttgcacgcgcaaacacccaccaatgtgagtctaatagatccctttgatgaagtcgagcccaccatggatactaaaaccaaagagctgttagccactcaggaaaaggaacttcaagaactaaggttgctaaaaaacgtaaacgaccagaaacaccgcaccgatcagttgcatatagaaaaacagaataacgccattaagctgctgaagaaccatttacagtcattgatccagggacggcagccaccacagccgcatttctatccgttcccggtggaacataacattcagcaagtacgtaactggaaagctcccaagctgattcgcggtacgccaaatgaatcaacaaagccccctttgctcctgccacagcactcaaaacaccaggacagcaacgcagtcgccgtcgaaaccatcactggcacaaagggtagcggtgcccaactgctcctaacggcgccgcccaacaaacagtcgcggcctaaagacaagcttcgaatcggcttcaatttcaaccagttcccaaggccacaagaattttggcggcaacaaccacagatcctaaaccaaaattctccgagattatcgttgccaacaactccaaacgacgaactccaagaaaacacaaagaaagagagtctggcaaaagtaacgacggttgaatctaccacaccgaacacagcggcttctgatactaccaaggtattcaacttgacagatccaaccccgccttccgaaactacgtaa

SEQ ID NO: 3624 - DNA, 132 bp, Saccharomyces pastorianus
atgaaagaaaagaaatataaagaagctatggccgtccacgcggatatcgctacaaaccatgcccaagaaggtggtaactggctaacaggtgtaaagagattaatcggcatagccgaagctactctaaattaa

SEQ ID NO: 3625 - DNA, 3255 bp, Saccharomyces pastorianus
atggtcaaacttgctgagttttctcgaacagccacgttcacgtggtcacatgacaaaatcccattgttggtctctggcactgtgtcaggcaccgtggacgccaatttctccacggattcgtctctagagttgtggtctctgctgaccaccgactcggagaagcccgtggcctctttacaagtcgactctaaattcaatgacttggactggtctcataacaacaaaaccattgccggtgctctagataatggtactttggaattgtactctgtcggtgacgcccacgatactattgtctccacggccaagtttagcaaccattcttcctccgtgaagaccgtaaaattcaactctaagcaggacaacgttctagcctctggtggtaataatggcgaaattttcatctgggacatgaacaaatgcaccgaatctccctccagctacactcccttgaccccgggccaatcgatgtcgtctgttgacgaggtcaattccctggcgtggaaccaatctctggcccatgtcttcgcatctgccgggtcgtctaattttgcatctatttgggacttgaaggctaaaaaggaagtcatccatctaagttacacctcgcccaactcaggcatcaagcaacaactatctgttgtcgaatggcatccaaggaactccacaagagtggcaaccgctacgggcagtgataatgatccatctatccttgtctgggatttaagaaacgcaaacactcccttgcagactttgagccaaggtcatcaaaagggtattttatctctagactggtgccaccaagacgaaaacctgctgctgtccagtggcagagacaacaccgtgctactatggaaccctgaatcagctgaacaactgtctcagttcccaacccgtggtaattggtgtttcaagaccaagttcgcaccagaggctcccgatctatttgcctgtgcctcctttgacaataggattgaggttcaaactcttcaaaatctaacaaatactttggacgaacaagaatctgaaactaagcaacaagaatctgacactgatttctggaataatgtgtctcgagaggaatcgaaggagaaacctaccgttttccatttacaggctccatcttggtatggagaaccatccccagcggcccactgggcttttggtggtaaactggtccaaattacccccgacggtaagggtgtttccatcacaaaccctaaagtgtcaggtttagagccaaacaccgccctgagtgaagcattgaaatctaaggactttaaaccattgataaatcaaagattggttaaagttattgatgacgtcaacgaagaggactggaacttattggaaaagctatccatggatggcaccgacgagttcttaaaagaagcttttgcattcgacaacgatgactctgatgcgcaggattatgctgccagcgataaccaagatgacggcgaagagttcttccaacaaatggagaccaactttcaacccaagaacaacttcactttgactgataacatcgaacacaccatttctaagaatttgttttctggtaatatcaaaagcgcagtgaaaaactctttgaaaaatgacttgttaatggaggccatgattattgcattggactcgaatgatgaaagactgaaggaaagcgttaaaagtgcttacttcaccaagtatggctccaaatcatcattatcgagaatactatactccatctctcaaaagaaagtggacgacctggttgagaatctggatgtttcccaatggaaattaatttttaaggccatccaaaacttgcatccaaatgacgtaactcggaaaaatgaaatgttaatcaaattgggtgacaggttgaaggaaaacggtcatagacaagactcattgaccttgtacctggctgctggttcattagataaagtagcctcaatttggttggcagagttctcagatttagaagacaaattgaaagaggacagtaagacagcttatgaagcccattctgaatgcctaactgaattcattgagagattcaccgtcttctctagtttcatcaatggcaacatcaccatcaataatgaacaactgatttctaaatttttggaatttatcaatttgactacttccacaggtaattttgaactagccaccgaattcttgaacactctaccaagtgataacgaagaagttaaaacagagaaggcccgtgttttgactgcctctggtaaatccttggcagtgcaaaacgcaacagcaacagcaacaagaaagggcaaatacgcaaaccccaaggttaataagaacgttccggtacccccaacttctggaatgccatccactacgtctatttctggtatgcaaactccatattatggaatgacgccagccactggcgcgggtgctccaaaaccttatgtcccaactgtcactgcagctgttcctgttcatacagacggcaaatatgccccaccacaccaaccttcaatggcctcgccttttgctaacagaaccaatagctctacgagattaaactcgttcgctcctccacctaatccatatgctaccgcagcagcagcttcaacgacaaccacatcagctccaacatttccacaaaactcttttgctcccattcaacctggaatgcctatcatgaatgatttcaacgctcagtctagttccatccctccacattcaccaattaacgctgtatcgggtcaaacgccacacctcaaccgtaaggccaatgacggttggaatgatttaccattgaaggtcaaggaaagaccgtcccgtgctaaagctgtatccgttgcacctccaaatattctatcagctgcaacttcatcgaacggtgttcctacatatgctactaataccatgcctccacctccactttcaagagctctatcttctgtgtcaatggtatctccacctccacacaagtcgtctagagttccatcgttggttgcaacatctgagtcaccaagggtatctgtttcaaatccatatgctccctctcaatcaacacaacaaccccctgtaggaattccatctctaaaaagcccaactccaactcctattcaaccaccatcatctaacccatatgctcctccactacaaccaagagtagccacaccattgacttcaggtgtgcctccaacttctttaccaaaggcttccagtccatatgcgccagctgccgcagctcagccaaatggatcgtcctatccttcaaccaatgcataa

SEQ ID NO: 3626 - DNA, 486 bp, Saccharomyces pastorianus
atgaatgatatcaatgactacatggcgcgcttaatccacagcgattctgctgcaagcaataccacagacaaattgtccggtaaccaaagtacaattcgttaccacacagcttcatctcgttccgatagcaccgatgaagagactgattcgatggacctaggaaatggccttgctctgaatgcgtataacagaggaccgccttcaattttaatgaattccagcgatgatgaagatgagacatctgataccatgaatgcatgtggtgatttgagtgctacgcaagagcgcatggcacagtttgcccagagctatactaacaagaggagtggtccggtacctgaaactccatcttttgttttgcacagttctttccctgtgctggctcgtagtgattcgaaaccgtctgatgccgattacgaaactcctccttcaaacgaagaaagaatactgaagcattctgtaaaaggggacaatgattctgaatag

SEQ ID NO: 3627 - DNA, 1365 bp, Saccharomyces pastorianus
atgacggtactagactctggaaactggggattgacgcctgccatggaaacaggtctgttccagagaccacaagaccgtgtctttattatagagttggagaattccatagtgtcttttattaactcgaacactgaatcatttcaattgagaccattgaactcgtattacaggcttctgtcgcatcaaatagctgaatatcacaatttgaatcatgtcttggcaagaacgcaggacagttgtgtaattcttttcaaaggtgagaatttccaaaaaatagaaggcaaaccactactacaagaattacaacagagtaaatcagaagaacccgcttcttcaaatgagaatattgatagatcaaacaataacaaaacatttcgaattttgaaaaggaaagaggtacgtaacgataatgattccaaaacggataataatatagctacatccgataagttagcaacgaatcctgttagtagtcaaaaaatcgaaaacgatgataaatcaagtactgatttggaacaagagagaatcgagaaggaaagaatttatgagcagcgtaaacaggaaatttttgacaagcttaataataatgaagacgatggaaaatcaatcaatagtagcagtggtaatgatagtgacaatgaatggagtgattggttggacagtgatgatgctaatacccaaaccactaatggcacgccaagctccccatcgccatccaacccatacacaactatgcaacaaaacaagcctcgtcaacaattttatgatagtagaagagcaagaggaggaagaagaagagggacaggaaactataaagatacacatcgagggctaaaccgccggaacaaagaaaacggcggttaccaagggggatatgctacaccttatatggtatatccacccacccagataggaaacaacgctctaccaacctatccaatcgtgtataacccagcttctcctgcgccttcttccaatccttcgcctgtggttatgggcggaaacgcggtgttcatgaacccttatatctacaacatgaatccgcaaggatcatgttcttttggtgcccctgtgcccgtgtatcaatcataccagtaccaatatcaatatccatacaatcaatatcaaaatgggctatatagcaatacaccaggctataattctaatgcttataaaagctcttcagtaaacaagcataaccagtctcaaagaaaagacacaacgtcaaatgagggccctgaccacaacaaatatatcagcaatgagaagattcgtagcgggaatagcaaggacacaccgtcatcgaaagaagctaatttaatagaggtcaaatttgatcaattgagcattttttccaaaaaatga

SEQ ID NO: 3628 - DNA, 864 bp, Saccharomyces pastorianus
atgttacaggcagtcgagagagagctagaagatatgcagtgcaacacaagtatagaagagtgttcggatgagggcgagatcaccttcccatccttcagtcctgaggtggacactcagaacaggtttctgccaagaagtgagttcccctcagtgaggcaactggtcatctccaagcaaagaagcagacgtaagagggaaaataacgtatttgtagggaaaatggaggacgtgctcgtgaagtggagaccgcccgcgtcctcacatcgaggtgccatcgaggccataaacggcacgcatccgtaccagatggacacgcctcagtttcagtcgagaagatcggaccccttcggttcgacgaaaagagacgaatccgtgcgttcgattgtggaatccttcaccgactggtggaagcgcaattccaaggtgttcttccatagcgaagagcatgaagaggaggaagagggtgtgcactctgaggacggtgcgagtcggcacggccacgaattacagctgttcgaggaagatattttctccttccacttgagccccaacgacatgtccaccagaaacagcgaacaccaaatacagacgccagtgctcttcccctacgaaacgcccacgaggacaacagcgaaccccacgaaacgacaagccatcgacctcggggacggtgaagagctgaccatctatcgggagatctactcaaatccgattcctgttagctatctagataccttgaacttgaaccaatcgatgtctttgcgacaaatgcagcagcagcagcagcaagcagagccctcttctgcatggcagtactgcgcggactctaactggattaagatctttctttgccacaacgactag

SEQ ID NO: 3629 - DNA, 1854 bp, Saccharomyces pastorianus
atggctggtgcaattgaaaacgctcgtaaggaaataaaaagaatctcactggaagaccacgctgaatctgaatatggttccatctactctgtctctggtccggtcgtcattgctgaaaacatgattggctgtgccatgtacgaattggtcaaggtcggtcacgacaacctggtgggtgaagttattagaatcgacggtgataaagccaccattcaagtctatgaagaaactgctggtcttacggtcggtgaccctgttttgagaacaggtaagcctttgtcggtggaattgggtcctggtttgatggaaactatctatgacggtattcaaagacctttgaaagccattaaggaagaatcgcaatcgatttacattccaagaggtattgataccccatctttggacagaaccatcaaatggcaattcactccaggtaagttccaagtcggtgaccatatctctggtggtgacatttacggttccgttttcgaaaattccctgatttcgagccataagattcttttgccaccaagatctagaggtaccatcacctggattgctccagctggtgaatacactttggatgaaaaaattttggaagtcgaatttgacggcaagaaatctgatttcactctttaccacacttggccggtccgtgttccaagaccagtcaccgaaaaattatctgccgattatcctttgttgacaggccaaagagttttagacgctttgttcccttgtgttcaaggtggtacgacatgtattccaggtgcctttggttgtggtaagacagttatctctcagtccttatcaaagtactctaattctgacgctattatctacgtcggttgtggtgaacgtggtaatgaaatggcagaagtcttgatggaattccctgaattatacactgaaatgagtggtactaaagaaccaatcatgaagcgtactactttggttgctaacacatctaacatgcctgttgctgccagagaagcttccatatacactggtatcacacttgcagaatacttcagagatcaaggtaagaacgtctctatgattgctgactcttcttcaagatgggctgaagctttaagagaaatttctggtcgtttgggtgaaatgcctgctgatcaaggtttcccagcttatttgggtgctaaactagcttccttttatgaaagagctggtaaagctgttgctttgggttctccagatcgtattggttctgtttccattgttgctgctgtttctccagccggtggtgatttctcagatcctgttactacagctactttgggtatcactcaagtcttttggggtttggataagaaattggctcaaagaaagcatttcccatctatcaacacatctgtctcttactctaagtacaccactgttttgaacaagttttacgattccgattatcctgaattccctgtcttgagagatcgtatgaaggaaattttgtctaacgctgaagaattggaacaagtcgtccaattggttggtaagtctgctttatccgatagtgacaagattaccttggatgttgctgctttggttaaggaagatttcttacaacaaaatggttactctacctacgacgctttctgtccaatttggaagacctatgatatgatgagagcattcattgcatatcatgacgaagctcaaaaagctgttgctaatggtgccaactggtcaaaattagcagactctactagtgatgttaaacattccgtttcttcatctaaattttttgaaccaagtaggggtgaaaaagaagtgcatggcgatttcgaaaagttgttgagcactatgcaagaaagatttgctgaatctaccgattaa

SEQ ID NO: 3630 - DNA, 300 bp, Saccharomyces pastorianus
atgaagaggtatatccacttcgccaacagattgacgggctggaacgccatcaaggccagagtagaccagctgaacctgaatctgacagactcccaggtcaaggagatcaccgcaaagatcaagaagctgggcgacgtgagggccttgaacatcgacgacgtcgactccatcatcaagaacttccacgctgaggtcaccaccccgcaactacagtctgcaagaaagaacaagcaagaagacagcgacgttccagcactcaactctgtcccggccgccaagcgggccaagccgaccgtttaa

SEQ ID NO: 3631 - DNA, 1281 bp, Saccharomyces pastorianus
atgactgctgctaaaccaaatccatatgctgccaagccaggtgactatctctccaacgtaaataatttccaactgattgattcgaccctaagagagggtgagcaatttgccaatgcgttctttgacactgaaaagaagattgaaattgccaaggccttggacgacttcggtgtggactacatcgagttgacctctcccgtggcctccgaacaatccaagaaggactgtgaagccatctgtaaactaggattgaaggccaagatcctaacgcatatccgttgtcacatggacgatgccagagttgccgtggagaccggtgtcgacggtgtcgatgtggttatcggcacttccaagttcttgagacagtattcccacggtaaagacatgaactacattgccaagagtgccgtcgaagtcattgagttcgtcaaatccaagggtattgaaatcagattctcttcggaagattcgttcagaagtgacttggtcgacctgttgaacatttacaagaccgttgacaagatcggtgtaaatagagtcggtattgccgatactgttgggtgtgccaacccaagacaagtgtacgaacttatcagaactttgaagagtgtggtttcctgtgacatcgaatgtcatttccataatgataccggttgcgccattgccaacgcctacactgccttggagggtggtgctaggttgatcgatgtcagtgtgctgggtattggtgaaagaaacggtatcactccactcggtgggctaatggcaagaatgatcgtagccgcccctgaatacgtcaagtccaaatacaagttgcataagatcagagacatcgaaaacctggtagcagatgctgtggaggtcaacattccattcaacaaccctatcactgggttctgtgcattcacacacaaggctggtatccacgccaaggccattctagcgaatccttccacttacgaaatcttggacccacatgatttcggtatgaagaggtatatccacttcgccaacaggttgactggttggaatgctattaaatcaagagttgaccaattgaatttgaatctaacagacactcaagttaaggaggtcactgttaagatcaagaagttgggtgacgtaagaccgctaaatatcgatgatgtagactctattatcaaggatttccacgctgagttaggcactccaattttgaaaccaataaataagggcattgatgaaggagatttaggaaattccaatgggcatgcatctaaaaaagttaaaacttccaaataa

SEQ ID NO: 3632 - DNA, 900 bp, Saccharomyces pastorianus
atgcccaatggtcaaatcgttaatagtatgcattccatgagaaaggacaacaccggttatgacttaaaacagctattcatcggctctgaaggtactattggtatcattactggtgtttcggtcttgacggtacctaagccaaaggcttttaatgtctcctacttggctgttgagagcttcgaagatgttcaaaaagtatttgttagagccagacaggagttatctgaaattttatcagcttttgagttcatggattccaaatctcaaatattagccaagagtcaattgaaagatgccgctttccccttagaagacgagcatccattttatattcttattgagacatcaggatcaaacaaagatcacgatgacgctaaacttgaatcattcttagaaagcgtcatggaagaaggcgtagtaacagatggtgtggtggcacaagatgaaactgagctgcaaaacttatggaaatggagagaaatgattccagaggcaagccaagctaatggtggtgtttacaaatacgatgtttctctacctttaaaggatctatactctttggttgacgccaccaatgccaggctatctgaagctggattggttggagattcacccaaacctgtcgtaggtgccattgggtatggccatgtgggggatggtaatctacatttaaacgttgctgttagagaatacaacaaggaaattgagaatgctttagaaccatttgtttatgaattcgtttcctcaaagcatggttccgtgagtgctgagcatggtttaggtttccagaagaaaaattacattggttattccaagagtcctgaagaaattagaatgataaaggatttaaaagcacactatgaccctaatgctattctaaacccttacaaatacgtttga

SEQ ID NO: 3633 - DNA, 582 bp, Saccharomyces pastorianus
atgctgagaaacattttggtgagaagcgctggcaaccatctgaaatacggttgcagatatgtgaaatcatcagctctcttagggcgtaagacaaaagtcaaatactattccactaagatacaaacaagactaaccagcgagaactacccagacgtgaaaagagacccgagattcaagaaactgacttctgatgatctgaactatttcaagtccattttgtcagagcaggaagtattacaaggcaatgagttggaggacctgtcattctataatgaagattggatgagaaaatataaaggtcaatccaagttagttttgaggcctaaaaccgtggaaaaagtctcactgattttgaattattgtaatgatgaaaaaattgctgttgtaccacaaggtggtaacaccggactggtaggtgggtcagtacccatttttgacgagctgattctgtcattagccaacttgaacaaaataagacatttcgaccctgtgtcaggcatcttaaagtgtgatgccggtgttatcttggagaatgctaataatcacgtaatggagcaaaattatatgttcccctggatttag

SEQ ID NO: 3634 - DNA, 90 bp, Saccharomyces pastorianus
atgtttcctgctccgcctctaccaacaacaatgggcgctgccttgctgctaccgttgttcggagtcgacatggcagaatgcatggactga

SEQ ID NO: 3635 - DNA, 372 bp, Saccharomyces pastorianus
atgttatctcaagtaaacatggatttcaaagagttgaagaatccggatttcttcttcttcttctttttctcgtctttgctcttgttattcttcgtatcaccatcatcctcgtcgtcgtcgtcggagttgtggtgtatggtattcctgctcgacttgggtgagattatattccctgcgccgcccctgccgatggcgaatttttccggcgtgcttttgatcttatgcttgcttttgagtttcttggacgaggacttgatagcagacacagcattgccattcgaagtcaccacgaacaggttattatcgttcgcgttgatcgtgtcctcgtcttcgcccacgccatcaccgctaccgtctcttatcgcatcctga

SEQ ID NO: 3636 - DNA, 4605 bp, Saccharomyces pastorianus
  modified_base (12)..(13): a, c, g, t, unknown, or other
  modified_base (29)..(30): a, c, g, t, unknown, or other
  modified_base (44)..(45): a, c, g, t, unknown, or other
  modified_base (55)..(56): a, c, g, t, unknown, or other
  modified_base (65)..(66): a, c, g, t, unknown, or other
  modified_base (78)..(79): a, c, g, t, unknown, or other
  modified_base (92)..(93): a, c, g, t, unknown, or other
  modified_base (104)..(105): a, c, g, t, unknown, or other
  modified_base (121)..(121): a, c, g, t, unknown, or other
  modified_base (125)..(126): a, c, g, t, unknown, or other
atgaattccaanngctttgaaaaacattnngaagccgcttatcnncatcttggtnnccatagctnngaaatcgatatnntacttttgataannaagcgagggcnnctgttaggatacacanaatnnacaattgacagaattactaagctagccagtgaagcaattgatgatggtaaaaaaattctaataatttcagatagaagaatgggtcctaaccgtgtttccatttcatctttgattgcagtttcttccattcatcatcatttgatcagaaataaacaacgttcccaagttgctcttattttagaaaccggtgaagctagagaaattcatcatttctgtgtcctattaggttacggttgtgacggtattcatccatacctggcaatggaaactttggtaagaatgaacaaagaaggcttgctccgtaatgtcaacaatgacaatgacaccattgaagaggaagaaatactggaaaactacaagcacgctgttgatgcgggtatcctgaaagtgatgtccaagatgggtatttccactttggcatcttacaagggtgctcaaatttttgaagcccttggtctagataactctatcgttgatttgtgtttcacaggtacttcttccagaattagaggtgtcacttttgagtacttggctcaagatgtattttccttacatgaacgtggttatccatccagaaaaacgatcggcagatctgttaacctaccagaaagtggtgaatatcattatagagatggtggttataagcatgttaatgaaccaactgccatcgcttcgttacaagatactgttagaaacaaaaatgacgtttcctggcaattatatgtcaagaaggaaatggaagcaattagagattgtactttaagagggttattggaattggattttgaaagttccagtagtatcccattagaacaggttgaaccatggactgaaattgctagaagatttgcatcaggtgctatgtcttatggttccatttctatggaagctcattccacattggccattgctatgaaccgtttaggtgccaaatccaattgtggtgaaggtggtgaagatgcagaacgttctgccgttcaagataacggtgacactatgagatctgccatcaaacaagttgcttccgccagatttggtgtgacatcttactacttgtctgatgctgatgaaattcaaatcaagattgcccagggtgctaaaccaggtgaaggtggtgagctaccagctcataaagtatccaaggatattgccaagaccagacattccactccaaatgttggtttaatctcccctccccctcatcatgatatttattccattgaagatttgaaacaacttatttatgacttaaaatgtgctaacccaagagccggaatctctgtaaaattggtttccgaagttggtgttggtattgttgcttctggtgtagccaaagctaaagctgaccatatcttggtttcaggccatgatggtggtacgggtgctgctagatggacaagtgtcaaatacgcaggtttgccatgggaattaggtttagccgaaactcatcaaactttggttttaaatgatttgagacgtaacgtcgttgttcaaactgatggccaattgagaaccgggtttgatattgccgttgctgttttattgggtgctgaatcctttactttggccactgttccattaatagccatggggtgtatcatgttaagaagatgtcacttgaactcttgcgctgttggtattgccacgcaagatccatatttgagaagtaagtttaagggccaacctgaacacgttattaactttttctattatttgattcaagacttgagacagataatggccaaattgggtttccgtactatcgatgaaatggttggtcactctgagaaattaaagaaaagagatgacgtaaattctaaagccataaatatcgacttatctcctattttgaccccagcacatgttattcgtccaggtgttccaactaaattcaccaagaaacaagaccacaaacttcatacccgtttagataacaagctaatcgatgaggcagaagttactttggatcgtggtttaccagtgaatattgacgcttctataattaacactgatcgtgcattaggttctactttgtcttacagaatctctaaaaaattcggtgaggaaggtctgcccaaggatactgttgtcgtcaacatagaaggttctgcaggtcaatcattcggtgctttcttagcttctggtatcactttcattttgaatggtgatgcaaatgattatgttggtaaaggtttatctggtggtatcattgtcatcaagcctccaaaggactccaaattcaagagtgacgaaaacgtgattgttggtaacacctgtttctatggtgctacttctggtactgcgttcatttcaggtagtgctggtgaacgtttcggtgttagaaactctggtgctaccattgttgtggaaagaattaagggtaacaacgcctttgaatatatgactggtggtagagctatcgtcttatcacaaatggaatcattgaacgcattttctggtgccaccggtggtattgcatactgtctaacttccgatcatgatgattttgttggtaagatcaacagagatactgtcgaattagaatccttgtgtgatccagtggaaattgcttttgtgaagaacttgatcaaagaacattggaactatacgcaatctgacttagcatctaggattcttggtaatttcaaccattatttgaaggactttgttaaagtcattccaaccgactacaagaaggttttattaaaggaaaaatccgaaattgctgaggccaaagccaaggcaacttctgaatacttgaagaaatttagatcagcacaagagattgacgatgaagttaacactttactgattgcaaaccagagagccaaagaacaagagaagaaaaagagtatcagtatttctaacaaggccactttgaaagaacctaaagttgttgatttggaagatgcagttccagacaccaagcagctggagaaaaacagcgaaagagttgaaaaaactcgtgggtttatggttcataagcgtcgtcacgaaacttacagagatccaaaaaagagagtcgatgactggaaagaattcaccaatccaattaccaaaaaagatgctaagtaccaaaccgctagatgtatggattgtggtacaccattttgtttatctgatacaggttgtcctctatctaacatcatccccaagttcaacgaattactgttcaagaaccaatggaaactagctcttgacaaactgttggagactaacaatttccctgaattcactgggagagtgtgtccagcaccttgtgagggagcttgtacactaggtatcattgaagacccagtgggtatcaagtcgattgaaagaatcatcattgacaatgcattcaaagaaggatggattaaaccatgtccaccaaacacacgcactggattcacagtgggtgtcattggttccggtccagcaggtttagcatgtgctgatatgctgaatcgtgccggacacaaggccacagtttatgaaagatcagaccgttgtggtgggttattgatgtatggtattccaaacatgaagctagataagactatcgtgcaacgccgtattgatttattggcggatgaaggtgtcgaatttgtcaccaacacagaaatcggtaagaacatgagcatggacgagttgaagagcaagcacaatgcagtggtctacgctatcgggtctaccatcccacgtgacctaaccatcaagggacgtgaattgaagaacatcgattttgccatgcagttgttggaatctaacacaaaggccttgttggaaagggacctggaaatgatccgtgaaaagatccagggcaaaaaagtgattgttgttggtggtggtgacacaggtaatgactgtctgggtacatcagtgagacacggtgcggcctccgttctaaatttcgaactgttgcccgaaccaccagtggaacgttccaaggacaatccatggcctcagtggccacgtgtgatgagagtggactacggtcatgcggaagtgaaggagcattacggcagagatcctcgtgaatactgcatcctgtccaaggaattcatcggcaacgacaacggcgaagtgaccgccatcagaacagtacgcgtggaatggaagaagtcccaaagtggcgtatggcaaatggtggaaatccccaacagcgaagagatctttgaggccgacatcatcctgttatcaatggggttcgtggggcctgaactaaccaacggcaacgaaagcgaggtgaagaagaccagacgtggcaccattgccacgctcgacgactcgtcgtacaacatcgccgggggcaagacatttgcgtgcggtgactgtagaagaggacagtcactaattgtttgggccatccaggaaggtagaaagtgtgctgcctccgtcgacaagttcctgatggacggtaccacgtacctgccaagcaacggtggtatcgtgcaacgtgattacaaactgttgaaagaactagccagtcaagtttag

SEQ ID NO: 3637 - DNA, 2406 bp, Saccharomyces pastorianus
atgccagtgttgaaatccgacaatttcgatccattgcaggaagcttatgaaggcggctccattcaaaactataacgatgaccaccatcttcataaatcttgggcaaatgtgatcccggacaaacgcgggctttacgaccctgactacgaacacgatgcctgtggtgttggtttcgtggccaataagcatggtgaacagtctcacaagattgtcacagacgctagatatcttttagtcaacatgacacatcgtggtgccgtttcctcagatggaaatggtgacggtgcaggtatcctgctaggtattcctcatgaatttatgaaaagagaatttaagttggatcttggtctagacatcccagagttgggcaaatacgctgtgggtaatgtttttttcaagaagagcgaaaaaaataataagaaaagtctggtaaaatgccagaagatctttgaagatttagctgcatcttttaacttatcggtattaggttggagaaaagtgcctgtagactccaccattttgggtgacgttgctttgtctcgtgaaccaaccactctacaaccgatcgtggtcccattatacgacgaagaacaaccagagttcaatgaaacccaattcagaactcaattatatctgctaagaaaggaggcctcccttgaaataggtctagagaactggttttatgtctgttctttaaataatactaccattgtttacaagggtcagttgaccccagctcaagtgtataactactacccagatttgacgaatgcgcatttcaaatctcatatggcgttggtccattcaagattctccacaaacactttcccctcttgggacagagctcaacctttacgttggctcgctcataatggtgaaatcaacaccttaagaggtaacaagaactggatgcgctccagggaaggtgtgatgaattccccaacattcaaagataaactggataaactttacccaattatcgaagaaggtgggtccgactctgctgcattggataacgtcttagaattgttgaccataaacggcactttatctcttcctgaagccgttatgatgatggtccctgaagcttaccacaaggatatggactctgacttaaaggcttggtacgattgggctgcatgtttgatggaaccttgggatggtccagctttgctgactttcactgacggtcgttactgtggtgctatattggatagaaatgggttaaggccttgtcgttactacattaccagtgatgacagaatcatctgtgcttccgaagtgggtgtcatcccaatcgaaaactcactggttgttcaaaagggtaaattgaaaccaggtgatttatttttggtggacactcaattaggtgagttggttgacactaaaaaattgaaatctcaattgtccaagagacaagatttcaagtcctggttatcaaaggttatcaaattggatgacctactctcgaagacggccaatttagtggccaaagagtttataccgcatgattctctctctttgaaagttcaaagcgacccacgtttgttagccaatggttacacctttgaacaagtttccttcttgttaactccaatggctttgacaggtaaggaagccttaggttccatgggtaacgatgctccactagcctgtttaaacgaaaaccctgtcttactttatgattactttagacagttgtttgcccaagtgactaacccaccaatcgatccaattcgtgaagcaaatgttatgtcattagaatgttacgtaggtcctcaaggtaatcttttagaaatgcatgcatctcaatgtgaccgtttattgttaaagtcccctatcttacattggaatgaattccaagctttgaaaaacattgaagccgcttatccatcttggtccatagctgaaatcgatattacttttgataaaagcgagggcctgttaggatacacaaatacaattgacagaattactaagctagccagtgaagcaattgatgatggtaaaaaaattctaataatttcagatagaagaatgggtcctaaccgtgtttccatttcatctttgattgcagtttcttccattcatcatcatttgatcagaaataaacaacgttcccaagttgctcttattttagaaaccggtgaagctagagaaattcatcatttctgtgtcctattaggttacggttgtgacggtattcatccatacctggcaatggaaactttggtaagaatgaacaaagaaggcttgctccgtaatgtcaacaatgacaatgacaccattgaagaggaagaaatactggaaaactacaagcacgctgttgatgcgggtatcctgaaagtgatgtccaagatgggtatttccactttggcatcttacaagggttgctcaaatttctga

SEQ ID NO: 3638 - DNA, 120 bp, Saccharomyces pastorianus
  modified_base (112)..(113): a, c, g, t, unknown, or other
atgtcattagaatgttacgtaggtcctcaaggtaatcttttagaaatgcatgcatctcaatgtgaccgtttattgttaaagtcccctatcttacattggaatgaattccaanngctttga

SEQ ID NO: 3639 - DNA, 342 bp, Saccharomyces pastorianus
  modified_base (28)..(77): a, c, g, t, unknown, or other
atgcatcaacgattggaacaggggccannnnnnnnnnnnnnnnnnnnnnnnnnnnnnnnnnnnnnnnnnnnnnnnnntagcagtaatagcactgttattaataataatggtggtaataatggtaataatggcgtcgacgggaaagataacaaagttcatgatattagtttgatggagtttgtatcaacaccgttatctatggcagcaaagtcaatgaaggagggagatgggagtgtgaactcgttcaacgagtataaaagtaataaggcaaatgttaatttttctaatgttaataatagtactgctttcgggaatggttttaatggttcagcacgttggtga

SEQ ID NO: 3640 - DNA, 1869 bp, Saccharomyces pastorianus
  modified_base (1817)..(1866): a, c, g, t, unknown, or other
atgcactatgtggtactagagctgcaagtcgcccacctgccagacagccccaaggatcagtgtcgcattgtaaatatggcataccaaattgtggacgctgaaacgttggcaagtcattttcagaacgattcgtcacccagcatcgagatagatgcggaggagaaaagtctggagagcgcaatggtgcaattggataaagatatccaggacataattggtaacgatgaatttgtccttgtctctctgtgttcgacttggcacattcgtgtcactttaccacgtcaagctcgagatgatggcttcatccttacttcttacttacaacatccaaggctgttcgatttatggaaggagtttgagagatggtgcgttaatcatcctgaaattatgggattaaggaaaaacattctgaataataattctaatactaagagtagcagcatcggtactctaatcaaaaatacaaaggatttgaacgaaatgatgagaatgttggatgttccaaatgttgcggaagaagacgatttcgccctagacaagcaatcttttttgcagagaacaatagatatacttttacaactacacagaaagtgctcttccgcagaagatatgaaatgcgtactgacgcaaccatatgattcacataccgatatcagaagtttcttgcaagaaagatctaaggtcttgtacatgaacaatttaccacctgacacaacccagagcgaattggaatcatggttcacccagtatggagcaagacctgttggattttggactgtgaaaaacattgtggaagacacgtccaatgttaataataactggagtttgaacaacagtccctatgtggaagatcaggatagcatttctgggttcgttgtattccagactcacgaagaagctactgaagtacttgcattgaatggtagatcgatattatctaatttagcaaatactaagcaaccgagagtagtggaacatgtccttgaactccagccgtcttccactagggtgctcgataaagcgcaagagattctatctcctttcccacaaagtaaaaataaaccaagaccaggtgactggaattgtccatcttgtggattttcaaatttccaaaggcgtactgcttgtttcagatgttctttcccagctccatcgaacagtcaaatgcataatgtgatcacaaacaataatgctaatagcaacaaaaacagcttaaacaaccgcaccaattccggtggtttgaataacaataataacataaccgggaaccattcttatggtactcccgagttaaatatgatgggtagtacaacaccaacagcactaacctacaatagaactcaattctcctcaatgacaccgttgtctcgacaaaactcattaaacttaactccatcaagtagtgggtcacccataaatacgccgaatagctttgtagcaagtaacaatgctgtgccaaattatcgttataccaacaacatgactaacaataacaacaataacagcagcaatatgaataacatgaacgttaatagaaataatggcaatatgaatattaatgtcaatggtaacggtaatggcaatggcaatgggaacaacgttaatagtaataatggcggtaattctaatatcggtatgggaggatcaggatctaatataccatttagagcaggagattggaaatgttccacgtgtacctatcacaattttgcaaaaaacgtggtatgcttacgctgtggtggtcctaaatctgtaaacgctgatgcaaatgaaacaaaccattatatagatgcatcaacgattggaacaggggccannnnnnnnnnnnnnnnnnnnnnnnnnnnnnnnnnnnnnnnnnnnnnnnnntag

SEQ ID NO: 3641 - DNA, 216 bp, Saccharomyces pastorianus
atgccgctttcaagcttgtgtttggtggccttctcaggagacgaagagcctcctggcggcttattcttcatggacgtgaagaacctagccaaagtagcctgttttggtttcttaccggcagaggaaggtaatgaggatgacatgaatagcagcgatcttggactcgagagacgtaaaggtgtgaaagtgaggccagccagtgatctgcgcatgtaa

SEQ ID NO: 3642 - DNA, 324 bp, Saccharomyces pastorianus
atgtatatccaaaatgatgttcgaactcagatcaatgcaggaagaaaaagggaaaccattagtgtatgtatggatgagatgatgttatccaaagaggcaataatagaaatcttaagccagaacaatggtagcaagaatataaaaatcgctgatgaagtgatactgatgatacaaaaatatttggatattttcattgaagaggcggcgttgcgatcactgcaatcccacaaagattctcctgaagcccacgatgacggtgggcctttcgaattatcgcatttggatctagagcgtatagttggtctactgctaatggacatgtag

SEQ ID NO: 3643 - DNA, 207 bp, Saccharomyces pastorianus
  modified_base (14)..(14): a, c, g, t, unknown, or other
gtcgattatgaatngttacaccacgaccttatactaaaatatgcaacagcatccaaagacgataaattcagacactggtgtaaaaagattaaatccaagataaaggaggataagaatttaaaaagagaagccttagaacgtgctaaactggaaaagagacaatgtgaaaaatcaacaaatttgaacactccaaatacaagcacatag

SEQ ID NO: 3644 - DNA, 1104 bp, Saccharomyces pastorianus
atgttactgccgcccttggaggaaagcctgtcgccaaccactgcggatttgaaggatacgttatcgggaaactcaagtgataactatattcaactacaggatttggttcaattggggaaaatcggcgctgggaactcaggaactgtagtgaaagcattacacgttcctgattctaaaatcgtggccaagaagaccattcctgtggaacagaacaatagtaccattatcaaccaattagtcagggagttatccattgtcaaaaatgtcaagcctcacgaaaacattattaccttctatggtgcatattacaatcagcatataaacaacgaaatcatcatattgatggaatattcagactgtggttctttagataagatattatctgtttataaaaggtttgtccaaagaggaacagtttcgaataaaaaaacttggtttaacgaacttaccatatcaaagatatcacatggcgtgcttaacgggttggaccatctgtatcgacagtataagattattcaccgtgatattaagccttccaatgttctgattaatagtaaagggcagatcaaattatgtgattttggcgtttccaaaaaactagtaaactctatagctgatacatttgttgggacatccacttacatgtcgcccgagaggatacaagggaatgtttactccatcaagggagacgtctggtcgttggggttgatgatcatcgagttggtaaccggggagtttcccttaggtgggcataacgacacacccgatggtatactagatctactacagaggattgttaatgagccttcaccgaggttacccaaggatcgcgttttctccaaagaactgacagatttcgttaatagatgttgtatcaagaacgaaagggagagatcgtcgattaatgaattgttacaccacgaccttatactaaaatatgcaacagcatccaaagacgataaattcagacactggtgtaaaaagattaaatccaagataaaggaggataagaatttaaaaagagaagccttagaacgtgctaaactggaaaagagacaatgtgaaaaatcaacaaatttgaacactccaaatacaagcacatag

SEQ ID NO: 3645 - DNA, 231 bp, Saccharomyces pastorianus
atgtttcaacggaaaactttacaaagacgaaatttgaaggggcttaatctgaacctacaggcagatttggtcagcaatggcgaaatgcaggaaaagacagaggctcaccaacgaccctctcgaatagaaggccagttgatgtccaatatcaacgcggtacaaaacaacagtaatttgtacttgcgaagaggcataaaaaaaaaaactgacgctggatgcatctgtaaatga

SEQ ID NO: 3646 - DNA, 195 bp, Saccharomyces pastorianus
atgttacaccacgaccttatactaaaatatgcaacagcatccaaagacgataaattcagacactggtgtaaaaagattaaatccaagataaaggaggataagaatttaaaaagagaagccttagaacgtgctaaactggaaaagagacaatgtgaaaaatcaacaaatttgaacactccaaatacaagcacatag

SEQ ID NO: 3647 - DNA, 147 bp, Saccharomyces pastorianus
atggataactccctgactaattggttgataatggtactattgttctgttccacaggaatggtcttcttggccacgattttagaatcaggaacgtgtaatgctttcactacagttcctgagttcccagcgccgattttccccaattga

SEQ ID NO: 3648 - DNA, 564 bp, Saccharomyces pastorianus
  modified_base (17)..(50): a, c, g, t, unknown, or other
atgaatacatttagagnnnnnnnnnnnnnnnnnnnnnnnnnnnnnnnnnntttacataatatgaagagtctatatataaatgtaggtatgaaaggagctagaagaaacgaaagggaaaacctgatatgtttctatgtgcttgtatttggagtgttcaaatttgttgatttttcacattgtctcttttccagtttagcacgttctaaggcttctctttttaaattcttatcctcctttatcttggatttaatctttttacaccagtgtctgaatttatcgtctttggatgctgttgcatattttagtataaggtcgtggtgtaacaattcattaatcgacgatctctccctttcgttcttgatacaacatctattaacgaaatctgtcagttctttggagaaaacgcgatccttgggtaacctcggtgaaggctcattaacaatcctctgtagtagatctagtataccatcgggtgtgtcgttatgcccacctaagggaaactccccggttaccaactcgatgatcatcaaccccaacgaccagacgtctcccttgatggagtaa

SEQ ID NO: 3649 - DNA, 333 bp, Saccharomyces pastorianus
  modified_base (17)..(50): a, c, g, t, unknown, or other
  modified_base (325)..(325): a, c, g, t, unknown, or other
atgaatacatttagagnnnnnnnnnnnnnnnnnnnnnnnnnnnnnnnnnntttacataatatgaagagtctatatataaatgtaggtatgaaaggagctagaagaaacgaaagggaaaacctgatatgtttctatgtgcttgtatttggagtgttcaaatttgttgatttttcacattgtctcttttccagtttagcacgttctaaggcttctctttttaaattcttatcctcctttatcttggatttaatctttttacaccagtgtctgaatttatcgtctttggatgctgttgcatattttagtataaggtcgtggtgtaacnattcataa

SEQ ID NO: 3650 - DNA, 144 bp, Saccharomyces pastorianus
caatggtggaagctaactttacgtagctttggtgggttattgatagcctttgggctcgtccgaggtaccgaaggttggttgtggcataaaaataaagaatataagaattacaagaaactagctaacggtgaaagcacggactag

SEQ ID NO: 3651 - DNA, 129 bp, Saccharomyces pastorianus
ccactgcccacaccactgtcctgcgtggtcagttggcacccactgcagaactggatcgccggtgggaactccagtggcaagatcttcctcttctccgatgactcgcaggccataaagcaggaacaataa

SEQ ID NO: 3652 - DNA, 1515 bp, Saccharomyces pastorianus
atgcctgagctaacagagttccaaagaaagcgtcaagagaacattaaaaggaataatgatttactaaagaaacttcatcttttaggggtggcatctcaaatcaaacatgaggccggtgtggtagacagagccaaggctcccgtcaaaaagaaacaaaagacgactagtaccagggcgaaaaagtctgctagtccttctttacctaccagaagatcaagaagactgaggggagaggctgcagataataccaaaggaatacctgacttgaacgataaccaattgctcaagatgggctctcccgatggccatgacaagactttcatcgacgaaatgaaagaaaaaccggtaattggagatgtaaaattgagtgacttgataaaggatgaaaaagaggatgcccttttggagaagttcaagagattcaacaatggcagtttttcatctggcgatttttttgacgaaataaaaaagaggcaaggggatgtcgtgggcatggacgaatttgatttggatttgtacgatgtttttcaacctaatgagatcaaggtcacttacgaaaggatctcagccacatacttccatcctgccgtagaaaagaagctgatcattgcaggtgacaccggtggcaccgtcggcttttggaacgtgagagatgaacccctgggtgatagtgaagaagatcgaatggaagagcctgatatcaccagggtgaaactgttcacgaagaacgtcggccgtattgattgcttcccaacaaatacatcaaaaattctgctgacctcgtatgacgggagcatcaggtctgttcacctgaacaatttaaaaagcgaagaggtgctcactttgaaaaatgaatatgatgatcctctaggaatcagcgattgccagtttagttacgagaacccgcatgttttgttccttactacactgggtggtgaatttaccacttttgacacgagagcaaaaacttcagagtacaaactgcgaagactggccgacaagaagatagggtctatggccataaacccgctaaggccctacgagattgccaccgggtctctcgacagaacactcaagatctgggacacgagaaaccttgtggagaagccggagtggtctcaatacgaagaccaccccagccacgaaatcgtttccacctacgactcgaggttaagcgtctctgcggtgtcgtactccccgacagacgggaccctggtatgcaacggctacgatgacactgtccgtctgttcgacgtcaagagcagtgatagcctcgtcacagacctgcagcccaaattgaccatccagcacaactgccaaacggggagatggaccagcatccttaaggccagattcaagccgaacaagaatgtgttcgccatcgccaacatgaagcgcgctatcgacatttacaacagcgacggccaacaattggcccacttgcccacagccactgtccctgccgtggtcagttggcacccactgcagaactggatcgacgggcgattgccagct

SEQ ID NO: 3653 - DNA, 1497 bp, Saccharomyces pastorianus
atgtgtcatggggtttatgttcaacgagtccggctttatcaagcagagtgttttgaaaccctctcaaagagaatcacacgagaagaattacaaaagaggtttatgctagcaggctttcttaatatcatactggcaccattcctggttacatattttgttctgctttattttttcaggtattttaatgaatacaagacatcacctggctccattggggctcgtcaatacacgcctatagcagagtggagatttcgtgaatacaatgagctctatcacatatttaagaagagaatgagtctaagtacgactctggccaataaatatgttgatcagtttccaaaagaaaagaccaatctattcttaaaatttgtttcttttatcagtggatcattcgtggccattctagcatttcttacagtatttgatcctgaaaattttctaaacttcgaaatatccccagacagatcagtcattttctatattactattttaggtgctatatggtcacttagcaggaatacaatagcccaagaataccatgtttttgacccagaagagacgcttaaggaactgtatacatatacacactatttaccgaaagaatgggaagggagataccacaaggaagagatcaaattagaattctgtaaattatacaacttaagggttgtaattcttttgcgggaactcactagtctaatgataacaccatttatactttggttttcattaccttcttcagcaggcaaaattgttgattttttcagagaaaactctgaatatgttgatggactaggttacgtttgcaagtatgccatgtttaatgtgaaagacctcgccagcaaagatgcaggcgacattaaagaagatgatgcgacgaagaaagcatatgtcaatggaggtcgtacgtcaaatgacaagcggaagaggaaatttgccacggaagatcacggcgataaagatacagcaaataataaaatgctacagtcatatgtatatttcatggatgattattctaacagtcaaaacctgacaggcaaatatcaattgcctgcaaagaaaatttaccaacacaatgagggtgattctgcccttaacaataagtactcctggaggaagcagtttcaaccaggccagaagccagagctgttcagaataggtaagcatgcactaggccccaaccagaatatatctctcaagagatactctacaaagaatcctgcgaagaattggggtaacaataataatggtagtagtaacaacgatgatgatggtactaacattactagtaacactgataacaacaatactaacaacgaacacgaatttgaacttacagaatcttttctagattcggacacattccctcgttatgatggaattaaccagaacagtatgctgaattcgcataataataataatagtgacaaactcaacaaaggaggagtcctaggactcgtcaaagaatattataaaaagtcagatgttggaagataa

SEQ ID NO: 3654 - DNA, 699 bp, Saccharomyces pastorianus
atgtttctacaagatgtttacaactactatctaggaaatggttactattgcatcatactggagaaaattctgaacataggcactttactctttgtcgttttcatttccacatacatgggacattgcattgattattctgaattgcctacaagtcatcaaatatcagatattattatcgataagtgctattccaccaacataacagggttcacaaagttttttctttggatattctatttcttcgtgattctcaaaattgtccaactatattttgatgttaaaaaattatcggaattgcaaaacttctacaagtaccttttaaatatatccgacgatgaacttcaaactctgccctggcaaaatgtaatacaacaactcatttacttaaaggatcagaatgctatgaccgcaaacgttgttgaagttaaggccaagaatagaattgacgcgcatgatgtggctaataggatcatgcgtagagaaaattatttgatcgctctttacaacagtgatattttggacctttctttgccgataccactatttaggaccaacgtattgacaaaaacattagaatggaatattaacttatgtgtcatggggtttatgttcaacgagtccggctttatcaagcagagtgttttgaaaccctctcaaagagaatcacacgagaagaattacaaaagaggtttatgctag

SEQ ID NO: 3655 - DNA, 87 bp, Saccharomyces pastorianus
atgcctaaaaagagcaatactgtggaggaagatcaacggcctttgtttttcagacacatcttacagaataagtatcctcagcgctag

SEQ ID NO: 3656 - DNA, 267 bp, Saccharomyces pastorianus
atggagagagataaataccagcagcccaactctcatgggaaaaacacttttctatcgcgaatatttggtttacaatcagacgaagtcaatccttctctcggcagtcaagagatgagcaatttccctatacctgacttagagagaggttcttctcttttgcattcatctggtagtagtcaagaggaccgagatgaaaacgatttgcgtgttcctgaatcagatcaaggctccagcacagaagaagaagacatagaagaagaagaagaa

SEQ ID NO: 3657 - DNA, 993 bp, Saccharomyces pastorianus
atgcaagcacgttttaaaaatgactatttcgatggtctttcaaatggtgatttggttttcttctctgttattggtacattattctctacctctgatcaataccatttggtaataactccttcgctaatcctaatgaatcaatttctggaacagatcaaatttaattctttgaaaagaattgcatttggtgcgattttgataaggatcgttttacagtatcaacgtatctccaaaaggtatataccagaggcggtttatttcttccaaaaggttttattcacttttatagttgaaaagaaaaaccaagacaaaccattagactttgaaactattagattggattcttatgagttgggacttccaaaagatgctgatttttcggaaaatagatctagtgtagttccattgcatagtttatcaacaatggatgaaaagctgcaatcagtaaacctgaaaacctgcttattattaaacattatggaatcattagatgtaacaatctctactatgtggaaagaattgcccgcttttcaagaaattatttcacccattcaaaaactattaaacgtatatgctttgagatatcctggttttgtaaaggcaaaaaatcttttgagcaagatcgggaaactattgaaatttacagaacatatcccactagctttacaaaaccacaggcccatatccatacctacacacgcacctaaatatgaagaaaacttcaatcctgataagaaatcttatgaccctgatagaacgagaagcgaaataaataagatgaaggctcaactgaagaaggaacgcaaattcactatgaaagaaattcgtaaagatgccaaatttgaagctagacaaagaatcgatgaaaagaacaaggaaagtagtaactaccatgcaaagatggctcatatcgtcaatacgatcaacacagaagaaggtgccgaaaagaacaagtacgaaagggaaagaaaattacgtggtgggaagaagtaa

SEQ ID NO: 3658 - DNA, 1365 bp, Saccharomyces pastorianus
atggccggttcgcaactgaaaaatctaaaagctgccttgaaggctcgtgggctcactggtcaaacaaatattaaaggtaagagtaagaagaatccaaagagacaagcaaaggagtatgatcgagaagagaaaaatagagctattgccgaaatcagagaggaattcaatcctttcgaagtgaaggctgccaggaacaagagaagagatggtccgccttttaaaactgctgatcgtgttgcagtgggtaaacctggtatctctaagcaaattggtgaagaacaaagaacacgtgcatttgaagcaagaaagatgatgaagaataaacgtggtggtgtggttgataaaagatttggtgaaagggacaagttgttgactgaggaagaaaaaatgttggaacgtttcactagagaaagacaaagccaatccaagagaaatacaaatttgttcaatcttgaagatgatgaagacgatggcggaatgtttggagacggtcttacacatttgggccaaacactgtctttggaagatgaattagacaacggcgaggatgatttcttaacttccaaacgatttaacgatgatgatgctgaacagcagcaacctcagaggaaaaagactaaggcagaagtcatgcaggaagtcattgcaaaatcaaagttctataagcaggaaagacaaaaggctcaagggataatggaggaccaaatagacgacttggatgaagatttcgaagatgttatgtccgaattgatgactacacagcccaagaagaagccaatggaacccaagactgatctagacaaggagtacgatattagagtaaaagaactgcaactggataggagagccgccccaaccgatagaacaaagactgaagaagagaaaaatgctgaagctgaagagaaaaaacgtgaattggaacagcaacgtcttgatcgtatgaatggtatgatcgaactagaggaaggtgaagaaaagggtgtagaagatttggatgacggtttttgggataatgacaatgattacgaagaaggcaatgatgaaattgccaactccgacgatgatatcaacctcgaaaatcaggaccaagatgatgactttacccaagtcttgaagaaaaaaaacatctccatttcttgccctgaaacacatgatgcactgctggaacaagtaaacaagttgaatttggctgaccaccctaagatcatcaaaaatatcatcaaagcctatcaaccaaaattggccgaaggtaataaccagaaactgggacaattcactgccgttttactgagacatattatttttttaagtaatcaagactattccaaaaacgtccaagtgttcaaaaagaccaaaatgcattga

SEQ ID NO: 3659 - DNA, 2250 bp, Saccharomyces pastorianus
atggaggaatcggtaagaactattgtagctgctggtcctggatctgttttggtcatacatccaagagaagccgtcctctatgatgtccaacagggcaaaaaggtagctcaattagctgttaaaaatgtcaagtacgtatcatggtccttagatggccaatatgttgcattgatgagcaaacataccataactttggctaccaagaaattagaattgattaactctatgcatgaaaccatcagaatcaaaagtgctgcttgggatgaaagcggtgtcttgatttactcaactttgaatcacattagatactcgctgctgaacggcgatagaggtattattaagactttggaaaagactttgtatatcacaaaagtccaaggaaaattagtttattgtttaaaccgtgatggtgaaattgaaatcctaaccattgaccccacagaataccgttttaagaaggcgttggtcaacaagaacttcccagaagtcttacgtctcataaagaactctaatctagtcggtcaaaacattatctcctatttgcagaagtcaggtttcccagagattgctttgcagtttgtccaagatccacatattcgttttgatttggctctggaatatggtaatctagatgttgccctagatgaagccaaaaaactaaatgacgatggtgtttgggaaagattgaaccaagaggctttggcacaaggtaacactaccttagctgaaatgatttaccaaactcaacattctttcgataaattatcttttctatatcttgtcactggtgatgtcaacaaactgtcgaaaatgcaaaatattgctcaaaaccgtgaagattttggaagtatgctattaaacactatctacaataactccaccaaagaaagatctaatatttttgctgatgctgggtctttgccattagcttatgccgtagcaaaggctaatggagatgacgcagcagcttcggcatatttggaacaagccgaaatcgacgtacaagatgttactttaccagaccaagttaatccctccaacttcgttcaaagcccggcaatctccgagccacttgcaaaatggccattaaaggaagctgaactatcttacttcgaaaaagctgtcttaggtcaaatcgatgatttgaacatagatgatgacgttccggcagaaaatatcgccgaagaagaagaagaaccacttgctgaagaaagtttcaatgacatggatatcggcgaagacgagggagcctgggacttaggtgacgaagatttggacgtaggagaagatctaactgaaaaagtagaagaaggtgaaatcgcctctccagcaaaagaggccgaaacggccgtttggattaaaaactccaagttaccttccgtcctagttgctgctggtgcttttgacgcagctgctcaagctttaaacaaacaagtaggtgttgtgaaactcgaaccgttaaaaaaatacttcaccaacatatatgaaggttgtagaacatacatgcccagcacaccatacgaactacctgctcaattgggttatatcagagcatacgatgatacagtgtctgaagaccaaatccttccatatgttccaggtcttgatattgttaacgagaaaatgaatgaaggctataagaacttcaaactgaataaattggaagttgcgattgaatgttttagagaagcaatttaccgtatcacgctattaatggtcgatgactcagaagatgaaaaactggctcgcaaggtgctagaaactgctagggaatatatattaggtttatccatcgagttggagcgtcgttcattaaaagaagaaagtactgtgcgcatgcttgaactggctgcatatttcacaaaggctaagttgtccccaatccatcgtaccaacgcactgcaagtggcgatgtcacaacatttcaagcacaaaaatttcttacaagcctcgtattttgcgggtgaatttctaaagattatttcatctggtcctcgtgctgaacaagcacgtaaaatcaaaaccaaagccgactctatggctagtgatgccattccaattgactttgatccttacgccaagttcgatatctgtgcagctacttacaaaccaatttatgaagacacaccttccgtttcagatccgttaaccggtagtaaatatattgtcactgagaaagataaaatagatagaattgctatgatttctaagatcggtgcaccagcatcgggactaagaatacgtgtataa

SEQ ID NO: 3660 - DNA, 1089 bp, Saccharomyces pastorianus
atgaagatgctaactaaattcgaatcaaagtccaccagggccaagggtattgccttccacccttccagaccttgggtattggtggctttgttctcctccaccatccagttatgggattacagaatgggcacgctgcttcataggttcgaggatcacgaaggtcccgttcgtgggctagattttcacccaacccaaccaattttcgtttctgcaggtgacgactataccatcaaagtctggtctttggacacaaacaagtgcctttacactttgtcgggtcatttggactatgttcgtaccgtgtttttccaccgtgaattgccttggatcatatctgcctctgatgaccagaccataaggatctggaactggcaaaaccgtaaggaaatcgcttgtttgactggtcacaatcattttgtcatgtgtgctcaatttcatcccactgatgatctgatcgtttccgcttctttggatgaaaccatcagaatttgggatatctcaggcttaagaaagagacattctgctcctagcaacaattctttcgaagaacaactgaatgcccaacaaaaccttttggacggttctcttggcgactgtgtggtgaaattcatcttggaaggtcacacaagaggtgttaactgggcctctttccatccaactttaccattgattgtctccgccagtgacgatcgtcaagtaaaattatggagaatgagtgccacaaaggcttgggaagtcgacacttgcagaggtcacactaacaatgtcgacagtgtcatttttcacccacaccaaaatctgatcatttcagtcggtgaagacaaaaccctaagagtctgggatcttgataagagaactccagtaaagcaatttaagagagaaaacgataggttttggttaatcgcagcccaccctcatatcaacctatttggtgcagcccacgattctggtattatggttttcaaactagatcgtgaaaggcatgtagcgttatccatcaaaatcaattgttttttgtcaatgcggaaaagcaaattcaaagtttcaatttccaaaaaagagtcgcttcattaccttatgcctcgttaa

SEQ ID NO: 3661 - DNA, 294 bp, Saccharomyces pastorianus
atgaagaggtatatccacttcgccaacaggttgactggttggaatgctattaaatcaagagttgaccaattgaatttgaatctaacagacactcaagttaaggaggtcactgttaagatcaagaagttgggtgacgtaagaccgctaaatatcgatgatgtagactctattatcaaggatttccacgctgagttaggcactccaattttgaaaccaataaataagggcattgatgaaggagatttaggaaattccaatgggcatgcatctaaaaaagttaaaacttccaaataa

SEQ ID NO: 3662 - DNA, 150 bp, Saccharomyces pastorianus
atgtctgactctattatttcctttgctgctttcatcctagctgatgctggtttggaaatcacctctgacaacctattggctatcaccaaggccgccggtgccaatgtcgacaacgtatgtacaaagacgagaagaaaagactgtgtttga

SEQ ID NO: 3663 - DNA, 90 bp, Saccharomyces pastorianus
atgtctctggctatgtatattttgattgcgatggccttcttttattatccagatgaaaaaacccttgactctatcggaaaagttttgtaa

SEQ ID NO: 3664 - DNA, 177 bp, Saccharomyces pastorianus
atgaaggacaagatggatttggcactgggtgttgccattggttcctctctacaaattgctctattcgttacaccatttatggttcttgtcggctggatgattgacgttccaatgacgctgaatttttccacttttgaaactacaacgctattcattgctgtcttcttatcgaactaa

SEQ ID NO: 3665 - DNA, 930 bp, Saccharomyces pastorianus
atgtcagactaccaagctttgctgcagttcaataagaaggccgtatccaaggatatggtccaatacctagcttccaccacagcttcgattataaaaatcaagaaaacgaatagtatgatagacatcgcattgccagccccaccattggttaaattcattaatgggttgataaagcactccaacgtacaaactccgactctaatggccacttcagtgtacttggtcaaattgagatctataataccgagcaacgtttatggcataaagactactagacacagaatttttttgggatgtctgatattagccgcaaagacattaaatgattcatcccctcttaataagcattgggctgaatataccgacggtctccttctacttcgagaggttaataccatagaaagagagttgctaggatattttgactgggacgtcaccatttcgacagatgatttggttacatgtctttcaccgttcttacaacctattaaagaggagagtgtgtacaagctgcaacaagaacaacgcttatccaattccttttcttctcaagaaaaggtcaaagcaaagagatcttctcttactcattcgcgctcatcatctaatttctccatcccatcgttggcctctacttcgacgctatcgacattggaatccaaaaggtcggattcatccaactacagtaataagatagaaactttgccggagtttaacgagcccaatgataattataataacaaattctctccgcgacctttcgatgcagacttcaagtacaataacaaggaaaacaatagaccaataccgaccagtaagtcatccaatttcaacaaggcacgccccttaattctaaagactggattagacaaaccaatgatcaacggagatttgaagttgaagaaatcaaattggtcaagctttttcaaataa

SEQ ID NO: 3666 - DNA, 231 bp, Saccharomyces pastorianus
atgccaattgccaagagactggccaaggccatgaagttggacacctataacatcttgcaaaacaacggtaagatcgcgcatcaggaagtggaccatgtgcatttccacttgattcctaagagagacgagaagaccgggttgatcgtcggctggccagctcaagaaagcgactttgagaagttgggtaaactacacaaggaattgcttgctgagctagaaggctccgattga

SEQ ID NO: 3667 - DNA, 255 bp, Saccharomyces pastorianus
atgatattcaaacatgataaatataacgcactacctattgatgttcgtaatgctgaaggtagagtacccctccatagttgtaaagggttatctatgtcttttaaagtcttccatagcgttgactttttgtcttgttggattctagtctttaaaagatctaatggctgtaatgtaacagcagatgtaagcccaccaaaaaagcctccaattaagtgggaagagttctttgacgtatttgccggttcggacatgtaa

SEQ ID NO: 3668 - DNA, 927 bp, Saccharomyces pastorianus
atggcatacaagaaaagggcttttaaaccaagtggaacaacaaaatgcttaaaggatttcccgacattcatcttgaacctacctagctacaacccttccatcctttctacccatgcgaccgcactaatcacaggtggttccagtgggcttggattagaaattgccaaggtgcttgccaaaagagccgataaagtcattatagctgatattctaccatttcctgcaatttatcaaaaagagttcaagaatattttcttttacaaatgtgatatatcaagtttagatgatatccaaaacttaaaaagagcaattgatagaaatcatggcaacgtggatattctcataaataatgcaggtatagcacatatcaaaatgctagaaaagatgtcaaataatgatgtgaaacaattaattgacatcaacttaataggcgcttatagagtcattcatacatttgctccagatatgataaacaacggagaaggctttataattgatattgcttctgttctaggggaactaacacctgcaaggctgacatcgtatggtgcatcgaaaggcgcgatgattggtttgcataagagcatgtgcaagcatttcgaaaatttacctacaaaacgcaataaacttggaataaaaacgttactagtatgtcctggaaaaattggaacagccatgtttatagatgttcctacaccatccaaattgttggcccccgacattgtaccttcagagctggcgttcgcaattatttctgcaatggaacacaaccagttgcaaatactaaacgctccttattatgttaacctggttcccttttttaaatctttaagctggccttacaaacgcctcttaaaacatttaagcggaatggaccacgtaacgtccatccaacggatgactaaggctctgaaaacaggcgcatag

SEQ ID NO: 3669 - DNA, 549 bp, Saccharomyces pastorianus
atggtagaaagtctatttcccttgccagagagagggataaggctttccaataatacaaagcataacaacaaacacacacacacactcataaacacaatgtgctcagcaggcggtatcagaagacctatccagatcgaagaattcaaaacggcgataagcggtatgtccgacatggaattggcacagatcaaaaaggaaatcgagaatagtatcaatcacttgcagaggtccagtgctcgcttgggtaagtacattgccaagctggagggcgatgaggagcgtctcgatgcggacgacagcgacgacttagagaacatcgactcgggggacctggcgctatacaaggactccgtcagagaaaacgacatcgtgcttaacaactacaacgaaagagtggacgcgttggagcaagaaaccgtgtacaggaagacgggccgcggcaagagcaagcacgaggcggatgcaaaggacaagactagtaaaggcaccgacgtcgacatggacaacactaacgtcgacgtggtgaccccaaacagcatattcatttga

SEQ ID NO: 3670 - DNA, 1980 bp, Saccharomyces pastorianus
atgaagtcaaaaagaatagggaaagcggctaatagtatgaatactggtacatccctcgacggcatactatatcatgagcaatcgtcagtgaaattaggtgagctagaaagatacgttattacatacgacttatacgaaggcgatgagattcccgctgatatcaggctagattctctatgggtaaaaattgaaaataccacaaagctatcctacaaggcagcttacctattgggaccgtttatcctgtattgcgacttacgaaccaagggctatcaccactcacaaaagattatctcttcggcagacaagcctgttttccaatcaaatattcaggcacagcagaaatttgttgcagaattatctttacatcaaatcaagcagcgttatgtctggatagtggatgtcgtaagtcagattatttttaataaagaaaccaagataaattacgagatatcaattggcaacaccaaggcatcgtttaaaaagaaaatacgaagtactagcacattgaacactcaggataatacttcatacatagggctgcaagtacaaaaactgactactgccgatatatgggcagtgccaaaatttcttggcacctctcaaaagtcgcacctaatcattctcactcacggcttccaatcgaacgtcacagcagacatggaatatatgatggaagaaatatacaaggcacaagtaaactatccagatgagcgcctagttgtcaaagggtatatgaagaatatctgtgaaactgaaaagggaattaagtttttgggcatcggactggccaattacattgtcaacgagttatacgataactctgttaataaaatatcatttattggtcattctctgggtggactaacgcaagcttttgctatttgttacatcaagattaagtatccagagtttttccagaaagtggaaccagtcaatttcatcacattagcgtcgccattgctaggtattgccaccagcacacccaattacgtcaaaaaatcgttgtcaatgggtatcattggtacgacaggacaagagctggggctagaggactcgaaattcggtgataaaccgctgctgtacttgctatcagagggccctctaataaaggtgctcacccgattcaaaagaagaacgctctacatcaatgccataaatgacggaatagtccccttatattcatcgtctttgcttttcttagactattctcaattgctggataagttgggaggccaaacgacggcttcgtgtgatcctctcttccagcccaaagacaaccctgttactcccggtgatgacaatggcaatgctggcgataagacgactaacacgtcatcctggaatacgttttggaaagccaagggaaatcaagacgacaggaaatctaaacgtttgatgaacacttccgtcattaaatccatgaagtctgcagtactgccaccgtgtcctgacaccgagtatcttttgaaccctgatacaagagctgcaactatcatacatgacaagatctacacggaaaaggatctaccagcccctgcagcagcagagtttcccgaaggaacctcagctcagggcaatgaaaagaagaagaagagcaagaaggagttggaagagatcatagcaagacgctggcacaagggaatgcactggaggaaagtggtcgtgtcactaaaaccggatgcccataacaacattatcgtcagacgaaggttcgccaacgcctacggatggtcggtggtagaccatctggtcggcgcccacttccaaggagacggtgcagacatcttgtcagcgccagacgcagcagagccccccgacgaagacgtagatatagccagcggtggtgtagagccgaataagcttttctcgtggctgaccggggtcgaggaccctggcacctaccgcgagggagtggtctccaccgccagccacctggccagctcttggatacggaggcattcctccgtcacagactaa

SEQ ID NO: 3671 - DNA, 330 bp, Saccharomyces pastorianus
atgggcgacgaactaacaagatcccatttcaatgcattatacgacactttactggaatccaatttatgtaagattatcgagccattcgaatgtgtggaaatatctcacatctccaagataattggcctggatactcaacaggttgaggggaaactgtcccagatgatactggataagatattctacggtgtgctggatcaaggcaatggatggctttacgtttacgagactccaaatcaagacgctacttatgactccgcattagaattagtaggacaattaaataaagtcgtcgatcaattgttcgaaaaggcaagtgttttgtactaa

SEQ ID NO: 3672 - DNA, 951 bp, Saccharomyces pastorianus
atgtcagtattgggttcgaaattggaagaagccagaaatttggtcagcgaaaaacagtatgataaggctgaacaagtgtatttaagcttgttggataaagacagttcactggtcagcgctcccaccgctagcgtggatgacaaacgtaggaatgagcaggaaacaagcatattggagctgggacaattgtacgtcactatgggcgctaaggacaagctgcgcgagttcatccctcattccacggagtacatgatgcagttcgccaagtcgaagacagtaaaggtcttgaagacgctgattgagagattcgagcaggtaccggactccctggacgatcaaatctttgtttgcgagaaaagtatcgaatttgctaagagagagaagagagtgtttctaaagcactctctatccgtcaaattggctaagttgcactaccaaaagaaacagtataaggactcattagcattgatcgaaaatctcttaagggagttcaagaaactggacgacaaaccctccttggtggatgtgcatctgttggaaagtaaggtttaccacaagttaagaaacttggccaagtccaaggcttctttgactgcagcaagaaccgcagctaactctatctactgtcccactcaaactgtagcggagttggatttgatgagtggtatcctacactgtgaagacaaagattacaaaactgcattttcatacttttttgagagttttgagagctatcataatttgactacccacaattcttatgaaaaggcttgccaagtattgaagtatatgctattatccaaaatcatgctgaatctcatcgatgatgtcaaaaatattctaaatgcaaaatacacaaaggagacttaccagtcccgaggtattgacgccatgaaagctgttgccgaggcctataacaacagatctctcttggagttcacactgcgctaa

SEQ ID NO: 3673 - DNA, 183 bp, Saccharomyces pastorianus
atgtattgcgaggcaaaaccgccaaaatgcacttcatcaaacaccacactgtctggccaagccagaccatgcagcctgacaatcgctgtaaagatggccagacacgccacgatcaatttctccttcacggtaaccatggaccgcaacgaggccaatttggcgctcgggtcagtaacgatatag

SEQ ID NO: 3674 - DNA, 462 bp, Saccharomyces pastorianus
atgactagaccaatgtacacttgctcatgtgcgcgctgccatagtatgagcagaggcatttcacgttttatgttttacgttttacccggccgtcgccctattattttaaccagaacgcttctttcgtcttgccatggcaacgtttccttccacgttctatataggtggttccagcagcagcagcacagcactgcagcacagcagcaagactacaccacaccacaccacacgtcccagggcggcacatcgttcataatggctagaggcaatcagagagacttggcaagacagaaaaatatgaaaaagcagaaggacctggctaagagccagaaaaaaaacggcgatccaaagaagagaatggagtcggacgctgatattttgaggcagaagcaggctgctgcggacgccagaagagaggcagagctgttggagaagctgaaggctgagaaggcaagaaaatag

SEQ ID NO: 3675 - DNA, 249 bp, Saccharomyces pastorianus
atgattaatgacgctaattttgctgttaatgacaaaattcgaatgatagagattatgctgccaccaagagatgttccacaagctctgcttgatagatgggtagtagagaaggagcaaagcaaacaaatgcaagaggaaaacgaaaactccagtgcagtggataccccaacgccagaattccaaccacttctgaaaaaaatcaaacttgatacagacatgatttctcccaattactatcaaggcccataa

SEQ ID NO: 3676 - DNA, 1482 bp, Saccharomyces pastorianus
  modified_base (1452)..(1452): a, c, g, t, unknown, or other
atgaattctagctatacacacaaatacgggctgccgaaatatatagctatatccgactatcttttccatcggctcaaccagctaaatatacatacgatatttgggctttctggagaatacagcatgccattgttggacaaactatacgatattccaaacttacgatgggctggtaattctaatgagctgaatgctgcttatgcagcagacggatactcacgactcaaaggtctgggatgtcttataacaacttttggagtaggtgaattatcggcaatcaatggcgtagctggatcttatgctgagcatgtcggaatacttcatattgtgggtatgccgcccacaagtgcacaaacgaagcaattacttctgcatcacactctaggaaatggagatttcaccgttttccatagaatagccagtgacgtggcatgttatacaactctgattgttgactctgacttgtgcgccgacgaagtcgataaatgtataaaaatggcttggattgaacagagacccgtatacatgggtatgcctgttaaccaggtgaacctcccgattgaatcggacagactgaacactccgttggatttacagttgcataaaaacgatccagatgtagagaaagaggtcataactcgaatattgagttttatatacaaaagtaagaaccctgcaatcatagtagacgcatgtacaagtagacagaatttaatcgaggaggctaaagaactttgcagtagactcaaattccccatttttgttactcctatgggtaaaggcactgtagatgaaacagacccgcaatttgggggcgtattcacaggatccatatctgctccggaagtgagggaagtagttgattttgctgatttcattatcgtgataggttgtatgctttccgaattcagcacgtcaactttccatttccaatacaaaactaaaaattgtgcactactatattcgacgtctgttaaactgaagaatgctacatatcccgacctaagcgtcaaaatactgctacaaaaactattggcaaccttggacgagtccaaactctcgtacaggccagatgaacaacccagcatgatggttccaagaccttatccagctggcaatgttcttttgagacaggaatgggtttggaatgaaatatcccgttggtttcaaccaggcgacataattataacagaaactggtgcctccgcgtttggtgtcaaccaaaccaggtttccagtaaatacactgggcatatcacaggcactttggggatctgtcggttatacgatgggggcttgtttgggagcagagtttgcagtccaggaaatcaatagagataagttccccgcaaccaaacatagggttgttctatttatgggggatggtgcttttcaattaacggttcaagagttatctacaattgttaaatggggactgacaccttatattttngtgatgaacaatcaaggttactctgtcgat

SEQ ID NO: 3677 - DNA, 90 bp, Saccharomyces pastorianus
tcacagtcggatgcgagttattatgatattcagccttggagctacttaggattactccgggtatttggttgtaccaattacgaaacctaa

SEQ ID NO: 3678 - DNA, 1128 bp, Saccharomyces pastorianus
atggatatggaaacgtatactaacaaatctttagttcataaaacggtctataaacacgagcacaatgccgacgccgacaaaaagaacagcgaagaaaccgtagatattagttatcctgccgtagaggtggtcggccatggttcgttcggcgttgtggttaccactgtgttacaggaggctaatcaaaaagtggctataaaaaaagtgttgcaagataaaagatataaaaatagagaacttgaaactatgaaattattgaatcacccaaacacaataggcctaaaatactacttttacgaaaaggatgaagaagacgaagtctacctcaatttgattttagactacatgcctcaatcgctgtaccaaaggcttcgtcattttgtccatttgaaaacacagatgccacgtctagagattaaattctatgcgtatcaactgttcaaagctttgaattacttgcacaatgtttcccaaatatgccatagagacataaaaccacaaaatgtactagtggaccccaaaacattctcattgaaaatctgcgattttggtagtgccaaaagtctgaaaccagatcaacccaatgtgtcttacatctgttcgaggtactatagagctcctgaattaatgttcggtgccaccgattactcaaaccaaatcgacgtatggtcaagcgcttgtgtcatcgccgaattgctcctaggtaagcccttattccccggcgaaagtggcatagatcagttggtagaggttatcaagataatgggcatacccacaaaggacgaaatctcaggaatgaatccaaactataaagaccatattttccccaacgttaagcccgtaactttggctcgactgttaaagggcgaagactccgatgctcttgaattgctatcaaaggccctcaggtatgaccctcgcgcaagattacctcctctacagtgtctactactaaagtattttgacgaaatcaaaagccgcggcaccgaagcttacgtaaaagcacaatgcttgcgtatatttgacttcgatgtgcaaacagaattaggccatgtgccacctgctgaattgtctaccatcgaagtagcgttaaaacagcccgtttcccaagcttcaacgtccttatga

SEQ ID NO: 3679 - DNA, 483 bp, Saccharomyces pastorianus
atggctgctgttttgaagagtttggtgcggaaaatttcctttggcaattcagatagcttgcagctgaaacataagacttctatacagagcgacacgagcaacaccgggctagaaaagaagaagaggaaggctggaaaagagcccaacaagatcacagtgcaccataggatatctaactgcaataacagcgccgagtatatcagcgacatagagaatcatataatatcgaagttactagacaccggtagaaaaggcgtcactgttgaccatattgaatacgtcgatgttccggatatcaaagcatatggaaaaaacattaaacaagaaaacatcagtaccaagcttgacaagaagaggatagatagaatgataaatttcgattatagatatgttaaatccaagcaaagaacacgtatgtatcactccgtttataggcttatgcttatgctttcgttagaggaagaagtgtcacggccaagataa

SEQ ID NO: 3680 - DNA, 213 bp, Saccharomyces pastorianus
atgggtactgaagatgtccgtctagccccagaattgaaccaagctatctggaagagaggtgtcaagggtgttgaatacagattaagattgagaatctctagaaagagaaacgaagaagaagacgccaagaacccattgttctcttacgtcgaacctgtcttagttgcctctgctaagggtctacaaaccgttgttgtcgaagaagatgcttaa

SEQ ID NO: 3681 - DNA, 477 bp, Saccharomyces pastorianus
atggttgaaaaaatagatattgcgaacatgaaatgggggaccatccacggaggcagtaagtacatgaagcctctccccgttccgaaggacatgatagttgttaattccggtaaaaatgaaattgagacgaatgacctcattttagctgatggcaaggatctggatattgaattaccggtacctgactttagtatatttggtgagcgtaaggaacatgagcacgaaacaccagtgaaaagtgctccaaatttggaagagtcggaaggttgcagcgaggaggatattgtggtttggaaacagaatcaagagatgaggttgaggacgagaatacaaaaaatttgtgttgtcattgagacgttcaatgctacagtaagagaatatttcgatttttctaacagattggagcatgaaagtatatttatagatttcgaagttagaaagcctagtagcaatagttctattaacattaaagtctga

SEQ ID NO: 3682 - DNA, 684 bp, Saccharomyces pastorianus
atgttacgtacacaggcgtttgtaactgttcgatcctatgtgatgcataggaatggctctaccaagatcataaacacagtaacaaagaaaaatgttgcgagggtggagaaattatgccatgtttttcaagtcgatcataatgatgatggaggaaagatacgcttgccgactaaagagttaaccaaactgctgtacactacaaaccgggatttgcaggtccaagtaactataagtggggacaccagtacgaataatgattttcgaaccagcaatgagattctacaaaaattaggcgagcaattaatcaacctggaaatcaacaagttgctgacaataacgtttacaaactttaatcagtttaatgtaatgaacaagaatttcaactacattcacaatttggaacgacgtcgaatagtgaattcaagctccataagttggctaattaacgattccttgaaaatcaatcaactggcccatttgcgaatacccgttaagctacccaaggaaatgggactgaattccagttcaaaagatttccagaacctaaatgattggaaggtgatattatcgtttgtcggttatctgaaactattagacaataagaacaatagcaaaatgtttgttgattcaattataaaaattatatgtttacctctgatcaatttccatttgggtaatttatag

SEQ ID NO: 3683 - DNA, 1029 bp, Saccharomyces pastorianus
atgagtggtaacgagcacgatgattttgatgacttggatgaccttttggatgaagacccaagcaaactagatgaattcgatccggaaaatcaacaaacagaacaatatgtgggcaacgacagtggaaacaaagaaagaagcgccagagataaaggtggtgatagttcaggggcaggtaatacgtctgaagaagatccggaattgaaagaaatgatgacagatttacaacatgaatttgcaaatttaatgaaacaaaatggtaatgagaattatgccaagacagaagactttaacaagctagtgagtgctctagaggaggctaccaagattcctcgtgaaggctctgatttggcttctaatgatttgaaaaccgataataatgttaaggggtctgtcagtggaaacagtccagggttcaaaagcatcatctcaaatacactggataggctaaaagacaacggtaataaagtagacacatcactagcagaagaaagtaaagaatccaaacgcagtggtcaaaacagtaatgtagatgacatattgtcacaattgctagaccaaatggttgcatccggaggaaatgacaatggagatgatcaatttgacgtaaaggacggcgaaatggatgatgcgataacgaagatacttgatcaaatgacgtcgaaggaagtgctgtatgaacccatgaaggagatgcgtagtgaatttgggacatggtttcaagaaaacggcgaaaatgaagaacataaggagaagatagatgtttacaagagacaatttgatatagtaaagcaaattgtaggtatttacgagttaaaggattatgaagaattaaagcataaagatcgtgttaccgaattgctagacgaactagaacaattgggtgataaccctattagaagtggaaacagtcttttaaagagtgggaacgaagaggaggatctcatgaaaatgttagaagtcgatggcaatgatcctaatttggggaacctcgataaggaattggctgatggttgtaaacagcaataa

SEQ ID NO: 3684 - DNA, 369 bp, Saccharomyces pastorianus
atggacttacaaaaatgggaggctggtattccgggtagagaagctacaaattgggcaggtggtgtatacccgattacagtagaatatccaaacgaatatccgtcaaaacctccaaaggttaagtttccggctggattttatcatccaaatgtgtacccaagtggcacgatttgtttaagtatcctaaatgaagatcaggactggaggcctgctattacactgaaacaaattgttcttggggttcaggatcttttggactctccaaatccaaactcccctgctcaagaacctgcatggagatcgttttcgagaaacaaaacggaatatgacaagaaagttttgcttcaagccaaacagtactctaaatag

SEQ ID NO: 3685 - DNA, 1851 bp, Saccharomyces pastorianus
atgggtagatcaaagaaaagatcaagagcttcctcgtctcgtctgaatccgctacgcaaagctggttcaaacggcgacaataaagacgccaatgtcgttaacaaaaagcttcagcctttactgcaaaacttatcgagtgtggtgccaaatgacagaagtgtggctttaagctccattagtgttctctgtgaagacagtcacatgagacaattgctactgaaggaaaaattggtgcatatcatcttgagtaaactattgaacgattctaattcagatatagttgtggagtcttttggtttactaagaaacttatccttggaagaaggctatgatgtgtcgatctacctgtggagatctgacatatggacaagtatatcaagtaactttgttaaaataattgattctctatcagctttgcaagcagcggaacagcaaacccaatcaaaacctgcagggaaggccaaaatagaatctaaaaggctattattcgatttcactgataatttgctatctctggtggtggctttatctaatgggtccgataatatcctcgacgaattattgaacgaaaataaaataagcggaatcttccaagtcattttagaattattgaaatacggtgtcgagaaattacctgtcaatttatacaataccattcttgatctgatttacgatttaagttccgaatcattcgagtttatcgatcaggtctctcacaataagcacatatcgcagtttttaaatgagttgtcttcagactctcatcctcaaaccaacgaattaaccaaggtgttgattgagggtatcaatttccagttccttgatacgaaaataacatatgatcaatgtaataaaatgatccactctgtgtgtcattccattaataacattgatccagtacagttgatgaatgatatcaataaccctgaggaaattgcgccagccacaaataaagatgaaaccagtaaagttatagagaagatcaagaactataatgcaaagcgtaacgaatccatgatgaaattgcagagtgttgaaattgccattgatcttattactgcaatcattgaattgattgcatccaaatatgaaacggcgcaaccgaatgaggccgtgattccagacgagctggtcaatactctaacaaattttttgcctcatgtctttatgattttaaaggatactttcacgtcacgaatattaatcggttggaataacctgatctggctgtatgttacactatcattaacagaactctcagaggacctgctcgcctcactatggagttatgtgacacaattagatagccaagatgacttgagtattaaaattggtagaatgggctgtatctgggctgttttgaagctcatctcctctaacggagctgctgaaggcggaaatcaagtattgaatatttttcaaatgcttaataatatagaattcgtgaagggaatcataagtgaactccaaaacaatgaagacttggaactaaagcaaaagtgtattaacgtattaagtacatatgctatggtacaggggcaaattgaaataaacaaggaaatcggtcaattcttcatacagaagttaacccaatcaaacgtccaacctgaaattttggtggaaatgacaaactcgcttttccaaatttacggcgatgcatcttacgattataatgaaccaatattcgtgggcggcgaatttttatcgatcttaaaagaccaagtagtaccaaacttgagacagcagtttaagatggttgataaaaacaaagaccccgagttaaaggaaaggtgtcatgattgtttcatcacgctagatagttttattcattacaagactgatgaaaattga

SEQ ID NO: 3686 - DNA, 243 bp, Saccharomyces pastorianus
atgtataataggtcgaagaaggaagccgttggcgatgcgctaaagaaggccttgttgagctttgaaaaaattatactcgattacgagaccaagattacaaacaactactatgtcgatggtttatatggttcgaaaaaaattaaaaaagaaactaacaacagttttaacttgagaccgataagcaatagcaagccggctctgatcaagttggaggataccaaaccatcaataggaaataagtaa

SEQ ID NO: 3687 - DNA, 483 bp, Saccharomyces pastorianus
atgacggtgcacgcgaagtctagttcaaccatatcatatgattcgactgtgtacggcacagctgcgggcttggatatcaaggatttccagaccgtcgaggattggaatggcaggcccgctagtgcttggtcggtgcagagaataggactgttgcagtctaagattgaaaggtacacttacaacatttatcacagtaatagatacgggaagcacaatttgtctaagctaatagcgggtcacgttctcatacagttcgccaacgagaccttcgggtatgatggctggcaaatggacgttatagacgtcgaggcccgtgaatgccagccctttactgcagtaaataatgatgataacaccgatacagatgacgtgaagtacacggtggtggcggaagctcaggtaaagattactcttaaggatggcacaaatacgcagtgtggtgggctcggtagaatcacttggcttcgaaaggtgaatgtataa

SEQ ID NO: 3688 - DNA, 1443 bp, Saccharomyces pastorianus
atgacccacagcagtgtcagcagcgtcagcagcgtcatgtccaatgaggttttgaaaccggaaactccccagggcccaataataatcggtaagaacacatcgaccggcgttttctatggaccgtcctttactaaacgagagtcactgaatgctagaatgtttctaaaatactacggtgcacatgaattcttggacacttatttgcccgaagagttgaactctttatacgtttactatttgatcaagttgctgggtttcgaagtcaaagatcaagccctaataaggaacatcaacactattgttcatacaagcacaccggaaaatatacaggattcagaaaatacaatatccgctaccaatgttgaagatcccttagcaaaaaagcaaacagttcgtctaatcaaagatttacaaagagccattaataaagtcttatgtacaagattgagattgtccaattttttcactattgatcattttattcaaaaattacataccgctaaaagaattttagtcctgacaggtgcaggtgtttctacttcattggggatccctgactttagatcttctgaagggttctattcgaaaatcaagcatctggggctcgatgatcctcaagatgttttcaactacaatatatttatgcatgatccttccattttttataacattgcaaatatggttctacctccagaaaacatttattctcccttacatagctttattaagatgctacaaacaaaggggaaattactgaggaattatactcaaaacattgacaacttggaatcttacgcgggtataaatgctgatagattggtccaatgtcatggttcttttgccactgccacatgtgttacttgtcattggaatctacctggcgagagaattttcaataaaattagaaacctcgagcttccattatgcccgtattgctataagaaaaggagagaatacttcccagaaggatataacagtacctccgattccaataaaattagtgggacaggaacgcaagattctgccctagcaaggccctcgtatatactaaactcatatggtgtcctgaagcccgatatcacgttttttggagaagctttgccaaacaaatttcacaagagcatccgtgaagatattttgcaatgcgatttattgatttgcattgggacaagtttgaaagtggcgccagtatccgaaattgttaatatgatcccagcgcacgtgccccaggtcttgatcaaccgcgatcctgtcaagcacgcagaattcgatctatcgctcttggggtattgtgatgatattgcagctatggtagcacagagatgtggttgggcaattccccataagaaatggaacgatttgaaaactaagaaatttgactgtcgggagaaggataaagggttatacgtcattacatcagatgaacatccaggcaatttgtaa

SEQ ID NO: 3689 - DNA, 1440 bp, Saccharomyces pastorianus
atgtatcgtacagccacttcaagtgacttcaccacttcagttgatgtaaccagctctgtcgcttccaccacttcagttgatgtaaccagctctgtcgcttccaccacttcagttgatgtaaccagctctgtcgcttccaccacttcagctgacgcgactggtccaatcacttctgcccaaactagatcaactgacgcaaccagttcagctgctcaaacgacttcagctgttaaaaccagttcgatttcttcaattactttgactgattcagctagctcagtttccccaattagatcagttgagtcaaccacaactcttcatgcaagtatttcaactgtctcaaccacctctgttacattaaccagttcagtcatcccattggccacatctaacgtaactggttcaactgctttaacgagttcagctaatccagatgcttcatctagtccaacaactacggttggttcaaccattttgactgactcaagcgcttcagctggctcatccactttggtcgcctcatccactactagtgatttgattgcatcagctcatacaacgtcttctactggacaaactacgttagtcaacctattaacttcaatcgcttcaaccgcttcagttcacccaactgcatcaaatgatctaagctcttctgttggatccacttcttccaccggaaaggttaacccaacaaaatctactacagcagcaagcacaagaagtacagttaagcctaatatatcaagcgttaagagcaactctgagacacaatacagatccagcaactcagcttctgaaatcagtgcaactcgctctactgaatctgcctcctatacaactaccatttcggtagatcagactagtctacttactgaaactgttttggttggttgctcttcctcaactcatccaatcgcttctgctgaccgtacctcgattaaaccaagcatttctactatctctagcggatcagctgctcattctacaacattattaacctcaaacattaacacgaactctgttttgacaaactcgaacagtttaagtcattctggcactactgttgtagggggatcaacactttcaacttctcttacatcgacagctactactaccaaagctcaaacaactaaatcttctcctgtcataaatgtcaattttgaagggagtgtctccgcggcagtttctctagagagtgcttctggcgattcaaccaaaacagaatccagccagaacaaatccattcattcaaccaaatccattacgaccactacttctaacgcatttgtgacatctaagaatcccctcaccgtcatttcaaccagcgcagccagaccatctatcactgtctcatcaatgatggaaggcaacgcaaacgtccaggtagtaggaaaactgatgtggcttgccgccgctcttcctttagccttggtctaa

SEQ ID NO: 3690 - DNA, 1212 bp, Saccharomyces pastorianus
atgccaaacttccaaatccaattcgaatatatgcaaggtaatgccgctcaatactggcaaacttggcaatggggtaccaccacttttgatttatcgacaggttgtaacaactatgataaccaaggtcactcacaaacagatttcccagggttttattggacctatcaatgtaagggaaatacagatggtacatgcacgaaagcctcgtcttccactaaaagcacatctaccaccaccagctccattactactagctccacttcaagcagccattcttctagcgaatatacattgcaaagtacagaagcaaccacttcgagtgatgcgaccacttcagtcgcgttgactagttctgttgactcaaccacttcagttggtccaaatgcttcgtctagtttagccgctatgtatcgtacaactacttcgagtgatgcaaccacttcaagtgatgtaaccacttccattgctcaaactagttcaactgaagcaaccacttcaagcgatgtaaccacttccattgctcaaactagttcaactgaagcaaccacttcaagcgatgtaaccacttccactgctcaaactagttcaagtgaagcaatcactccctttactcaaacattctcaattgacacaaccagttcagtttctcaaaccagctcagtcggtccaaatgtttcgtccagtttagccgctatgtatcgtactactacctcgagtgacgcaaccagctcagttgctcaaactagttcaactgacgcaaccagctcagtcgttccaaccagttcaactgatgcaaccagttcaactgaagcaaccagttcaactgctccaaccagttcaactgacgcaaccagctcaaccagctcaactacttcaactgctccaaccagttcaactgacgcaaccacttccattgctcaaactatttcaactgatggaaccagctcagtcgctcaaactagttcaaccatcttcaccagttcatttgtttcatctaacctaagcacttcagctggtttgactactttagttgctccaacaacttcaatgtactcaagtttgatttcttcaaccacctcaaacgatgtaaccacttcagttactccaaccacttcaagtgatgcaatcacttcacctaatccaactacttcaagtgatgtgaccacttccgttgctcaagccagttcagctgctctaaaccagttcaactga

SEQ ID NO: 3691 - DNA, 222 bp, Saccharomyces pastorianus
atgaaggcacctaaaatgcccgataaacatagagacaattactacacccaaaagaagaaagttgaaaaggctcttcaaagtggtgttaacgtaaggggctataacaatgctccaggtttaagaagtgaattgaaatccactgatcaaattagaaaagatagagctgccgcagagaaaaaacgtgcaaagaatgctcgtcctactaaaaagcgtaaattttag

SEQ ID NO: 3692 - DNA, 2691 bp, Saccharomyces pastorianus
atggcaggcgtacagaaaaggagaagagatcttggagaccaagacggtagcggaagtgaagaagaagacgacgccgccttcgacattgccaacgatatcgctttgaatgccagtgaaagtgattctgatgattccggcagtgaggaagaagctgattatggcctcggtggtgtccaagatgtcatcgagtatagctcagacgaagaggagaaggaaaagaataagaagaagaccgatgccaagaataccaagaaaagcaaggaaggtaataagaccaagactacgaccaagactaagaatggtaaaaaagaaacagcagcatttccaacattggaactttcagacgatgaaaacagtgcacctggtaaaaatcaagccgatgatgatgaggatgatgtcaatgaatatttctctaccacgaatttggaaaagtcaaagcacaaaaagggcagtttccccagttttggtttgtctaaaatagtgttgaacaacattaagagaaaggggttccgtcaacctacacccattcaaagaaaaactatcccattgattttacaaagtagagatatcgtcggtatggcacgtaccggttccggtaaaacagcagcattcatcttgcccatgatagaaaaactgaagagccattctggtaaaatcggtgctcgtgctgtgattctgtcgccttccagagagttggccatgcaaacgttcaatgtcttcaaagacttcgctaagggtacagcgttaagaagtgttctcttgaccggtggtgactccttggaagagcaatttagcatgatgatgtccaatccggatgtgatcatcgctactcctggtagattcctgcatttgaaggtcgaaatgaacctcgatttgaagagtgtagaatatgtcgtttttgatgaggctgatagactttttgaaatggggtttcaagaacaattaaatgaattactggcatccttgcctacaacaagacaaactttgttgttttctgcaaccttgcccaactctttggttgattttgttaaggccggtttagttaacccagttttagttcgtttagatactgaaacaaaagtttctgaaaatttggaaatgctattcgtctccacgaaaaatgacgatagagaagctaatctactatacattttgcaagaggttataaagattccattggcaacgagtgagcaattgcaaaaacttcaaaagagtaacaatgaagcagccgacagtgaatcagatgatgaaaatgaccgtcaaaaaaagaggaagaatttcaagagggaaaagttccgtaaacaaagaatgcctggtggtaacgaattgccttctgaaaaggcaactattttgtttgttccaacccgacaccatgtggaatatatctctcaattgttaagggattgtggatttttgatctcgtatatttacggtactttggatcaacatgctcgtaaacgtcaattatataactttagagcaggtctgacttccatcttggttgttacagatgttgctgccagaggtgttgatatcccaatgttggctaacgtcattaactacacactacctggttcatcgaaaatctttgttcatcgtgtcggtagaaccgcaagagctggtaacaaaggttgggcgtattctattgtggcagaaaacgaactaccttatttactagatttggaattatttttgggtaaaaagattcttctggcacctatgtacgattccctcgcagccttgatgaagaaaagatgggtggatgaaggtaaaccggaatatacattccaaccgccaagtctttcttacacaaagagacttgtcttgggtgcatgtcctagattggacgtggaaggattaggagatctttataaaaatttgatgacttctaatttcgacttgcagttggccaggaaaactgcgctgaaggcagaacaattatactacaggactcgtactgccgcatcacctgaatccttgaagagaagtaaggagattattgcatctggctgggatgctcaaaatgcatattttggtaagaacgaagaaaaagaaaagttggatttcttggctaagttgcaaaacagaagaaacaaagaaactgtgtttgaattcacaagaaacccagatgacgagatgtctgtgttgatgaaaagaagaagaagacaactggccccaattcaacgaaagtcccgtgaaagaagggaactattagaaaaggaaagaatggctggtctttcacattctattgaagatgaaattcttaagggtaatgatggtgagactggttacacgatatccgaagatgctttaaaagaattcgaagacgcagaccaattattggaggcacaagaaaacgacagtaagaagaaaaataagccaaagacgttcaaagatccatctttcttcttgagtcattatgcgccagctggtgaaatacaggacaaacaattgcagataactggtgggtttgcaaatgatgctgcacatgctgcttacgatctgaacagcgacgataaggtgcaagttcacaaacaaacagctactgtgaaatgggataaaaaaagaaagaagtatgttacactcaaggtattgataacaagaaatacatcattggtgaaagtggtcaaaagatcgcggcaagtttcagatctggtagattcgatgattggtcaaaggcaagaaacttaa

SEQ ID NO: 3693 - DNA, 1197 bp, Saccharomyces pastorianus
atgaatctaaagagaggcagatatgcactattctcttcttctgctgaaccatcgaagcgcaccaacattctttctgaaagagccagggacatagatttgaataggttgtttaccagagacgagcaatatggtgaatatatggagctagaacaattccattctttatggttgaatgtgattaaacgaggcgattgttctttgctccaatttctcgacaccgtggaattatttgtagatgatgaaaaatatttgctagtaccaccgatggatcgtaaaaatgatagatatatgtccttcttgataaagttaagcgaatacgtggaagacttttttcataaaagttacgttttgttcgagaaagaagtagtagaaggtttaatcaagtccgactttgagaattcatactgtagaggatttttgaaatctgaatcaaaggggatttattgtcctctttgttataagtggttcaagacacaggctgttttcgaaaaccatataccagggaaaacccataagaagaatgaagccaaaagaaaaagggccgtatactctgaatacaaattgcatcgatacttgagacttcttaaggatgaactgttccatacgaaaagtttcgtggaaagaaagctggcattcacagcgaatgaaagaatggtggaaatgaatggtctaacgcagaaatatgaagcacccgcatacgatgtaactgaaagggagggtgatgggcaaggtggtgacgagcaaaaagacgataagctacaaggaaagcatatgttcggtaaatcctttgatatgccactaggccccgacggattgcctatgccatactggctatataaactacatgggcttgacagagagtacctttgtgaaatctgcgggaataaaacctataatgggcggcggacttttgaaaggcatttcaatgaagagacacatctttaccacttgcgatgcctgggtatcgaaccctcctcaatcttcaaaggcataacaaagattgcagaagcacaaaagctttggaacaatacaccaaggcagccacaattcgtaacctcgacagcagccgtaccagcagataaaaagctttcgcagacaaaacttcccgttgaaatggaactggaagaagaggacgaacaggggaatgtgatgagcaagaaggtgtatgatgagctcaaaaagcaaggcctggtgtga

SEQ ID NO: 3694 - DNA, 369 bp, Saccharomyces pastorianus
atggatattttagagacgaaaagatctttgttggaagacttggaaattattgagaatgccataacagaaagaattcaacggaatccggagttgtattaccattatatattggaagcaggcaagctgtttcccgatgttaaacaacccaggtcttcgttggtttctgagaacaaaatttataaactgaaaaaggacaagagaaatagaaagcaggtaattttacaacagcatgagatagatctttttcttcgagactataaagagaaacaaaagttagccaatgaaataaagatccgcaagacgttcaggaggatgacaaagatttgcgtggttttgaacaaaagttacaagaacttgaagaagaactga

SEQ ID NO: 3695 - DNA, 1014 bp, Saccharomyces pastorianus
atgattggtgatgaggcaagcgacgttcgttcctatctacaaatttcttatcccatggaaaatggtatcattaagaactggacagatatggagcttctttgggattatgcctttttcgaacagatgaaattaccatccacttctaacggtaagattttattaacggaaccaccaatgaatccattgaaaaatagggaaaagatgtgcgaagtgatgtttgaaaagtacgatttcggtggagtttacgttgctatccaggccgttctggcattatacgcacaagggttgtcgtcaggggttgttgttgattctggtgacggtgtcacccatatagttccagtttatgaatccgttgtgttgaatcatctgacaaggagattagatgttgcaggtagagacgtcactagacacctaattgatctactctctcgtcgtggttacgccttcaacagaaccgctgattttgagactgttcgtcaaataaaggaaaaactgtgttatgtctcatatgacttagacttggatacaaaattagccagggagacaaccactcttgtggaatcgtatgagctaccagatggtaggacaatcaaagtgggtcaagaaagatttgaagctccagaatgtttattccaacctggtttggtcgacgtcgaacaaccaggtgtaggagaactactattcaataccgtgcaatcagccgacgttgacattagaagctctttgtataaggctattgtcctttcgggtggttcaagcatgtatccaggtcttccctcaaggttggaaaaagaattgaaacaactatggtttagtagagtcttgcacaatgatccttcaaggcttgataagtttaaagttagaatcgaagatccaccaaggagaaagcatatggttttcataggtggtgcggtcttggctagtatcatggctgataaggatcatatgtggttgtccaagcaagagtggcaagaaagtgggccagccgcaatgagtaaatttggtccgagatag

SEQ ID NO: 3696 - DNA, 333 bp, Saccharomyces pastorianus
atgtttttcccagaatctagagaagaaacctactatcaagaatccgctggtgttgctgacttgatcaccacctgtgccggtggtagaaacgtcaaggttgctagattaatggctacttctggtaaggatgcctgggagtgtgaaaaagagttgttgaacggccaatccgctcaaggtttgatcacctgtaaggaagtccacgaatggttagaaacctgtgggtccgttgaagatttcccattgttcgaagccgtctaccaaatcgtttacaacaactacccaatgaagaacctgccggatatgattgaagaattagatctacacggagaatag

SEQ ID NO: 3697 - DNA, 585 bp, Saccharomyces pastorianus
atgtctgctgctgctgatagattaaacttaacctctggccatttgaacgccggtagaaagagaagttcttcttctgtttctttgaaggccgctgaaaagcctttcaaggtcaccgtcattggttccggtaactggggtaccaccattgcaaaggtcgttgctgaaaactgtaagggttacccagaggttttcgctccagaagttcaaatgtgggtgtttgaagaagacattaacggtgaaaaacttaccgaaatcataaataccagacaccaaaacgtcaagtacctgccaaatatcactcttccagacaacctggtcgccaacccagatttgattgactccgttaaggacgtcgacattctagtgttcaacatcccacatcaatttttgccacgtatctgtggccaattgaagggtcacgtcagctctcacgtcagagctatctcctgtttgaagggtttcgaagtcggtgccaagggtgtccaattgttgtcctcttacatcaccgaaaacctaggcatccaatgtggtgctttatccggtgctaacattgccaccagaggtcgaccaagaacattggtctga

SEQ ID NO: 3698 - DNA, 222 bp, Saccharomyces pastorianus
atgtgtagacaagtgttccagctgcaaaaaggtttagcaatcaacgatgcgcatatcagaaaattcgttgaggtagtttcaagaagaagagaagagatgatagaagagggcgtggcggaagattttgtggacttcgatgaaccgatacggcaaaatacagatagcgcaatagacagagaacaagttgatactgttctggatgaagactttttgttacggtaa

SEQ ID NO: 3699 - DNA, 129 bp, Saccharomyces pastorianus
atgctgaaggaacaactgggccactcccatgaggagtaccttgaattcattgttatattactggtcggtgtggaagtgctgatatcggtgataaatattgtggttgacatgttcgccagccaacgttga

SEQ ID NO: 3700 - DNA, 1044 bp, Saccharomyces pastorianus
atggtagacagcaataattaccaaccggagcgtcaggcattacttgataatgaccaacacctctcgaataatagcaaattatcttcgaatcccaaaaagtacgtacccactccgcaagatacaagaaagtctagggcttcatatacaggaagtgccatgattaatcccataagtaaacagagccgtacaggtgcaggtgcccaaagaacatcacgtacagcgcaaaaactaaaacttctgccagaagagccattccaaagagacgacgaaggacttacagacctaaagaatcaggaagtgtattcccaggtaaatagaataaaagataagcccgcgagaagagatgctgaaaagctaggaaaggctcacaggcatttgctcccaaggtctactgcatattgtacttctagcagttacaacatgaaagaactgataagatggttaaaggattctcgaaagatacatcacacccatccaaaattattcgatgaatgtttgtacaccccgtttatatacaacgactggagaggtgacaaaagatttgaacatgaagacgttattcggttagacgatgaaggtggtgaaattattgttagtgataagcacccagatttgttcatttttgaatatggggttgtcgttatgtggggattcacggaaagagaagagaaggcgtttttaaatgatatagaaaagtttgaaaaggaaaaattagctgaagaagatattcaagtagaagagtttaattattatgtgacaaaaagttatcaaccaaggatctacaatgacttcattactctgagagacggctcgaactatatggtcaagctctcaatatctcatgcaattgctcaaagtgtgaagatttctttatttgaggagttggtagataatactatcgaagatactcaggatataccgcaagaaattgcgtatagtgggaaagtttctatgagcaaagaggacataatgaaaagcataggtgagctatttatcctaagaattaacataaacttggcatggatcggttttagactcacctga

SEQ ID NO: 3701 - DNA, 651 bp, Saccharomyces pastorianus
atgataacacttttttacgagattttacaagagcagatcgaccttctcatacacaaaagagcgaatgataataatggcgatggcggagtcattattgaagatgatccattcagttcttcctcgtggaaatggggaagatggattttttttatttttttcgtaattgctatccttatactgttattttcagctgcaaaagtgaataggagaagacgaatcatgggtcaggctcccattagaggaactgcttggttaaccccgcccacatataggcaatccgaaagagactacaatggcacacagcgctgtgttgaagactacgtcccggagtatacagaaacaacgaatgaaaatgatttggggttttatgacgaacgcggggagtttcaccctaatggcaaaaccgaatatttaccgccgccgcctttatcgggagaccgagctgattcgacagacaaagatttacagcgcccaaaagctgctgtagtacgagtgtccagtgaaagtgaatttgatttgaatttaatgcgacctactatgaataatttcgatagtaatggaaatagtcgcgtcgggcagaattctccaataatcacatcgtcttcctttgacgttgattccacacctggaaggcctaaaacgactaagtga

SEQ ID NO: 3702 - DNA, 1347 bp, Saccharomyces pastorianus
atggatctttacgatgaattgccagaaagtaagctcctttatgacgaagaatacgtgtatcttttggatgcagttcaacagaacaatgtctgcgttgtagattttctaacgcttacaccaaaggaattagcaaggctagtacagaggtcaataaatgaagtcttcagatttcagcaattgcttgtccatgcgtataatgaaaaatacctagaaatttgtgaaaagagctcaatcagtgcagatgaaggtccaaagtgcttttcaaccgctgatgtagcgatagatgaattgttaggtggaggaattttcacgcatggtattacagaaatatttggggagagttctaccggcaaatctcaactactaatgcagttagcgctaagtgtccagctctctgaagctactggaggccaaggcggaaaatgtgtatacatcaccacagaaggtgatttacctacccagagactggaaagtatgctatccgctaggccggattttgaaaaactaggcatttcacaatctaaaatctttacggttagttgtaacgatttaataaaccaagaacatatcattaatgttcaattacccatcttattggaaagatctaaaggctcaataaaactggttataatagattcaatatctcaccacttgagggtggaacttcaaaacaagtctttcagagaatcccagcataacaaaaactacttagacaagatggcagaaaagctgcaaactttggcccatgattattcattagccgttgtagtggctaaccaagtaggagacaaaccactaggaaatagtctggtaccgcataaggcgtatgtaactgactatgactaccagctaggttggttagtagggtggaaaaactctactattctttaccggcagatgaattcactgctgggggcaaatgccaacaacgatgaaatactttcagacgatgaagattatatgttaatcgagagagtactaaaaaatgtagatgaccgagctcataaatcttcctcacaaaagaaaggtccaatcaaaactgaaaagaaatttttcgaacaactcccacagggctttattaaccagcaaaagaaaaaaagaaagttcgactatcgtgttcctaatttaggtctgacatggtctaatcatgtatcaacacgaatattacttcaaaaatcattcaaagcttcaacaataattcagagaggcgaagctcacctttatacgggaaatgacccagcaaatttttggcaagttagaaggacactgaaagtggtatattcgacgttcgttaaacctgggcaaatggcataccaaatcactaaaagagggatagaaacagtttga

SEQ ID NO: 3703 - DNA, 720 bp, Saccharomyces pastorianus
atgagctcctcttctctagattcgtctttcaaaaatcatgagaaaatgagaagaagaagtagtagtagtatcagcagttttaaaagtggtaaatcgtcaaatcataactccaacaatgccggttcaaccaccaataatgttaacaaaagaagaaagtcttcaataaacgaacgaccaagcaacctaaatttgggtccattcggtcctataaatgaaccatcgagcaggaaaatattcgcttacttgatcgccattctgaatgcctcctatcccgatcatgatttttcatcggtagaaccaactgatttcgtcaaaacatcattgaagacatttatttccaaatttgaaaacactttgtactctcttggcaggcaaccagaagaatggatttgggaagttattaattcacatatgaccctttcagattgcgttcttttccaatattcgccttcaaactccttcttagaagatgaaccgggatatctttggaacctgataggtttcctttataacaagaaaagaaagagagttgcttatctctacttaatttgctcccgtttgaattcgaatacaagcgaagtagaagatgcttccgtcaaagaacttcagggcaaacttataatagatgatggttcaaatgaatatgaaggagaatacgattttacttatgacgagaatgtaatagacgataaatcagatcatgaagggccccttcattag

SEQ ID NO: 3704 - DNA, 813 bp, Saccharomyces pastorianus
atgtgtcgtggtggtcgtatgttcgctccaactaaaacctggagaaagtggaacgttaaggttaaccacaacgaaaagcgttacgccactgcttctgctattgctgctactgctgttgcctctttggtcttggccagaggtcacagagtcgaaaagattcctgaaattccattggttgtttcctccgatttggaatccgtccaaaagactaaggatgccattgctgctttgaaggctgttggtgctcactccgacttgttgaaggtcttgaagtccaagaaattgagagctggtcaaggtaagtacagaaacagaagatggactcaaagaagaggtccattagtcgtatacgctgaagacaacggtattgtcaaggctttgagaaacgtcccaggtgtcgaaacctctaacgttgcctctttgaacttgttgcaattggctccaggtgctcacttgggtagattcgtcatctggactgaagctgccttctccaagttggaccaagtctggggttccgaaaccgttgcctcttccaaggtcggttacactttgccatcccacatcatctccacctccgatgttaccagaatcatcaactcttctgaaatccaatctgctgttagaccagctggtcaagctacccaaaagcgtacccacgttttgaagaagaacccattgaagaacaagcaaattttgttgagaatgaacccttacgccaaggtttttgctgcagaaaagctaggttccaagaaggtcgaaaagaccggtaccaaaccagctgctgtcttcactgaaactttgaagcacgattaa

SEQ ID NO: 3705 - DNA, 570 bp, Saccharomyces pastorianus
atgcattttttatctggttttacttacataccaataaataaccaattaaacaaacaaactataatgtctcgtccacaagttactgttcactctttgaccggtgaagctactgccaatgctttgccattgccagccgtcttctccgctcctattcgtccagacattgtccacactgttttcacctctgtgaacaaaaacaagagacaagcttacgctgtctctgaaaaggccggtcaccaaacctctgctgaatcctggggtactggtcgtgctgtcgcccgtattccaagagttggtggtggtgtaccggtagatccggtcaaggtgctttcggtaacatgtgtcgtggtggtcgtatgttcgctccaactaaaacctggagaaagtggaacgttaaggttaaccacaacgaaaagcgttacgccactgcttctgctattgctgctactgctgttgcctctttggtcttggccagaggtcacagagtcgaaaagattcctgaaattccattggttgtttcctccgatttggaatccgtccaaaagactaaggatgccattgctgctttga

SEQ ID NO: 3706 - DNA, 345 bp, Saccharomyces pastorianus
atgttaagacaaaggagtggtgaaggggagaagcgtgtggcaatatatcggttaattatggctagtacgtctagtgaggaaaacaaaacaatgtcgaccactgacgaatttttcatagaacaaaggaatatagtgttgcaagagatcaatgagacgatgagttcaatcctaaacggtttaaatggtctgaatatttccttggaaagttcaatcgctgtggggagagaatttcagtccgtttcggatttatggaagacattttatgacgggctggaaagtatatctgatgaagtgcccattgacgagcaatctactttacctcaaacgaagacaacgactaaatga

SEQ ID NO: 3707 - DNA, 1230 bp, Saccharomyces pastorianus
atgcttcacagctcaggagatatgaagcaaacacaaacacaacagtatcatgacatttatcacaagactaataatgccgttatcaaggtgttacagagagcgtttatcatatgtttctttcttttgggatctttgagtatcgtaatcttccaggtttgtttgcatttgcttctaccctggagtaagatcagattacagaatggcatgaaccagagcaagaaagcgttcatcgttttgctgtgcttgattttaaacatggtggctccctcctctttgaatgtcactttcgaaacatcacaatcatcgaagagttcctcacctagcgccaattcgcgtttcaaattcaaagataaggccattatcatggctaaccatcagatgtatgcagattggatatatctctggtggctttcatttgtctcagacctaggtggtaatgtctttatcattttaaagaaaactttaaaatacgtcccgatattggggtttggcatgcaaaacttcaaattcatattcttaaatagaaactggcaaagggatgaaacaaccctaactgatagtttagtttccatggacctgaatgcaaggtgcaaggggcccctatcgaattataaggcttgctactccgagacaaatgcatccattgcagcctataatttaataatgtttcctgagggtacgaacataagccccaatacgagagaaagaagcgaagcataccgtcaaagagcccgcttgcaccacgttcacttgagacatgttttgctaccacatgctaaagggttgaaatttgcactagaaaagctggctcctagtttagatgctatctacgatgtcaccattggttattttccggtcctgaagactgaatacgctggcaccaaatttactctaaaaaaaattcttttgatgggtatataccctgagagaatagctttccatataagagaatttgagatcaacgagatccccttgcaagatgacgaggttttcttcaattggttactggatgtgtggaaggataaggacgaattacttgaaaactactacaattcaggccagttcaagagcctcaacgaaaataagaactcgtccgctgtcgttgttaagcaaacagacggattccaacacgatgcgctagtaccccggatcctttcctactacggtatgctggctttccttgtgttcctatttgcgatgaaaaggctctccgagctaccagtaagctag

SEQ ID NO: 3708 - DNA, 234 bp, Saccharomyces pastorianus
atgcaccgtactattgtcatcagaagagcttacttgcactacattccaaagtacaacagatacgaaaagagacacaagaacgtcccagttcacgtttccccagctttccgtgtccaagtcggtgacattgttaccgtcggtcaatgtagaccaatctccaagactgttagattcaacgtcgtcaaggtctctgctgctactggtaaggctaacaaacaatttgctaagttttaa

SEQ ID NO: 3709 - DNA, 129 bp, Saccharomyces pastorianus
atgggggtgtgtcgacagagtgtttattttttttcgttgccctatttacctcgtgttcttctgtctttgtcttgcaaaaggttgttgcacaatctcagggttggttcctttcttcaatatccagtatga

SEQ ID NO: 3710 - DNA, 366 bp, Saccharomyces pastorianus
atgtctgacgttttagacgagattgtaatagaagacgttgtggcaaattgcccacaggagtttttgcagtatcacaagtgtataagggataatgaggataatcctgggaaatgccaagatggaagattgacgctatcgacgtgtatcagagagaaagtgcccagtgtgaaaagtatcatgagtgaatgtagtgagccaatgaagaaatacgaccagtgtattcgcgataatatgggaagtagaacaattaatgagaattgcttaggtttcttacaagatttaaggaaatgtgcagaattgcaagttgaaaacaaaaacatcaagcctacgattaacggaacgagcttggaattaattaagaaataa

SEQ ID NO: 3711 - DNA, 2919 bp, Saccharomyces pastorianus
atgaactctttgaaaacattgagctctcccaatgcacatattatcagaaacgggaaaagtgaaaccgtgaattcaaaaactgtagttcctggtgacatttgtcttgttaaagtaggtgacaccattcctgctgatttacggttgattgaaactaagaatttcgatactgacgaatccttgttaaccggtgagtcactaccggtatccaaagatgccgctttggtttttggtaaggaagatgagacttccgtaggtgaccgtttaaatttagcattttcttcttccactgtggtcaaaggaagagccaaaggtatcgtcatcaagacaggtttgaatagtgaaattggtaaaatcgcgaagtcattgcaaggcggtacgggtctcatctcccacgaccccagtaaatcctggctacaaaatggatgggtatccactaggagagtcattggcgcgtttttaggtactacagtcggcacccccttgcatcgaaagctatccaaattggcagtgctgctttttgggattgccgtgctttttgcaatcattgtcatggcctctcaaaagtttaatgttgatagaaacatagctgtctatgccatctgtgtggccctgtccatgattccttcttctttggtcgtagttttgacaatcactatgtccgttggggcaactgtaatggtcactagacatgtcattgtcagaaagttagactctttagaagctttaggtgctgttaatgatatctgctctgataagactggtactctgactcaggggaaaatgctggcaagacagatctggatcccctcctttggtactattactatttcaaacactagtgatccgtttgaccctagccaaggcgatgtgaatttgataccaaagctatcgccttatgaatactcccatgacgatgacggtgacgtcggaattcttcaacatttcaagcaacgtctgtacgataaagaattacctgaagaaatagacatggatctgtttcaacgttggctggagacagcaactttagctaatatcgctaccgttttcaaagacgaagagactgatacctggaaggcacatggtgatccaacagagattgcaattcaagtcttcactaccaagatggacttgcctcgtagcatccttactggtgaaacatccaccacccaagaaggtgacaagtgccaatcttcttcaaacgacattgaaaagcccggttatgtccaattcgagcatattgcggagtttccgtttgattcgaccatcaagagaatgtcgtccatctattttaacaatcacaacgatacgtacaacgtttatgccaagggtgcatttgaaagtgttatcagcagttgtagccattggtatggaaacgatggctcgaaaattacaccattgaccgaccatgacatcgaaactataaggaaaaacgtttatagtttatcaaatgaaggtttaagggttttaggttttgcttccaaatcgtttacaaaagatcaattaattcacgaccaactggcaaacataacttcggacagagctactgcagaaagtgatcttgtctttttaggtttaatcggtatctatgatccgccaagaaatgagactgccggtgcagttaaaaaattccatcaagctggtatcaatgttcacatgttaactggtgattttgttggtacggccaaagccatcgcccaagaagtgggtattttgccaactaacttataccactattctcaagaaatcgttgacagtatggtcatgactggatttcaatttgatgcattaagtgaagacgaagttgatgacctgcctgttcttcccctagttattgcccgttgctctccgcaaacaaaagtcagaatgattgaagctttacatcgtagaaagaaattctgtgccatgactggtgatggtgttaacgattctccatctttgaaaatggcgaatgtcggtattgctatgggtatcaatggctcagatgtctcaaaagaagcatccgatattgttttaagtgatgacaattttgcttccattttgaatgccgttgaagaaggtcgtagaatgacggataatatccagaaatttgttttacaattgttggcagaaaacgttgctcaggcattgtttttgatcattgggttagtgttccaagatgaaaacggtagatcggtcttccctctatcgccagtcgaagttttatgggtcattgtcgttacttcttgtttccctgctatgggattaggtttagaaaaggcagccccagacttgatggatagacctcccaatgattcagaaatgggtattttcacttgggaagttattattgatacattcgcatatggattcataatggcgggcgcttgtatggcatcattcactgcatccctttatggtattaacaatggtacattgggacacggttgtgatggttcctacagtagtatttgtcatgacgtttatagatcacgttcagcagcattcgcaaccatgacatggtgtgccttaattctcgcctgggaagtggtcgatatgagaaggtcattctttagaatgcatccagatactgacagtcccgtgaaagaattcttcaagggcatttgggataaccaatttttgttctggtcaattatatttggatttgtttcaaccttccctgtcgtctatattccagtcattaatgacaaagtatttttgcacaaaccaattggtgcagagtggggcctcgccattgcattcacgctagctttctgggtaggcgctgaactttacaaatatgggaagaggtgctatttcaaaactcaaaaggcccacaatccagaaaacgatttggagcgtagcaataaacgtgatccattcgaagcatacagcacgtccactacgatccaaagtgagcttaacatcagtatgaagcaataa

SEQ ID NO: 3712 - DNA, 300 bp, Saccharomyces pastorianus
atgagttcagacgcagttaaagatggtagtgctgagttcagtgcctaccacacactcactgcagaagaagtggcagaatttataggtacaaacttaaccaatggtctcaccgaggatgagtttgaagaaagaatgaaaacagtgggtgaaaatacgctgggcgatgatagcaagatcgattataaagcgatggttatccaccaactttgcaacgcaatgattatggttctgttaatatctatggtcatctcctttgccatgcacgactggatcgacaagcttgatccggccataaggcca

SEQ ID NO: 3713 - DNA, 1887 bp, Saccharomyces pastorianus
atggctaacgtactgaagaaaaatgacctttacatttttgatctatctaaaccgcttctaaattcgttagacttaatgagttttgattattcattacgagaaattgagatagatacagggtctcaccggaacgaggaaaagactactgaagatgtccagtcactacagcaaaagagcccatcaaactccatgcgttgtactgtttgccaagtagatttcgaatccagagatgttcaaaaggctcactaccagactgattatcacttgatgaatgtcaagcggagcctgaggggactgaatgtcttatccctgagtgaattcgatgaggtagtttctaaagaacttgacaacaaatcaaaagatgaaaatactgaaaatgaacagtcctctagtggtgaggcagacgaaagtgaagaagttagtgatcaggaatcggacgcatctgttaatgattacatggaaagcataattgaggacgatatgaaaaaactaagtcttcgagaagatgagtcgagtgttgttagtcacctcaatacacaatctccttacattttctttaaatcgagcactcttccaaaaaatgaagttctgggaatctacaaatctatattcagtaaagcatctctttcaaaaccttacgaggctttggattcttggaattcacaagaaagctcttcgatggcaatatcggccctgtttatggtgggaggtggtcattttgcaggagcgattgtttctcatcacagactcaatgtcaagggaaatgctcacaaaaagaatgaaacgttgattgagcaggctgttaatttattggagcacaagacattccataggtatactaccagaaggaagcagggtggttctcagtcggcaatggacaatgcgaaaggcaaagccaactcggcgggttctgcacttcggaggtataacgaaaccgcactaagaacagatatacaaggcgtgttgaaggactgggagccctatctgtcaaaatgtcagaacatttttattcgtgctcgtaatgttagtgacagaaaaattttcactgataataccatcttgaataaagacgacgataggattaaaagttttcctttcaccacaagtaggcccacagtattagagctgaagaaagcatggtgtgaactttgctacctgaagattttgcctaggcctgaacctttgacaataaagcaaacggtacaaaagccggaaacattgagtaaaaaagatggcgctgaagaaaagcaagagctttctacagaagaaaagcaaacagaagaagtggtttctttgataaagaaaggaagagcacctctattgattgtttttttaaagaaaaacaaacttgatgggagattccagctcaagcctgaaaccaagtactccttaactccgacgatgttgcattacgcatcgcaacagggcatgaaacaaatggtgattgttttactttccaatttaaagtgtgatcctacgatcaagaatagattgggaagaactccctgggatttgaccaaggatgatggcgtaagacacgctttccaaatcgcaagacacactttgggcgagtccttcaccaattgggacgaatctcatatcggcgaaccactaagtagagaacaggttaatgagctcaatgaattgaagcagtcgacggaaaatgaacgaactaaaaacatgatcaaagtggaattagaggctgccaaggaaagacaaagatctgccaaagatacagaaagagggccaggtaaaaagctgactagtataccatcagttcaccaacaaaatctgaattctttgacagatgaacaaagacgtagattgatgagagaacaaagggctagggctgcagaagaaaggatgaacagaagtcttgataaatag

SEQ ID NO: 3714 - DNA, 474 bp, Saccharomyces pastorianus
ttatggccggatcaagcttgtcgatcttacttccacgaagatgacaagttcgtcgctgaaaagaccaagttcgctttgggtgaaggtgtcggtgtcatcttgtgtatcggtgaaactttggaagaaaagaaggccggtaagactttggacgttgttgaaagacaattgaacgctgtcttggacgaagttaaggactggaccaatgtcgttgtcgcttacgaaccagtctgggctatcggttccggtttggctgctactccagaagatgctcaagacattcacgcttccatcagaaagttcttggcttccaagttgggtgacaaggctgctagcgaattgagaatcttatacggtggttccgctaacggtagcaatgccgttaccttcaaggacaaggctgatgtcgacggtttcttggtcggtggtgcttctttgaagccagaatttgttgatatcatcaactctagaaactaa

SEQ ID NO: 3715 - DNA, 576 bp, Saccharomyces pastorianus
atgagcaaaaacatgaagtcattgagtagactaatggttgataggaagttgggcgtaaagcaaacaaatagtaactataacacttacactaccgccgcgacaacaacaacaacaacaacaacagctacaacagcaacagccaaggaaactaaccataaatccaatgtaaatgtattgcaaaaagatgagatccgttcgcaaacgatgatcaaaggtaattccacacatacggaaaccaacaacaaagcacaggatcccccaaagaaacttgtaaagtctgcatccacgggtctaaagttcagtaatgacgtcaagataataactacggaatctacaacagcatcgaagaagaccacaacttccacacacaccacgttaaatcccagcctaaacacaacaacacagccagcgaagaaagaaacaataaaaaattcaggatactgtgaaaactgtcgtgttaaatatgaatctttagaacagcacattgtatctgagaaacatttgtcttttgctgaaaatgatctaaactttgaggccattgactctttaattgaaaatctaagattccaaatctaa

SEQ ID NO: 3716 - DNA, 120 bp, Saccharomyces pastorianus
atgaaggaaattgaagacgggaagcattcgctggaagaggaagaagtaaatagacacttcattgagaaagaatctaagaagatcctccaacggaaaaaccaattgctacaccaaagctaa

SEQ ID NO: 3717 - DNA, 396 bp, Saccharomyces pastorianus
atgatttttttccagttggtttgccattccagtaattccttaggtgtgacccttggctcgacgttttttaagcctgtacccttactcacctggacagcgccttcaatggacctggccctttctagcttagcctttttcttttcgtgtaagtgttgttgttgttgttggagctcgaggcgctcaagggaccttttcttcgggaaggattcattagtgttgttgttgccattgttatcgttagggagcgcgttcaaatgggccgttgccgttgccgttgatacaggaatgccattgttatgtttcaggttcgtgtccgtttcctttaatggagacctaatcagcatctttgttggtgataccatattctctctggtcctgtttatgaatcaaagttga

SEQ ID NO: 3718 - DNA, 609 bp, Saccharomyces pastorianus
atgttgatgcggttgttgcgagttatctcattggccggggtggtcttcggcgctgatgttttgcaattaagttattcagatgacaagaagaacactattccgttaggaacctttgaaatcgacagcacaggcagtggaaacgtcacagtcacaactgttgatttgcgagacgtccaagcggccggatcgtactgcttaaatgcagaaattgaaggtaaactagatatgccatgtttcagctacatgaaactagagacgccattaagatacgatttgattgtggatgtggacgaaaatgatgcggtcaatcaggtctctctttcatacaatgacaagaatgacgcaattgttggtgttgtaaggtacccagaggaaggggcaagtgcaccagtggctaaattaaagaaaaagaccaagacttatgctgacaagaaagctagtaatagcaaggatggaagcactgcgcaatttgaagaagatgaagaagttaaggaggtttcttggttccagaagaactggaaaatgttagttattggtttattaatctataacttcgttgcgggttccttgaagaaacaagcgcaaaccggtgaagctaagaaagactga

SEQ ID NO: 3719 - DNA, 333 bp, Saccharomyces pastorianus
atgggcccctcggactcaccttacgcaggtggcgttttcttcttgtctatccattttcccactgattatccctttaagccaccaaaagtgaactttaccaccaagatttatcatccgaatattaattcgagtggtaacatttgtctggacatcctaaaggaccagtggtctccagcgctaaccctttcaaaggttcttttgtctatttgctcccttttaacagatgctaaccctgatgatcccttggttcctgagattgctcaaatatacaaaacagataaggctaagtacgaagccactgctaaggagtggacgaagaaatatgctgtttga

SEQ ID NO: 3720 - DNA, 243 bp, Saccharomyces pastorianus
atgagaatcttgaagtctaacggtttggctccagaaattccagaagatttgtactacttgattaagaaggctgtctctgtcagaaagcatttggaaagaaacagaaaggacaaggatgctaaattcagattgattttgatcgaatctagaatccacagattggctagatattacagaaccgtctctgttctaccaccaaactggaagtacgaatccgccactgcctctgctttggttaactag

SEQ ID NO: 3721 - DNA, 606 bp, Saccharomyces pastorianus
atgcaacccatgatgtctgtgataagtattccacttatacaaaaagaaatccttcaaccacaccaactacatgaacaattgtctttgttcgaagctcaaatggttgaatcagccatagtttctatgctcagtgagtcattctgcaaaaatgagcaaaccttgaaatatttggcacggttactttcaccaatgtcatatctggatattatcaatgctaggtccgggaataaaatatgtggatacccgttatgtcatgaaaggatatcagaaaacctctctgatggtctccttacctactcgatatattgcagcaaatttcatagtaaatgctcgttgtacttgataagacaattaccacaaatacctttgaatgaaagatcaggggtgcactcaactagctactacaatccaagcttcaatgatgtttataatgttgatcttttggaagagttgattagaaataggatatctacagctacggttacatcactgactgcagatttcgagtgtcttgaagttgatgatatccacaaagatgagactacattactagatgaatattctgtgcaagtgactactgaaaagaactcatgtatgaaatactag

SEQ ID NO: 3722 - DNA, 936 bp, Saccharomyces pastorianus
atgaaatgctttggtttcgctctagggctgcaaaacatagcaggtgtctttacccatcttctcatccccatggcttcgccatggtttacccatttatacggcattaacgacactgaacacgtcaattacacccaggaaggatttgctgctggactgataagagtggacacacatctaggtacgcatttgaacaccaaggggttccacatgtcacccatcgtcttcggcgccgtcccttccttgcattccgccattgcattccaatgctttctatttttgctctcacggtccactagcttgaaacatagattctccaacataagaaatttaacggttaataacatcgattcttctaccctcaagttaaatgaggaagacgacgaagatgacgctgataacaacgcagcgggcatgttccgtcccggtgacttggagatggaaccattgagtaccattgagtctacagatatcttgaatgaacgatctccctctccctcatcttcattttctgtatctagcagtgaacgaagccctagtaacagttccagcgccgttatcagtaatgatggccataagaaatcactccagttcgtccaattatatgaagaagatacagaatttacaaacaaatgggtgttcaaaatgataaacaagggattagtaccaaaactctgtgcaatttcatatattatactacaatggtgggccaccatgtatctcgaccaccattatcgattcgatctttttatcggagtcttatatgcaatggtaagttttattattataaattggtttgttttacagccaaaagtattaaaaagttggattcacttaaggttaggtaacaaagtggatacaagaaacgaagctcgtactttcggtatgagagtcttttgtggtaccaagatggaatggttcttcgatccattggcatag

SEQ ID NO: 3723 - DNA, 462 bp, Saccharomyces pastorianus
atgaatgtcatatacgttctggcgactttcgtcaagaacatgtacaatgcaggtttgaatcagcggagcctcatcactctgccgttcaacttcctactcaacttcgcacccgttttcatttggttatccatattcaagcatgccggcctaatacccactgagatcaggcccgaaattcacagcaagttcgcattctttgccgaccaatttctttttggcgactactggaatgagctggctgtccagttacccaagaacggttctaagctggttttctggtccttcgtatcgtcttctgcattttttctaacattagtctgcctccctatcgctatttggtactatatctactacgtcaagcacgtgaactataatttagttgagtggttctcaaacgtcttccattctcctcgtgatcacaagcagcaaaagcctatccataaaagtctaaggactatctga

SEQ ID NO: 3724 - DNA, 1182 bp, Saccharomyces pastorianus
atggctttattcaacgtggaaggttgggatataaagacgaaatctgtcgtttttgataacaagaccagcaagtctgcgaaggataaaaaaaaaaataagaatagaagaaatgacaaacttacaagagaacagaagttaaaagaggagacagaggccgaattaaaagaaacagtggaaggcgtttcccctgaagaaggggtagctgaaaagaaacaagaaaaagaaggtaaaaatgcaaagagtaacaccaataataagaaacgtaagcacgatgaaggtggtgcgtctgaacaaacaaaagaggttattgaacagcctgcaaaaaaacagttgactcctttacaacagaagatgatggctaaactaacgggttctagattcagatggatcaatgagcaattttatacgattacctcagatgaagctttaaaattagtgaaagaccaaccacaattatttgacgaataccatgatggtttcaggtcgcaagtgcaaacatggccagaaaatccagttgatgttttcgtcgatcaaattcgttatagatgtatgaaagctgttaatgcgccaggtggattgccaggcctaagagaaagcaaagagatagttatagctgatatggggtgtggtgaagctcaattagcgttagagatcaataattttttcaaaggttataacaagaaggccaagaagtatttaaagaggcgtcacaaagttcatagttttgatttgaaaaaagccaacgaaagaataactgtggctgacattaggaaagtgccattaccagatgaatcatgtactatcgtggtcttctgcctagcgttaatgggaaccaatttcctagatttcattaaggaagcatatagaatcttagctccaagaggtgagttatggatcgcagaaatcaaatcaagatttgctgacagtagaggaaatgaatttgtagacgctttgaaattgatgggattctttcataagaaaacctttgatgaaaataagatgttcacaagatttgaattctttaaaccacccgcagaaatcattgaagagagaagacaaaaattggaaagaagacagaaatttattgaagttgagactgagaaggaagaactagaaaagaaaagaaaaaaggttgccgaaggtaagtggctattaaagccttgcatctacaagagaagatga

SEQ ID NO: 3725 - DNA, 414 bp, Saccharomyces pastorianus
atgcccacagattcacgacagcccttgtttggtacgataagctcaccaatggatattggaaatgacataatagacagattgagaaatgattgggaatatatcaggttcgatgattgtggaaattcgccccctaaatcctcgtcaagcaacgtcgaagctgtatcaaaaccatccaaaaaaaaaggcgtccggtttgctgaagaagtgtgcctagcaagtacttggtcaccgaatgtatacgagagagccaatccagaatttatcatgaatcgccatagattattgtggatgatgaaggtgaatccgagcatgaataaagccatgaacgaggttaaactggaacttaactattttaaaagaaacgagatggttgtccataaaaacagtaagtgtttcacgcattatctgatctaa

SEQ ID NO: 3726 - DNA, 1137 bp, Saccharomyces pastorianus
atggaaagaccatatttgtccggccaagaagaccaatacatatcagagcgattgatacctaggtcaaactcaacttcgaatttgttttccttgtctagtacattctctaagcttaatgtcagaaacgatgcggaatacaattcttttggcccaaataaaaagagacaaattaaccgttgtgggaacggccaagagcatatgactagaaccaataattttccaatgaggtcttcttcaatgacagccgcccaacgtaacaacaaaggcgcattgtttacagtcaaaggaagaaactcataccacgaagggttaaataaggatcactattaccaagaccagtgccaaaatacaccgaatagcgtaaggatgtacaaaaagttaacaccttatcaaatgcaacgttctaaaatgaaaacaagctttcaatttcctaatggggaggtgttcaagccaaaacctgaggggagaaactctaccagctcaaaaaaaataagcttatcttccaagaacccattttcctttcgctttggccagaaggaaggtagtgcttcgttagaaaatcttcccgccaaagtttcctctgctccgaacatggaaacttttcaggatacggatagcctgaactcagacagttcagttccctcgacgacgaaaagttcgatagcgtcatcttctccaatatccaccgttaacactccaaccagttgtacagaaagccatacagatgatgatgacggttttgaaaataaaaccgtcaccatatcttacagcttccaaaatgccgtcactgaaactcacaactcccatatagaaaagctgaatatgttgaacgaaaaagaagccaagctacctacaaagccagggccacgggaaagaaaaaacaaagctaattcaggttatcgtagaaacgaatgcaaaaaatcatcctcaagattaaatttgggttccgttttgaaaaaactttggtcgagttctggaaaatcaaacacaaagcctaataagaagtatccgaaaaaaaagttggaccctgacgatgatatcgctgaccattttgttgagcttcccgacatggaaaatgatatcgaattgatgaatgcaactttgaacagcattgaaattgatgacgatgaaccttaa

SEQ ID NO: 3727 - DNA, 411 bp, Saccharomyces pastorianus
atgaaaatagttgaggaaaaatgccaagttactaaaggttgccttaagcgggagcttaaaggttacacagggatcccaatccatatcgttgatattctattggacgaatgggagagattactcaaggacgaagaagaagacgacgaggatgaagatgatgaaaagaaggaagaacaactgcgcaaactggctgaaagcgcaaaagaaacaccattgatcaaggtcaccgggatattccaagaccttgttgctgattacaacaccagcaaagtcttgagagaaaagatcaaagaagacctattcagcgacgccagacttactgcctggggcgttctccatgaggaagtggccgggaaagacgctgacagcgaatctgaagaggaggaagctgaagaatgggaggggttttag

SEQ ID NO: 3728 - DNA, 699 bp, Saccharomyces pastorianus
atggagacttcaaatttcgttaagcaattatcatcgaataatagaaagactagagaaaatgcacttgaggcgttaaagaaatatttaaccgctagacaattcaaagagaacaaacagctgcagttcaataagctgtggaaaggtctgtactactccatgtggtttagtgatcgtcctagaccacagcaacgtttggccagtgaattaggtgagttgcatggattgtattttgattccaaggacaatagtagtgcagatgagttaacgataaatgacaaagcgttcctcaagttcagtaagggtttctggaaggttatgtgtttcgagtggttcaacattgatagacatagagtggacaagtatctgttattgataagaagagtgttgttcaaccaactgaaatatttacagtcgagaaactgggatgaaaaactagttgatgaatacattgccaaggtactaaaagggttgcctttaagcgggagcttaaaggtttacacagggatcccaatccatatcgttgatattctattggacgaatgggagagattactcaaggacgaagaagaagacgacgaggatggcgatgatcacgagaaggaagaacaagactggcgccaaactgggctgcaaagcgcacaaagaaatcagccattgatccagggtcacccgggactattccaaggaccttgttgctga

SEQ ID NO: 3729 - DNA, 759 bp, Saccharomyces pastorianus
atgccagttattgaaatcgacgatcaagaccaatttacccacctaacaaccactgtagcaggtgacaagttaatagttctttatttccatactagctgggcagaaccatgcaaggcattgaaacaagtgtttgaagccatcagtaatgaaccttccaacactggcgtctcctttttatctattgatgccgatgaaaactcagaaatttcagagctcttcgaaatctcagctgttccatattttatcttaatccataagggaaccattttgaaagagttgtccggtgcagacccaaaggagtttgtgtctttattggaaaactgcaagttgtcaataaatccaaaattggcacaaactggtacgattactgaagacgcaaacgtgaacgaagaaaaccagaatgaagatgatgaagacgacgacgaagaggaggaggaggaaactgaggatcaaataaacgcaagattgactaagttggttaatgctgctccagtaatgctattcatgaagggaagcccctcagaaccaaaatgtgggttttcaagacagctcgtgggcattttaagagaacatgaagtaagattcggtttcttcgatatattaagagatgatgctgttagacaaaatttgaagaagttttctgaatggcctactttccctcagctgtacatgaacggggagtttcagggtggtctagatatcatcaaggagtccttagaagaagaccctgacttcttgcagcatactcttcaaacttaa

SEQ ID NO: 3730 - DNA, 2133 bp, Saccharomyces pastorianus
atggaattaaaaatatcctcttcaggagcactaccgtcagagaacaaattgttatctcaaaattccctggaagattcccaagcaaaattttatgttggtgtagatgtaggaacaggctctacgagggcgtgtattattaaccgctttggtaagattttgtccttggcagaaaagcccatcaaaagggaagaattaaggtcgaactttattacccaatcttcgaaagaaatttgggatgctgtttgccattgtgtaaaagtggttgtacaagaatcaaaagttgatccaaaaaacattcatggtatcggcttcgatgcgacatgttcattggtagttgtatcggctactgatttgaaagaagttgccgtagggcctgattttagtaaaaatgaccagaatgttatattatggatggaccatagagcgatgaaagaaactgaggagattaactcctccgcggataagtgtttgaaatatgtcggagggcaaatgtctgttgaaatggatatgcctaaaatcaaatggttgaagaacaatttagaaactgaaatatttaaagattgtaaattttttaacctcccagattacttgacgttcaaagctactggtagagaaaacaggtcattctcttctgccgtttgtaaacaagggtttttaccagcaggtgttgaaggatcaaagtcgggctggtctgaagaatttttaaactcaattggtctttcagaacttataacaaatgattttgaaagactgggcgggtcgttaagagataagagaaacttcttgagcgccggtgaatgcattggtttcctagatgtaaagtcagcctgccaactaggtttgacgcatgattgcatagtgggttcgggaatcattgatgcatacgcaggctgggttgggactgtagccgccaagccaggttctgcgatcccaggtctttccgaaaatgaagatcagaaaaatgatttcgatagtgctattggaaggctagctgcagttgccggtacgtccacctgtcatattttgttgtcaaaagacccaatattcgttcatggtgtttggggaccttacagagatgttcttgcaagaaatttttggactgccgaaggaggtcaaagttgtacaggtgctcttttagcccatgtgataaaaacccatccagcttttagggaactgtctcaattggcggatggagctagtgtatcaatatttgaatacttgaactcaatgttggaaactttggtacagaaacgcaatgagaggtctgttgtatccctagccaaacacttctttttttacggtgattatcacggtaatcgatcgcctatagcagatccaaatatgcgtgcttgcatcatagggcagtctatggataactcagttgaagatttggcagtaacctatttgggtgcctgtgaatttatatcacagcagacaagacaaataatagaagcaatgttgaaaaatggtcatagaatcgacactatttttatgtcaggtggccaatgtagaaatgggttattgatgagattactagcagattgcactggtctaccgataatgattccaggatatattgacgctgcagttgtatttgggtctgctatacttggagctgctgcaagcgaggcctttgatctggctaatgaaaagacgacttctcaaactaacaggtcttgtttgtcccaaaaagaaagtgttttcgatggctcatgtcagtcaattcaaaacttaccagaaggaggccaaaattcaaaaaatgatgtttcacctctttatccaacaccaacttatatttcaaatacacctgcagcactaaatagccatatctccccaatagttgaacgaccattacatgccgtgtcctctgttaaaaatgataaggatacttcagcttccacagaaacaggagggctacaaaaggaaaggcgcaatcgtacagatcttctatggaaagttatgcaagaattaactggcgaagcgaaagttgtcaatcccaacaataaaacacatcccgatagaatccttcttgatacaaagtaccaaattttccttgacatggctgaaaatcagagaaaatatagaagtatggtagatagagtggaagttaatttagtaaacaagtcaaagtag

SEQ ID NO: 3731 - DNA, 363 bp, Saccharomyces pastorianus
atgaatatgatgatcttgcgcatggattcttcagaaggcgaatatgaacctagcacgttgactccagtagtaaataccacacacaatttagaagaggtacgaatagaatcaaccagtgagacgactgatcttgatgggaatacaaagcaagaaagagatgagtctgaagaaagaaatctcaacagcgagaaagcaggtgcagcactgcagacagaatcacatggggatcgaagcgtagaaatcacaagcccagaaacatcttattatcaaactgaagaaccgccttcaacaaaaagacaaaaggtaggcaatcagggtcatggtgacataacaagggattttgggttgtcaatggaattgtaa

SEQ ID NO: 3732 - DNA, 378 bp, Saccharomyces pastorianus
atgtccaagttgcgttataaaggcaccttgtttgacgacgaaggtcactcattaccatccgaatcagccaaaaggaaatcatctccgcagaggagaaaaacaacatcaccaagggaatcgagagaatctttaaaagatcgtttgctgatactaccattaatgggggaatcgtatacagaatacgtggattcatatttgaacttggagttattggaaaggggagaaagggaaacacccatttttctcgaatctctgacaagacaattaacccaaaaaatatatgaattaattaagacaaaatcattaacagcagagactctgcaacaaataagtgataaatatgatggtgtagcggcagaaaacagctgctatttttag

SEQ ID NO: 3733 - DNA, 450 bp, Saccharomyces pastorianus
atggtaatggcgacacatctgatgaataagcaccttagagggaagacgctgcactcgtttttattttcgcatttcgctaatacaagtcatgcaatcattgattgggttcagcaattttgttcaaaatgtaataaaaaggggaaaattaagccattgaaggaatataaacgtcctgatatgtacgataaattactaccaatggaaaggattcatatcgaggtattcgaaccttatggtggaaaggcaattgagggtaaatatccctatgttttattgtgtagagactatcgttcaagttttatgtggttactgccattaaagagcactaaattcaaacatttaatccctgttgttgcttctcttttcttatcatttgctagaatcccgatttttgtcacctcaagcactcttgataaagatgatctctatgatatatgtgaagaaattgca

SEQ ID NO: 3734 - DNA, 150 bp, Saccharomyces pastorianus
agtagtaataataacgaatatgtcaatgacgctaacataggaaatgataactttgaagaagaagtacaaaaacagtttgatctaacggaacaaaattacatcgatgaatatgatgatcttgcgcatggattcttcagaaggcgaatatga

SEQ ID NO: 3735 - DNA, 378 bp, Saccharomyces pastorianus
atgacgattacgatattgcaaatagcacctcaaagacaggagcctttattatatgtgccggacggctatccgccattccagcaggaagatatcttaaaactgaaaacgttcaactctccatacgggcttgacctggaatgcgagagtaataacgctaacagcacagataaagttggcctgctttcattagtggaaattaacgaagaagttgagcaagacaacacggcacacacaattagcgatcaacaagagcctgctgcgctatcattagcgctcgagaacgccgaggacgatgagaacgctgcaattcccgttatagagtctctatataacggtgaaggactcgattccgaagaattggaggacttactcacttaa

SEQ ID NO: 3736 - DNA, 885 bp, Saccharomyces pastorianus
atgccagctaacgaagacaaggaaaataatgttgtatatacaggaaatgaaagttccagcaccagcttcccacagacaccagcccacctgttgaaaaggtcccattccaatgtgctaaagccacctgtgaggctagaccaactgaaaaaagatattaacagcaacaatggcaagaacttaaagtacatacagggaggtaaggaagtatcgcccacgaaaagattgcatacacatacacagcaacaagggagattgcctctggcagctaaggacaacaacagatcgaaaagctttgtgtttgctctcgacactgcaaaccagaataaagatgcggaacttgtaccgcaacaacagaatacattatctacacgcaagaacgatcagctcagaaagctctcgcagatctctcgcaatcgtaatagaggtaattacaacggcatgctgaacaacacaagaaagctacagaagtatggttctgtcctcggctacaatgcattgcccaagatgaaaagtttggttttaaaagatctggcggatccaggtaaaaaccaagagagttctgacgatgacgacggtagtgagggagctgacaacaaactcggcaagaagctccagagcgcctttttccaacagcattcttccgaggatgagcacgagtttagtgggggaatcggtttatttaataatcagggcggtctgcaacagctcataaagaacacagcaaagggaaaagaaggctccgcaaaagaggaccatgacgattacgatattgcaaatagcacctcaaagacaggagcctttattatatgtgccggacggctatccgccattccagcaggaagatatcttaaaactgaaaacgttcaactctccatacgggcttga

SEQ ID NO: 3737 - DNA, 1665 bp, Saccharomyces pastorianus
atgttcagggctgctatttccaagattaaggcgaaccttaccgcatatggcgcacgaaaaattaatatcgaagattttaatatagttaaagagggtaaagcagagatactttttcccaaaaaggaaacagtcttttacaaccctatccaacaattcaatagggacttaagtgttacatgcatcaaagcttgggacaatttgtacggtgacgagtgtggtcaaaagaggaggaacaaaaagggcaagaagaaaagaactgctcaaaatagcgatgattcttccaaacgtcagaaaatggaggatggatcgtcaagggaaactgctgaggcttccaaaacaaaaactccttatattaatattttggaagctttatcggccaccggtttgagggcgattagatacgctcacgaaattcctcatgttaagcaagttattgctaatgacttactcccagatgctgtagagtctataaaaagaaacgttgaatacaataacgttgaagatatcgtcaaaccaaatctagatgacgctaacgttctaatgtaccgcaataaagctgcgaataacaaatttcatgttatcgatttggatccttacggtaccgtgactccatttgtggatgccgctatccagaacatcgaagaggatgggctagtgttggtgacttgtactgatttatctgtcttggctggtaatggataccctgagaaatgttttgcgctatatggcggtgtaaatatggtttctcatgagtctacgcatgaaagcgccctaagattagtattaaatttactaaagcaaagtgctgcaaaatacaaaaaaactgtggagccacttttgtcactaagcatcgatttctacgtcagagtttttgtgaaagtcaaaacaagcccaattgaagtcaagaacgtgatgtcgaacaccatgactacttatcattgttctcgttgtggctcctaccacaatcaacctttaggtagaatttctcaacgtgaaggtaagaaaaataaaacgttcaccaagtactctgtcgctcaaggcccaccagtagatacaaagtgtaaattttgcgatggaacataccatttagccggaccaatgtatgcaggtcctctgcacaacaaggaattcattgatgaagtattaagaattaacaaagaagaacaccgtgaccaggacgatacatacggaacacgcaagagaattgaaggtatgctgtccctagcgaagaacgaattatcggattcaccattctactttagtcccaatcatattgcatctgtgataaaactgcaagtccctcccttgaaaaaagtagtcgctggattaggctccttgggctacgagtgttcgttgacacatgctcaaccttcatctttaaaaacgaatgctccttgggatgcaatttggtacgtgatgcaaaaatgtgatgacgagaagaaagatttgagtaagatgaatccaaacaccaccggctacaagattttatcggccatgccaaaatggttaagtgaggatgtcaaatctgaatatgactcaaaactatcgtttacaccaaatgaagagagcggtaatattgagaaactgagaaaattgaaaattgtaagatatcaagaaaaccctacaaagaactggggcccaaaggctcgtcctaatgcttcctag

SEQ ID NO: 3738 - DNA, 642 bp, Saccharomyces pastorianus
atgccaccaaaaggttggagaaaggacgcgcaagggaattatcccaccacatcatacatcaaagaacaagagaatatcacaatccaggacttactgttccccagaagcgccatcgtaaatttggcgcgtgaagtgccccagcaaagtggcaaaaagctgttgataaacaaagacgcctcattagcgttgcagcgcggtgccactgtgtttgttaaccacttgctcttgtttgcaagagaaattgccaagagccaggataaaaagagttgcagtgtagatgacgttttgagcgcattggaccacatagggcaatcagctttgaagggagctgtcagagataagctcgaagaataccaagctgccgttgaattgcggaaaaaggaaaagcctgaaaacggcgacactgataccaatgctgatgctgatgctgacgtggatatgactatagggggagatatgggaaccacacctgcagaagaggccggcgaacttgaggaaatggaagaacacgaacaagagggagagccatcgcagactgcggaagaggcctctgacaagaaacagaaaacagaaatacaaaatgcagacgctacgatacgaagccctgaggagatgccgtcctccactggaaccgttctctag

SEQ ID NO: 3739 - DNA, 2109 bp, Saccharomyces pastorianus
atgctggtggtggatccaaaaagaagagcaactttaaaacaagttgtggagcaccactggatggtaagagggtttgacggccctcctccttcttatttaccaaaaaggattccactgactatggaaatacttgatacggacgtcttgaaagagatgtaccgtttagaattcgtcgatgatgtggaagaaacaagaagtgttttggctagcataatcacagatcctacttatgttcttctctctagacagtactgggcattgatggccaaaattagagcagaatccaacaatagtgaagatattccaaacataacggaaagttttgaagatccaactagagcgtatcacccaatgctttctatatactacttgacatctgagatgctcaatagaaaaaacgccaaggtacagaatcaacaacagcgacagggcaacgaaaatgtggaaaagcttgccgagatacccgaaagcgtgaagcaaaacaaagttacgaataacgtgtctaccacaaagtcagatcttgaaactgtagaaccaacaccggttagacaagatactcacacgcctttgtcttcaagaaatggaaacagaacgcaacctcccctacatgttttgatcccaccaaaattggtagcaccagaacaagcgcatacatcgccaacaggtagaaagagtccggacaaccaacatcgtgaaacagattacgcgctctctcccacaccgcaagggaatgattatcaacaattcagagcaccatcaaatgcaggcgatccctcagaaaaggctaaatttggcaatatattcagaaagctatcacaacgccgtaaaaagactattgaacaatccgctgcaaacggtagtaatatcgttaataaacctgtacaaaagacgcattcgcgcgccgtttcggattttgttcctggatttgcgaagtcttcttatgaagcaaactatagttcagtgagggagccgatcaagagcaatgatgacgaggacaatgataatgctgattttccagcactacccgttaatgcagagaatattttggaaaagcaaagagagaagcagctagaggaagacataatgaaactgcacaatatcaataaacaaaacgatgatgttgggaaaggtaatacaccggaagtttacaccgggcaaaactatgaagataataacgacgatgaaaacaagcccttacctccactcaatgtcgcgaaaggccgtaaattgcatccaagtgcaagggctaagtctgttgggcatgctcgccgtgagtcgctaaaatacatgagacccccagtacctacatcgggttatcctcaacaggagcttatagataccggattcctggaatcaagtgacgacaacaagtccgatagtttggcaaatgttacatcacataccaatggtagttctagcttacattctgcgaatgcgcacgcaagttcgccaatcatggaaaaggaattgacagatgaacagattttagaagaggcatccaaagctccagcaggttccatgccatccattgatttccctcgttctttgtttttgaagggttttttttccgtccaaacaacttcatccaagcctttaccgattgttagatataagatcacatttgtcttaagaaaaatgcacatagatttcaaggaagtcaaaggaggttttatttgtgtgcaaagattcgtttccaataatgtggtagcaaagagagaagaggggccatcgcctagtcaagaaaagtcgcagttgactccaagatcgataatgccggcttcacatcacggttccattagacgccaaggctctaacaaattatctccctcttctccgttaacaaccaattccattcaccagaggaagacatccgtaattgaaaattacggggacgagaagcactccagaacatcgttggaaaacgttcgccaacaaagtgtcaatagcgaaagcttggatacaagagaaaaggaaccaatcaaatttgaaatacatatcgtgaaggtgcgtattgttggtttggcaggtgtgcattttaagaaaatttctggtaacacttggatgtataaagaactggcttctgagatattaaaggaactaaacttataa

SEQ ID NO: 3740 - DNA, 981 bp, Saccharomyces pastorianus
atggaggattatcacgtaaagacagccttctcgatgggcaaacaacataacgagaacaataatgaagctagtagcgtaaacactcagccaagtgccatggcgcccgcaacactgagaatgatgggaaagagtccacaacaacaacaacagcagcagcagcagcagcatcaacagacacctttaatgccacctgcagacatcaaatatgtaagtaatggaaatggtcaccaggcgcaacaaaaagagagacaaccagaatttgaaaatccgcctagagagaatgcacagaagtcgaatacgtccagccagggtcgagctccctcttctcagggcatgcctaaacagttccatagaaaatcactgggagactgggagtttgttgaaacggtgggcgcaggttctatgggaaaggttaaactagccaagcaccattataccaatgaggtgtgtgccgtaaagatcgtgaatagagctaccaaagccttcttgcataaggaacaaatgctaccaccacccaagaatgaacaagatgttttagagagacaaaagaaattagaaaaggaaatatccagagataagagaactattcgggaagcgtctttaggccagatcttgtaccatccacacatatgtaggcttttcgaaatgtgcacactatcaaatcatttttatatgttgtttgaatacgtctcgggtggtcaactgctagactatatcattcagcatggatccatacgagagcaccaggcaagaaaatttgccagaggtattgcaagtgccttaatgtatttgcatgctaataatatcgttcatagagatttgaagattgaaaacattatgatttcagattctagtgaaatcaagataattgattttgggctgtctaatctttacgattctagaaagcaactgcatacatcctgtggctctttatattttgctgctccggaattgttaaaggccatccttatacagggctga

SEQ ID NO: 3741 - DNA, 402 bp, Saccharomyces pastorianus
atggaaacagctccgcgtaatcacgtaagagagttgcctgcaaacatagcacaattgccaagtgaattctctacagcagcggaacaccaacctactaacagcactcactacagccctccacccttttcggttcccgaaataaaaatcccagattctgagattccagctaacatcggagacgaccctgtgaagataagaaaatggaaacacgttcaaatggagaagatacgaagggtgaacaccaaggaagcatttgaacgactgattaagtcagtaaagactccaccaaaagaaaatgggaaaagaatcccgaaacatattctactgacttgcgtaatgaacgatatcaggtcaatttcgaacgcaaacgagacactacaacatatactggacaactcatga

SEQ ID NO: 3742 - DNA, 237 bp, Saccharomyces pastorianus
atgcaacaagcaacggggaacgaactactgggtatcctagatttggataacgacatagacttcgagactgcctatcagatgccgagcagcaacttcgatgaccagctgccagcacacgtgcacgaaagcacattcagcgctgcgtccccccctctcttagcgcacgagctcggcatgattcccaacgtggcaactgtgcagccttctcacgtggaggcattaccgatcaatcctcaa

SEQ ID NO: 3743 - DNA, 423 bp, Saccharomyces pastorianus
atgggccctttcggagccaaagtatgttggaattatataatggcggcatatagcagagttccctcattagcatttaaggaatatatctttgagctgttctacggtaagggaggaataccagaggtcacaacagacatcttcaaaggattattctcaagaagtattttggcacgagaccccttactggattccttaaaccacttgaatgtacaaaagcttttggtagtatatgggcaatatgattggatgaacaaaaatggtggcaggctcatggtcaaaaacttaaacaatataggtatcgggtcggaaagagcgagttatttggaagtaccttcttctggccataacctgtttttggacaatccggaatcattcaaccagtctatagtgtcctttttgtcggagaaacctttactgtcttag

SEQ ID NO: 3744 - DNA, 540 bp, Saccharomyces pastorianus
atgcgcccctatagacaatgcaagtgggacagagccttacacaccagcagatctctttttgaagagaaaattctgcagaaaaagagtctacaaaggaaaatcttcgaaagaattcttagacccaagggtcaaaatactgtgacaaaatcgggattcaaattatggtctagccatttgaatggtccagcaaagacgtacgagcggttaagggaactgcaaaattgtatcatggaccaagtaaatgtggaaggatccaaaaaaaacgataagttattcgacgaaataaaccaatggcattttcaaaatacaaaggcaagtatacaaacatccacgttactgatacacggctatgccgcttcttcgatgtcttacttccggaattattcgggactgtccaaacacttccaaaacttatattccatagacttgccagctagtgcgttatcttcaatacctaatttagacctcaataccaacaacggctctggcattacacctcacctcaccggtcaagaccagctcacattccatatacgatca

SEQ ID NO: 3745 - DNA, 2082 bp, Saccharomyces pastorianus
atgagagcagcaggcaagactaccattagcaaatggtgtgctgcagccttgggctacaagttagtcgatttggatgagttatttgaacagcaacatggtaaccaaaccgttaagcaatttgttgtggataatggttgggaaaaattccgtgaagaagaaacaaggatttttgaagaagttatccaaaactacggtgacgacgggtatgttttttcaactggcggcggcattgtcgaaagtccggagtctagaaaagccttgaataactttgcttcatcaggtggctatgttttacacttacatagggatatcgaggaaacgattattttcttacaaagcgacccttcaagacctgcttacgtcgaagagattcgtgaagtttggaacagaagagaagtctggtataaagagtgctccaatttctctttttttgccccacattgctcagaagaagccgaatttcaagctttaagaagatcttttggcaaatacattgccacaattacagggacaagagaagtaaagattccatgtaaaagatccgctttcgtgtgcttgacctttgaagatttgactgaacaagccgagaaactgaccccgatctgctacggttgtgaggcagtggaggtcagggtagatcatttggctaattattctgttgattttgttagtaagcaattgtctatattgcgtaaagctactgaaagtattcctattatctttacagtacgtactaaaaagcaaggtggcaactttccagatgaagaatttaagagtttgagggaattatatgacattgctttgaagaacggtgttgaattcattgacctagagctaactttacccactgctattcaatatgaagtcatcaataaaagaggcaataccaagattattgggtctcatcatgacttccaaggattatattcatgggacgatgctgagtgggaaaacagattcaatcaagccttgactcttgacgtggatattgtaaaatttgttggtactgctaatagttttgaagacaacttaagattagaaaggttcagggatgcgcacaagactaaacccttgattgcagtaaatatgactgccaaaggcagtatctctcgcgttttgaataatattttgacgcctgtgacatctgatttactacctaacgctgctgctcctggtcaattgacagtagcacaaatcaacaagctctacacgtctatgggtggtattgagcctagagaactatttgttgttggaaaaccaattgggcattctagatcgccaattttgcataacactggttatgaaattttgggcttgccccacacttttgataaattcgagactgactcagcagaattagttaaggaaaaacttttggacggaaacaaaaatctaggtggggccgcagttaccattcctttgaaactagatattatgaaatacatggatgaattgactgacgccgctaaagtcattggtgccgtaaataccgttataccgttaggcaacaagaagtttagaggtgacaacactgactggctaggtattcgcaatgccttggtcagcaatggtgttcccgaatccgttggaaatacagctggtttagttattggtgcaggtggaacttccagagctgctctttacgctttacacagtttgggatgtaaaaatatctacattattaacagaacaacctcaaaactaaaaccattaatagaatccctaccatctgagttcaacatcactggcatagaaaccgcggaatctattgaagaaatcaaggaacacgttggcgttgctgtcagttgtgtacccgcagataaaccattggataatgaactgttgagcaaattggagagattccttgtaaagggtgctcacgctgcattcgtgccaaccttgttagaagctgcttacaagccaagcgtcactcctgtcatgacaatatcgcaggacaaataccaatggcacgttgtccctggtgcacaaatgctagttcaccaaggtgttgcgcagtttgaaaaatggacaggatttaaagctccattcaaagccattttcgatgccgttacgagagagtaa

SEQ ID NO: 3746 - DNA, 2208 bp, Saccharomyces pastorianus
atggtggaattagctagagttccaattttagggaatgatattatccacgttgggtataatattcatgaccatttggttgaaactataattaaacattgtccctcttcaacttacgtgatctgcaatgatacaaatttgagtaaagttccatactaccaacaattagtcctggaattcaaagccgctttaccagaaggctctcgtttacttacttacgttgtcaagccaggtgaaacaagtaagagtagggagaccaaggcacaactagaagactacctattggtagaaggatgcactcgtgataccgtaatgatagccattggtggtggtgttattggtgacatgattgggttcgttgcttccacttttatgagaggtgtccgcgtcgtccagataccaacatccttattagcaatggtcgattcctcaatcggtggtaaaactgccattgacactccattgggtaagaactttgttggtgcattttggcaaccaaaatttgtccttgtagatataaaatggttagaaacattggcgaagagggagttcatcaatgggatggcagaagtcatcaagacagcttgtatttggaatgctgccgaatttaccaggttagaatcaaacgcttcagtattcttgaatgttgttaatggggccaaaaatatcaaagttaccaatcaattgacaaacgaaatcgatgagatatcgaacactgatatagaagcaatgttagatcacacttacaagttggttcttgaaagtatcaaggttaaagcagaggtggtttcttcagatgaacgtgaatccagtttaagaaaccttctgaattttggccattctattggtcatgcttatgaagctatcttaacccctcaagcattacacggagaatgtgtatccattggtatggtcaaagaggcagagctatcccgttatttcgatattctttcccctactcaagtcgctcgtctgtccaaaattttggtcgcgtacggtttacctgtctcgcctgatgagaaatggttcaaagagttaactttacataagaaaacaccactggacaccttgttgaagaaaatgagtatcgataagaagaacgaaggctccaaaaagaaagtggtcatcttggaaagtatcggcaaatgtttcggtgattcagctcaatttgtaagcgatgaagacttgagattcattctaacagacgaaactcttgtgtacccctttaaggacattcctgccaatcaagaaaaagttgtcattcctcccggttctaaatctatttcaaaccgtgccttgatccttgctgccttgggtcagggcccttgcaaaatcaagaatctattacattctgatgacacgaaacatatgctaactgctgttcatgaattgaagggagccacaatatcatgggaagataatggtgaaacagtagttgtggaaggccatggtggatccacattatcagcatgtgctgatccgttatatctaggtaatgcaggtaccgcatcaaggtttttgacttctttagctgccttggtcaactctactccaaatcaaaagtatgtcgttttgactggtaatgcaagaatgcaacaaagacctatcgctcctttagttgattccttacgtgctaacggtactaaaatcgactacctgaatagcgaaggttctctcccaatcaaggtgtacactgattcagttttccaaggtggcagaatcgaattggccgctacagtttcctctcaatatgtgtcctctattttaatgtgcgctccatatgctaaagagcctgtcactttggctcttgtcggtggtaaaccgatctctaagttgtatgtcgaaatgacgatcaagatgatggaaaaattcggtatcaatgttgaagcttccacaaccgaaccttacacttattatattcctaagggccattatgtgaatccgtcagaatatgtgattgaaagtgacgcctctagtgctacttatccactagcctttgctgcaatgactggcaccaccgttacagttccaaacatcggtttcgaatcattacagggtgatgccagatttgcaagaaatgtcttgaaaccaatgggctgtaaagttactcaaactgcaacatcaacaacagtttcaggtcctccaaaaggtactttaaagcctcgaataaacaaaaacagcaccaagactttgacatgtaatacatattag

SEQ ID NO: 3747 - DNA, 1026 bp, Saccharomyces pastorianus
atgtttgcagtaaatacctttttacgtcaaaacgtaaacaaaaaacatcaagaacaattgagtaagatcaaccaaattaaagaaacacctttcaactcttaccgtagactgttaagatcccacttcagcccaataatcttaacaatgagtagtaaaaaaagccgtaggagtctacgcgacataggaaacacaattggacgaaataatttgccgactgacaaggataatgtgtttgtgagattgagcatgtctccgtcaaaaacaacgggcccaagggagtttttaaaaccacctatgagactatcgcctaaaaagacggatggcacgaaacatagcacacagctcacacctaacaggatacagtcgccggaatgcttaaagggctatactcccaaagtaactcaaagtctggatcgacctcaattcaaaaacacgagtaacgacctgaagattcgaagctccaaccacataacgaatataatatttcctacatcgccgactaagttgacatttagtaatgagaataagattggaggcgatggctccttaacaagaattcgggctcggtttaagaacggtcttatgtcacctgaaagaatacagcaacagcaccaacagcaacagcaaaatctccctttacaaatcaaaaatggcactgacattgaccatagtgatgagtttgaagcgaatccgtttgaggatgagctctctgctggtaaattaaaaggaaaaaacttactgagcgaactaaggaaagaagatgaaggtgtgggaaatggcatagaatctctcactaagacaaacacgaaactgaattccatgcttgcaacggaagggaaggtgcagaaagctaacctccagaagtgcgtaaaatttaatttacctgacaacataaccagcggagaaactacagagttgagggacataaaagacctgctgtcacaaattttaaggaggcaacgagaaatagaatcgcgattaacaaacatcgaacttcagctcacggaaataccgagacaaaaataa

SEQ ID NO: 3748 - DNA, 243 bp, Saccharomyces pastorianus
atgtgtgaatggaatcaggatttcccaggtaaaaagtttgtaactgataagaatatgttcaatgacaagatcattgacgcctctaatccatcaggccttaaaatgtgctccggtttgaaactttacctaagaaaatcgctttggaagttggccgttaaagatggcaaaattatgttgatagctatcaaagctatatcattcaacggaaccaaagagtactataaaggatatgaatatctatag

SEQ ID NO: 3749 - DNA, 1293 bp, Saccharomyces pastorianus
atgtcgcattctccacttatatcgactttgtcgccagagtattttgatcctaacattcctcaaattctcccacacgaaaaaatgtacaagatccaagtaggaaaaacgctgtttaagattagcggtgcttcattaagttcggatggtccaagtttcttcactgaatatttttccaaaaaaagcttacctaatcacaatagcagcagcagaaataatactaaagaatctcctgaaaatgaagttttgttcatagacagatctgcggaggttttcgaaaggatctataaacatttgcaaggctatacaattgagattaaagacgaagttcaatacactatgctttttgcggatgcaatgtactacaatttaccacgattgagagccttactaaaggaaacagactattattttacaaatgtgggcgggcaatcgtttaaagtagccaaaaatttatttagaaggaaaggtgattctccaaactattttgaaatatacgctgccacagtttacatcgatgtggaagagttgattatatcgaaaaaattattaaggccgcctcctcactctgctccctacattccaagatcgtcagagttcttcaaagatctgctgacattactgggaggagcatccatagatttggatgacaataaaagagacgcactgatcaaggaatgccgttattacagattcttaaatcttgaacagcggctaattaagtgcagtattagctataacccgataacaaggaaagaagaaatatgtcttttactgacggatctgtccaaaaaaggtattagtttccctgatactatagcgtgttcagctttaccgttcgaagaggacgtctgtagttcagaagtttgtgatacatcatcacaaactcctgaacagccagtaccgaaaaaaattaaacttgatgtcactgatgagaaggattattcctggaatgtaatttgttacaagagaccatttctggataactgcgcaagagagctgatctttcagatagattcaactgattctacaataatgttcaataaaaaaagtaaaagcattcacttggatataactggggaatctgcacaaaagttcgaagcgttgtttggaaatcatttgctaagtacgccttttggcccgattgatttgagcaattatcaatatcaatctacatcaccgacattagataccacacaagccaaagcagaaacacactttttacttcctgcgtgtatattgctttgtgacttatgtgtgaatggaatcaggatttcccaggtaaaaagtttgtaa

SEQ ID NO: 3750 - DNA, 2298 bp, Saccharomyces pastorianus
atggcaacaactacgccagtgacatattggatgatcttagacgatttttatacctttttaattgacatcacaaccatcccaagaaggaaaatggccgatgttgaagaattgattcaggactccgtagggtttctccacaaaacttttgacgcactccccacttcacttcattctattaaaaatgaaccactttcatccacactgtttgatgacagcattctcaattttgagtgggaaccgctcaagaactgtatctcgatggttcatgacagagatcttttagttgacactgtactaaagaagttcatcatagattcaatgacgaatgctatcgaagatgatgaagtaaataattttgaaagagggttgctgaattcgtgcatatgcctcgactttgtgtataatgcaagacgtaacagaaaaactccgtccacttggggaaacactttttttgacttattttctacaaccattgatctgctaaactcaccatcttcgtttttgaaattttggccctatgctgaatcgcgtatcgaatggtttaaaatgaacacatcagttgaaccaattttgtttggagaaagcaatttgattagttacaaacaaccgctatacgaaaaattgcgtcactggaatgatgtattggccaaattagagaataacgacatgctaaatacgactaagcactttaacatgaaattcaaactcgaaaactttttatcagagctattacccataaacgaagaatcaaatttcaatagatcagcctctatttctgctttacagtattctgacagcaaatggaacaaaacaatttctggacgagaaagtagccataattcagacgctattttttctgccgattataactttgtctttgagaacctaattactcgtccgattgaatttgctttcagcgatgtagaatttaaaaatgatgttgataggtctctggccccccttcttgatgcaattttagagattgaggaaggcttttacggtaaaattaaaaaaaacaataagacccgatttgccttagaggaaactttaaataacgagtattacgccaactacgatgttatgacacctacgttacctgtatatatgaagcaatcaagttcaatgaagatggacaggaacgaattttggctagatctacaaaatatcaaagaatcaagagacttccttcttcggcccaccattatggatatctcattaagcaatacaaacagtctttatagacaattgactcaagaggatgacgactattatcgcaagcaattcatcttgcaattgtgttttactgtgaacctcgtacgaaatctgatctcgtcagaagaaactaggcattcttataagagctgctatttgagggaaaatccaatgagccatatcaattttgaaaaccttgacgaaaataataaaaagcgtggtctcaacctgtgttcatatatttgtgacaaccgtattctgaaattctataagatcaaagaccccgactttcatagcatcgtccaaaaattgctatcttcagatgaaaattttgtaacagccaaaattgacggcttcaaagaatttcagagttttaagatttctaatgagaaaatatcctcacccaactttgataaaagtttcaaaaagtttacctttgtcaagatgggaaataagtctatcaacagcatctggaaaatcgccactggtctagataaaattgaacgagaccttaaaaagcctgaaggtgtatacgaagcggcccattcaaaatgggagtccaaagtttccgctgaggctcctagtgaagaagcaaaagacgagataattaggcaatggcaaaccttgcgttttttgagatcgcagtacctatttgacttcaacaaagttaatgaaaatactggtgttgacggtttatttgaaagctacgaaaaagccgaagtattaaataatgatatcaaaaagaagcttctgtgtaaaataaaccaaggtcacaaaaagaaacttcaagaggctaaagaatataggatcgtaaaagagcagaaaaagagagctttagaggaagggccattgtgtagcgaagaaaaggatattaagttacaacgtttagatgacagttctctagcggatggagatgagctaaaaaggaaaacggcagcatctgggcaagaaccgatagaagaaaatgctaaagtcgcagttgcagatatcccttctcaataccccggtgagacgacggagaagaaagtattttcttcacatagcgacatagcgcagtcagaaaatgcagaaaataattcgatgtaa

SEQ ID NO: 3751 - DNA, 705 bp, Saccharomyces pastorianus
atgacaaaaggaagacggagactgaacagaaccgtaagaatgttaccaactccttatgtaaaatgcgattacgataaggtttacgagcctgctgaggatagtttccttttactagattgtttagaaaaagaacaaggcttcttaaatgaaagatttaataatcgtttagccgttgtttgcgaaataggctctgggtccggtgtcgtcacaacgtttataatgcaaaacaaaatcctaccacaagaaaggtctattcacctggccgttgatgtcaacccgtgggcactcgaagcgaccctagatacggcaaagttaaactcgtgtaaaaattcattcttagatgtggttcaaagcgatttgaatgcttgtcttcgaaataatcaaattgatgtcttaatattcaaccctccatatgtgccagcagaatgtgtaccggatttcccagagtcaagggagcaggcggatcaatggctagacttggcattactgggcggaaaagatggaatggcaatcactgataaactattgcaacagttggataaaattctttctgaggatggtgttgcttacatcttattttgtgcgagaaatagacctgaagaagtcgttaagaaatttctaaaaactcacaggtggaatgtgaaattaatcgaaataagaaaggcaggatgggaagtgctcagcgtttacagctttacaagatga

SEQ ID NO: 3752 - DNA, 1680 bp, Saccharomyces pastorianus
atgacaaaccataactcgtacaagttcaaatttagatcaaagaaattgctagagactttgttcttgctagaacctttagagctgctagaaaatttgattaatattaggccagacgatgttacagttactctggtacatgtgcttgacggaaataaacccgctatgaccataccacatttgttgtatggtgtgattatcaggtataacagaacagcatctgtgaagttttccaatcgtgatggaagcgttagagcaagtacgactaaattaaccaaaggagaaccctccatgttgaaaaagttaagtggggaatcgatcattgcatttttgtttaaatatgtggactatgttgaaaactctgccattgaagaattttatggagatttcctgttattctttagagaagtggcaactaattataacctctactcggatgtatcattgcctgtactaaaactggttgcccttatttctgaaaaggtaagtaaaacacaatttggggaacagaaacgggttagaagagaaatatcagacgtatttttcaaatatttacccaatgcgtttatcaactttcctaatcaaaatcgaggccaatctgcatcatttaaggatttggagtttgtggtgtggcgcgttcaatatattgttaatgatcaagttggaggtgataagttcaatacaacattatctactatcgtaaaccaatgtctaactccatacatcaaaccgaaaagtgaaaaagccatctcaaattatgctctagaactggctgtggttatagccaatttgagttcaaaggtaaagagttggagacttttaatagcggaattatttcaaaatgacaagaagctctcagttattggcagcaaccgagtttgggagaaaattatatacgaatggtctgtttacccagagaataaatcaaaaattttgaatgacttgctgttggagattggatctaaacgttcaggggtagcaccaacgttaatcacgttcaatttaagcaacgaatcggaggttgaatacaagtgccaaaacctctcaaagatatcgtacttgctaatgatatcaccaaatgatgcatatttgttacagttctcctccttgataagttgcgtttgccaatacttggtgtccaaggatatcaagcttaaagggagttgctggattctactaagagttttgctcttaagattttcagagtcgcatttcaacgattactggtctatgattagctactgtttacaaactaatctacaagagttttatgaatcgttacagattcagtccgaagtcgattcccaaacaatattacagatttgtaaaaccttagacttactgctcttactaaacatggaaggtttcacttctacgaacgaatggatatttgtcattgatacaataaattgtgtatacaaaactaattcattcgttgcactagtagatgaaattgctgaatttaaggattatgaaataagtaaaattgatgatctggaattaccaacgactttaaaagacggccttccgttactacggggcatccacaaaatcgaaaggcactcacaattgagaaagtttttccagaatttaagctatgtacactatgagaaagtatacggattaggcactgtagatttacatggttgcagtgaggatcttaagaaagacatcttgtcatga

SEQ ID NO: 3753 - DNA, 3321 bp, Saccharomyces pastorianus
atgtccttacccttgaagccacttacgatcgactcgaataataaacagatagactccaaacaaaagaagtttcgtgctaatgttgagcgtgcattagaaagatttgactctgtgacagaatgggcagactatattgctagtttaggaactttactaaaggcgttgcaaagctggtcaccgaaattccagaacgtaaagtactatgtcccatcgccatatcaagtaagccgaaggttaacatcgtcattatcaccggcgttaccagcaggtgttcatcaaaagacattagaggtttacacatacatatttgaacacattgggcttgaaaccctagctgcggaatgtaatatttggattccaggtattttacccttaatgacatacgcctctatgtctgtcagatcacatttgatcgagctttatgacagttatattcttcagttacctcaaacaacgttaagattactaatcagacctctgatttctagtttattgcccggaattgatgatgagagtagcgattttttacctttaaccttaaagcttattgagaccctgcaggaaaacttggctgacgattccttgttttggcagacattgttcttagttatgactgcgaataaaggcagaagattgggtggacttacgtggctgactagaaaattcccatcgttaaatgcggtacctcacttggtaaaccaaacgaagaacgagacagaagaagatacaagtgaaaccggtactatagattcacatttggataggaaaaaaaagaaagagggagcttttaagatcttgcttcctgcagctagagacttagtgacccccgaaccaggtctacttgtccgctgccttgtcggttgtctagaagatgaaaacgacatccttattaaaagaagcgttttagatcttttactacagagactgaggctagattctcctgttttaaatgttctaattactcccgaagacaagaaactactaataatgagttgttgtagaactactttgagcaaagatatgtctttgaacagaagaatatggaattggttattaggccctacttctgggggtttactaaataataatggcggaacatctattcctgatgctgcttctgctaactctgcaatcgaagaaagcaatgtttattttaggaggtatggattaggcacgcttttagaaggtttaaacgatcttctttcagaagaagagtccattcttattgcgtttagaataagcatggcagtcatggataggtgggaaattggttcacttgtgattcctgaactatttattccccttctctcttcttcggaaaagttcaagcagaatgaacaaattatgaaaaccgcacgtactttttttgacaacgttgaaacaaacgttatatgggggaagctgttccaaaaaattgaagattacaaaaacttgaaaatcctagactttgttttaacgaactttaatatcgaaagcgatgaagaaattattgtacgtcatcttcccttaatattattggctctacttgctctcccatcctctgataacgaccttttggatatctgtaagcttcagaaattttctttgtacaacaaattgttaagctatattcccgaaagagctcttcttcccctaagccattcaaagttaaaatataatgatgccttaagctctgaagaacttctaaacaaaatacatggattctatactagtgtttctaatccctccacatccgagaaggaaaatacaaacgaatgtttgccgccctttacaacagaagatttgacttttttgatcgtaaagcttattcatgaaaagctcctttcaagtttaagcgatatggaaagcatcaatgaaagctctaagttatttataagtgtttttgagaaaatacccgaatctaacgtatctaaaggattatctcacccaagctggtcagatgaagagctaatccagaggacatttaaggcgattcccaagctatgtgaatccaacaatgatgcgaaatcaaaagaaattgtcggaattgttgaaattttcggtaattacttatattcacgcatgcaatttattgagtctatgaaattgctaaaagtgatcatgacggccgtgtggaaatctttaaaagatccacaccatcaaattttaggggtcaagaatttaaagaccctgaacagatttattcccccaaaattcattgaaagtgcattagtttatacttttgtagaagagagcgatataagcgagagactgggcgtgttagatttgctatggacgcaactagactcaaacacagatttaattaggcacccgctcgaattgattttgggtgagctatttgatgatcaaaatccctactacttaacagtttcaaagtggattctgtctattataaattcaggttctgcaacaagactattttacattttgacagataatattttgaaagtctcccatttagagaaagaaattttagatgacagggatgacctcgagatgctcacatatgagtttcaaatgcttgcttatgttttaaaaacaaacaatggccgcgttaggaaacttttttctactgaactcacctcaataaagtctttagatatatggaagaatgaagatgtgtctacatataagagcttattgttggtcatgttgatgagatttttgaatataaagaataacacgcatgcaaaaagcatcaggagtgctttaattctcttggatatactactggatggaactgaagataatttcaaggatatcgttatatttttacttcaaatgtcatctaaatatattgcagaagaaggcattgagccggagctaatagcggtttccttattagatattgtgtcaaaggttctcagattatcacatgataacggtattaaattagacattttcgatgacaatgcagctcatctgaaatatatcgattaccttgttaccagtgtctcaaatatgaagagtccccttattgtaaccgcttatgtgaaacttctgtcagaaagtattatctactttgaacattctatatttcgaatgattttgccgctgtctgcttctctcgtacaatgtgttcaaaggttgtttttgctcgaaaagaaagaaggcggctattaccagccagtaggtctactactcggtggcctggaagaattattggaaatctctcatggatatcttgtgactgatcaaagagaggggtactgtttccgagtctctaatttgaaaggcgatttattcagtccgtggtctcaaatgttttctcatccgattcctccaatgaggagagtagaattcaaggcgaaagggatgtga

SEQ ID NO: 3754 - DNA, 1998 bp, Saccharomyces pastorianus
  modified_base (29)..(29): a, c, g, t, unknown, or other
atgacctctcaaattactcaatggaaggntgaatataaaacactagcaacagacgacctgagcaacatcttgaatttaaactatggagaaacaaatgatataattatgaatgagataaaagacctcaatcttccgctaggaccgctttctgatgagaactccgttaaagtttctagctttcccgaattaactgtaaacgattggcaaaacgtaaattttggcttggggaatagcgctaaagaagctagtcctaacacggctagtttaataactgaaagcaggcccaaccaggacgttgttatgtctaaggatccaaagaggatggcattcacattggataacatgaaaaaaagtgaatctgaaaagggcttcgatagaaaccttggtgagctactgcttcaacaacaggaagaactacgtcaggagctaagggcacagcaagaagccaacaggaaattagaagtaaaactaaaagaaacacaatataagcaacaacaattacaggctactttagagaatgctgatagccaacagtttttgtccccaaaaagaagtactatacctgcttccgagaacgtggaggacgtatacgcgaatagcctttcgccaatgatttctccaccaatgtcaaacacttcgttcaccggatcaccttctaggagaactaatagggcaaagttttctctaggaagaaaaaactctaccggaacagcaggtccattaagttttcaagaattgaatgaagattttaatggagtacttatttcacctaagaggactcgtccaaatccaaatggaagttcgaacttaaaacccaaatttatcgcaccatttactccgaagagtagagttagttcagctacttccaattctgcgagcatcacgccaaataacttgaggctagactttaagatttctactggagaacacgataacgaagattcggatcaacccttggggctaggtatagaaattcttggaaagtcaggatcttctccaaccaaaggaatgtctgtaaaggcccctccaatagacgttatgcccacaatccctgggtccgttaataatactccatcaggcaataaaatagccattccctccaactacattgaccaatataccccgagaggaaaacagctacattttagttcaatcaatgaaaattctttgggtattacctctgtgacgccgcaactaaagcctccgagtcagcaaatgattggacgtcgggaaagtgttttcaatgagttgaaccccaatttagtctttaaaaatattgataatgagggcaatagcgaagaaaatgagccggaaagtagatttgttatatctgaaacaccttctccaattttgaagtcacagggtagatacgaaggaagatcccctcaatttggtgctcatgcaaaggaaaatgacacgtatatcggtaatagcccttcaaaaatcacaaggaaacttactactcttccccgaggttctattgataggtatgtgaaggaaatgccagacaagtcatttgagtgtttgtatcctggatgtgcaaaaacattcaagagaagatataatataagatctcacattcaaacacatttagaggatcgaccttactcctgtgataatcctggatgcgataaggcatttgtgagaaatcatgatttgataagacataaaaaatcacatcaagaaaaggcatacgcatgcccttgcggtaagaaattcaacagggaagatgccttggttgtacacagaagcaggatgatttgtagcggcggcaagaaatatgaaaatgtggtgatcaaaaggtccccaaggaaaaggggaagaccaagaaaggacggatcatcgagtgtttctaatagtccaatcaaagagagccttaaccgggatcacaacgggcaattgatgttcaaacttgaagatcaactgagaaaagagcgtagctacgatgagaatggaacgggaattattgtttcgccaatgagagtcaatcaaaggtaa

SEQ ID NO: 3755 - DNA, 117 bp, Saccharomyces pastorianus
  modified_base (114)..(114): a, c, g, t, unknown, or other
atggactcttcaaactcttggtttgatgtctcgaaagtccagagtctaaatttcgatctgcaaaacagctcttgttctagaaacaatgacctctcaaattactcaatggaaggntga

SEQ ID NO: 3756 - DNA, 5025 bp, Saccharomyces pastorianus
atgactttgttgtctaatgattcatacaatgacctcttacaaaatactgagaaagcattgaaaccgaaaaacgatgaatcggtgactaaagaggctgccaaaaacttgaatataattgcgttacctaatgacgacgatcacaataaaaaggagttttcaatcgaatctcaaatcgaaaaattggaggcttctggctataaagttatcggtctcgaagagttcatggacttgaaacaatccataaccagcccatcatatgattatttgagggagaagcttcaagcgttcagaaagatacccattgaccaaaacacttttgatttattggaacaccctacagttgatttcttacttcccctaacatctaaaatcgactgtttaataataccaactaaagaatataatgagctcgctaaagcctccaagaatccatcaacagaacagatgaaacagtatttggagggcaacaccgatttagaatctactgtttctatatggctagcggagaagaatgactacacactactcaataataatgagtactccagcatgatcgataaattaaatagcccttccaaagaatatttatcgaacaaggcaaaagagtttaatcaagtattgattgatatcaacgaattgaaagatttggaagacccatcactggatttccttaaggagaagatttctgcaactaattacttattactcacaaaagaggactatgaacacccatctttgacatatttggttgaacatgccaaggagactgaccaccatctgctctctgcatctgcctacaccgatctggtcaagtacaaggaaagccctgacattgagttcttgaaggagaggtctaccgatctcggccacacagttgtatccaatgatgaatacttagagttgaagaatcaattggaacacccatctttgacatacttggttgagcacgccaaggagactgaccaccatctgctctctgcatctgcctacaccgatctggtcaagtacaaggaaagccctgacattgagttcttgaaggagaggtctaccgatctcggccacacagttgtatccaatgatgaatacttagagttgaagaatcaattggaacacccatctttgacatacttggttgagcacgccaaggagactgaccaccatctgctctctgcatctgcctacaccgatctggtcaagtacaaggaaagccctgacattgagttcttgaaggagaagtctaccagtctcggccacaccattgtctccaatgatgagtactccaagttgcaacatgaatactctgaagctaaggagcaattggaacacccatctttagagtatttggcggaacaagctgcaggactacaacaaaagattgtttcgttatcagaattcgacagcttaatatgtccgtctttagaagactgtactttaaggttacacacactaaactacgaagtgattccgatcgctgaatatgaaaatttaaaaaattctttggacaacccttccaagaaatatattgaagaaaaagccaactcaatgaagcttacagtgattgatagagcagaatatgaaacaatgaaagacaagttaagcgacaaggattctcttattgcatctgtgaaaacttttggtcttgttccaatacctattccccaactcgcttctctagagaagtcatcactccagaattctaccctatccgatttggggaaaagattagactcactaggttatgttgccatcaccaaggacaatttaacaagcctaaaaaaaccggttgttgaaagagcttctagggacgatgccttggatctatgctccaagtttgacttaacagcattacctagcgaagaatatgttaaaatgaaaaatgaatctaatcctaccgccgaagaactagtacaagaacttacagggcgtggttatgttgttttagcaacaaaggaacataacgacatgcttgaaacactcagcgatccttctattgatttcttgaaagaaaaatgtgaaaaataccaaatgattccagttgataaaagtatatacgaaaagaaggaagaagcaatcgagagtccaacttatgatttcatctcagagaaagcattgaaattaggatatgacttgattagtaaagccgagttggctgacatgaggcgaacaattgatttacctgaaattgattacatccgcggaaaggctatagagaacaatatggttctattgaagagcgaagaaaagaaaaccttggaggatcaaattgaacatccttctatatcataccttgttgaaaaaactgctgagatgaacaaaataattatcgatgaagctgagtattacgggattcatcgaaaatgcagtcatcccagtcagaaagaggtagaggaatactgccatgacttgaatttggttttgctgcacaaggatgaacatgcagctttaaaagactctttagaaaacccaaatgtggataatatgaaggacacattggccaagctaaattaccacgtaatctctaaaactagcttcgatgaactcattgaaaggtgcgaaaacccaagtcttgactatttgaaggattgtttaaagagcatgggttacactgcaatgtcacatcagaattatgaatttatggttgacaaatatgagaatccgcaattggactacttgcaaagttctttagcaaaggttcaccacttcacattgcccatatctgagtatgacgcaattgttgcggaccatgagcatcccaacttggcctatttaaaggaaaaagctactaaattcgattgcatcttagtagacaatgcagagtaccaacatatgttgaacgctattagttccccttccaatacttttgaagacttagaagcaaatgcccggtatttcaatatgggattacactcattaaactccaacgaagcctcctatgagctgaaatcacgccaagcagaaaagccggggcatttagatacccagtctctgaataccaccagcagtatttctactacaacatcaagtatgtttacagatgccttagacgataatatattagactttaatgaaaacgatcttgaccacaacggagatgtgactgacgtaatttcgaagtcatccactatgaaagaaatcactaatttcaacctcacatacgaaaccctagaaaattgtgccgaagagttaggatataaattagttttgatcaaagattcaagtagaaatctcataaacaaagaagctcctttatttgggaaagacaatgacgatgaaattagtgtcgctagtagcatcgacataaatgatttatccaagaaggcagaaaagtggggtatgaccctaatttctgatgaggagttcaaagaatatcacatactgaaggataatacaatacgcctgaatggtgataagaaagaaacgaatgatattgtatcagaaaagcaatctccagtaacagaaattacaaatgcgtctaaagaatatgagcttcaagaacattctgctgatcactctatgaataaggaagaacttgttaagaaggcagaagcactggatatggttgttcttgacgagaaagagtatactgaaatgatggcaagatccgaaaaccatttaatttctgcggatgatgtcatacgtgaggccgccaatttcggtctagtacctgtagagaggcaagagttggaagatattaaatatgaactagctcatccaacattttcaatagcacaacaggaagaacacactgctgatcataatatagttccgacaactagggatagaacattattattgaacgaagaacgcacaatgggccaagatgaagtggattatgatgacgatatttccgccagttttgcggatgaatcacaagaaattcgaaatgatataaatattatcaaaacgcaagccaaaaaatatgggatgttgtgtatacctgaaagcgctttcgtggttacatcgtatgcaaatactccagatacaagcaacgttgttgcactccctgtttcctattaccataatctattatcaacagaagagaagaaatggaatgatgtgaataacaaagatttagaatcagaagccaaaaagcgtggatttcaagtcggattgccatcgaagaaggatattgcggctcaaggcacgccacctaaacacgtaagcaaatcatctaaattgagttcgaaaaagtcgattgtatccacaaagtccgggataaaaaaaggacttgccgaagctgctgcaactactgcttacgaggattatgaaagccacccacagttacagcagcaagaacatcaccaacaccacactcacctacaaagcgtatcaaattcgactccaaagatcaaaacagcaccttctaggaatactgcaggcttcagaagggatgcaatggaatcgtttatgtcacgtgcaggatctgctgatagagcggtatctttacaaactttagcttcactaaatgaaccaagcatcatacctgcattaacccaaacagtcattggggaatatttgttcaaatattatccgcgtctggggcctttcggatttgaatcacgtcatgaaagatttttctggatccatccatacactttaactttatattggtcagcatctaatcctattttagagaatcccgccagtacaaaaacgaagggtgttgccattttgggtgtgaagagcgttacagacccaaacccatatccaacaggcttgtatcacaagagtattgttgttactacagaaactaggtatatcaaatttacctgccctacgagacaaaggcacaatatttggtataattcattacgctatctaatccaaagaaacatgcaaggaataagcttagaggatattgccgatgacccaacagacaatatgtattcagggaagattttcccattacctggtgagaatactaagagctctaataaaaggctaagtgcatcgagaagatccgtatctacaaggtcactgagaagcagagttccgaaaagtcaatcattcagtaacttgagataa

SEQ ID NO: 3757 - DNA, 843 bp, Saccharomyces pastorianus
atgtcccagaagaacagaagcaggaagaacaacaagacgagcggcgcaatggagccacatgctgatgttattcgcgatccatcggcacaggaagacacaacaatcaacagcgtaacgacggcggctaacgcagagcatgacaaaaccggtaatgagaatgcagaaggaacttctaagcgtttttccatctcaaatattttaagtaaaagagatacaaaagacgtgctcccggatttcgcgggcagcagttctcataacggggttctcacaacaaattcatcaaaagacatgaatttcacattagaattaagcgaaaacttgctagtggagtgcaggaagttgcagtcttccaatgaagccaagaatgagcaaattgagtcactcaagcaaacgaatggctcattaaatgacagaattgagcagttgagtagtcaaaaccattcctttaagagggagatagactcaaccaaagacctcaactgggatttggaagctaagttaactagtttggatatggagtgtaagcaactaagagaatcgaacaaaaggacagaaaaatcttggaataatgacaaggaaactttgaaaaatttgaaaactgatttagagatattatcgttaaccaaaaatggcatagagaatgaccttaatgccaaaaagagtttttatgaaagggagattagtgaactaaagggaagaatattgaatttgaataacgaaaacgataaattgattattaatgtttcagaattgacaagcgaaatcaattctttacaaggcgataaagctgaaagagtagaaattcaagagcagattaacaaagctagggcatctatttcttga

SEQ ID NO: 3758 - DNA, 213 bp, Saccharomyces pastorianus
aaaccccccgggcttacaacatgggacactaaatcctgtcccagctccgtatcacaattgaagagaatccagagagattttaagggcctgcctcccgcccaggacttctctgccgcacccattctcgtatccaccgccgccaaggacgagactagtgtcggcgtcagtgccagtgccaccggcggcaagaagactacattcgctgacgagtag

SEQ ID NO: 3759 - DNA, 363 bp, Saccharomyces pastorianus
atgaggtatgtacgcaatacagaggacatctcatcgggccgtagagcacagctcagcacagcacagtacacaatgatgaaaggttccagaagagcaggcaataactcggtcaccacactcaacacccctgtggtcatccacactacacagctgccccagcacgtctccacggatgaggtcctacagttcctggagggcttcatcaacgagaaggagagcatcattgacagcaccacgatgaacaccatcaacgtcaacgccgcggacgcggacgttgccgccggtgccgccaaccccgggctaaacatggacactaatctgtccagctccgtatcacaatccaagcgacacacgagccagtga

SEQ ID NO: 3760 - DNA, 3147 bp, Saccharomyces pastorianus
atgacttctctgttctttgttctgatgttgccactccgttcctttggctctagtcatgagtatgatttacagcctctttttattttcgtctttgttccacatgaaaaacgaaggaataataacaactattcagctctaataataaacaaaatagagttgtttacattcaggcgtcgatcgaacgggaagacaattagcattgggcccggatatagtagacgtgattttactaccatggataactttcaagttagtgatgaggatttactccaattttatcagttgaagactatcaatccaactcgttcatgggtacaagattcctcaaaattaaataacgatgaggctactaccactgaatttgggacggaatcgtcttttgacatattgaaagactttaaatacggtaatcagattagcattgacaaggaatcaagggcctatttgaatgatgaagccttaagcttcatcagggatcccttaagtggtcaagagatgtccaaggaactacaatattggaatctaccaaacgattcaacaaggttaaagtatcttgttaatagcaagcaatttaatgtgaaggcctttttaagagatatgcacaaacaggactccttcaaagatttaaataactcgttggataagctggacaatgatatacaagtccaatccggaaatttaacacagttggttggtaaaaacttcaccaaatatgttaaaatcaaaaacaaactggatcaaatgtacaaagaatttgatgagaagactaacgaaaacatccaagacgattcaccaaaggagaatcaaataaatgtgaaaaatttaaataaaaaagtcgacgaggttattaggacaacaacttttaggttgaaaccattaacggataactatcaaaaaattctaagttaccaagcaaccaaaaaatttatagaacaaaacaagttttacttcaatttacccaaatctttgaaaaaatgtttaaataataacaatttcaatgaatttatggttcaatactcaaaaggtgtcaatatccgccgtggttttaaccaaagtttagatacctcacaatcgttaattattaaaagaatctggtctcaggttgaaaaagtactaaccatctataaagacttgatttggaacagtttgataaactcaaatttcgacgttgaccaacctcaagagactatactttccttattttccaaattattgaatttagaaaacttcatcaacaaaaatcaaactggtgacaagaatgccgcttcatcatctaatgaaaacccaatcttgaggtggatgaccataaaattgaatggttttcagggtgatttaagcgagttgtctaatcatatgatcaataaaattattcattctcaaaagctcatcttacagaacaacaccaatcaagatcataatcaggattgcattgaattgtcctattatctacaaattaaccagctgttccagaatataagtgatattagtaaagacagtgatgacttaagaaccgccactgacccaagcaagatcaataccatctctgcaactaattatttaaacttgaattctcaatctagttctcaggggttaaccgactctccaataattatcgaaatgtggctattgattttaaagtatattaatgacctgtggaaaatatgcaatcaattcatagaattttgggaacacatcgaaaagtttttggatggaacttatcaaaactctattatcaatgaaaagagaaaggaaaatattctgatcggtgattctaacataattgaatcataccaaaaaagtttaatattaaagaaagaacagattagcgacatcaggttaaaaggtgagaatttcatcaacttagtttcacagaacttgctgtcttttttcaagtcttctcaagcttctttacccttctcgttgaagagggaccaaagtagcgaaaaggctggcaataataaggaaactgggtcacctttggactatgggtttataccaccgaattgtaatgggttaagttgtttgagatacctacccaaagttgtggagcccattttaaaattctctaccgaattagcacaattaaacattacaacgaacggtattgatatttgcagaaccactttatcggtcataatcgatcgttgcgtaggtgctatctcttcgacaaaattgagagatatctcaaacttttatcaactagagaattggcaagtttatgaaactgttattttttcaagcaaatcaaaggacaataacaagaatttagtttttgagtatggtgtgacacagtttccagaaattgttcgttccttccaagaagtcagtatcaagaccacgagagacttattatttgcattcgagaaactgccaattattaacggaatttcagtggtcagctacccgtcaaaacaattacttacaggcattgaaattcaacaaattatctcgctggaagctgttttggaagcaattttaaaaaatgccgctaaagataaagacaatccaagaaattctcatacaatattgacattgacaaatctacagtacattagagagtgcacgtttccaaatgtattgcagtactttgatgatgcgtttgaatggaacttaacttccaagaacttagaattgttcagcttattgtccaaaatggaatcgtccatctttggaaattatctttctgacttaaaaattaatttgagagatactcttgaagagaaattccatgaaataaattggccaatgtacacatcaaattcatttagagtgggtgattatattatagaagcgttgatgattttgattgtggtccacagtgaatgttttagaattgggccccagttgattcacaagattctgattgaaactcaaatttttatagcaagatacctattcgaagcatttaaaccttatatcggcaacctttctaacgatggtttattacaagttatagtggatctagaatttttccaaagagtcatgggcccattattggaaaaggacactgaggcaacattaagggcgtgtttacaaaattgtttccagaacgacacaaatagactacagaaacgtatcaatgaaatcgaacccattgtatccgcaaatctgaagaggacttctattcaatttgctgcgttcaattga

SEQ ID NO: 3761 - DNA, 984 bp, Saccharomyces pastorianus
atgatcaggaatatgaaggtaccactgggactatggaaggcttcaagtggcagcatattgtgcacgcagagaagggtcttcccaatgaccagaagcatgaatacaggtgcaagtagtgaagttgcagctgtagccgcggcaaaggagggcccagccctttcagcagacctttatatgcatccggaaaagtggaaagggctgccaccccaaaggattttggaattatactgggaaagaatggctagattgggttcggaatataagcccaacaaggacgagttgagtgctttattaaccacgtcggagtattctgatgtgtcaagtagtgatatcaagaagctatactataaaggggagcagggtgctatcgatattaaaggtggaactgtaaatcgtgatgatagtcttagaccatttatgtttgacgaattaccttcccaagctcaagaattggtggctcaacatcgtgaacaaaggttttataatcgactagctgcctacgaattgccattattggcgcaatatcgccaggaatacaagaaaccatctgcaaagactcacccggtcacttacaggtacactaactacgtcggtgaggaacatccaaattcaagaaaagttgtattgagtgttaaaacagaggatctgaatctagagacaaaatctctacataagtttagagtattggctaggtcacgttatgaccatattacggatattttcaaaatgtctagtgacaaatttgaaaatgcgtcacaaaacgcacgttatctgcatgatattttacaaaaactgctagccgaatcaaaagatttgaccaaagacgattttagcgatgtgcctattgatatgagacatactattgccaagaacctgcgtaaaaagaagcataatcacaagtttcctgaagaatggaaacgtcctgaagatgcgccgaaaaagaagtttgatatagtagatcagtttatgaatacacttcaatga

SEQ ID NO: 3762 - DNA, 780 bp, Saccharomyces pastorianus
atgaacaataggactgacggcacagatatgtcattatcacaagagactggacccagtgttcggacacccgacagcgacatcgacgaagacgcatccttccaggcaaaatcaacaggaaacaaagacggtggtagtaccacaagtacactacctcaacagattggatggataacaaatggaatcaatctagactatccaacctttgaagaacggttgaaaagagaactaaagtatgtggggatatatatgaacatgcccaaagatgaaaacaatcctaactcagatgaccctgattggattaccggtagagaagacgacgagataagcgcggaattaagagagttacaaaccacattgaaacaggtgaccaaaaaaaatcaaaaaaggaaagccctgctgattccgttagtcgagaggcaattagcatggcaggaatactcatctattttggaggacttagacaagcagattgaccaggcttatgtcaagcgcattcgtgtacctaagaaaagaaagaagcatcatacagcaacttcaagtaatgtgaatacaggaaccacatctcaaatagcacaacagaaggctgctaactcgagcctaaagtcgttactagataagaggcagaggtggattaacaagattggtcctctatttgacaagcctgaacttatgaaaagaattcctgctgaaagcgtattcaaggacatagaccaagaagaagatgaagacgaaggcgatgtgtttggacaaaacattaacaaggacgtggaactaaactga

SEQ ID NO: 3763 - DNA, 1095 bp, Saccharomyces pastorianus
atgcctagacatggaagaagaggaaagctgccaaagagcgaaaagctccctaagaaagaggaaacagacaatacgccgtcgaaacttttatcatctatgttaaaaacgttagatttatcattcgagcgtgacattggaatgctcaatggaaaagccgttagatctatacccagtaagaagacattgttagaattacaagctcaattggatagcctcaacgaaatattgggtgcaattgcccaaagtgatagagagactatagaagctttacgaaaaataagagatagtaaggacgaaaaggaagcagacaatgaagagcagaaagaattaactgcaaatggaaaagacgaaaaggaaatggctgataaggaaaaggacgaaaataaacagaaggaagataatttattagaatcacatccatctgaaacccttcctggcacaattgaaaatgatgtagaaagcatcaaacaagccgcagatactatggctagggaagaaatcaacgaagacaaagagttgcaggtaaacaaagaccaaccaagggaaaagaggccatttgagtctgaaataacaaatgacggcgcagagaatgaaagtacgaacgaaccagaaaataaaaaacagaaagttgacattgataaaatggaaaatgatccatcagtgaaaaatccaaaatcagaatttgttgtatcacagacactaccacttgcagcagcggccttgggattatttaatgaggagggactagaaagtacaggagaggatttcttgaaaagaaaatataatgttgctagctaccctacaaatgatttaaaggaattactaccaggtgagttaccagacacagacttttcgcatcccaagccaactaatcaaatccaatttaacacttttttggcctttgtggaaaacttctttaaagacctcagtgatgacaatgtaaagtttttgaagacgaaatatattttaccggatagtttacaatttgacaaaacatatgaccctgaaataaagccatttgtcataccgaaattgggtcctctatattctgacatctggtctaaagatgaaacacgactaaaaccctgcctttaa

SEQ ID NO: 3764 - DNA, 147 bp, Saccharomyces pastorianus
atgtacatgctagggttaggttctgctttctctcttttcgggatttataaattggagacagaaaacgatggttttgttggcttggttaagagtctatgggactcttctaaaagagaagattcagcaaagattgaggccaagaaatag

SEQ ID NO: 3765 - DNA, 744 bp, Saccharomyces pastorianus
atggtaggcatctacacatatagaagtaaggtcttatggtataggcagacttccctggtgattattgcaatttgcttttcttatgttgttgctttcttgccttcttgcttattatgctttcggaatgcgaaaataatggaactgaactactcatgtagcctttttttatgtatatactgtatcacatacaagggtaaacaaacaaaaggaaaaacaagtgatgatctgaatggaacaaaaaaaaaatcagcaatgagggaggaaacaataagagcgttagaagagcctcacaaataccattataaagcagaatggttggagagtaaagatctcgatgaacgacagttatttgaaatatttgcttttggaaacattaaggatgttccggaagatacaaccttaacatcttcgatgcgatcgaaacttgaaaagttgactttgataacattgagtgaaacatataatgagttgacgtatgagaacataaggaagcaatgtcaaattgaagataacagtatcattgaaaaccacttaatccagttacaagatattttcaaagtagaaatagactctgttaatttatctataatttttttgaaaagactggattgcagagatgtatattgtaatgaacgagaattggttgtgattgagaacccgcgagtgacgaaagagtgtttagtaaacaatctacgaaagtggaagataaagctcaaacaagatatactggatcagtcgaagtaa

SEQ ID NO: 3766 - DNA, 1386 bp, Saccharomyces pastorianus
atgcctaccattttatataacaccaattccagcttaatttctaaataccgaagatctaatgcctccaagccatataaaggactaccatcgaagaaagcgcataagcgattgagtttgccaccagatattttcaaagaggagtctggctatacgcgaaattgtaatgacgatatatcattccaaagtgaattcgagaaggattctgttggatatctccaggatttatgttgctccgtatacccaagttcactgcatcaaaggatcaagaacctgagaggttcaccagatttacaaataaatgcattcattgcgttaattttcaaaaatttcattaaatcttggtacggtgtcaaaatacctactaatgattcaaaattcttaactgaattgtacaatttggttcaaaatttggtaaagtatatgaaaaattcccaaatcgactacggttcccttctacttgattacattccctgtttggtttcatcccatttgaaagctttgagagactgtccccaggataccaatcttgtttatgaacattattgccagttaactctatatgattccaaacgatacccaggcttattcatagatattatccaaaataaaatgaacaccaaatctctattgcaaagaagtttcttggatagttttcttaatgaacttgtatttggacatatattggattcgataatagagccatatcatcttctgaacggtctgaatataatttgcaagaagataaagctaaggtcagcaatgaaccccaaagaaagtagcacagatgaaaaaagtaaagctggtgcctggtcgtttgtaggcaaaataaagcataagatttctcaagtgggtaaacttgtatcttattcaacttcaatgaaatcgccaaacatggacagcaccggtattccagaaataccgtttttacagaggtacatctttaccttcattcttgttgattttttcaaattgcccatgaggaagccgtttttattctcaatgtgcagaacttttcaatgctggatctctaaatctaagtttttgaacaaaatgatgtatagaatgtttgctaatactgcccaggctaaaatcaccgatcctacaatacttggcggtttgtttgtatcactacggcattcactgttccctaatgatagtgcaatgggaccaccgaaaacaataccaatagacgatgctttcttggagtttaggggggaatgcgtttctaatgtatgggatgtgtgtatcgcttacagaatcgataaaattcttgccatcaagaaatttgacatcgaggaagttatccattctttgtcaaaagatcgggattgtaataaactactgctttatagagctatggactgtgttgctgctcaattaccttaa

SEQ ID NO: 3767 - DNA, 1470 bp, Saccharomyces pastorianus
atggaaccagtggaaaaagcaaagaatgattctaaaaggtcactaagatcaaaggctcaaaacgagcatggggaaattgaaaagtttgattttgatacagaagaatatgaagtcaaccctaaaaggaaactaagactggttagcaggataaatccaaacgcgaggcatttaaggaaggctaaatcccaacttcatattacagcgaaaattgcaagcgttgttcctcatgaagagcatgctaaggaagcggctagtcagcaacctgtattgaaatctccagccatgatgagcactttctgtagtgaggtcgaagaaaagaaaaaaacaattacgaagatgatacttaatattgaaaaccatgaattaaatttatcaaacaacaactcaacagaggatttgcttcccgattgtatatatcaatcttaccataagaaaatgctgaagcaagaaaataggatgattcaatcagatgtcgtgaacagcgaaaatgaagcagataggctttctttgatatctgatagattggatatgttaaactggacaacaacactgcaaaaggttaccaaaataaacgatcccacagacaagaatgaaatggagaccaaacgctaccagacaaaagagctaattgattccatgctaagtaaatttgaatccatgaaaaaaaagagctataaattagctcgaaggccagcatcaagcgactctttgctaaaactggtcagtagtaaagactggcctaaactatacacacggattgaccgaactttcatcccggattatgcaagctcatctgatgaagaggaagatgatataatagtcgaggaaataaggcagaggcggttaaagaaaagagaacagcaatgcggcggctctattataatattactaagtgaccatcaatcgcaaaaaggaatgacacggtttgctattgtagctgagccgctacggaagccgtatgtgatcaaaacgtcacatgcagagagaactttatggaagacgaaagcgcctttgaacccaaagaagttcagaaaaaattttcgagcaccaacacaagtagctataaagaaaagaaaactagctatccctttgactatggaggtagaaccagagatcattcgagatataagacacaaactacaagaatctctaaaatcaaatgctatagaggaggaaatggcgatagcagatactgatgagtcgggggtcaaaaataattctagggacactccggaacctccaattctaaccgttccagaaacgacaccatttgactatacctttgcgtcaactgcatctgagactttaccgggctcttccaaaaagatagctacggtgggcacgaacatagagacaagtttcacaacagtgccttctgttgacgaagataaattcgtaaaagcgcacaatggcattattagtgattcggatatcaccatcttgcctgtccgcaaaagaaaaaaagcttga

SEQ ID NO: 3768 - DNA, 384 bp, Saccharomyces pastorianus
atggttgtaatacattttgaattagagtcattcgggaagtgccagtacatgaatgagaaactggaaatcttggctaggaaacatctaactacaagatttattaaagtaaatgtcggaacgtgtccttttctagtcaataaactaaatgttaaagtactgccgtttgtactaggttataaaaatggtctggaaaaagtccgttatgttggctttagcagattaggtaacgatccaaacggatttgatattaaaagactggaagagtctctgacgctttcaggagttattgaagacgaattcaaaaccaagaatcgatcatttggtaatgcgaaatcttttacttccagaagtgatagtgatagcgacagtggtttagatatttag

SEQ ID NO: 3769 - DNA, 1128 bp, Saccharomyces pastorianus
atgcagagccgtaccatgaaacacgaaactgccttacccattactccacctagcacggtggaaaaaaagcctcaagtgggggatcgttgtgatgagcgtttaaagccaagaaagttgttatcgcaattgaagaagagtgtcagtagcaggaaaccaagattgaagtataggcctgtattgaactctgtgtttgatctggacgccttcatggattccaagctctcctgtacgtcgccaaaccatcatatggaccgcgatgctggtttcattaaatatgcattgagttatagtaaaagaatggtggtggttagcggtgcaggcgtgtcagttgctgcagggataccagatttcagatcgagtgaaggtgttttctctacagagaacggtggttctggtaaggatttatttgattacaaccgtgtgtatggagacgaatcaatgagcgttaaattcaatcggttaatggtttcgctgttcaagttgtcgaatgattgtctgcccacacgatttcatgaaatgctcaatggttttgcgaaagatggaagacttttaaggttgtacactcagaacattgatggtttggacactcaattatctcatttggcaacaaatgttcctttggcaaagccaataccgagtacagtacagttgcacggaagcataaaacatatggaatgtaacaaatgtctaaatgtcaaaccttttgaccctgaaatattcaaatgcgacgacggatatgattcacgaactgaaattataccgtcatgtccacagtgtgaagaatttgaaacggtgaggagaattgcgggtttaagatccactggcgtgggtaaattacgtccaagggtaatcctatacaatgagattcatcctgagggcgatttcattggtgaaattgctaataacgatttgaagaaaagaccagattgtttaattgttgttggtacaagtttgaagattcccggtgtgaaaaatatttgcagacagtttgcagccaaagttcatgcaaacaagggtattgtgctatatttgaacaccagtatgccccctaagaacatattggattcattgaaatttgtagacttgattgtgctgggagactgtcaacatattacttcattgctatag

SEQ ID NO: 3770 - DNA, 174 bp, Saccharomyces pastorianus
atggcgttgttattggtgacgttggcagtgaacggattcataccgttcgtattggagagattgggcttgacgcccgacgtgaacggattaccgaaacttgacattatagttatgttgttactcgcgttcaactcctatgggaaattgatgaaatcctgtgttatagctctctga

SEQ ID NO: 3771 - DNA, 141 bp, Saccharomyces pastorianus
atggaatgtgaaaagttaatagtatccacaagcgatccaactttgatcagtataagtgccaaattgaacagtcttagagctacgatgacaaatcatcaagccaatttgaatgccaataaacgattacttgcaaccaagtaa

SEQ ID NO: 3772 - DNA, 882 bp, Saccharomyces pastorianus
atgagtgttgagttgtatccaaatgacaggtttggagcagctgcccagtatgatgagcataaagatgccatggcagaatgttcatgggtcatcgaagagattgttaaaccacaactgcctaacatcattgacaatttctccaaatgtctggaaatgctagagagtgaccagatatttaagatgcccatatccaatggtattcccaacgaaaacagcaaacaaaacgattcaccgacggtcaagggcgtcatcacgagacaaggtgaatatatcattgattttcatattgtagtaaaatttccacagtttcaaagaggcaaacaagttatgttccggatgaataccgggttgaatttcttacttgtccagttcagtaagataatgacccatttgaaaagtatactagaaatactgaaccagttacaactggccactgatgtcaacgagttcggggataagtttgacgtggcgatggagctactaaatcattccctagcactcttacaaaatcctccaagagatctggtatttccagaggataataactatgccatgaaggaaatgtttcaggattgctattcaatctgcgaatccacggctcatatcctgggactggaactaacgctttgtaaaaatgagctctgcattgaattgcggaatcttattaaagtgacaaagaaaccttggtgcgaaattgataatagaactggcaaatcattttgtgacgatataagaaatcaagtgacaaatgaaagacaaaaaaatttgtctaaaatcctttcagaaaatggtgtgcaagtccaggattccaccttactgaatcatttgatctcttcttttcaagcgaagccattacactcccagaagcccaggaactactaa

SEQ ID NO: 3773 - DNA, 2178 bp, Saccharomyces pastorianus
atgatgggtctgcaagaactactggcgaaagtgccgttgttgctatcgtatccaactatcattctatccagcaatctgatcataccctcccataatgatctaataagtacagctacatcagcagcggaacaagatgggcaaagaccggttccgtttaccacagaccacatcatcagagtggttctacttccaacatttatcgcctcatcttttaacctgtttgcgtactacttcaatttcgtcaattacaccaaccgaaagaagtattgggttttatttgttgctatcttcctcatatcgatactgactaccattttccatccaattcagtccacatgtatttctctgtcaattattaagcgcttaactgctgctactgaatcttcatcgaaaactgttttcgacttcaaaaccattctaaaaatgtttgtgccctttatcgttatgacactggtgatactgcgctttgatccgtcattagagtctggtatgagtgatatggataaattttctgtgcctttggttacatatgcattattagtgattttgctaagatgcgtatcaccactgctactatcgaccttatcggataacgtagatgttgcatctaaagacagcggtacacagaaatcggtaggcaggaacaagaagtttccgctgatgattatactaccaattgtttcgtttacttttttgtacctaacgactataataaacaatacttataacatccagttgttgatggtgtttgtattttttggatgtttgtctatcttcttcctatctttaaaagatttgttcgcagaagatgtgaatcaagaaaaagagattcacgaagcggagcatcgtcataagtttgggataaattacgtgatttctcacttttggttgacaaggttcaccattctattaactggaacaatggctattatagtacattttttatcgtttaatgaggttacttcttccaagaagacagatttgctgagtttactttttgtcatagtggcagaatgtatttcttcttcttccagcatagaggcagattcgcattctcttaatcatgcgcattgtcattctcatacgtgtgattcgacatcacttgaaaatgaaagtatatttagacagatggctttaaacaaggatacaaggtccattttttctttcctattattaaacactgcctttatgtttgttcaattattgtactcttttcgttccaagtcattaggtttattatctgactcattacatatggctttagactgcacttctttattgttgggtttaattgctggaatattgaccaagaaacccgcaagtgataagttccccttcggcttgaattaccttggcactctggctggtttcactaatggtgttcttttactaggtattgtatgcggtatctttgtggaggcccttgaaagaatctttaaccccattcatctacatgcaacaaatgagcttttagttgttgccacgttgggtttgttagtcaaccttgtcggtttatttgcattcgaccacggtgctcatgatcatggtggtacggataacgagaatatgaagggcattttcttacacatattggcagatacattaggttctgtcggggtggttatttctacgttattgattaaactgacacactggccaatctttgacccaatcgcttctttattgattggttctttaatcttactaagtgctctgcccttactgaaatcgactgcctcaaatattttactaaaattagacgataaaaagcataacatagtgaaaagcgcgctgaaccaaatatcaacgacaccaggtattactggttacacaacccccaggttttggcctacggagtcaggtagctccgggcattctcattctcatggtcacacgcactctcatgaacaaggtcatgggcacgagcaacaacatgatcatactaaccaaccacaaataaagccgactttggtagggtacattcatgtacagtacgcagaaggcgaaaattcgacaatcatcaagaaaagagccgaaaagatatttgaaaatgtggggatcaaagcatgggtacaagttgaggttcagaactctacctgctggtgtcgcgctacttcaatgaatacagtttcgaccacgagccccagttctctacctctacaatccatagcgaattga

SEQ ID NO: 3774 - DNA, 1014 bp, Saccharomyces pastorianus
atgagattcatcaaacagattgatcgttcgtttactgaaaaggtaagaaaaggacaaatcacaaagatattcgattcatttttgaattccaaaaaattgaacttcctaaaggattcctctattgaggtactgtgtgagtttctagtcgctttgaacttttctattcgtaacattgcatatctgtacattgaagaagacaccagtcttgaccaccaaggaacgaactctctagagaagccaggtatttgtttaaataaacaagcgctctcggttttcaatttgcaaggcttttattatagttttattttaatcataaaattcttattggattttgaggcaacacccaatttcaaattactaagaatatttattgaattaagaagccttgcaaattctatcatgttgcctaaattatcaaaattatatccccgcgagttttctggatttccagatgttgtactaatgcaacaacttctaaataaagaaaaccattttcgcggtcctgatttatctagaagcgaacgtaccaatagttcattcacaggtttaaaggcaaaattgaacaagaagattaatgtcgaaggcttggaattgtttattaatgaaatcctggtgaattctttcaacgatacttccttcttgaatatggaagattctatccgaaacgagttttcttttgataatcaagagaggccagttttagatatgactcatccagcacactttctatcaaattcgaacttagaaaatgttaactgtaatggtctaaacgactctcaccaaacgatttctactttaaatctgttgcgttatggagaacatgattcgtccagccataaaaatggcgtaaagggacaaggttttgctgaaaagtaccagttatcttcaaaatatgttactattgcaaaactgtttttcaccaatgttaaacaaaactatattcattgccatatgctggacaagatggctggcgatttccatactttggaggagtatataaaggaagtcagctga

SEQ ID NO: 3775 - DNA, 1083 bp, Saccharomyces pastorianus
atgatagtaatggagactccgctggactcgaattcgaatgtgctgtccaaagaattgataatgccaactacaacggaactgaatgaatacttggaccttttcaaaaacaattttcttctgcacttccccatcattcatccaagtttgctcgacctggatttgaaaaatctacaacagtatactaatgaaggtgagtataccgacatcgagaacgcccaatttgatcagggtacggataaggattataattttaaacactatcaaatattgtccatttctaaaatcgtttgtctccccctatttatggctacatttggctctttgcataaattcggttataagtcccaaacaattgagctgtatgagatgagtagaagagttttgcacacgttcctagagactaagagactatgtcgcaataaagccatgagtgagaatcatcaaaatatctggctgatgcagtctttgatattaagcttcatgtttgccttagtagctgactatttggaaaaaatcgattcttccttaatgaaaaggcaactgtcggcactttgttccactatcaggtcaaactgtctgccgacgatttctgctaactctgaaaatagcttcaacaacaacaatgaacctttaacgtttggttcttcacttcagtacattatttttgaatcaaaaatcagatgtacgctaatggcttataatttctgtcaatttttgaaatgcttcttccatatcaaattcgatttatccataaaggaaagcgatgtcgaaactatttatatacccgataatgagtcgaagtggacaagtgaatcgatactgttcgacaagcatgttgtacaaaaggaaaaccttcatgattttagaaacttctactacagtttcacatatggacatctactttcaataccagagtttctagggtcgtcaatgatttactatgaatatgatttgaaaaagggcactaagtcgcatgtgttcttagatagaatcgatacgaaaaggttggagagaagtctggatatttcttcgtataacatcgataatggcatgacaacaaataacaaagataatacatcttag

SEQ ID NO: 3776 - DNA, 1125 bp, Saccharomyces pastorianus
  modified_base (94)..(121): a, c, g, t, unknown, or other
atgttaactttgaaaacccacaatatatctgtggttggatcattaaagaatgtgcagcaaaagtacaaattaggcactttagatcaagtaaagnnnnnnnnnnnnnnnnnnnnnnnnnnnnccaaaaaagaaggaaatgcttctttcaaagattcaaatctagacctaagcaagtgctccgagacaccaagggaacaggtcgtccatatggccgtaatacaaggaatgaatcactttattgaactgaatgataaagcattccagacgcattcagctgattcagatgatacatacatagatgaaaacaatgatgagatacattcccttcatgagttggaaaagaacacaacatttgaggaggatttggctaaaaagccatgtttcaccccatccccaacgttttctaattattccagaagctcaactaattctgtcttttcaagttcgtctcctaaacttctagatgatgattggaataatatcgcggctgatttctcaaaatcacaagatccagactacaaagagacaacccctacatctaccgaatcgtctgattcaattacgagattgagaaaatctagtaaagttaaggataaagccgagttgtttgaaaagttaatttttagagatagcaggccattaaaagcaaagaaaaaagacaacccaagaatgaaactacctagttcgttaagtgttaatgacgaagactttagaaagatcataagccctccttctgaaattttacctaaagccagccgaagaagcgtctcgagaggctacttagaagaaattgaaagacgcagtcccgatcaaaccaatgaaatgctaaattctttggcaattaaaagaataaacagcaggaaagtagcagactatgagcaactcattaaaagagaaaataatattaatactgaaaaaggggaggagaataatgatgaaaataaacttcagaggagtcatacttccccagtaatagaaccactaaaacctcaccaaagaagcaaactcaaggcagttgtcacaactggtagtaaaataagctatcgtaaaattgatttagataactcgaatgcaaatgaccatgtaattaagcaacttcatactaatactaattctaatatataa

SEQ ID NO: 3777 - DNA, 789 bp, Saccharomyces pastorianus
  modified_base (358)..(385): a, c, g, t, unknown, or other
atgtcatcatattcttaccatatactaacaccgctggaggagaagtctttgacaaacttaccgttgaatttattattccgaatactgtcacacctggacatgaatgatttgcaaagcatagggaaaacctgcactctgttacggatgctggcaaatgaaaacattgtttacagaaatgctcttattggttcaaacgggaacatgtggtggaccaaaaatgtccttgttgatgtttttgatattttgaactttaacagaaaggcaatgttaactttgaaaaaccacaatatatctgtggttggatcattaaagaatgtgcagcaaaagtacaaattaggcactttagatcaagtaaagnnnnnnnnnnnnnnnnnnnnnnnnnnnnccaaaaaagaaggaaatgcttctttcaaagattcaaatctagacctaagcaagtgctccgagacaccaagggaacaggtcgtccatatggccgtaatacaaggaatgaatcactttattgaactgaatgataaagcattccagacgcattcagctgattcagatgatacatacatagatgaaaacaatgatgagatacattcccttcatgagttggaaaagaacacaacatttgaggaggatttggctaaaaagccatgtttcaccccatccccaacgttttctaattattccagaagctcaactaattctgtcttttcaagttcgtctcctaaacttctagatgatgattggaataatatcgcggctgatttctcaaaatcacaagatcgacaagctgatccg

SEQ ID NO: 3778 - DNA, 1695 bp, Saccharomyces pastorianus
atgctagctgatatacccgctgaaagcactatgcggcgcaagtcccacttgccaaatagaaatgtgccgaatgaaataagcagtactgccctatcttcatcgacctcttcagctgtctcctattcatctaataatgatgatggcagttttgatttcccttcagattcttctttaagcgacatttctgacgtagaaagtagttacacaagcataaaaagattgaaattagaaaacagcaaggaagggaaaaatcagtcttacaattattttgagaagaggaacgcaaatgctttagaaaaggaggcttctcttgacgacgattctaagatagaaacagatgatagaataaatcatctgcttacctcagccagccgcacgacatacgtcagtaatatgcgcgatggcctagctgaaaatcggcctgatttgtcaataagtaaatgtggagcccacgaatattatttaagcgattcatcatcgggaatcacccagaaagaggaggacattggtgtcgaagtctttagagatggggaacttgattgttgccaagtactatcgataaataatgacgaacttgttaattttcaatatccggaaacagaaactgatatggaattcgacgaagtatttttaacaccattagatggtgtgaacagagtaggaaaagggaagggatcgattggaaaagatctgaatagttgcatttttgagcaacacacgcagctaaattcaggagttcagcttgttggcgaaagcaatgcctttccaatattgagtacatccaacgtttcttctctcaccgaggctttgcataaaattcatgaagacaagctccgttcgcctactgatgagaactttaatgcgtcaaatgtcgttatagattcaaataaaatagacatgaattacctttataccaatgctagagaggagttatctactccctcattttcatcaaaagactttgaagatgaaagttttgataacgatgacaaagtcgatgaagtcatatacagggatgatgattcaacagacgaagatgagagtttaccaccaccggatccaagaaggaaaaaaatcggttccaaagcttgtgaaatagtggattctagaaaagttggcataaatgtaccaaagttatgtatgtggtccctaagtgataaacccttttgtgttattgacggactatgtacaaaatcgctctgtccattagccgagaacctttctaactgcgaaagctcaagttcgagctcaagtcccattaatccacaggaggagcaaaaagaaaactcaccttttgataatgataccatgttaaccgatcttttaaacataagtgaagctgaagcagagaaagcccccatttgttgcagcgaacatacacatgaacctttttctgaaattccaaaagggccattatcgtcatttagagatagaggaaaagctttacaagacacaggcgtaccttacaagctgaacgtttcaaaattcactagaatgggcacccgttatgtgagcaaagatcaatcagagggaggaaatggaaacttctgttattccgaatcactaccccaagagaaaaagaggaatttaatgattagagaaagacgtctaaagcagaaacagaatcaagggaagctttataaacaaaagctaacctccgtcaataatttgctcgacaatattactccattttga

SEQ ID NO: 3779 - DNA, 3114 bp, Saccharomyces pastorianus
atgaaagaggatgccgatctaaggcggatggagattttaaagtcaccgcattcatctaaaaaatcacctgaaaaacctcttggactaaaggacaaccaagatgtgtcaaccgaggatgaggtctctgactataccgcctctcccagtaaaagtgaaagcgatagaagtggaaataattccaaagcaccatttagtgctggacctgaaattgcagaaaataaaaatgatataaacggttccgaaaccaacgggaatgacaaaactaaagaagttaaaattaaacgccccgaaaccaaaatcaccgaagcatatatgaataaagctagtattaacgaagcagtcggaacgatcaggcaaataacgcacaaaggaccaataaatagtggaaaaactgtatttcagagctcccaaaagatcgaaacagatcctcttcagaaggcttttcaaacaaattcaacaattgaaatttcaagcttcaatccatcaaaaagagctcgggtggaggatctgctgaatccctcgaaaaagaacaaacttaataaggaatcattctcaaatacaccaaaaggtacagcgaacccctccgtgcatccagaaacccagttagctatcaaagatgcctcgaacacaaaagaaataataaatgtaattgatactggcaaacaagatattttggttagctcacctcaaagcgacgctctccgttctacacaaacaattatacagagagacaacttacaaaaaaatgtacgagatccttctcaggccgaatatacttctgccaaatcttcagtagccatcaagaagcgggataattcaaaaagcccacctccggcacataataataaagaaccagcaaagaagaagtggagtagtgtcctagacgaagaaggtgtccctgaggctgtcgaaagtcgttcgttattgaatttgttttcaaacgtattcaagacttcccttcatagtaaaaataaatctccgattggaaatgctttacatatgttagggcaaaagcctagtgctccggaagttgctgttaccacggaatcgctgggaaacaaatctgatgatatgccactatcccaaccagttaacggaagtaagcctgagtatacgaatgatcctcaaacctctttatcccaacccactggagctggcgaagccgttgctcaatctattaaaagttctttactagatttggcaaaggataagcaaattatggaagagaagttcaatcgcggaagaacggatacgggaatatctcaccctgcaaaaatggagcttatttacatatctgaccccgacaagaggtattcagagaatgatagttcaagcgatttggagagcttaagttctcgcgaatcagacgaaatcaaagtagtaaaagatatcgatacaagcactggaaagaaccaaaatcaaacatggtctgaccctgaattagagtggcgaagatctgaacgtgaattaaccaaaaacatacttcgaagtctagatgataatacaaaatacgataagaaaacaatgtgtatccttatcgagcaaggtattcccaggcacagccacctaagcaataatccattgactagtgtgactaataacatctgctctgttgaaaactatgaaacgtcaaacgcatttttctatcaacaagttcacaagagagatagattacagtacttaccattatatgaggcttcaacattagaagaatctgatgttgttaaaagggaagattcggtcaacaaaaataccagaacagaaggaaaaaattcagaacagagtcttactccgacaaaaacttttcaaacaccaaccatatcatctccattaggctttgaaataataaacgcacctataaacaaaaatggcacgatcaccaaagagactggcgtgactacccaccacgatattagtcacagtaaagccaagaataacaaagagaacctatcgaaagatttttggagacaagagtggttagcaaatctgaaactcatttcggtctcacttgtggatgaatttccttcaaaaactcccaagagtgagagacagacaattaacgaaaacatggaaaggctcaaagagatatttgttaggaagtttggttcaaaaatttccaaggttttaactgagagcgacatcgttatattgaaaggcgagatagaggattttccaatagattctagagtcaaatctttatataatgatacacaaaacaagcctgggacgaaaaaaaccaggttttggtcatacaagaagactctaagattcgttgtcaacatgggaattcatatacatatgccacagaagcctatttccaaactggcattggtcaaaccacaagaagtcgtaccgcagcaaataatagatgccaaacttaaaccaaacgataaaaaatcacaaccgacaaaggaactgtcatcgattaaacatgtagctgcaccaccgccagcagcttcaaagcctgtaaggcagcagcaaaagatagccaataaggagaggctaccagaaaaagagcagatcgacggcaaaaacgaggaaagaaaaaaggtcgttgaaaatggtgaggtcgagccgcaaaacatacccctatcccacttgaatgcggtatcttctggctatactaatctggacaaaaatgttgcaactgctgaagatcaaccagatactcaatccgaaattatcacggataagaacacaacagacatttttagcagtgttgatgttttgaaaacacagtcagtaatctgctcacaaccagcaaatatatacacatcaactcaaaaaacagaatatgaaaccaaaaatcaagacaatgatatcgaaaaattggaaggagaacatatggatgacgacggcctttcctttgttgataaccttttgtcgagaacagagttaattttggacgaaaaggaaaaacagctggtcgcagcaaatgaaatcatccagtctttgtcaagtgtgattatgagagatgaaatcaaaataacgtcacttagaggagacctcaactttacaaaaaaatctctcaaggatgccaaaagtcagatttctgagaaagatgctaggattcaaaagttaatgctaagagtttttaaaaaaaggagaggatga

SEQ ID NO: 3780 - DNA, 720 bp, Saccharomyces pastorianus
atgtctgatggtaagaaaacgcccaataggttgagcacaccgaagattactaatgattcaaagacaccaacggataaaaacgctaaaattagtgaaaaattaaacgaaaccaaaacacctagaataccattatttacgtttgctaaaggcaaaagccattcaaggccgtcaactccaactcataagacacgcactttgtcgaaagaagcaaagacaaccccacgtaaaatgcatcaagaaacaaaatcttcaccattgagaaaggatgcaaacaactcttcttctcactcaagtctagggaaagtaagcaatagcaaattactcttccttcttcgatccaagacgtcattggggagaattgaatcaaacaatagcacaaccgcaagtgctaagacacaagcaactattgaccaagcgcccttactcccacatgcgatacaacaaactccaaacttaaacactaaacctgaacatactataataccgatatcaaaaacccgaaacaataactcattcttatcaggagtcaaaagtttattaaataaaggacagatacgtgaccattctgatggggttctgagcaaaaatatgataaatatgccatgtgtttttgagaaatcacttaaggagaaaaccacgatcgcaagcgcaacaccggcatcctataaagaaaataagactattgagtctgataactggaaggggggaatgagactgtaa

SEQ ID NO: 3781 - DNA, 1059 bp, Saccharomyces pastorianus
atgaaggacctggtgattttttccgatgaactaaaccatgcctccatgatcgtcggtatcaagcatgccaatgttaagaaacatattttcaaacacaacgacttgaacgaattggagaggttgctacagtcgtatcctaagtccactccgaaactaattgcattcgaatccgtgtactctatggccggttcagttgccgacgtagaaaaaatttgtgatttggctgataaatacggtgctctaacctttttggatgaagttcacgccgtcggcctatatggtcctcatggtgcaggtgttgctgagcattgtgattttgaaagtcaccgcgcaagcggtattgctaccccaaagaccaacgacaaaggcggtgcaaaaactgtgatggaccgtgtcgacatgatcaccggtaccttgggtaagtcatttggtagtgtgggtggctacgtagctgcctctagaaaactaatcgattggttcagatcatttgcacctggttttattttcaccaccactttgccaccttctgtcatggctggtgctacagctgctatcaggtaccaacgttgccatatagatctaagaaccgcccaacaaaggcacaccatgtacgtaaagaaggccttccatgacctgggcatccctgtgattccaaatccttcccacattgtcccagtgttgattggtaatgccgatttagcaaagcaagcttctgatatcttaatcaacaagcatcaaatttacgtacaagccatcaacttccctaccgtcgcccgtggtacggaaagattgagaattaccccaacgccaggccacacgaacgacctatctgatattctaattagcgccgtagacgacgtgttcaatgaactacaattgccacgtgtcagagactgggaaaaccaaggcggtctgttgggtgttggcgaagccggattcgtggaagaacccaacttatggacatcgaagcaattatctttgactaatgacgacttgaaccctaatgtcagagacccaattatcaaacaactcgaggtgtccagtggtattcaacattga

SEQ ID NO: 3782 - DNA, 618 bp, Saccharomyces pastorianus
atgcaacgttccatcttcgcgaggttcggcaactcttctgccacggtttccgctctcagtaggctgtctcccacagccgcaccatatgcgaaaaacggttatgccaccaccaccggtgctggcgccgctactgccactgcctcagcttcatctacgaacgcagcagctgccgctgctgccgccgctaaccactccacccaggactcgggcttcgattacgaaggcatgattgattctgaactgcagaagaaaagactagacaagtcatacagatattttaacaacattaatcgtctggccaaggagtttcctttagctcaccgtcagactgaagccgacaaggtcaccgtttggtgttctaacgattacctggcgttgtctaagcacccagaagtgttggacgccatgcataaaaccatcgacaagtacggttgtggcgctggtggtacaagaaacattgctggtcacaacatccccactttgaacttggaggcggaattggctactttgcacaagaaggaaggtgcttcggccttctcgtcctgttacgtgtttcaacgacgccgacttgtccttatagggccaaaagatgaaggacctggtgattttttccgatga

SEQ ID NO: 3783 - DNA, 387 bp, Saccharomyces pastorianus
gatatagggctcagtgggttcaattgcgtaaccggttcctccagggaacaagcggccaccgccttattggctaaaggtatcaacttagttgtttcaggatcttttggtaatattttttcaagaaactccattaacaatgctcttctgaccttggaaatcccagcattaatcaaaaaattacgtgagaaatatcaaggtgctccaaaagaacttacaagaagaactggttggtttttgaaatgggatgtagctgatgctaaagtggtcgttaccgaaggttctttggacggccctgtgatcttggagcaaaaagtgggtgagctaggtaagaacctacaagaaattattgtaaaaggaggcttggaaggttgggtcaaatcccaacta

SEQ ID NO: 3784 - DNA, 396 bp, Saccharomyces pastorianus
atggattacattaagccagccagtaccgatgatgaacatttccgtactatgtggaatgcttttgaatgggaaaacaagatttcagtcaaatcacaactaccaacactgcatgcttatttgaaagaattgatcacgggaacaaacatgggtattttaacaccatcagagtctttaggagaagatgactgtagattcttaagttgtaacttgtatgcaaaatcatctttcggagaagatgccctggccaacttatgtattgaaaaggattccaagaccgatgaagtcataggttatgtgcgtatccgttcaaagggacaaggtctggctctgtcattaggtgatagagtggcattgattgctaaaaagactaataaactcaatattacccatgtttga

SEQ ID NO: 3785 - DNA, 2022 bp, Saccharomyces pastorianus
atgtcttcactttcttcacaaccagcgtacacgttggtttttgatccttctccgagtatggagacctattcaagcacagatttccagaaagctcttgaaaagggatctgacgaacaaaaaattgatactatgaagtcaattttagtggctatgttggacgggaacccaatgcctgaactgttgatgcatatcatcagatttgtcatgccttccaaaaacaaagaactaaagaagcttttgtatttctactgggaaattgttcccaaactagcagaagacgggaaattgagacatgaaatgattcttgtctgcaatgccattcagcatgatttgcaacatcctaatgagtatattagaggtaacactttaagatttttgaccaaattgagggaggccgagttgttagaacagatggttccttctgttttggcgtgtttggaatatcgccatgcatacgttcgtaaatacgccattttagcggttttttccatttacaaagtcagtgagcatttacttccggatgccaaagaaattatcaattcgttcatagtggctgaaactgacccaatatgtaaaagaaatgcattcattggactagctgaattagatcgcgaaaacgccttacactatttggaaaacaatatcgctgatatagagaatctagatcctttattgcaagctgttttcgttcagtttgttagacaagatgcgaacagaacccccgcattgaaagctcaatatatcgaactattaatggaactgctcaccaccacaacatctaacgaagtgatctttgagactgcgctagctttgactatcttgtctgctaatccgactgtattagttcctgctgttaataagctaattgacttagctgtcaaggtttctgacaataacattaagctaattgttctagaccgtatccaagacatcaacgccaagaatgcaggcgctttggaagatttgactttagatattctgagagtgttgaacgctgaagatttagacgttcgctcaaaggcgcttgatatctctatggatttggctacatccagaaacgctgaagatgtcgttcagctcttgaaaaaggaattgcaaacaaccgtaaataacccagatcaagacaaggcaatgcaatatagacaattattgattaagacaattcgtactgtggcagtaagctttgtagaaatggcagccggtgtagtatctctactattggatttcgtcggtgatctgaattcagttgccgccagcggtgttatcacttttgttaaagaagccatcgagaaatacccacaactaagatccaatatcctcgaaaatatggtccagtccctagacaacgtcaaatctgctaaggcataccgtggtgcattatggattatgggtgaatacgctgaagaagagcatgaagtacaacattgttggaagcacatccgtaatagcgttggtgaagttcctatccttcagtctgaagcccggaggttgacacaaaaccaagatgataccgaagaaaacgaagacgacgctgccgctaagccaacaggtccagttattctaccagatggtacgtatgccactgagaacgcctttgatgttaaaacttcccacaaatcggttaccgatgaagaacgcgactctagacctccaatccgtcgtttcattctaagtggtgatttttacactgccgctatcctagcgaatacgattatcaaattggttctaagatttgaaaaggtctctaaaaacaaaaccgtcaccaatgctttgaaggcggaagctttattgattttggttagtattgtgagagttggtcaaagttctttagtggagaagaaaatagacgaagattccttagaaagagtcatgacatctatctccattctattggatgaagctaatcctgatgaaaaggaaaccgaagttaagcttttggaagttgcattcttggacactactaaatcttcattcaagaagcaaattgaaattcaaacaagaacaagcataagagagctctag

SEQ ID NO: 3786 - DNA, 2442 bp, Saccharomyces pastorianus
atgcgtgaagtgatttgcatagaaacagttcatagaaaccaaaagatactgcacctaataccgaaaaaaacactaatgtttgatagtttcaatagcggtaaaaatagacgaaggtccttttttcgctttggctctgaaagtaaaaatagcgactctgaacaatctgtgaggaagctatcaacaccccctgcaactaggaagtcaacaagcaatacgccaccctccagggataaaaagattactcctgatgtaccgccaagaagcccacacaggaatgtccacgccagaagccgttctatacaagcaccattagaaaagggaccgttaaaaaatacgaatccgtttttgaatgctggtactaatacaagtgattcttttcaatctttaaaatttaaagaggtgccgatggatgattttaaagagaatcaaaagtcggcaacgaacaacaccactaagaagaacacaagtccctttacgactagcactaatttaaatgtaaatctttccagtcttaaacgtccaaggcctccgccaccacctgtagatatgaaatcaataacaagctcactaagtaatagcactatcaaggaagatactagcatggataatgattacgagcagaacattatttcaccgccatcccgtaatcaacataggcgacagcgatcagaagcagaaaaattagtcgacgacatcgaagattatataatcgagcataacggaaatccagatagtccaatatcggcaaatgcagccagtttgtcagacgtggaaacggcgcaggatgtgccagtaaattctttgtctattcccatcctgagggacgttagcatagaaagctctttgagttacgtgaaaccgctcgttgttggtggtggtgtagtgaatgggcgtagtgataccaaggacttaaaattagagcacccggtacaattatcttctaatgtagatgatggcaatgatagattttcgtttactacatcggttagtggtaagtccaccagaagtcttcaacaggttgttaaagatgaatctaatggatttaaatctgcgcattctgattttgtatataagtcaattgatcatctcaaaagtgatgaaaatatagggagcgctagaaggcctttgcggataactaatgaagcagatagcggttcttcagacgaggagcaaaatgattatcaagataaatattcatttggggaagagaaaagcaacacatcgacaagcactgaggatcaccaaggcctacgaataaaaaatgacgttccaacgcaagagcccgagctggcaactcaccgtagagtttttcgagtggtcaatgaagatcgtcccagtttttttttgaatagtgcggaggatacaggcagtttgattgatggacattccctcgatactgcaacatcttctggcgagtatggtatgccattaaacgttgctaacccatctgaaccctctatctcaaaaagcgctcaatcaaatgtattgtctactcttgactcaagtggggacacgaaatcctcaaataaaacatctgagttaaacagttcaacttcgatttcagaaagcctggtacttgctccacaatctttaaatgaagacacaatttccgctgaagaagccaccggctttccaagctcagcaccaactgtaccaaatgaaaaatctgtcaaaggttcgacgctaacttccgtcgtatcaaacaaatcggagaagtcggtgcctctggtctcgagttatgtggaagagttgcggttaaagtattacaggacatcgaacttcttacaagcccctcctaacttaccagtggccttaaaacaaaagaataatctaattcagcccagaaatatcaaggttaagctgagaacaagttccaaacaaatcggtataaagcacggtaaagttaaacagaaactattggcgctagagacaaggaacgaggactcgaatgagagatcgaacggttcagattcgaaaaataacatcaatgtcgaccatacaaaggagtttcataaattgttggagaaggaaaccggggtcgattctacctcaaagagcggaaacgctggtgaagatcaagcggaggattatctcaaggatataccaggtgatgaagcatataatagcgacgatatcatggcaccgttgagagaaaaaaagggccaaacagattcagctgattcggtaacaagatcgaatacggtagttagctactacacaaggtcccaaaatagaatgagaagcggaacgctcgacaatgactacgtgaataggcagaaacttcctactcatatttgtctgcaggattaccgcgactccaatgctaaaaatgatgtaacgcgacaagattctgtctccacaacggactcagaggtgattgaacccagttattccctgggtcgcggcttgcgtgtggcaaacccagattctgatgcagagtaa

SEQ ID NO: 3787 - DNA, 843 bp, Saccharomyces pastorianus
atgaatgagctttccaatttctttgctcagataaaatttggtcagtgtgaaggaaacgtgatagatcgtttccagtgcgaatataggcggactgattctcaaatatctcttgctctctacgaacttcccttgatcggagatggcttatttgatatgaagtcttttatcagcaagaccaaaccaattatagaaacttcgaaagatcagatggtgaaacacattgctgacatgaaagcctataatgagataactaacactgaaggtattctatcttcaccacaacagaaaccttcgtcgacgtcatcttcgaatgtgatcccctcccttaaaggtgatcagacaagtgccgcttcataccaatctcaaactcaaaagtacgctgctaaccaatcatcaagtgcattgcactcctctagtcgttattccgggcctaatagccagttgggcgcaagaggtaccgagggtcataaggcgggtttcatgacacaagatgaaatcaagcagcactgtattgctactataagggcatctatggattcagcgaaaaagaaatcctcgtatcaaattttaaaaacatatgtaaggtgcccaagacagaattatattgatgttgtctatcagagtttgaatgacttgcgatcaaaaacgaattgtaatattgtcgtactgaatctgaacaatcttcacgaatcgcagccgtggcttgattcgttgaatatatcagactattccgcattttcccagcagcctcacccaagcaccgtacgcattattagtattggtggtgtgggtgagtatataatcaaagcgctagagttgatattgaacatattagaaaattag

SEQ ID NO: 3788 - DNA, 555 bp, Saccharomyces pastorianus
atgatcatggaaccctccaagtcattagaagaacatatttttgataggctggatactttggccgatagagaactgaaaagtttcaaccccttagaccttacaaccgatataccctatgtcaattatgcggaggatttggaatttttaattacacaagattgtggtgggttcaaccttggttcatttctgataaaaaatagcgaatggtccaaactactcttagacatgtggtgggaccctgttttgtacgaacaaaaacatatggtatgggagcacagagaacaagatgcattggaagcgctgtacgagagcgaaccgtggattcgttcgagaatagggtttttgcccttaagaacaatcaatgcattcccaccgggggcatgttcggaatacagtggtgactcaagatacttttacactgaaaaggaacacgattttgtcgtgaatatggccggatgcaactttggtagagactgttggggggagatgcaatactataccaccttaatggaaaagctgaatagaaaatggtatacgaggttttttttcccatag

SEQ ID NO: 3789 - DNA, 609 bp, Saccharomyces pastorianus
atgtctagtgtaccttatgattccccacttcctataacaaatcatcaactagatttcgatgaagaggaaaagaaaagcagaggctcaaaattcggtttgagatacaaaataatgtactggaggggaagactagccgactctttagcgagaagcaaaagacaaatactattaatatctttgattttgtttctatttatatggataaacgattctactgtcagcaggaacccatctaccacaagcttccaagggcagagtagtaacgataacagtttgaacaaaggtggttccagttctgattccaaatggtatctgccaccgtattccaagagatcaagatggtcgttttggaaccaagatcccaagattgtcatcatattagcggcaaacgaaggcggtggtgttctgagatggaaaaatgaacaagagtgggccatcgagggcatatctatagaaaataagaaggcgtatgcgaaaaggcatgggtatgggtttacccaattccagggaattttacggaggttcaaggaagattcttccaaggaattattgaaaagggttgggcgaaagtggattttttggaaaacaaacactttaaaagaattcccc

SEQ ID NO: 3790 - DNA, 162 bp, Saccharomyces pastorianus
atgaaagctgatatgatggaatctcaattcagggacctagaattgcctaaccttaacgaagaaagctattgtgacgttgttcccctggatttcaaaacattctaccaaattgaaaaagatgtgatacacgtagtgaagaagaaggttttaaaaaccgagtaa

SEQ ID NO: 3791 - DNA, 372 bp, Saccharomyces pastorianus
atggggaaagtcaaaatcattgtgctggcaggaacagcgggcactgggaagtcaaccattgcagccgaactgatacatgagttcaaagatacgtatccggatttgaagttcattgagggtgacgatttgcaccccccagctaatgtggaaaagatgacgaagggaatcccgttgaatgacgacgaccgctgggactggttgaaaaaagtagctgtagaatccaccaaggctgcagcgagcaccaaagaaggtttatcgattgttgcgtgttccagcttgaaaaaaaagtacagagatttgataaggaacactttgttcccgactcagagttccattttatctttttgtatgcaagtaaaattgaggttttaa

SEQ ID NO: 3792 - DNA, 750 bp, Saccharomyces pastorianus
atgatatttcactctgcagataaggatatttatgctagactgatattgcaaagtattagtcgagccatatcagaaagagaaacaattattttcaaactaatacaaaaaataccgataaagtcaatagatagtatgcttatttcaatgggaccttcaagatttgcagagtctatgggcccttggaaatgttatgctgatgctaatttcgaacactcgccattgcacgattatgaaaagcaccagggacttacgggcaaaaaagtactaatacgagattttgatgactcgtttttaagtagcgatgtgggattcaatgggactgaagaacccgagatcagacagctcaggttagaaaaaaacatggttagattcaaaggctcaacgaaaggtataatagacgaaaaatataacaccttgaaagaattcaatgaacatgttcacaacattagtagggggaagaaagacgcattctcaaacgatgctgtgtatatttccaggtacacttcattagtacctgttgaaaaagtaggcttcactttaaagaaggagtttaacaatagagtaattacaataaaattcaaattccgtgggaacgatgtttttggcggattgcatgaactgtgtgataaaaatttaataaacgttgaaaacatccctgggtggctagctggtgaaaacggatccttttcaggaacaataatagacggaggatttgtgcaagagcaggttgataaaggtgggttgctatag

SEQ ID NO: 3793 - DNA, 345 bp, Saccharomyces pastorianus
atgttcaatgagtcgagtcttgaagatgattatgtgccgaactcggatacgtcaatagttttcaagcaattgatgaaactaccaataaccacattatacgatcttacgttgtcatggttcgccaagtttggcggatcattcgatggtgacataaacctattaactgagacgctagatctgctgattgaaaaaggcataaagcgcaaggtcatagtaaataggatattatacatgtattggcctgatggcctcaatattttccagttagctgagatagattgccatctaatgattagtaaacccgataaatttaagtggcttccgtcaaaagcttttcaagggtaa

SEQ ID NO: 3794 - DNA, 1542 bp, Saccharomyces pastorianus
atgtcaggacaagaggagaataaagtaaattcttctgacgtaagaaaggatagagttgtgacgaactctactggtaatcccatcaatgagccatttgtcacccagcgtgttggggagcacgggcctttgcttttacaagattataacctactcgattctttggcgcattttaacagggagaatattcctcaaagaaatcctcacgcccacggttctggggccttcggttattttgaagtgacagacgatattacagatgtttgtgggtctgccatgtttagcaagatcggtaagagaacgaagtgtctgacaagattctccactgtgggtggtgataaaggtagtgccgatactgttcgtgacccaagagggtttgcaactaaattctacacagaagaaggtaatttggattgggtctacaacaatacacctgtattttttatcagggatccttcgaaattcccccattttatccacacgcagaagagaaacccgcaaactaatctaagagacgctgatatgttttgggatttccttacgactccagagaatcaagtggccatccatcaagtcatgattctcttttcagaccgtggtactcctgcgagctatcgtaacatgcacggatattctggtcatacttataaatggtcaagtaaaaacggcgattggcgttatgtgcaagtccatattaaaaccaatcaaggggtcaagaatttgactatagacgaagccactaaaatcgcagggtccaacccagattactgccaaaaagacttgtttgaatctatccaaagcggtaactatccatcgtggactgtttatattcaaacaatgactgaacaggaggccaagaatttaccattttcggtctttgacttgaccaaggtatggcctcaaaagcaattcccattacgtcgtgtaggcaaacttgttctgaatgaaaatccactgaatttcttcgcacaagtggaacaagcagcgtttgcccctagtactactgtcccataccaagaagccagtgctgatccggtgctacaagctcgattattttcttatgcagatgctcacagatacagactgggccccaatttccatcaaatacccgtcaactgtccctatgcctccaagttttttaaccctgccatcagagatggcccaatgaacgtaaatggaaattttggttcagaacctacctatttagccaacgacaaatcatactcgtatattcagcaagaaagacctattcaacaacatcaagaagtatggaacggacccgctatcccttaccactgggcaacatctccaggtgatgtcgattatgttcaagctaggaatttgtaccgcgtcttagggaagcaacctggacaacaaaagaacctagctcacaacatcggtatccatgtagagggcgcctgccctggaatccagcaacgggtttacgatatgtttgcccgcgtagataagggactatctgatgcgatcaagaaagaagcagaggcaaaacacgctgctgaactttcaaataactctaagttttga

SEQ ID NO: 3795 - DNA, 171 bp, Saccharomyces pastorianus
atggctcagagagttttaaaaagcgaagtagagtcactgcgggcgtgtgagaactcggctggcaagaactacaagatcatacctgaccaaaaactgttagcaaacatcttgaagagcaaaccaacaacgagcgaagaaagtgctgccaagcgtccttgtattaggaaataa

SEQ ID NO: 3796 - DNA, 1239 bp, Saccharomyces pastorianus
atggataatttttctacaaatacggaatgctttgttaattggttggaaaagaacgccaaaattgaagtttccccaaagattaagatcaaggacctccgttctgatagtcaaggccgcggaatagttgccatccaaaaagtcaagaaggatgaagtgttgtttgaaattccacgaacttcggttttgaacataacaacatctaaactggtgagagattacccttggctcgaagagaagtttctgaatgaaatggagtcatgggaaggtttaattatatgtatactttatgaaatggaagttttgaaagaaaagagccaatgggcgccctacttcaacgtttggaacaggcctaaagatatgaatacgctgatcttttggaatgaaaaggaattggaattattacagccttctcttgtacttgagaggatggggagaaaagaggccaaagaaatgtatgaaggaattcttaaaatgattgaacaaattggcggaaaacttgctgatgtggctgtgcatttcgagttcgatgattttgcctacatcgcaagcatcattttaagctattcttttgacatggaaatgcacgataataatgcagatgaaagtgaagaagatagcgaggaagaacctgaaagtaatcgctatttgaaatctatgattccactcgctgatacactgaatgcggataccagtaaatttaatgccaatttaacatacgactcgggttcattgaagatggttgctgtaaaggatattgggatgaacgaacaagtatataatgtttatggagagcacccaaattctgagatattgaggagatatggttatgttgaatgggatggttccaagcatgattttggagaggttttactcaaagacatcgttgatgtattaaaagagacccttaatgcaagtccacaatttttggaaagctgcatagccattttacgtactaacaccactattcaagatttattggaaggcgaagatatagtattgaattcatacgaatgttattttgatggtgaatcggtccctcaatcaatagtttttgttcaaaccttgactattctctgccaaattccaggtttatctgaaatgaatgggaagatactagaaatacaagtagaaagagtgataaagaagtgtttgcaactgatagaagggagccgcgttacagaaaactaccataccacatggaagcgttgcattaccaagcgtctagaaaagtattcttga

SEQ ID NO: 3797 - DNA, 3024 bp, Saccharomyces pastorianus
atgagagaagtaatactggttgttcatggaatgacatgtagcgcctgtgtgaacacgcttaccacgcagctacgagctttagcgggggtgacaaaatgtgatattagtttagtgacgaatgagtgccaggtggcatacgataatggggtgactactgattctatcaaggaaacaatagaagattgtgggttcgactgcgagatactaaatgacaaggatactacaaccgcaactacaagacaaggtttactaagcatacaaggaatgacctgtggatcctgcgtttccacagttaccaaacaagtggaaggcataggaggtgtagagtctgtggtggtttcgttggtcacagaagaatgccatgtcatttacgatccatccaagacaacactagatagcatcagagaaacgatcgaggactgtggatttgattcaagtattataatagatgatgcgggagcgcccgatcagactgaaaaacccgtagttttgaaaatattggaggactcagatggcgaatctccacccgcgctttcatcatttagtgaaagattccagttcttactagacctaggtgtaatatcaatagatatttccgatgaattgcgcacgcttaccgttaaatacaactctaacaaactcggtatcagagacttattaactcacatagaaacaaccggctgtaaattcaccgtatattccaatttagatagctctacccagctaagactactatcgaaagaagaagaaataaaattctggaaaagaaactgcataagctcttcttcattggccgttacatgcttggtattatatatgatttttccgatggtggcgccatcagtagttcagaaacgcatcttcccatatagagaaatatcgttcataaaaggtcttttctacagagatatcattggtgtgatattggcaagctacattcagttcggcatcgggtcatatttttataaagctgcatgggcctcattcaaacacggctcaggaaccatggatacactggtttgcgtttccaccacttctgcgtacgctttttctattatctctctacttcacaacatatttcatccctcagacacggggaaattaccaaagattgttttcgatacatcagttatgataatttcttacatctctatcgggaaatacctcgaaaccttggctaaatcacaaacttctacagcactctctaaactaatccagctaacgccttctgtgtgttcaattttatcgggtacagaatttggcgagacaacagaaatccccatagaattattacaagtgcacgatatagtggagataaaaccgggaatgaaaatccctggcgatggtatcataataagaggtgaatctgaaatcgatgagtccttgatgactggtgaatctgtcctggtacccaagaaagagggctctttggtgatcgcaggttctatcaatggatctggccatttctattttaaagctacgacagttggagaagaaacaaaattagcgaatattatcaaggtcatgaaacaagcacaattgactaaagcccccattcaggggtatgcggattatttagcttccattttcgttcccggaattttaatcttagctgtactaacatttttcacctggtgtattattctagaagcctcagccaatccgccaacagttttcagctcgaatacaaaaggcgataattttttcatttgtctgcaaactgccacatcggttgtgatcgttgcgtgcccatgtgcactagggctagctacgccaactgcaataatggtgggtacaggggttggagctcagaatggtgtcctgattaaaggtggagaagtgttggaaaaattcaatggtatcagtacttttgtttttgataaaacaggaaccttaaccaccggctttatggttgtgaagaagtttctcaaagatttgaatgggattgaaaaactagatgaaagtgaagtgcttgcttgtatcaaagcgaccgaatccattagtgatcatccagtgtcaaaggcgatagttcgctattgtgatagtttgaatcgtagcaaagcctcaagtgccgttgttttagaaagcgaatatgtgttaggaaaggggattatatcaaagtgtcaggttaacggaaatatttacgacgttcttatcggcaatgaggcattgattccggatgaagtgttaaaggtgtccaggattaatcacaaggacatggatcaaggacatacagtttcgtatgtttccgtcaatgcgcatgtcattggtttatttgagataaatgatgaagtcaagcatgattcctacgaaacaatccagtatttacaaaggaacgggtacgagacatatatgataactggtgataacaactcggctgcaaagagagtggctagagaagtaggtataaacttccaaaatgtttacagcgatgtttcgcctacaggtaaatgtgatctcgttaaaaaaatacaagaggaagaaggtaaaaacaaagttgctgttgttggtgatgggattaacgacgcacccgctttggcattaagtgaccttggtattgcaatttcaactggtacagaaattgctattgaagcggctgatattgtcatactatgtgatagcgacccaaacactatcggcctgaaaggtctggtcaatgccattgatatttcgctaaagacattcaaaagaataaagttaaacttattttgggcactttgctataacgtattcatgattccgatagctatgggtgtgttagttccctggggagtaacacttccaccaatgcttgccggtttggccatggcatttagctcagttagtgtcgtactcagctctcttagattgaagaaatggtccccaccggatattaaatcttacgagacctcagattccaaatctaaattttccatcggaaacgtttggtcaaggcttttctctcgtcaggttgtccgaaatgggcaagatatagaatcacacgctggattaatgtcaaacgaagaaagctttgcaagtacttga

SEQ ID NO: 3798 - DNA, 342 bp, Saccharomyces pastorianus
atggatgttgctctaaacaaatctatcctggaaacggtaggtaaggaaaattggggcaaaacaaaagtttacccaggacacgaatacaccaaaagtaacgttaagtttgttcgtaagatttacccacaagttggtgaaaacaaagcgctggataaattagagcaattttgttctaagcacgaggtcactgcagggcatttcaccttgaaggacgaagtggatttcaacccctttatgaggttagatgacccgacggttcaaaaagccgtcggagatgcaagtgcttcgtgggacagaggtaaaattatggataagttgagagcaatgaagaatcgtatgtaa

SEQ ID NO: 3799 - DNA, 210 bp, Saccharomyces pastorianus
atgcaggtcaagtcgattaagatgagatgggaaactggtggtgtcaattactgctatttgttgtccaacaacaataacagtaaatattggttgattgacccagcagagcctccagaagtcctccccgagttgacggataatgaaaagaaaagcatccaagcggttgtaaacacgcatcaccattacgatcgacaagctgatccgcctaag

SEQ ID NO: 3800 - DNA, 342 bp, Saccharomyces pastorianus
atggctacaagatctaagaaagccaataaaagagaaaaatgggtatacgaggacgcagctagaaattcttcgaatatggtaatacatagtttatccaatgcaccaattattactgttgatgcattgagggatgaaaccttggaaattatctcaattacatccctggctcagaaggaagaatggctgaggaaagtatttgggtcaggtaataattcaacccctaggagctttgccacgagcatttataacaacctctccaaggaggcccataaaggaaataaatgggccattttgtattgccacaagactgggaaatcatctgttattgacttacagagatga

SEQ ID NO: 3801 - DNA, 4467 bp, Saccharomyces pastorianus
atgtcattgagccatctcactttagaccaatattatgagatacaatgcaatgagcttgaagccatgcgttccatttatatggatgattttagtgatttgactaaaaagagatctagctgggataagcaacctcaaatcatattcgaagtctcccttcgatctgttgacaaagaaccagtggaatcatctttgacattgcattttgctatgacaccaatgtatccttttaccgccccagaaatagaattcaagaatatagaaaatgtaatggatagtcacctagaggtgctaaggacggaattcaaaaaaattcataatacttcccggggtcaagagattatattcgagattacctccttcacacaggagaagttggacgagtttcaaaatgtagttaatacacactctttggaagatgatcgcctacaaaggataaaagaaactaaagaaaagttggaaaaggaagaaagggaaaagcaacgggagacgataaagagaagatctgacgaacagcgcaggatagatgaaattgttcaaagagaattggagaaaagacaagacgatgatgatgatgaattgctactcaataggtccacgcaattagacttacatcctccttcggaatgggttgcatcaggggaagccattgtcttttcaaaaactataaaagcaaaactacctaataactcaatgttcaaatttaaggcagttgtgaatcctaagcccataaaattaatttcagacctattcagcttttcgaagcaatttctcgtaaagccttatataccacccgaatctcccctggcagattttctaatgtcatctgaaatgatggaaaatttttattatttactatccgaaatcgagttggataatagttattttaatacaagcaatggaaaaaaagaaatagcgaacttggagaaggaattggagactgtgctaagagtcaagcacgataatgtaaatcgattgtatggttacacagttgagcgtaaggggagaaacaatgccacatttgtttggaaaatcaggattttgactgagtactctaactactatcctgtaggagatttgatacaatccgtcggatttgttaacttagcgacagcacgtatttggatgatcaggctactagaaggattggaagctatacacaaattaggtattgttcatagatgtatcaacttagatacagtaattttggtcaaggatgcagatttcggaagtactattcctaagctagttcattctacttatggttatgtcattttaaatatgctatcgagatatccaaacaaacacggttcttcgattgagttacctccagacacatggatagcccctgagttggtgaaatttaaaaattctaagcctcaaagactgactgatatctggcaacttggtgttttatttattcaaataataagtggttctgatacagttataaactttacaacaccccaagaatttctggactcaaccagtatgaatgagagtttgtatgaccttctttcaaaaatgcttcatgttgatcccaagaaaagattaggaacattagaattattgcctatgaagttcttgaggaccaatattgactctactataaatcggttcaacttagtttccgaaggcaccaattgcaattcattggatcaagtttctggagacaccgttaactgtgggggtggaagccgaagaactatttcacaaactagtatacgaagaagatcttttaacgttggctctagattttcttctataaatcctgcgacacgatctcgatatgcttctgattttgaagaaattgcagttttgggccagggcgcattcggtcaagtggttaaagcacgtaacgctcttgacagcaggtattatgcaatcaaaaagatcagacatacagaagaaaaactgtctactattttaagcgaagtgatgttattagcgagcttgaatcatcagtatgttgttcgctattatgctgcatggctagaagaagacaatgttgatgagaacgtttttgagtcgactgaagaagaaagcgatgtaagcgaatcctgctctgattttgaagaaaacgatttattggaccaaagcagtatttttaaaagtaggacaaatcatgatttggataacagtaactgggatttcatatctggctcaggatatcctgacatcgtttttgaaaacagttctcgtgaaaatgaaaaagaaggtgtgagccacgatccttcttcttcttcctcttcttcttcaagcgaaagtgatgaagatactagtaaagaatcaatgagcagcctgaaaccattgaaaaggaagaatcgcatgatgcctatgacggctgtaaaaatgaaaagcacccttttcatccaaatggagtactgtgaaaatagaacattatatgatttgatccattctgaaaatctgagtcaacagcgtgatgaatattggaggttatttcgacaaatattggaggctttgagctatatacattcccaaggtattatccatagagatttaaagccaatgaatatttttatcgatgaatcgagaaacgtaaaaatcggtgattttgggttagctaagaatgtgcatagatctctagatattctcaagttagattcacaaaatctgccaggtagttcagacaacttgacctctgcgattggtacagctatgtatgtcgctactgaagttttggatggtaaaggccattataatgaaaagattgatatgtactcacttggaatcatattttttgaaatgatttattcattcagtaccggtatggagagagttaatattttgaagaagttacggtcagtgtcgatagagtttcctcctgattttgacgataacaagatgaaagttgagaagaagataataaggctattggtggatcatgaccctaataaaaggccaggcgccaggatgctcttaaatagtggttggcttccagtaaagcaccaagatgaagtgatcaaagaagcgttaaagagtttgtcgaatccatcgtccccttggcaacaacaggtgagagaaagcttgtttgaccagtcttacagcttaacaaatgatatactgtttgatatttccatcccaacatctactccgtttgcaaacatcctcagatctcaaatgactgaagaggtagttaaaatttttaggaaacacggaggtattgagaacaatgcccctccgaggatttttccaaaggctcctatatatggtacgcaaaacgtgtatgaagtccttgataaaggcggtactgttttacaactgcaatatgatttaacttatccgatggctcggtatttgtctaagaacccaagtttaatttctaagcagtatagaatgcaacacgtttacagacctcctgatcactcgaggtcaagcttggaacctagaaagtttggcgagattgattttgatataatatcaaaatcttcttcggagtcaggcttttatgatgcagaaagtctgaaaattatagacgaaattttaaccgtatttcctgtatttgaaaaaacaaatacattttttatattaaaccacgctgatattttagaaagtgtttttaattttacaaatatcgataaagctcaaagacctctggtctcacgtatgctttcacaagtcggatttgcaagatcgttcaaggaagtgaagaatgaattaaaggcacaattaaatatatcttctacagcattaaatgatttggagctgtttgatttcagattggattttgaagcagctaagaagcgtctttataaattaatgatcgatagttcccatctcaaaaaaattgaggattctttgtcgcacatggcgaaagtgcttggttttctgaagccccttgaggttactagaaatgttgtcatatcgccattgagtaactataacagcgctttctacaaaggaggtatcatgtttcatgcagtgtatgacgacgggtcatcgcgtaacatgatagctgccggaggaaggtatgatactctgatatcattttttgccaggccatcaggtagaaagagtagcaatacacaaagagccgtaggatttaacctggcttgggagacgatttttggtatagctcagaactattttaaactggcctctggaaatagaattaaaaagagaaatagatttctgaaagataccgctgttgattggaagccgagcagatgtgatgttttgatatcaagtttttcgaactctttactggacactatcggaattacaatattaaacacactatggaagaaaaatatcaaagcagatatgctaagagattgttcatcggtggacgatgtcgttagcggtgcccagcaagatggtatagattggatcttgctaattaagcagcaagcatatccactaaccaaccagaaaagaaaatacaagccactaaagataaaaaaactgagtacaaacgttgacatagatttagatcttgacgaattttaa

SEQ ID NO: 3802 - DNA, 2463 bp, Saccharomyces pastorianus
atgcaacaccatattattcctttgaacagtagtgacgattaccacaacgatgcatctgccactgcagcaacgagtaataattttctatcgtcatcttcgtcatccgactcgccaaacaaagatgactcgtccattagaagaaatacgtcatcaaacatcaataacgacaacgatcctttatcgtctcccactaaaacaggtgtgaagagaagaagttcattaaagcaacgtccaacccaaaagaaaaatgatgatgttgaggttgaaggtcaatcgttattgttagttgaggaggaggaaataaatgacaaatacaaaccactgtatgcaggtcacgttgttgctgttttggatcgtatccctggtcaattattcagtggtacgttgggtctattgagaccatcccagcaagctaacagtgacaataataaaccacctcagagcccaaaaatagcctggtttaaacctactgataagaaggttccgttaatcgcaattccaacagagttggcaccaaaggactttgttgaaaatgcagataaatactccgagaagctatttgttgcctctatcaaacgttggccaatcacatctttgcatccgtttggtattttagtttctgaactcggagacattcacgatccaaacaccgaaattgattctattctaagggataacaatttcctttcaaatgaatatctggatcagaaaaatccacaaaaggagaaatcgagctttcaaccactgccattaacagcggagaacttggaaaagagaagaaattttacagacgataatgaatacaacattctcgcaatttcagagcttggatggatctcgggatttgctttacatgttagaaacaacgatgatggcacggttgagctaggttgtcatgtcgttgacgtaacaagccatattgaagagggttcttctgttgacagacgtgctagaaaaagatcatccgcagtatttatgccacagaagctcgttaatttactaccacagtccttcaacgacgcactctcactggcaccgggtaaagaatctcccaccatatcagttgtatatactctagattcttctactctaagagttcaatctacttgggtaggagaatcggtcatctctccatcgaatattttatcattggaacaattggatgaaaaattgttaagcggaaaccctgggacctacctctctctggtacaagaaattgcaagatcattctatgctgtaagaataaatgaccctgaagccaaattgcttcctacactatctttactggagagtttagatgacgaaaaagttaaagtcgacttaaacatcttggatagaacttcaggctttattgtaataaacgaaattaaaagaaaagttaattcgaccgtagcagagaagatttataccaagcttggtgacttagctcttttgagaagacaaatgcaacctattgcaaccaaaatggcgtcattcaggaagaaaatccaaaacttcggttacgatgttgacatcagttcggcagatgaactcattaaagcagtgttaaagattgaagatgatgacgtaagagtcggaattgaaattttactgttcaagactatgccaagagccagatatttcattgccggcaaggtcgatccagatcagtacggtcattatgctctgaacttacctatctatgctcatttcacagatccaatgagaagatatgctgatcatgtcgttcacagacaattaaaatctgttattcacgatgttccatatactgaagatatagaagcactaaagattacttctgagtactgtaatttcaaaaaagattgcgcctatcaggcccaagaacaagcaattcacttactcctatgtaaaacgatcaatgatatgggtaatactactggccagttgttgactgtggccactgtgttgcaagtttacgagtcttcgtttgacgtctttattccagaatttggtattgaaaaaagagttcacggtgatcaactgcctttgatcaaggccgaatttgacggcaccaatcgtgttttagaattacattggcaacctggtgtagatagcgcaactttcatcccagcggacgaaaagaatccaaaatcctacaggaactctatcaaaaacaaattcagttccacggccgcagaaatcgctaatattgaactcgataaagaagctgagtcagaaccactgatcagtgacccattaagtaaagaacttagcgacttgcatttaacggtaccaagtctaaggttaccatccgcggacaacaacgaacaaaatgccttggacaagttcattgctactacagaaactaggatcgaaaatgataactatattcaagaaatacatgaattacaaaagattcctattttgttgagagctgaagtgggaatggctttgccatgcttaaccgttcgtgcactaaatccgtttatgagaagagaataa

SEQ ID NO: 3803 - DNA, 1275 bp, Saccharomyces pastorianus
atgtctaaaaatagtaacatgaataacaatagatcgcaagatccaaacaacatgtttgtacaaaccacaggaggtgggaaaaatgctccgaagcaaatccatgttgcacatagacgttctcaaagtgaactgacgaatctaatgattgagcaattcactttgcaaaagcaactggaacaagtccaagcacaacagcaacaactgctggcccaacatcaacaattggcccaacagacaggacaatatctttcgggaaattcaggcccaggtaatcattttgctcctcaacctcctcacccacattacaactcaaatggtaattcacccaatatgagtgctggtggcaatagaagtagagcccattcgagaaacaattctggatattatcaaaactcctacgataacaataacaacaataacaacaacaataataactctggtcctaattcgcacagaaagactagttcacaatctagcatttacggtcattcgagaaggcattctttaggtctgaatgaggctaagaaggccgctgctgaagaacaggccaaaagaatatctgggggtgaagcaggtgtaactgtgaaaatagatcctgttcaatcagatactggttcaaataccactacagaacagtccgaattcaagttcccgccaccaccaacctcacaacagggccaccgccgtgcaacttcaaatctatcaccaccttctttcaagtttccgccaaactcccaaggtgacaatgacgacgaattcatagccacttcttccacacatcgtcgcacaaagacaagaaacaatgaatattcgccaggtatcaattctaactggaggactcaatcacagcaatcgcaacagcaactgtctccattccgtcacagaggttccaactccagggattataattcattaaacactctagagccccctgcgatctttcaacagggtcataagcaccgtgcttctaattcatctgttcatagtttcagctctcaaggcaatagcaacggaggcgggcgtaaatccctatttgcaccctatcttcctcaagcaaatattccggaactgatccaagaaggaagactagtagctggtattttaagagttaacaagaaaaacaggtcagatgcttgggtctctacagatggggctcttgatgccgacatttatatctgcggctccaaagatcgtaatagagctctcgaaggtgatttggttgccgtagagttattagtcgtcgatgacgtttgggaatctaaaaaggaaaagaag

SEQ ID NO: 3804 - DNA, 1758 bp, Saccharomyces pastorianus
atgaatacaacattatcaagcagcgattggtatagcacctcagtacgtttactagtggaagaatacgatgtcaagcagtttttgatcctaaccatcagtgaattaagaacaagtatacagaactacctctcaaatactccatggcagaacattttgaaagattatttgtacttcaccttctgctacaaactactaagcaagtttctctacctactaaaggtttatggaccattaacattagcgaaaagaacatatgaacgtacttccagatcaatattccgttggttgctggactcgccatttttgaagggaacggtggataaagaagtttcgaaaatcaagagatcaattgaagatgaacttatcagatccgactcacaacttatgaacttcccacaattaccatctgacgggatacctcaggatgaagttgttgaagaactaaacaaattgaatgacttgataccacacacccagtggaaggaaggtaaggtctctggtgctgtttaccatggtggtgatgatttgatccatttgcaaacgatcgcatacaaaaaatactgcgtcgccaatcagctacatccggatgtctttccagctgttcgtaaaatggagtccgaagtggtttcaatggttttgaaaatgtttaatgctcctgctgatacgggttgcggtacaacaacgtctggtggtacggagtccttacttttagcatgcttaagtgctaagatgcacgctttgcatcaccgtggtattactgagccggagattattgctcccataactgcgcatgctgggtttgacaaggctgcgtactactttagcatgaagctacgtcatgtcgatttagaccccacgacttatcaagtggacttgaaaaaagtaaaaaaattcatcaataagaacaccgttttactggtcggttcggccccaaactttcctcacggtattgctgatgatattgaaggcctagggaaaatagcgcaaaagcataagctacctttacacgtcgacagttgtttaggttcctttattgtttcattcatggaaaaggcaggttacaaaaatgtaccaagactcgatttcagagtcccaggtgttacatcaatatcatgtgacactcacaagtacgggtttgcaccaaagggttcatcagtcataatgtatagaaacagcgatttgagaatgcatcaatactacatcaatcctacgtggacaggtgggttatatggctctcctacattagcagggtctagaccaggcgccattgttgtaggctgttgggccactatggtcaacatgggggaaaatggttacatcgaatcgtgccaagaaatagtaggtgctgccatgaagtttaaaagatttatcttgaaaaacattccggaattggagatcatgggtgaccccaaatactcagtggtttcgttttcatctaagagcctgaacatacacgaactatccgataggctggccaagaaaggctggcacttcaatgccctacaaaaacccgtcgccctacatatggccttcacgagactaagtgtgcacgtggtagatgagatctgcgaagttctacgcactaccgtgcaggaactaaagagcgagtctgactccaaaccatcgccggatggaaccagtgctctgtacggtgtcgccgggagcgtcaagactgccggcgttgcagacaaactcattgttggattcttggacgcattatataagttgggccctgcagagaacgccgacgccaaataa

SEQ ID NO: 3805 - DNA, 462 bp, Saccharomyces pastorianus
atgactgaatcccaagattatttcaagaccctgcaattaatccatcgatttattaagtggcaatacaaggctgactcggtcaacattgccattcaggatggacccgaagctggtcagtccgtcccccatctacacacgcatgtcatcccacggtacaaaatgaacaatgttggtgacttgatatacgacaagctagatcgttgggatggcagtagcactttggccaattggcaggcaagaagagacgaatatttgggagtcggcgggagacaagcaaggaaagacaaggccacgcacaccagtggagatgagagtgaatctccgcaaggacccaaggtgttgaagccagacagccaacgggaagagagaacccttgatgaaatgaaaaaagaagtgcagggccttcaaagcgccctggaaggattcgtggctgcacgtcctgacctgagccaatggcaatag

SEQ ID NO: 3806 - DNA, 2088 bp, Saccharomyces pastorianus
atgtcgaaacaaaagaagcgtaattcccaaaacatggtagacccgaggttacagggtccattcaggaagtacctcccctataacatctttgaagagtgccacattggtcatctaactacacttgattatattttcgcgtttttagttgtcgttgccaatttcacattcgtatggaaatcacatccttcatcattttgggcccgtccatgggataatgatactgaacaggaactatttggttacattcggttttatctggacaaggccttctacattcacgaactaccaccgttcaccgtccagctatactccactattgagaggctagatatcatacaaaatctaagatgcgtttctttattttttaattcgtccactttggcttttcttttcctggtgttgaggagaattgattgctcttttattatttccacagtgggtttactgacactgtccaattgggggacttttaggaaagagggtaccattctttcatctgataatttggaatggtgtcttttttcaataatattatacacttctatcactatgtcaagaatgaagctgggcactgctaaatggttcgcacatttgattacgttatccatttctttaggattagcaatttcttctaaattcattggatttctcacatgggggttcattattctttctttggtgcgtcaattcgataaattgataagtgacgttgatatcacggcttttcaaattgttagattcattgtttttaacctattatttatttttattgtccctacttccatctttacgctaagttactggaacttactctcaaactttaacgtcgatgttcctgaatattcaaaatatatgaccacttccttcaaatcgtatctgagaggttcccaattgcagccaactcgattatattatggctcaaccattactttgcgccacttggattcaatggcggggtatcttacctctcatgaaattccctacccatctgatatacaggaaaatctagtctcattattgtttgaggaatttaatgccgataatgaatgggtagttgaacatccgacgttgaaattaaatttttctgaaatacatcgtattggtcaattgatacctttagagtttgatcatgatataaaactaagacacaaatctactgggaagctgttaagagcaagtaccgctaaaccgccgatcagcgagcaggattacgatcttcgaatctcatgcacgaaggactccgagtatgaaggaggaatggatgaaagatggaatgttctgttggtaaaagacagtactaatgataataacaacagtagcagtgatgataagtatgtcaagccacttcgatcagaggtccagttgcgcaataagggtcagagatgtgggctattgagccatgatctgagattacctgaatggggttactttgagcaagaggttctatgtatggaaaatccagttatgtccagaacctcttttctaatagattcagtaagactggcagttgatttcccaattccgacgatgaaatattatatgaacgagattaattcctcaacagaagacagccgcactttgtccttgacacaatttgttggcctgctcaaagagtacatcttcaaacagtacaagtacaattattacgttagatacggtaaaagcaaggcaaatttcgaagattctttggttgtggagaaatggccgatcacgttggacgctggatctccagtctggtttaagctcgcttggtatggttctatactagcgatgatcgttttcttgtgcgtgcaatgtaacagaattgtacattggaatccatggtcaactactgaaacagtcttttccatcaactgggatatctacaatgagtttggctgggagtgtactgttggatggtttttacattattatgtcttcactatgagtccacatttcaatttggaaagcaaattgtactttcaaagttttattttcagcgagttatgtcttctggaatcattgaatgttttggcaaagagtcataagaccatcttttccattatgatattattgcttattacatcaatagttctcatgtataaatag

SEQ ID NO: 3807 - DNA, 423 bp, Saccharomyces pastorianus
atgctcggtacccggggatcctctagagtcatgtctagatcaaatgacggagcattctgtgccactttaaattacatagataaaaatcatagttttgaaccgttggctgcaaatgaacctcaaatgtccgacaagcatgccacagtagcacctcccgaagagttcagcaataccatcgatgagctatccacagatataatcctgaaaacaaggcaaataaataaacttatcgattcgctgcctggtgtagacgtttcagctgaagagcaattgaagaagattaacatgctacagaaaaagttagttgaggtggaagatgaaaaaattgaggcaatcaagaagaaagaaacactcctacgtaacgttgattctttgattgaagactttgtagacggaattgcaaactcaaagaaaagtacataa

SEQ ID NO: 3808 - DNA, 903 bp, Saccharomyces pastorianus
atgccagccgtcaaggtcatcgaaaacgatgcctcttctaagaacgtagtcacgatgagaattgtcggacgcggtggagcaaacgtattgattgaatttggccatccaaattggttgtggcggtgctgtgttcgttggccacatctattatcagcaaataatgcctacactatcgataacatccattatatcaagaacaatgtagaacctcttttacatggtttgctttgtcctatggaactaattgatgtgagtacggatattttaaggcccattttagatacctttatttcagaattagatgatgaggtagtaaaagttattaagattaaaaatttggctagcaaggttgccactaatttaattcaaaatgatcaccttttgaaatcttattgctcacaaaattttcaaacaatccttctggaactaaaacccaaatggatatactacgatacaaattattgtaggaactgcacacataacgcattaaaaggtagaaaaaccgaatactgctacaaccaactgctaatgaactcactgcatttggaaacgatgctgatagattacgaaagataccccgttgagttcaaagtcacgatactcgagtacttgcgcaatgcaagtaacgttttcagagtcctttatgaattgcaaaagaaactttcagaaaatgcaattccgattaagaatttacggtcaattcgcgatataaaagacgagctcttactactcatgacactcagagatgtgacatgtttcattgagtggaataatgccggaaatacgttaagtgtacacatagtagatgtagatctaaaaccgaaaaaaaaatggactcattggacccaaactcaacgccgaatagaatccggtaaaaaagtacttcatacttcgaataaatag

SEQ ID NO: 3809 - DNA, 1248 bp, Saccharomyces pastorianus
atggttgttatcaaaaacacttttacagacaatattttgttatttggatcatctggtttggcaggagaaggtattttagagaatctgttggacattaacttttacattaagaatgtgtctgatttacaagataagcttgatagtttaacagaaataaaagaaaatgttgtgctagataaacatattttttgtattaatagaaaaagcgtcactgagaaaaaatcatttataaagaccatcgattatgtgaacatgaaatcaattatttggaaaggtggaagatactatttgagaactagaagagaggacgaaaaaaaaagagaaacgtgtaactctaatacattttgttacgatgatttcgaagagggaatctttagaaattccagggacaaagaagaaaagggcacattttcctttgcctataatcggaaacagtttggttatgctttacattatgcttgtggaaaagatgaaagttttaaaatcaagtacagttttaccgtaacgcaattggttattcctcaatctgaaagttggccaagactacttccacaaattttctcaggaacgcagatgttggaaaggttcgatttttacaacaaatattatgtatccgacagaagcttaccttccttggatgatatcggcaccatggtgagtgctttgggctctactacagctagagtgcggaaaagccaggtgccaagttcctttgtggattaccatttgtctttcaatttagcacaagagtttgtaaatacgacagataagaaactggtcgttataacttccttcaataatgattttcttagcagaacattggaatattttcgaattaaagcgaaattggagaacgatttagaagaggctttgccaaataaactaaaggagcttataattttgcggccaggtccaatgtgtgggcaacatgggaatcctgtacacgttcaaatggatatacaagagtgtccaactttttcagaaaggcttttctattatcctcgctatattctgaagtataagcagcaatgcatttctgaagcaagaaaagttggtttacgaacaaggctaagcgaagtaattgcttcgggtatttatagaatgccaggatctgcattattaggatattccgttccagtctcaaaagtttcgtatgttacagctttgatggcaattgggaaaaaaagcaaggaagcagggcctaaggtggaagttattaatagttatcagattgatatgattgcttaa

SEQ ID NO: 3810 - DNA, 921 bp, Saccharomyces pastorianus
atggacgacaaggatgattcgatggcgcaaacgcggtcaccttctcccgagtttaaattaaagtctacgccagcaacgtcaataccgtatgaaccaaagaaaagggctaaattggagaatgacgaaaatttacctgaacacgaatgggtgctgaagacgcagccaatggtccagcataggatgtttgattcagatgtagccgatttgttagataccgaaattttaacgtcaccttctaagaggaagcgaaaactaaatctagaggagatcactgcaggcgataagagtatgctggaggattcgattatccttgaaaatatttatagaatgtttggcataacattcttccccctcgtggatcctattgatttgaaaatgaaagaaggtagtgatgagattgttgttgatagagaaatgttggggatacggctagaggtcttcagtgaacggacttcaaaatttgaaaaacctcattacattcttttaaaaaaaagggtaaagtccaatagttggtttctattcaagcacactattccaagctttattgacgttcaaggaatattcaacgataccaatggaggacttgtaatatcctctgatgacgcatacttgtttgcaaagagggttttcgtgcaattaatagaaattcaaagaaggcaacaaagcttcaaggacttagaggccaaggaaattatccataatttggatttagatttacaatcttcgatggtttcattttttgttaaagacgtcaaagtagagttgttcctaaagcaaaatgaaatagtttcgtgttcaatactggacgaaattcatgatttcaaccataaaaataagaacaagtgggagcttttactattgggtccgttggatgacttggagttgaagttaaaccattcatttgcgacgatcttcaaatga

SEQ ID NO: 3811 - DNA, 1233 bp, Saccharomyces pastorianus
atgatgatagcctttagtggaagatatggctttggatatagtgaagctcaagacctctgctgccactgcactttcggagacggtaccatgaggaacgacttagtcgaaataacaaccatttgcccagatgtcgagaactctcagttccttgtgcaaagcagctgtccagacaccattccggagatactaaagtgtcaaagtgccactgaaaactgcagcagcatcatttaccagcagcgtagtctgcctagaatcaaaatcctgggtactggtgggacgattgcgtctaaggctgtagactcgtctcacactgctggctatcatgtggacttgactatccaagaccttctggatgctattccagacatatctaaaatttgtgaaatcgaatacgaacagctgtgcaatgtcgactcgaaaaacatagatcaagacgttctttacaagatctataaaggtgtctcggaatcactacaaacttttgacggtatagtcatcactcatgggacagatacgctatccgaaaccgcattttttattgagagcaccattgatgctggcgatgtccccattgtgttcgttggttcgatgcgtccttcgactagtgtttctgctgatgggcccatgaacctttaccaagcgatttgcattgcttccaacccaaaatcaaggggaagaagtgttcttgtttcgctgaatgatcaaatctcttctggttactacattaccaagacaaacgcaaacagtttggatactttcaatgtaagacaggggtatttggggaatttcgtcaacaatgaaatccactattattatccgcctgtgaagccccaaggttgccataaatttaaattgaggttaaatggtgaagacttcaaattaccagaagtttgcatcttgtatgctcaccaggcttttccctcgtctatagtcaagctggtagcagataaatatgatggtattgttctcgccaccatgggtgctggttcattgcccgacgaagttaatcaggcatgcatggagttgactttacccatcatatattccaagagatcgatggatggtatggttcctgttgctaatttgccaagaaacgattcaaagggccataatatcattgcatctggttatctgagccctgaaaaaagcagaattttgttgcaactgtgtttggtaggtaattatactcctgaagaaatcaaacatgttttcacgggcgtctatggtggttga

SEQ ID NO: 3812 - DNA, 1287 bp, Saccharomyces pastorianus
atgcgcatactggtttatataatggttccactttttaagtctatttactgtcgttgtcgcttgaaaattgtctgggctcaaacggaacggaaagacccaactaaacaagacaatcataattcaataatgagatatagctacacgattagtcaaagattagacatagtaacgaaggtcacgtccaaaaccatgttgcgaagatccattcataccacaaggattctcaaaaactccaatgctgctccacacatttggtcagacttctccaagagacctagctcactttccattcaatctcctaaagtgaaaaattatcttttccaagagaagccttatcttgaccctccatctatcaaaagaagaagcaatcgtatcaagtattcatctccagaacacatggatgaaatctttaagatgagttatgatttccttgaacaaagagctagtaagttttacgacttggtaaataagacaaagaatccctcgaagcgggacacacttctcacaaaagcggagattaataatcctgaagtgcagtacaacttccagtttaatgataaactggacaacatcaaatcaataattgattacgatgtaccagtatacaggcatctggggaaacaacattgggaatcgtacggtcagatgttattgatgcaaagattagaaactctagcagccattcccgatacgctgcccactctggtgccccgagcagaagtgaatatcaaatttcctttttcaactggtgttaataaatggatcgaacctggtgaatttttgtcctccaatgtcacatctatgtgtcctgtcttgaaggttcaagaatacgaccacgtggatgttgaaagacaactgtatacgatactggttgtcaatcctgatgtccccgatttaaacaacgattcgttcaagacggccctgtgctacggattggcaaatatcaagttgagttacaacgataatttgatagacccaagaaagtttaacagttctaatattcttgctgactatttgcctccagtgcctgaaaaaaatgctggaaaacaaagatttgtcgcttgggtattccgacaacctttgtctgaagacggccagaattctctcgaggttagccaagaggatattaatagagacgagtttgatattagacagtttaccaagaaatataatttggaccccatcggtgcacatatatggagaagtgaatgggatgtcaacgtcgccgttgttagagaaaaatatggcctccctcctggaagagttttcagcagggtcagaaggtga

SEQ ID NO: 3813 - DNA, 1584 bp, Saccharomyces pastorianus
atggtttccaatgggacgtcgtcagatacgcccagcaatttatctattatggaccttgaaaatgtttcatgtccgatttgccttaagaagttcgacaatttgcaagcgctaaataaacatttagatgttgagcatgagtttaatagtaatgagggttcgcttggatccaatgagagtagtacggtcaatggtaaagcaacgaaggtgaactctagtgcggataaagtgcaaaagttgaaaagaagccactgggagaaattgcaaaaagggataagccactgccaagcatgtggaagaactttgaataacgaaattggcgccattaattgtaaaaagtgcggcaaattgcattgtagaaggcatcttcccaatatgattaaactagacttgtcagcacggtatgaacccgagaaagggaaatggtataactgttgtcatgattgtttcgtgaataaacctggttataatgattacggtaaagcaatagacctcacacagaaatttttcaagctacgaaatatgaagaaggaagataagaacttgagattactacaacttgaaaaccggtttgtccggctggttaacgggttggtcacactctataagaagtataatggatctattatctataacctgaagatgaacaatgagatgtccaagctagaacgtacagttactccctggagagatgataggagtgtactatactgcaatatatgctccgaaccgttcggattattactacgaaagcaccattgccgattatgtggcatgattgtttgtgataatacgtatagaaattgctcaaaccaaatagatataggatacttggtatccgcagcatctgacttaccatttgactacgatacagagagggatagcttgtctgaaattcctgtgtctgtaagattatgctcgcattgtattagtatgttatttgtgggtagaaaattcagcaaggacgtagaaatgcccctaagtggaatatttgccaaatatgaaagcatgcaaaacatatctaaagttattgacagcctcttgcccacttttgaagattcgttaaacaatcttaaattagaaacgtttagagattctaaaagagtacctgacccaaagaatctgaacgagctcgctcgattaagacacaagctgctcaactcatttaatttgtataatacattaacaagacaactcatatgcatagaacctcgaaaccacgtggaaagacagctccaaaattcaatcaagactgcttcagctgcatatataaatgaaaaaattctacccttgaaatcgcttccagcgatcttaaatccagagggaccgaaaacccaaaaagatgaaccagaggtgaagaagttatcgcaattaatgatcgaaaacatgaccatcaaagaagtgaaggaattaagacaagaactgatggtccttaaggagcaaagctacctaattgaatccacgatccaggactacaagaagcagcgcagactggaagaaattgtcaccctcaacaagaacttggaagagctgcactcgaggatacatacggttcaatccaagctaggggataatggttttagttga

SEQ ID NO: 3814 - DNA, 270 bp, Saccharomyces pastorianus
atgaacgatgaagaagatgatgaggatgacgatatcgatatggaaatcaatgaaaacctaaacgtattattaagtcaaggaaataaaataaagaccacagatgcacaccggaatgaagaaagtacaaacgactatttctttaccgataaatacagacctttattatttgttgacttaatatccagtgatgaattagccatcattgaaataaatccattaagttctcattccaagcaaaaggcatttgttcaaccaaagttggtcttctaa

SEQ ID NO: 3815 - DNA, 1911 bp, Saccharomyces pastorianus
atgaccagtcagcaacagatgatagtgcacagatgcaggtttgtggattttacacctgccacaatcacttctctaacattttcacataaatcaaacataaataaattgactccatcggatttgagacttgccattggtaggtctaacggtaacatagaaatctggaatccaagaaacaactggttccaggaaatggttattgaaggtggcaaagacagatcaattgaaggcttatgctggagcaatgtcagtggtgagccattaagactcttttccattggtggttctactgtcgttacagaatgggacttggctacgggtttaccattaagaaattatgactgtaatgcaggcgtgatctggtctattgccataaatgaatcccaagataagctgtcagtgggctgcgataatgggactgtggtacttatagatatatctggggggccgggtgtcttggaacacgatactatcctaatgagacaagaagccagagtattgactttagcttggaagaaggatgacttcgttattggaggttgttctgatggtagaataaggatttggtcagctcaaaaaggtgaagaaaacatgggtcgtctattgcataccatgaaagtcgacaaagccaaaagagaatccactttagtttggtccgttatctatttgtcaaagactgatcaaattgcttctggtgattctaccggctccataaagttctgggatttccaatttgctacattgaaccagtcttttaaagcacatgatgcagacgtcttatgcctaactactgatattgataacaattacgtgtttagtgctggtgtggatagaaagatcttccaattttctcaaaatagcaacaaatctcaaaagaacaacagatgggtgaactcttccaacagattacttcacggtaatgatattagaaccatatgtgcataccaatctaaaggtgccgattttctggtctcaggaggtgttgaaaaaacgttagttatcaactcagtgacctctttctctaatgggaattataggaaaatgccgaccgtcgaaccttattccaagaatgttttaatcaacaagcaacaacgtttaattgtctcgtggaacgaatcgactgttaagatatggacaatgggagttgaatctaattcagagcagaattataaactagtgtgcaaactaaccctaaaggacgaacaaaatatctcaacttgtgctctatcgccagacgggcaagtgctacttgtgggaaggccttccacaaccaaaatttttcatttgcaaccaatgggtaccaaattaaaagtgacgaagctagataacgaactattgctgaaaactgcctcaaaattggcccaatttatcgataattccaaaattgtgatatgctcctgcgaagacgaagtattcgttgtggacttagaatctgaagaagatgaaaaaccacaagaaattgaacttttagaaatcacttccactaaaagtagcattaaagttccatatatcaatagaatcaaccatttggaagtaaatcaagatattgcagttatttctcgtgggtgtggggctgtagacatactaaacctaaagacactagaggcaaaatcattggttcgtttgaataactttatcaccgctgttcacattaacttacccagaaagtctgttgttgtaattactgcagaaaacaagatttatgaatttaacatgaacttaatttcagaatctgaaaacgaagacgatgaaagtctattaacccaatggtcaaagaataataccgaaaaccttccaaaagaatggaaatcattaaaagagaactgtgtgggtattttcacggatgtgaaaaatagtaataggttatgttttgggtgctacttgatcgacaagctgatccgccataagcat

SEQ ID NO: 3816 - DNA, 3624 bp, Saccharomyces pastorianus
atggctcatagcgccatctcacatgttccgaaaatttcagctttaagcaatgaaatacaacctgaagtctcacattccggtgaaaaaaactcaagttcaaatcaccatcctcatttccatcatcagcatgggaagcagcaacatcctttagcgcatcaacaagtgcacttcccaacttcagaaaatcaaaatcaaaatgatacagtgctcattcactctccttcgaccaagacagctcatcgtagttcatcatttttacgtcatttagattctttattatctccagtttcaggccctgcctctgatccacatatgcaggccaatgatgatgaagaggaagatgatgatgacgaattctcgccacattccaagacgtttctttcgccatcaactcaactcgtacctacaaatacatcgactacaccgctttccaattctttgacacccaacggtagaaacctgaatgcaaattcgaactccgaagctgaaaatgacaacgatagagacgataaatcgaatgtaggtaaagtgaaatttcaaccattgacagtacacgaacctgcaatttccacctttggtaaaggaaatttaactttagaggccgtggcgggttcttcggatatcgataatacaactcttgaattagacgaaaataataccaataataacaatagcaataatccaaatgcaagttccacaaatctgagccatatcagcaaaactaacgtgagcaataatactgcttccagagaactaagtaaaagttatcgtaatagcagttatattgatatggcaaggtttgccactatgcaatcgaaattatgtaaccacagagcaagaagtaagaccttacctgctaataaagcattggaaaatgccacgagcgatgaaaataatagcaaacgaaattcaaggtattcttcttattccaatgacatgacttttgaagattctgacgagaggaaatcgaggaacatgtccaaaagattcctaaacagaagatcattttcaccatcgaacttaggcaataaagtggtccctgggatcaatttgagaaattcatttaacaaaacgagaaatagtagctccgattttttcaatacgaatcagggacaacaaaggccaagaacaagtaccactggttcaggaaacattaatacagtagtggatctagattctggtaataacgattttaaattacagggtatcgaatatgcatcggaaaagaaaaatagtgaatttcacactcttttcaaagattccgatatcagtcctaacgaaaggttgattgttgatcatagttgtgctctgtctcgtgatattctattacaaggtagaatgtatatatctgatgctcatattggattttcttcgaatattttgggttgggttagtacagttttcataccattcaaggagatcgtccaaattgaaaaaaaaaccacagctggtatttttcccaacggtattgtaattgatactctgcatacaaagtacatattcgcctctttcatgtcaagagatgctacttttgacttaataacagacgtttggaatcaaatcattttaggtagaaaatatagaaatggtttcggaaataacgattatggtacgctaagtgattcaagtagtgcattctttgatgaatatgatgacaatgatgatgatggagatctagacgataatgatccagacatcaatagtacggatatgacatcaagcgatgacatggatcctgatatttttagtgaatcaaatgaccttcgtaagaacaaaaaaccagcaaacaatctattactaggtcccaataaacatgccccaacaacggccgattataaaccttccagtaatgaacaattagttgttgaggcaaatataaatgcgcctttagggaaagtcatcaatgtcttgtatggcgaagatgtatcttactttgaaagaattttaaaagctcaaaagaattttgaaatctcaccaattcctaacaactttcttactaaaaaagttcgtgattatgcatacacgaaacctctatcgaatagtattggtccaagtaaaacaaagtgtttaatcacagataatttggagcactatgatttggaagactatgttaaaatactaagcgttaccaagaatccggacgttccttcgggaaatatcttctcagtaaagacggtctttcttttctcttgggacaaaaacaatactaccaaattaacggtttataactctatcgattggactggtaaaagttggattaaaagcatgattgaaaagggaaccttcgatggtgtcatggatacgacaaaaacaatgatatccgaagctaataaaatcttaagcaatgaagactcaaacttgaattcaaaaaatcaatccagcaatacccctgaaccagaggaagaaactatcaatctgcccactgttggacctcccgttcatgacccgacagaaccagatttccaaaaaggaaaagatgatacagttattgaagaaaacatcaatattccagttcccttgggaacagtttattcactattgtatggtgatgatacttcttatattaaaaagattatcgaaaatcaaaataattttaatatttgtgaaattccaaaatttgtgaataaaacaagagagattacttacatcaaaaaattgaacaattcattcggcccgaagcaaactaaatgtatagttacagagaccatcgaacatatggatttgaacagtttttttatgataaagcaagtcgttagatcgcctgatgttccatatggtagttcattctccgtccatacaagattatttttttcgtggggtgagcgtaatacaacaaacatgacagtcgtgactaatgttgtttggacaggtaaatccatgttgaagggaaccattgaaaaggggtcgattgatggacaaaaaagctccactaagcaacttgtcgaagatcttaagaaaataatttccaatgccggttcaacaaagagaaaatccaaaaaaagaagtaagacaacgagtaagagaaaatcatcgtcatcatccactaccaaagttgataaaagtgaagataatgtcgaaaccacaaatagtagcccttccttttcttctatatcttccgtgctgcaacaaatagatataacatcaattcagggaattatgacagttgtctctttgattatatgttttatcttcttatttagattattatttcattcgaggaatagttccaatatccaaattattactccaggaacaattctaatcaatggaaatgagtacaattacgttccaaatttcaaaacactttaccacgtatacgaagataatattatgaaaaatgctcaccgtaagggctcgaatagtaataatatagtcactgatacagaaagtttaatttgggactggttgattgatcgtgggaatgggaccattcaaaatggtgtcttgtctgatcacatgaaggaaaaaataaacaataagaaaagcgatcctgaaaatggaattagtgaccataaaatacaacagttggttgaatccattaaggtcaccgaaattcaactgcaagaaatgaaagaattgctagccaaaactgataatatgtcagtagtagcccagttattataa

SEQ ID NO: 3817 - DNA, 519 bp, Saccharomyces pastorianus
atgaaggatgaacctccacgcaataaaaggtctttcagcgatggtcactttttcaagaaactgaaattgatgtcaaagaaaaagcaaccagtggtggaaagaagtaaaactactcgtacaagaaaagcatctgccaattccgcaacgaagtcgtcgctatcgctaaagaggaacaatcatggcaggaacgccattgccaagagaagagtattgaccgatataggatctagtgatgatgacgttattggtaactcagttacgaacccgtctgtccaggattctcataattgccattctgatgattctatcccgccgctgcctttagaactaccagatatcgtttctataagaagcagtaaaagtcatctcagtaataaaagtaacagaaacaagcatggtatagatttgacgttcatgcctcgaagatctctacaaaattccaaagctggtttgaaaaaactgaatacctcctcgcaaggttattttaatatcccggtaaccatagaccgagcaagttaa

SEQ ID NO: 3818 - DNA, 735 bp, Saccharomyces pastorianus
atgggtgctatgattcaatctctacaacaattgacaggtgataactatttcttctactatggtaccactattttcaaggctgttggtttgagtgattctttcgaaacttctattgttttgggtattgtcaactttgcctccacttttgttggtatctacgttgtcgataaatatggtcgtcgtacttgtctattgtggggtgctgcttccatgactgcttgtatggttgtttacgcctctgtcggtgttactagattgtggcctaacggtaaaagtcagccatcatctaagggggctggtaattgtatgattgtctttgcctgtttctatatcttctgtttcgccaccacctgggctcctattccttatgttgttgtttcagaaactttcccattgagaatcaaatccaaggccatgtctattgctaccgctgctaactggttctggggtttcttgattggtttcttcactccatttatcaccggtgccattaacttctactacggttacgttttcatgggctgtatggttttcgcctacttctacgttttcttctttgtgccagaaactaagggtttgactttggaagaagtcaatgatatgtacgctgaaggtgttctaccatggaagtctgcctcatgggttccaccatccagaagaggtgccaactacgacgctgaagaaatgactcacgatgacaagccattgtacaagagaatgttcagcaccaaataa

SEQ ID NO: 3819 - DNA, 1473 bp, Saccharomyces pastorianus
atgaagggttcagaaatggaaaggcaattggccacatttcaggtttttttgcatgatgagaataacataatgccaataatggaaaaggtggtgaagctgcatacgtttgatagcttgattgttttagtgaatgggcttactaagggaaaagactttaagtttattaagtcgtatattcaggccctacttcaaaagttggaacaagacagttattctgataaaggaggaactaaaaagaaaagcttacgctacgttaggttcaataatgctttactttattaccttttaaaaagtgggaacgttgaattgttcattaaaacttttcaagatgaattgaaatttattacggattcaggattacttaatcacattgacggaaatgagcacatactgaattttcctatacaccattatttgaacttgttacgaatatccaagagacaggaagaactctttaatgtgatttcctgtctacagagcagttcattgatgaagtataaattgttcaagaaatttttaatgggcgaattaattgcatcattccaagcctttcgcgatcctaagttagtttgtaaatatcttctctcatcttacagctcaaagccctccgctgaaattttgaatgaacttggtgtttggggatgggtttaccattcaaaatcaacgactctaactacatctgaactcaccaaagagttacagcacaatagcaaccttttgccaaaaacaatgagaatagggtctccggtatctattccagttttaacagaactatatataagtttgttatcatttaattctgtttcactggaaagggatcaattcaaggactgccttcttgatttatattacaagtacaaatcctttctttcgaaagaagctggcaagtacagatattggagaaatgataccggcattttaaatgtatttttgaactacattagatttcacgcgcgagaaccaagactggcttatgatgttcttctagacttttactcagagcccttcgcaaaaaaagtcagtctaacgacgaagatatgtcccttttcgatagtggcatacaaaaatcatgatatagcacaagctgaattatcagaactattacgagtgatgcacaaaaaccgagtacctttaacattcaagttttgttctgcgatggtcatgcattacacaaaattgagggacgaaaagggagcacgctcttggtacaataaaatactctatggaggctttgaaataaaacatatggctttggttcagataattaaggaccaaggctggccgtttccgaaaaatttcgacgaaaccttattggcgcagttgattgacaatagcagtattggagaacctgcggataatgacctgtttaccgaggaagaaatgtttgaagaaagtagcgaacatgattttaatgatgaagatgttgataaatgtactaatactataaaagaaacactaaagtgccttaattga

SEQ ID NO: 3820 - DNA, 1125 bp, Saccharomyces pastorianus
atgttggtttcagaagacaaaataaaggccgtaagccactttcgccctagttggctgcctccaaaagactccaaagagaggaaactacaagacaagcaaatctataaaaacattgacttagcatccatggaggagttacaaaaaagtaaagaacgtgatgatagatcaaagaaaaatgaagagaatagagttagatttcaacacctattggaccggggtattactcgtaactccacattgaatgaatcaaagaaaattgtttgggaaacacctttcacgtctactgtacgacttcaaatatacaatcagctcttacaaagtgacaatcgtataatatcagagtgctttatagagtcgtttgaggaaatgatgcaattactgaataaaatggatttccccaaggataaagaaaccgaactagaacaattggtggaacatggcatacaagagagggtgttttaccgaagcggaacgaacaagcaaattctttctgacctgatgttgttgttgcaaattaaatccatatcccagcaaggtttgattactggtgacgaattgttattctatcattttttgactgatgaatcctttggatcgttgaaggaaatttgggaaattgtcaacctaattcaaatgacatgtttcggtgaaatttgcaaagagaaatatgattcaagaatactcaaccctaggggaatcgttgcccatcttctacgtaaggatgaattcaaggacgaattcaacggcgactgcttaaatagcaacacatggtggaacatattgcaaagaatagaccatagactctttatgtgggtaatggacataattgtcgtccataatagtcagaactttgcgaactatcccgtaaaaatcgaagcgttcaaagacaaatcatgggaatattatagatctaagaaagtagttgttaactataagatcttagtttcattaatggttaatgttctaataaactatcatttcggatacgataatttgaaggacttatcggatttgaaggaccagcacttttgtattccactttatacagaggatagcatcgaagaggaaaaacttaacgatcttttgaccaagcggtggttacattactacaggaaattacgttag

SEQ ID NO: 3821 - DNA, 870 bp, Saccharomyces pastorianus
atgagtacaataactacatgcattccatcccgccaaaattctgtaacaacccctaaactatccagagtgaaaggagttcctggatcgactaatacaacaaatagtgtaactacgtcacaagtttcttttataagcgagaatgattctcccctcaaacagtgcatgagtaccacagctttccatgaacctaaactaatgccaattacaaaaacaccttatgcacactccaatagcacttcggcaatattaccatataagacaacccagctgactccttctcaacgttatcgtttgagaaaagagcaaaatgatcaatctttgcgtaaatgcattcaaaagaaagaaaaattttatgaagaccaggatgctaacttggaacttcaagagggtgacgttgatggctctttgatctggaacatcccaatggcttccttatcaaccagctcttttttgacgctgtctaaattcagcaataaggaaaaaagttttgattcaacaccaaccgatgaagaagtattggcacaaggaaacagccatacacataatcaacatatacagtcgcagcatcaaacttacggtactaaaaagcattcgttatattcgaaccacaagtttggaggatcttgtttggattacaaggagcttcctccgacatgtattcctgggatctctcctatctctgattcgcaatacgtccaggatactatgaaaaatctttcccaggcttatatacatagttccgaaaagatctctaaaaatattctctctggtcgttctaagtccgtacagtgtttaccattggagtataaagaagccagcaatcgaggtatggaagatctgatgttggtttcagaagacaaaataaagggc

SEQ ID NO: 3822 - DNA, 279 bp, Saccharomyces pastorianus
atgtttggcctaaaagaacacgaattgtctgagtgcgcctctttcgggcctacggaaaacgcaagaatcctgaaggaggaggttctatctggtaaataccacctcggtgataataatgcggtctacgactacattttgatgaacactgccgtattatactgtttaagtcaaggtcaccaggattggaaaaaggggatcattaaagcagaagaaagcatccagtctggtaatgcattacattcattggagcactttatagctagcgtaagctcattgtag

SEQ ID NO: 3823 - DNA, 738 bp, Saccharomyces pastorianus
  modified_base (725)..(725): a, c, g, t, unknown, or other
atgtctgaagcggcactgttatcgttcaccaagaagttgttggattcacctccaaagttgacttgtacagacttgcatgatgccatattaatcattcttgatcttttaaaaaaatgcgatacaaatagcgacgaaactctttccatttataccaaagtttccagttttctgacggcattgagattcacccagcttgaccataaagcagaatacattgccgaagctgccaaggctgtgttaaagcattctgacctcgtggatttaccattgcccacgaaaagcatattaagccctggcgcaggaccaataattttggatatcgtgggtaccggtggtgatggacaaaacacctttaacgtttccacctctgcagctatagttgcctctggtattccaggactaaaggtttgcaaacacggagggaaagcttctacatccaatagtggggctggtgatttaattggaactttgggatgtgatgtatctaaggttaactcctcaacggttcctggcttgtggcccgataatacatttttgtttcttctagccccgtttttccaccgcggaatgggtcacgcttccaaggtacgtaaactgctgggcattccaactattttcaacgtgttgggacctcttttacatccagtcagccatgtaaacaagagaatactgggcgtttactcaaaagagcttgcgcctgaatatgacctgcaggcatgcaagcntgcactgccgtcg

SEQ ID NO: 3824 - DNA, 1647 bp, Saccharomyces pastorianus
atgaatcaaaaagattcacaactgggttcgaaggaagaagaattgagagctgttaatgagaagttacacaccgatattaagatttcaagacagcaaactgcttcaagggataaacaaaattccaatttacaaactaaagtccaagatttggaaaatgatttatctctaatgaaaaaaacgcataacgattcaaaatcagtcgctaataatgaactagaatctaaagttaaaatgatcaaaaccttagaaagtgatttgaaacttgcacaggaaaagtgttcaaacatagaacgcgagctgaaagaaaaggaagacaaatatcggttttcgaagtcaaacctgggagacgaaaatattaaactgaacgaaaaagtttcaaatttaaccacagaaaactcacaacttaaaagtaaattaaatgatgaatctacggccgtcagtaatttaaaagaccattatgaaacacagttaagttcaatgaggaaagaagtagaagaatataagacaagcgcagaaaaatttgagtccgaggttgaagaattaagaatcagaattacggaaaactccgccaaagtatctgaaaaaagatcaatggaactaaaacaaaaggagaatcaaatcaatgagctcaacaacgatctgaaaggacaaagggacgaaataagctcactaaaaaatataattgaaaaatacaagaaagattttaaccaatcgaaagccgaacaaagcaatattcaacgcgacctaaatttacaaatattgaacctggaaagtaagctcattgaaagcgaggatcaattacgatcattaagagattctcaaagaacagagatagaaaattggaaaagaaaatacaacgatctctcccttgaaaacgatagactgttggctgaaaaaacatctgcttcagacaaagagcatgaagtgtccattttgaatagaaaactagatgaatcagacaaagaaaaatggagcttgcaggaatccaaagaaaagtataagcgcgaattacaaaagttaatcactgcaaatgaccggttacgaagagagaaagaagaattaaatgaaaacagcaacaacattcgtatcatggaagaaaaaatgacaagaataaaaaataactatttaggtgagattacctctttacaagaggaaaatagaagacttgaagaacgcctcatattaaatgagagacgcaaagatgacaattcaatcatgcaattaaacgacactgtaagttactataagctgaaatatcattcggaagtaagacataataatgatctaaaggtgatcaatgattatttgaacaaggtgttagccttgagtactcgccgtttaagatcagacacaaggaaaggagagcatagtttaaacattgcaatcccggaagacgacgaattagaccgtgactactataatagtcatatttatacaaggtatcatgactatgattacccactaagattccattcgcacagaagaggtccgtactttgagcgccgcttgaatttcaagactgttgctcttttggtgcttgcgtgcgtgagaatgaagaaaattgcattctataggaggtcagacgatgttagactaagaacactaagagacaaaattgagagtaataacggtcgcatatcttggtaa

SEQ ID NO: 3825 - DNA, 654 bp, Saccharomyces pastorianus
atggacgacacttcacatcctccaaatgggagcctgaagaatatggagtttacgcctgtaggatttatcaaatctaagcaaaactctacacaaacacaagtcgtatcgcccactaaggtgccaaactataatgacgatgacgaaaacgaaggcccggcgaggaaaatgcgaagaataagcattgatgataccattgactctaccaggttgtttagcgaagcttcgcaattcgatgtcagtttcccagaaatcaaggccaatataccgccgagttcaaggtcaggcaatatcgataaaaaccgtaaaagaaacctaattaatgatttgaaaaaggacgtaccaatgtcacagcctttaaaagagcaagaagttagagaacaccaattgaaaaaagaccggtttgagcgtgcgttagaaagtaaactactagggaaaagacacataacatacgctcaatccgatctttctaataaagagctatatattaatgaaattaaaacattgaggcatgaaattaaagaattaagaaaagaaagaaatgactctttgaacaactatgacaatctcgaacaagaaatggatgacttgaggaataaactacaacaagtagaacaagaacttgcgtctaaaacaacttgtggatccaaaaagtaa

SEQ ID NO: 3826 - DNA, 2961 bp, Saccharomyces pastorianus
atgtcctcacgctcagggtcagcagtatccagttctgtgcctgctagtgacaacaatacgagtgataggagcaaactggataaaacagatgatttaatcgaggaaagagacaggaagctaactgaactttactgtgtgtctcgcttgaatcagttgctagaattaacagacgaaagtaggctccggaaggaaatagatggcttcttgaagaaaaatgacatacgaaggggtacaagatttgacgacgcactgctgccgaagttcctgcagttagccgtgacttctaagacaaagaaaaaatccaaggaagcgagtctgatcaatatatctaaccagactccaactgactctaaaataggcaccgaactgcaggacagtgccgaaaagatagcagcgaatcccgaaaaccattatgtgccgaaccgcaataactcaatccgtgaaaatataatggattctttaacacctgttgataaaactggagatagatggaacaaaagaccgattgagtcacctataggtagtgaagaacaacggcctgaaaaaaggcaaaagacgcattctcaatccttagaatcttctaatggatcggagatggcttcactgcctatatcaccacgtccaccagtgcccagtgcgttgtcacattacgcttactatgagaacatagaataccctccggcggatcccactactatcgaacctacggagaaatttaaggatcccttaataaaaaccatcatgggaaaaaaggtagagacatctgatcatttcaacgaacataatattgacgcatcagagaccgttttcttgttgatgaacgattacatgccatcaaaaataccccaggctctgcctttagcagaattgaaatacatgtctcaaacgttgccacttataaatctgataccaagagctcacaagactttaaccactgatataataaacaatgccttaaacgaagccagaataacggtcgtgggttcaaggatagaggaattaagaagacttggattatggtctttgaggcaaccgaaaaggtttattgatccttggaaacaagacatttctcatcaaaacattcttctgaaagaagctaaatggatgcaagctgattttaaagaaggccaaaaatacaaaatggccatgtgtgccacaatggctcaggcagtaaatgattactggaattacggtgaaatatgttgtgtggggcgtaaaataataacaaaagacgaaggaattacaccatcgagtgatgagtgcatagtcgagtcttcgaataagctatcggaaatttcaacaaaggatgcgcaaatcagtacacctggtaacgatggcgctaacacttccacggatgctaacgatactggttgtaatgatcatgctgctgctgccgatgatgataatgatgatgataaggatgataataaaataagatctagcaacgatcttgatctccggcatagtggcccgattcaagtaggccacaatgaccgagtcgttccctcaattgacaccgaactgcttttgagaaaaccttcttcgtttaacgaggctgttgctactccacatgaagctgctgcattatcgttatcgatagggacagaagaaccaagaaacgctttagcttctcagttcaaactcacaatctttgtgaatgaattcaatgcctttgaaaaaacattggtgcaggatctacctgtatatagtggtattaatgatgaggtgcccaataaaaacgaacctttaccatttattcccatctctaaatcagtcgtgacattggatgacaatggtttttataagctacttgaacgtcagttgatcgacgatgaaccgtcaatatctcaattgagcaaaaggcgcggtatgttttacggtaatagaagaaatcattatttaaggccaccagcggtgccctctttacgctatcttcagaatagaacgcctaccatatggttatccgaggatgaccaggaactggttaaaaacattaacacctatggctacaactgggaattgattagcgcacatatgacacatcatcttacctgttcttatctgtccaatattgaacgtagaacaccatggcaatgttttgaacggtttgtacagttgaacgaacgatttaattttagcgatctcaaaggacctagagcacatggcgcccaacaatggctgatcgaagcacataaatttcaacaaagacagaatagaagaatctcacctttaggtgtaaatatggaatccatacaaaggggtcatagaagattacgttgggccagcatgtttgaggccattaggaaatgtatgaagaaaagagaaaatacaccacgtcccaatccaactcaaccaaggaaacctttagactgtaaaaacatgaaggtccctactccagcagaaatgtcgcttttaaaagctcaaagagacgaagcattgagaagagacattcaattgagaagaacggtaaaaaacagattacaacaaaggcaacaacaacaaagtctgcaagctcgtaattcatctagagctcaaagcccagttccttcaaatggtaacgcatcagcgaatttgcctagaagtggtcaagcatcaactcctaggcaaaatcagaaacagtatactgagcaagatattattgaaagctactcaagaaaattattggagcagaaacctgaacttactcctgacacagctttgaaagctgcaaaaaattactacagaactttgaaagagcaacaacaacagctgaagcagcaacaaatacaacagcaaaggatgcaatcacaggaagagtccaaccaagtacagccacagccacaatctcaatctcaaacagtgccccaaactcagaacgcatccccatcacaagccaccccttctggtcttttaaacatcaattctgccacaaaaataaaatcgccaacaccacaggagattttacaaagattccaaaagtaa

SEQ ID NO: 3827 - DNA, 282 bp, Saccharomyces pastorianus
atgagtacggatactgctgctgcacaagcccagaataaaatagattctacgaaaaagaagaatgaggaagtaaataagaagtctctggaagaagacgatgaatttgaagattttcctatcgatacatgggcaaatggtgaaacgataaaaagtaatacagttacacaaacaaacatatgggaagaaaactgggatgatgttgaagttgacgacgattttaccaatgaattaaaggccgaattagatagatacaaacgagaaaatgaacaaaaagctacataa

SEQ ID NO: 3828 - DNA, 645 bp, Saccharomyces pastorianus
atgccactctatttagcagtcgagattgttctaggtatctccgttctgaataaatgtagtggggtttatggtatcttagccttgtttacaggccatcctttagattttatgcaatgggttgcatatctttggtcggtgtttacactgattgtatttgtacaagggctctatctgattcataagccaaatttgctggttttctctcaaatatgcgtcctatataccgttgatactatctgtacttgctttttcaccctatggtttaccacacagtggttcactttggaagataaagttgatttgagttctattgctggtgatgctagcagtactgcatcccaagccaattacaacccaatagcaaccggcaagctaacagcacgtagtattgatataagtggacagagtgctagtgaaagctacgagtattcgatcacgatattaattacgttggtatcgttgatattcagattctactttaatttcattttggcatctttcgtccaagagttgctgcatcaccctaaatatttagtcgatagagatgatgtagaacaggacttgaagaataagcctatttggaaaaggctttgggccaagagtcaaaaaggctgttacaaactatgtaagaatttactagagtag

SEQ ID NO: 3829 - DNA, 636 bp, Saccharomyces pastorianus
atgaaaaatgggaaatggtattccgatagaggcattccataccgcagaggctatctactgtatggtccacccggatcaggtaagacgagcttcatccaagctttagctggtgagttggactacaacatttgcattctaaatctttccgaaaataacttaacggatgacagattaaatcatttgatgaacaatatgccagaaagaagtatactcctattggaagatattgatgcagcattcaataagagaagccaaagtggcgaagaggggttccattcgagtgtcacatttagtggtttattaaatgccttggatggtgtaacatcgtccgaagaaacgattacgttcatgactaccaaccacccagagaagctagatgcagccataatgagaccgggccgtattgactacaaagtgtatgttggtaatgcaacaccttaccaagtggagaaaatgtttatgaaattttaccccggcgaaacggagatatgcaagaagtttgtagagagtattacaacgttggatatcactgtaagcaccgcacaattgcaaggactattcgtcatgaataaggatgcacctgaagatgcagtgaaaatggttactagcttacgaaattctaatcgtattttttag

SEQ ID NO: 3830 - DNA, 516 bp, Saccharomyces pastorianus
atgtcggatacgccggttgatataccaaatgataagcaggctgtctcagagctgagcggtgccgttacttcctcagcgagtaaaactgattctaatacagtccggggtaaactttcacagctagttggcgatgctatgtcaagcaatccatatttcgctgcaggtggtgggctaatgattctcggtacgggattggctgtggcgaggtcaggtataataaaagccagcagagtggcgtatcgacaaatgattgttgatttagaaattcattctaaggacaaatcatatgcctggttccttacttggatggccaagcatcctcaaagggtgtctagacatttgtctgtgaggacaaactttatacaacatgacaatggatcagtcagcacaaaattttcgttggtcccaggtccaggtaatcattggattcgttataagggtgcctttatcttgatcaaaagagaaaggtctgctaagatgatagatatcgcaaatggatcaccattcgagacgtga

SEQ ID NO: 3831 - DNA, 261 bp, Saccharomyces pastorianus
atgtcaggcaaggctcccacagaaggtagtgtcaccacagagtttctttccgatatcatcggcaagacagtgaacgtcaagcttgcttcgggtttgctttatagtggaagattggaatccattgatgggttcatgaacgttgctctatcgagtgccactgaacactacgaaagcaatgaaaacaaactcctgaacaagtttaacaatgatgtctttttgagaggtacacaggtcatgtacatcagtgaactaaaaatataa

SEQ ID NO: 3832 - DNA, 321 bp, Saccharomyces pastorianus
atggctaacattacattcaaaaatggcgacttggccagaagagcagttgaaagattcaacggttctccaattgatggtggtagatctagattaagactaaacctaattgttgatccaaaccaacgtccatccaggagtttagctgacagaatcaaggctatgccccaaaagagtggaaatgctccaagacctgttaagagaggtccaaacagaaaggctgctatggtcaaaactcaaaacaagcaaaagagagaaagaccagccaaaaagagtctagaggatttggataaggaaatggctgactactttgaaaagaaatga

SEQ ID NO: 3833 - DNA, 432 bp, Saccharomyces pastorianus
atgcagaattctttctttttggttgagtgcttcaatttgttatatacttgtaaatcgttgaagacaaatagatatagaatctccctcattctatttgaatttttacgaatcagaaacaaaaatacctacatcagcaaaatgtccgctaacttagataagtccttagacgaaattattggctccagtagaccaggaggcaacagagcccgtgtcggtggtacccgtggcaacggcccaaaaagagtcggcaagcaagtcaacacccagcgcaggaacattccaaacagaaatggtcctatcagaaagaatgtgaggcctcctccaaacgctgtcgctagagttgccaagcttttagatacctctagagaggttaaggttaacgtcgaaggtttgccaagggacatcaagcaagatgctgtaagagtatgttaa

SEQ ID NO: 3834 - DNA, 762 bp, Saccharomyces pastorianus
atgacggaggccacacacaaacaagaagagaactgtccaatgactgatacatataacaccatatcgagattcatagatgaagagttgtccgccttcttgtccagtgatgactacctaatggatgatttcttaggtgagataccgaatgaggtaactaggctgctaaaggctgaagtaatcgaaaaaagaaaggatgccttaagtagaggcaaacaagacgtactcactaaagagatatacgataacgaatcggaattgaggatcagacaaacacaacaggtaatggatctgatcggcgatataccgaaatattcccttggaagtgagttaagaagcagagtcggcagtgagccgcaaagcacgtcgattgcaacattaattgaagacgtgttaaaactaccacagatggaagtggccaccgaaggagaactagaagcagagacggaaaatgacctcaagatccttaatgagtatagtaatttaagaagggatttgattttgagatgccaagctatccaaataggcgaaagcacactgtccgaaatcgtgacccaagtaagctcgatagactctttagtcaactctatcaaggaaaccacagacgatgacgatgttagcgaatatttcgccacttataatgggaaactagtggctgcattggaagagatgaaactactactggaggaggccatcaagacatttgacacttccccagaaaagatacagaaaataaaagacatcttggtcgatttaaagaagtaa

SEQ ID NO: 3835 - DNA, 642 bp, Saccharomyces pastorianus
atggaaccacgcacaataagggccctggttgtaggttgtgtattgatgtttttccaacaggccactggtttcaacgctttcatgtattacgcggcaataatattttctagatttaatatgaaaaaccctctattacctgcaattctaattgcttcgactaacttcatattcaccttttttgcaatgtacactatggactccttgggcagaagagctattttattgaggactatctggatcatgactgttgggttacttctttgcagtattggcttcgatcacgataaagttaatttgctattggcttcggtcgtaatttacgttgcggcatatgcttccgcaatgggtagtgtaccatggacttgtgtggagttccttcccttaaataggagatcttttggtgcctcttgtatagcgtgcacaaattggctgaccaacgcgctagtttcgatgacatatctgagcgctattgacgcaattggtaatgaacatactatgctaatctttgcatttttcacggtttgtgcttggttttttgtctacttttggtatccggaagtcaaaggtttgtcattagaagaggttggaaaggtctttgatgacggaattgacgtgcattatgtttttcgtacttaccattaa

SEQ ID NO: 3836 - DNA, 1044 bp, Saccharomyces pastorianus
atgtctacaggtgaaagtgaagacgtctattctgatctgtattccatcttctcccaagtaacgtccaatacagctaatgacatcgagcaactcccatatgctataacgtttaagacatctttaatcttcgttggtgctactgttggtgggttactgttcggctatgatacaggcgttatatcaggggttctcctgtctttaaagccgcaagatctttctttgacggtcttaaccgacgttcaaaaagagttaatagcctccagtacaagtgtcggatcatttttcggttccatgctggcgtttcccttagcagacaagtatggaagaagaatcacgctcgcgatttgttgttcgatcttcatcttggctgcaattgggatggctgctgcaagaacattatcgttccttatttgtggtaggctgctcgttggtatcgctgttggggtgtctgcgcaatgtgtccctttattcttaagtgaaatttcaccttccaaaattagaggttttatgttgactttgaacattattgccatcactggaggccagctgatatcttacataatcgcccttctcatcaaagacatggatcattcatggagatatttgttcgcattttccgccattcctgccattttgtttatttccatattggattttattcctgaatcacctcggtggtccatctctaagggtgattttctctatgctagggactctttgaaaatgttatatccgactgcatctacacatcatcttaatagcaagatcaagcaattgattattgaactggataagctacgaatatatgaagatgcgggtgagcccttacttgcgcaagcccaatcacttgttcggtacatgaatacgtcaacatcagagactattagcccgcccaatgtcaagagagtttcttcggctactgatagaaacagcaacgcaatttcttcctcatcagcgtttttaacagcattacgaagtccaatttcaaacggtgctacaacacctgctaaaaaaaaaaacataggatggaaccacgcacaataa

SEQ ID NO: 3837 - DNA, 1146 bp, Saccharomyces pastorianus
atgagtgatcccaacgcgactataccagaagacaatccagagggtattgaagctagtgagcaatatagggccatggttgctgaattacaagaaacattgaagccggacttggcgttggtggaagaaaagatcgttacgccatgccaggaattgttgaaaattattacttatattcgtaaaatggccaccaagagaaaccacaaaaaactagatttggataggcatctgaacacctatagcaagcaggagaagaagaaggaaccaactcccaaggacgaagagaggttgtataaagcacaagcccaggtggaagttgctcaacaagaatatgattactataacgagttgctaaagactcaattgccaatcttgtttagtttggaagccgagttcgtgaaaccgctatttgtttcgttctatttcatgcaattgaatatcttttacactttgtacaacaatcttcaagacatgaaaattccatatttcgatctaaacagtgatatcgtggagtcttttatcgccaagagaggtaacgtggaggagcaaacagattcgctaaccattacccatttcaagattggttactctaaagcgaaactggaaatgaccaaaagaaagtacggtgtaggagccactgaggactcgccagtaagcggcgcttccagtggaaccggatacggtgccggatatggtacagccacaccaacatcgccaacccccacgggatacggatatggcgctgcagcaccaggttatggagcccaaccagtcgcacagtacggtgccgctgccgttgcaggcgccgttgcaggcgccgtcccatcttatggtgctgtacaatcgccaccactcaccggaatggcattacaacaaccacaacagcagcaacagggtccaccacctgcctattccaaccctctaacgccacctgtaggcggtgcaacagccgcagctgtccccgccttagaaaccgtcaccgcgctatacgattaccaagcgcaagccacaggtgacctgactttcccggccggtgcagttatagagattgtccagcgtactccagacgcaaacgaatggtggacaggaagatacaatggccagcaaggtgtgttccccggaaactacgtccaactcaataaaaactag

SEQ ID NO: 3838 - DNA, 255 bp, Saccharomyces pastorianus
atgagtttcaaagggtttaccaaagccgtcactagggctcctcagtccttccgtcaaaagttcaagatgggtgagcagactgaggatcctgtgtatgaagatgcagaacgtcgtttccaagaactggaacaagaaactaaaaaattgagtgaggagtcgaagaggtattcgtctgcagtgaacgggatgctaacgcatcaaattggatttgctaagtccatggaggaaatttcaaacctatcagtggtaaaatga

SEQ ID NO: 3839 - DNA, 2004 bp, Saccharomyces pastorianus
atgttaaaaagcaaaaactatgtttacgttaaattaacctgttcggattccagtaataagccatctcaactatacggaattcctcgtacgttaagcagaaaggaaaaaatggcaagagaaacgaatttaataaagatcattggtgaagataactttcaaaaattgcggtcttccaaatgtctcttggttggtgctggaggcatagggtccgaactattgaaagacttgatcctgatggaattcggtgagatacatattgtggatctggacactattgacttgtctaacttgaataggcagtttctcttcagacaaaaagatatcaagcagcccaaatccaccacggctgtgaaggcggtccaacatttcaacaactctaaactggtgccttatcaaggaaacgttatggacacttccacttttcccctacattggtttgagcaattcgacattatcttcaatgcccttgataacctggctgcaaggcgttacgttaataaaatgtcccaatttttgtcgctccctttactagagtctgggacggctgggtttgatggctatatgcagccaattattcctgggcagacagaatgttttgaatgtaccaagaaagaaactccaaagactttccccgtgtgtaccatcagatcgacaccatcccaaccaatccattgtattgtttgggcaaaaaactttctatttaaccagctgtttgcctcagatgcttctgaaaacgaagaaggcaataaggattggggtacggacgacgctgaggaaatcaaacgtatcaaacaagaaactaatgaactacatgaactacagaaaattatcatctccaaagatgaatcccgtgtccctgagatccttcacaaattgtttattcaagacataaacaaattattagctattgaaaatctatggaaaacaagaactaaaccaacgccgttgtccgattctcagataagtgggtcttccaagataaataaatttgattcgaactctgttggaacaatacacgaacagatcaaccacttcattaaaatcactcaaaagctaatgaatcgttatgctacggagcagagccatattgattttgacaaagacgatgctgatacattggaattcgttgtaacagcagcaaatataagatctcacattttcaacataccaatgaagtctgtatttgacattaagcaaattgcaggtaacatcatcccggccatagcaacgacaaatgctatcattgccggtttatcatcattaatttcattgcgtgttctaaaccttctgaaatatgcaccagttagcaaattcactgacttgaatatgacttttaccgccaaggcaagcaatttgtctcaaaatcggtatttgtcaaatcctaaattagcaccaccaaactgtaattgtcctgtgtgttccagagtaagtagaggggttattaaattgtcacctgatcagctgaagaaaataaaattgtctgatctgatcagcttaatacgtgacaaatacgattatccggaggatatctcactactggatgcaagtgatcaaagactattggccgattatgactttgaagatttgaatggtcgcactttgtctgaagttaatctaggcaacggatctataatattattttccgacgaagaaggtgacacaatggttcgtaaatccattgagctatacttcgatgtaaatgatgcatttcctcatgatacgtgtaagttaccagatatacggatcccactagtcaaatcaagcgaaacttcaacaaatggtgacgaggacgaagataatgacgtagctaccactacggataaacaggaagatggtggtatcgtaatactagatgaagatgaaggtgaaattgaattggcgaccgacccgttagatgactcgaagaaaaggtcggctaatcttgaaggttttggtgaacccagcagcaaaaggaaaaagttgacaaatgaatctgctgattctgatattattgaactagactga

SEQ ID NO: 3840 - DNA, 777 bp, Saccharomyces pastorianus
atggaaaagaaattggaggccacgaagaaagaacataaactgtacaaggataaatatgccgatgccattgatgaacgggcccgatctcaaagagaagttaacgaactattgcaaaggcaaagtgcgtggtcttcgactgatttagaaagattcacacaactatacaaaaacgacgcgttaaatgctaaacaagagcaagagctgaagaataaggtgaaggaaattgaaagcaaggaagaacaactaaacgacgacctgtatagagcaattttgacaaggtaccacgaggaacagatatggtcggataaaattagaagaacttccacctggggtaccttcatactgatgggtatgaatatattcttatttgttgtgttgcaattgctactagaaccttggaaacgaaaaaggttagtaggttcctttgaagacaaagtcaaaagtgctctcaacgactattctacagagcagaacttgaaaatagataaactatcatctgaaagaacattccaacatacagatcaagacgaaattgaaaattctatcattgaagagcccctcgagcaagtcttggtatgcaagactgacacacccgagactaaaacgaggataaaatctttcagcgatatctggaaacaaataaagtcattctttagcacactaaggaacatcgaatttaaaagtctcgatgctcctcttgtcgtcaacacattagaattctacctatactcgatttccttagtgagtatgacgatattaatatccggggtaatatga

SEQ ID NO: 3841 - DNA, 474 bp, Saccharomyces pastorianus
atgttgagatgccatgggacgacaagaagtatgcccttagtgttcagcatcaaccggatggtgttgaggccgccgtttgttaggcttttccattacagttcacattacctgatccagtctggcagaaatccttataatgacaacaccaacaacaatgaaatgcggttaaacgacaacaccgtttggaaaaggaatatagaacctcagtggcagcacttgaaaacgaaattgaatgaattgtactccaggttcaaattatatcgaggccaactgtcctatcaggtcaataaggccaagaaatctatacaagaggtaaataagaaactatctgagcaagaggacgaaatcaacgatagccgtttaaactataataaagatgaattgactagtgggaaaattgagggtctaccctccgaaagagaactgcacagaaagaaagactctagaggatccccggtaccagctcgattgtaa

SEQ ID NO: 3842 - DNA, 105 bp, Saccharomyces pastorianus
atgattatttctctcgcgtccttggtgaacatcaagtcttggtccagtatttcagatatcatcttttgtacggtcgctaagggcaataattcgtctccatgttag

SEQ ID NO: 3843 - DNA, 390 bp, Saccharomyces pastorianus
atgatatctgaaatactggaccaagacttgatgttcaccaaggacgcgagagaaataatcattaattccgggatagagtttattatgattctgtcctcgatggcttccgaaatggcggataacgaggccaagaaaacaatagcgcccgagcacgtgatcaaggccctggaagaactggaatatgatgagtttataccatttttagaggagattctgctgaacttcaagggctcccaaaaggttaaagagactagggactcgaaattcaagaagtcgggtctttcggaagaggagttgctacgacaacaagaggagttgtttagacaatcgaggtcgagactacatcagaatagcgtgtcggatccggtcaaatcggaggattcttcatga

SEQ ID NO: 3844 - DNA, 1023 bp, Saccharomyces pastorianus
atgactattactaaaatacccatatggttagactgtgatcctggtcacgacgatgctatggccattctgctgggttgttttcacccagcttttgagcttctaggtattagcacatgttttggtaatgcaccacctgaaaatacagattataatgctcgctctcttttaactgccatgggcaaagcccatgccatcccagtttacaaaggcgcacaaaggccttggagaagagagcctcattatgctcctgacattcacggtatatcaggtttagacggcacctcgttattgcctaaaccaacttttgaagccagaactgataaaacatatattgaagccatcgaagaagcagtattggccaacgatggagaaatatcatttgtttctaccggtgcgctaacttcattagctacggttctaagagacaaaccccacttaaaaaaatctatcaaatacatcagtattatgggtggtggacttcatggtctagggaattgtaatccaaatctttctgctgaatttaacgtgtggattgatcccgacgcagctaatgccatattccatgaccccgaagtaaagaacaaatgtatagtggtacctctaaatttaacccacaaagccatcgctacccatgaggtcaatgaagaaatctccaacgaaggggacaactccaatttgcgaagattgtttttcgaactctttcaatttttcgctcacacttacaaggacacgcaaggttttgaattaggcccacctgtccatgatccagtggccttggtgccactcttggaattttataagtgggatccatcatctttaatcagatttgattacaagagaatggatatatcttgtattgacgatatactcaatgaagactcgggaaaaatcattatcgaaaaagagtatccaagcgatggtaatttcggtacaatcattggtctagatttgaacattcaatacttttgggaccagattttcacggcattaaataaagcagacaaaatgtcaacaattgaataa

SEQ ID NO: 3845 - DNA, 795 bp, Saccharomyces pastorianus
atgccacgattgacggttggagctaaaaatgtgctctatcctttgcaaaagacatttgtgacaggcagtcgcaagcaagagcaggtaggaataaggtcgctagcctcagtggtggatggcacgtcgaagaaagtggatgctgcccgcggcggcaaggaagaagacatgaaagtgagcgagagaatctatgagtggacaagaacaggattggagcaaggcagggaacatttcaaagtaggtggtactaaggtctacttacccaaggccagaataatcctgctaagacccaacgcgaagcacaccccgtaccaggccaagttcatcgtcccgaagtcgttcaacaagctggacctaagggactacctgtaccacatctacggcctgagagcaatgaacatcacaacgcagctgctgcacgggaagttcaaccgcatgaacctgcagacgacccggttcagagagccgcagatcaagaagatgacaatcgagatggaggagccgttcatctggcccgaggaacctcacgcaggcgagagcccattctgggacagcacaacgcccgacaacctggaaaagtaccgtgaggaaagactcaactgcctcgggtctgacaccaacaagccgggcaccgccttcggcgggatcatagggccctacaagcgggtggcccagccttttgtgccgcggttctggaagagagagatggacaacaagcgtgagcggtacgatgcagagctccagcgcgcaaacaagctgatagctctagatcaatacgtgaacaaggaattgcgttaa

SEQ ID NO: 3846 - DNA, 2121 bp, Saccharomyces pastorianus
atgaaaaaagaaggcaaattacaaaaaggccaccagaaccctaaggatgttgaaaatagtgcaggaagctctccggattctgctaccacagaaaaaaaactattagatgatagttctgagggttccgaaacttcttcagataatgccggattgggtctttccaaatcagaagcaattttccactggcgtgatttgtgctatgttgtccctgtgaagggcggcgaaagacgtattttgaacaacgttgatggctgggtgaaaccaggtactttgactgccctaatgggtgcttcaggtgctggtaaaacaactttattagattgtttggccgaaagagtcactatgggtgtcataacaggtaacatcttcgtcgatggtcgtttgcgtgatgaatcgttcccaagatcgattggttattgtcaacagcaggatttacatttgaaaacagctacagtaagagagtctctaaaattttccgcttacttgcgccaaccttcctcggtatccattgaagagaaagacaaatacgtggaagaagttattaagattttggaaatggaaaaatattcagacgctgtcgttggtgttgcaggtgaaggtctaaatgttgaacaaagaaaaagattgactattggtgttgaattagctgccagacctaaattactggtgttcttagatgaaccaacatcaggccttgattcccaaactgcttgggatacttgtcaattaatgagaaaattggccactcatggtcaagctattttgtgtaccatccatcaaccctccgctatcttaatgcaacagtttgacagattactattcttgcaaaagggtggtcagactgtttattttggtgatttaggggacggctgtaaaactatgattgattactttgaaagccatggtgctcataaatgtccacctgaggcaaaccctgctgaatggatgttagaaattgttggtgcggcccccggtactcatgccactcaagattacaatgaagtatggagaaattcagacgaatacaaggctatccaagacgaattggactggatggaaaagaacttaccaggaaaatcaaaagaaccgaccgctgaagaacataagccttatgcggcaccattaggttatcaattcaaaatggttaccattcgtctatttcaacaatactggagatcacctgattatctatggtccaaattcaccctgactattttcaatcaagtcttcattgggtttacttttttcaagtctgatagaagtttacaggggttgcaaaatcaaatgttatcaacattcatgtacaccgttattttcaatcctatgctacaacaatatctgccatcttttgttcagcaaagagacttgtatgaagcgagagaacgtccatcaagaactttttcgtgggtcgcgttcttcgtatcccaaatcattgttgaaattccatggaatattttagcaggtacacttgcctattgtatttactattacgcggttggattttattcgaatgcttcaaccgctggccaacttcacgagagaggtgccttgttttggttgttttctattgccttttacgtgtacattggttctatgggtttgttagtgatttccttcaatgaagttgctgaaacagcagctcatatggggtctcttatgttcacaatggcattgtcgttctgtggtgttatggctactcctagtgctatgccaagattttggatctttatgtatagagtgtctccgctgacctatctgatcgatgcattattagccattggtgtggctaatgttgacgttaaatgttccaaatatgaaatggttaaatttactccaccatccggaagcacctgtggcgaatatatggctggatatatcaaaatggctggaacaggttatttgggcgacccgtctgcaacagatcaatgtagtttctgttccgtatctaccactaacgttttcttagcttccgtcagctctcattattatagaagatggagaaattatggtatttttatttgttacattgttttcgattatgccgccgcaacatttttatactggttagcaagagtccctaagaatagcggtaaaattactgagaagcctaacaaaaaatga

SEQ ID NO: 3847 - DNA, 2448 bp, Saccharomyces pastorianus
atgtcatcggatatcaaagacgtggaggaccaggcctcgagcacaagctccgctgcccagtccatcgcgcagcacccgtaccgcggcttcgacaacgaagctgctgaaagggtgcatgagctggcaaggacgcttacctcacacagcatgctgcactccgccgcctccaacaacgccgaccaaaatagctcttccatcactgacaacacccgcaacgcggactcgcggtccatcttctctacggacatgatgggcgtaaacccggtgtttaccaacccggacaccccgggctacaatgccaaactagacccgaacagcgatcagttctccagtacggcctgggtgcagaatatggccaacatatcctcctcggacccggagttttacaagccgtacactctggggtgtgtgtggaagaacctgagtgcctccggggactctgcagatgtgtcgtaccagtctacgttcgtgaacatcgtgccgaagctgctcacgaaagcattcaggttgctgaagcccaggaaggaggaggcaacgttccagatcttgaagcccatggacgggtgcctcaacccgggcgagttgctagtcgttctcggaaggcccgggtctggttgtaccacactgctaaagtccatctcttctaattcgcacgggtttaagatcgcgaaggactccacggtctcttacgacgggctgtccagttcggacatcaaaaagcactaccgtggggaagtcgtgtacaatgccgaatcggacatccatttgccccacttgacggtttaccaaacgctgtttaccgtggcaagattgaaaaccccgcagaatcgtataaagggcgtggatagagaatcgtatgcgaatcacgtgacggatgttgccatggcaacctacggtctttcgcacacaagagacaccaaggtcggtaacgatttggttagaggtgtttccggtggtgaaagaaagcgtgtgtccattgccgaggtcgcgatctgcggatctcggttccagtgctgggataacgccaccagggggttggattctgctactgccctggagtttatccgtgctttgaaaacacaggctgacatcggtaagagtgccgccaccgtggccatctaccaatgttcccaggactcgtacgatctctttgacaaggtttgtgtcttggacgacgggtaccaactttattttgggtcctccaaggaggcaaagaaatatttccaagatatggggtacgtttgtcctccaaggcagacgactgcagatttcttgacctctattacaagccctactgaaagaatcatcaataaagaattcatccaaaagggcatcaacgtgcctcaaacggcaaaagatatggccgaatactggctgcaatcagaatcctacaagaagctgatcaaagaaatagacgccgctctggccgaaaacacagacgaagcacgtgtcatcatccaggatgcccatcgcgccaaacaggcaaagagagcccacccttcctctccctatgtggtcaactacggcatgcaagtcaagtacttattggaaagaaatttctggagaataaaacaaagtatcagtattactctgtggcaggtcatcggtaattccgtcatggcattcatcctaggttctatgttttacaaagttatgaagaaaaacgacacgtccactttctatttccgtggtgctgcaatgtttttcgccatcttgtttaatgccttttcttgtcttttggaaatttttagtctttatgagacaagacccatcaccgagaagcatagaacttattctttgtaccatccgagcgcggacgcatttgcgtcagttttgtccgaaatgccccccaaattgatcactgctgtttgcttcaacatcatcttctatttcctggttgatttcaagagaaatggaggtgtgtttttcttttattttttgatcaatattctgtccacgttcactttgtctcatctgtttagatgtgttggttcattgaccaagactttgcaagaggccatggtgcccgcttcgatgttattgttggcccttgccatgtacacggggtttgccatccccagaaccaagattctgggttggtctatttggatctggtatataaacccgttggcctacttgtttgagtccctgatgatcaatgaatttcatgaccgtaagttcccctgtgctcagtatatccctgccggtcccggttaccaagacgttacaggtactcaacacgtttgttctgctgttggtgcttatccaggtaatgattatgttttgggtgatgatttcttgaaggaaagttacgactatgaacataaacacaaatggcgtgggtttggtattggtatggcttacgttattttcttcttcttcgtttatttattcctttgtgagtacaatgaaggtgctaagcaaaagggtgaaatggtgtgtttttaa

SEQ ID NO: 3848 - DNA, 276 bp, Saccharomyces pastorianus
atgttagatagaatactatattccgctataaacttttgggacgtcgtgatttttgatagaaagacatcaaagctattaccaagatcaaacagaagaattctgtataatggttcgttaaccaggtcaatcactacaactaaggcttcagtggtcaatttggaaatcattccgatcgaaaaaggccagtacgagttcggcgtttgcatttctaagtccaacaaccaggacgggatcattcaattcgattccgaaagagtggttttgtccgtcatttag

SEQ ID NO: 3849 - DNA, 1311 bp, Saccharomyces pastorianus
atgacctattcgggaccatatagcgtcaaagccaaaacaatgagattaataacgctgcctttgatgataaaaaaaccaacataccaaagaatatatgaagtaacgtcattaaagatatctgttttacaactaccttctcaacagttcaatattataaaaagctccaaaaaatcaaaccattccgaagaagatgttgagaacaatagatgcatatacagtaaggtgaggattaaaatcctaccagaacaaccacaactagagttgctgagcacttctaagatgacaaagaattcttggatgatgttggatggtacgaaaactggtttccatgtaacggtgagaaacaaatcactgagctgtgaaataaatcatatcagaatcataccaataaataatattgaacaactattgaagtctgattattggaaaaagatgccacctgatgatttatatattatggaaaaacagctggattggctgtctaaatcttgcatacgaattgttaaaacgccgaaggttattaaaccaaatgaaatcattacttttgacttagagttagatactacagctgtaccgtttaattttactggatttgacctgttgattgaatatggcgtaaatgctgctgacaaatcctgtatttatttgaaaaagctatcaataccctatgaggtaacattaagaagaactattgaggtaccaagtatggacattatcccattgaatgagttctttagttcagaggttgaaaatgtggattggattacgtgcataatgaaccaaacacacaataacactgacctccaacctagagattttatattgctattattagacttcaggaattcctggatagacggtattaaattgaatgttcaattcgaggatttcaccagtaatgagtatcacgtagaagccaaccatacctcaagaattattgttcctataagaaaaattgattacaaaaagcatagttttgaaactatgccaataccgaggatatatcaagggagacaattcattcagagtggaatgaacgaggaacagactatagaaatgagacagaaattttggtgccgtgaacacattatttcaaggctcaaatgtaattggaaactaactacagatcaatctgtaacaggctcggtagattttaataaattcatagaaaagttggaccataagatggtgtccacgatatacactgggaaattgtttttcggagtacaactattgattgataatccagaagttaaagttggtgaaagaaccaacttaaagatattggctgatccaactagcacatgttag

SEQ ID NO: 3850 - DNA, 1980 bp, Saccharomyces pastorianus
atgaacattctcaagcatttcccaagttatgttggcccgtctaaaattcgaactttggtaataccggttggccactggaagcgaaacgagttcaatgatgcggtacaaagcctgtccgaattcagcgaaattcacttatccgacgtgactcccattgacagtccgattttcacaccgcaagggtttccacacggtcggctatttttcgagttcttaaccatagatcatgacaatgccttggaactgtttctctatgatttcgagccatttagaaaaacgtttgtcatcattggcctagtgaacgattccagtgacccttctaccaatttgaactttatgaaggaaaaatacccaactttgatttcaccaaatttaatatacacttcggcttcgctcactacagagtttatacaaggcatagatgctatcgaaaatgcattcacatccacaccggatatgaaaaaaagtttagagacgattatgtgcgacatagcaagaaactttctgatcgctttgaacaactattactcttcatacaagcatgtcactttgagatcaccgggtgcgatcgcggggaactcggtactgaaaacaacgctgataagacagaatagctacacatcttcgctgtccaccgcatccatgggggctgcgcaatcgtccgtctctagttcatcgaagacaaacgcagctgctactgcttccaaaagattatcttctttcgaaatgaccaccaacagtctaaagagatccgcttctttgaagctagctaccacgctttccagttctgaaaatagagcccaacagaagtcactaggccgacaactgaaaatattggggaatttccaattgatagcgggacgatacatcgatgcgcttaacagctttactgaagcgattacaactttgtacaaagtacgcgactacctgtggctgggttctgctctcgatggtatttccatttgctttttacttctgtcttacctcgatatggcatatcagattccacaaattgtaaacctgatctgccctgtggaaaagctcaacactgaagctggttcaacaagtgtctctcccgtagactctaataccaagacatccgccactacaacaactgcaacaagcacaccaagaaacagcatatcgatagctgctatgcaatctcctagaaattcaatgatttctttgtctgctccaacacttaatatcgatgttgagaacgtcaacctcccgttattgattaaatccatctccgataaggtcttctactacttcgatttaagcttaatgcataatagtgagtatgctccgcaggtggtttattgtgagtccttgctaaagactttgacctttatgacctcgtgctataaaagttctgaattttcgaaagacgttttggatttcattgttaaaaagcatagcgtagctgtgttagatattcctaggaattcgatatttccaagatttgaaatctatttttacacaaataagctttttgaattacaattgaaggaaatgcaagttgaagcgcaagtaaatatctacgcaacaatggctgaagtctatcgtatcttaggatatgaaagaaagcagctgtttgtattgcggttgttaatggtggcccttttggcgactacgaataaaatcgcttggcactctgactacaggtcgttactcgataagattgttgaactattcagtattgacgaaagacgacctgaaaacaatgtaaatgacgcatctcaattcacttggttgattttacaaaaaaaaattttacaactctgcatcaaagtttcgcgaaagattgatgatttcgagtatgtcgccaaatttacctccatactggttaccagatatacgcatttattaagccgccctgaacaagaaacacttttaaaggactatatcgagccttcgattatgaacgagtctattacacgttactgggatccttttctcttgagggaaatgttttaa

SEQ ID NO: 3851 - DNA, 861 bp, Saccharomyces pastorianus
atgccttggaaacaacacgccaacaacaaacaggttgtccctgagtatgccgaaagcagttccaattatgttggtagacagttaccgaatattctaggcaagacacctttaaatgcatctggagtcggcaattcattacatttaatctctccaaatgtcagtttatcatctccaacgcctagaaatgcaactacaaatacaaattcaagtacttttagtacacctccggtactaaggatgagctctctggaccccggtggatctagagccgcaagccaagcaacgataaggccttctatgagtacaacatatcctgtcacctctaccactaatcgattaaaccagcccgaagaatctttagtctactcgtcacgtgagcaatacagagatatgcctcttcttcctgatatacctccgactttcagcaacgcacgtccaaatgctaaccagtttgccagttcatcggtatgtggtgctaccgtctttccaaacagcatgctgaatcagagaactaactctgtaccaatggcagatctaaacacaagaaatgacgtacgacagatctcgatgcccatacttccaaccctgccccccaacatttcaactcgagccaactctaacaagttggcgcctcccttaatagccaataatagcatcatttcacgttccagtcctcccattggtgcaagtgcaccgctacagaggtctaagcccatagtgaatccattcattccaagaaggccatatgttactgtactgccacaaaaaagacagctttctaatgcatctgcaacatcaaatgggcccataatgggaacatggaaaacacaggattatgaaaaaaaatccagcaacggttag

SEQ ID NO: 3852 - DNA, 1428 bp, Saccharomyces pastorianus
atgatacatctagaggactactgggatgatgagacccctgggcctgatagagaaccatccaacgagttgagaaatgaggtggaggagaccatcacgcaaatggagctgctcaaggtgtccgagctgaaggacatttgcaggtctgtatccttccccgtttctggtagaaaggccatcttgcaggatcttattaggaacttcctgcaaaacgccattgtagtgggtaagtcagatccttatagagtccaagccgttaaattcttgatagaacggatcaggaaaaatgagcccttacctgtttacaaagacctttggaatgccctaaggaagggcaccccagtgagtgccattactgtccgttccatggacggaacttccaccgcgcagcagcaatcatctgcagttataagacagtctcccacgcatcgacggacaacttccagtacagcttctacgtctcgtgcgccacctgcgaaccctcaggttactccttcggcttcttccccggtaccgacaatccatttcaaggaatcgccattctacaagatacagagactaattcccgaattggtaatgaaagtcgaaattactggtggtagaggtatgtgttctgcgaaattcaaactgtgcaaggcggactatgatttattgacaagcccggatagtaaatacaaactatatttgttttccgggatgataaatccagtgggctctcgaggtaacgaacccattcagttcccgttccccaacgaattgagattcaataatattcaaatcaaagataacataagaggcttcaagagtaagccaggtacggccaagcccgcagatttgactcctcatcttaagccctacacccagcaaaataatatagagctaatttacgcctttaccaccagagaatacaaattattcggttatatcgtggaaatgatcactccagaacaacttttagagaaggttttgcaaaatccgaagatcattaagcaagccacattgctttatttaaaaaaaacattcaaagaagatgaggaaatgggccttacgaccacatccacaattatgagtttgcaatgcccaatctcatacaccagaatgaaatacccttcaaaatcgatcaattgcaagcacttgcaatgctttgatggattatggtttctccattctcaactacaaatcccaacttggcaatgccccgtatgtcaaatcgacatagctttggaaaacttggcaatttctgaatttgtcgatgacattttgcgaagttgtgaggacaacgttgaacaggtggaactaacctccgatggcaaatggacggccattctagaagatgacgatgaggacgatagtgacggcgatggcggcgatagaaacgataccaactcgaagaaagacacttccgtgtctaaccatccttcagttcttcac

SEQ ID NO: 3853 - DNA, 342 bp, Saccharomyces pastorianus
atgctttgggtgagcactttttctgccttttccaacttgacattgttcaagttggccaaatattcaaagttatcgttgggctccaaggattccacttctactgtagttgagtcatcgtatatttcagtaacggcgcccttcttcaaaatgggcttcacgtcgttgccttctttgtcgccatcgacttcttcttcatcggaatcaaacccgtgccaggaatcgtcagactctaccttggcaccgtcaacatcacccttttttgcatcttctatctcggcctccaagttcaaactttctttaaacgtctttaactgctcttccattatctctttacgttcctga

SEQ ID NO: 3854 - DNA, 2586 bp, Saccharomyces pastorianus
atgccatacgctcatccacatgcagtgaaagaatcaatgaacggaatcgatgagaacataaagaatgacgaagatgtggctttcgagtacgaaattcaaaagacaccacagagcgtacttacgtggaaacgatacctccagtattgggaaaataacgggagaacagatgatcagattaggtggctatatgaaagattttgctcccaattttcaactgatacaagtatatgggaagaatatatacgatgggaatcgactagaaaagtaatcggagcctcacgtattttatcgctattccaaagatgtttaaaagagtgtgttcaagattgcgataagatatgtctgtcctatttggagttagcgatagaacaatgtgatttgacgacaataagggacgctatgaatttatctttaataagagtagataccaagatgcattcaaaagtttgggaacctgttttgcgattcatcacagaaaagtttttacttttaacacagttagattcgacgcaagaggaagatgaagaaaatgttgatgaagctgaattaataaatatacttttgacaaaaggtttcacaaaaataggctttatcagtgaagaaatagtggaaagtaaaagtataggtgatgtttggtcggcccaaattttagaaagatatctaagagtgacgccccagcaaaaacaacatgaagtcctgatgactctcgcgaaaacaagagataattctaccgtcaattcagtgtacaaaaaatatttaataaaagatagagatagtggcaagtattttcccaatccaaaattaacattttcgctaaatttcaactatttggtcaccctggaaaaactgggtttagatgagcaatacgaggaattcatgaatcagatgaaagttttatatgctgaaaactgggtctttttgactttgtcccttgccagacattacacttctcgtggtaggcttgaccaatgtgaagatttgctgcaaaaaagtttacaggaaacaatgaagtatactgactttgatcgtgtttacagtttctacctcctttttgagcaacaatgctctcaaattattttagaagagttaaaagacaatagccccaagtcctttaatcgagaagaatgggttgcaaaattacaacgccacatggcgacatttgaatctttagtaaattcacatgatatatacttgaatgatctagcattaaggcaagaccctcatgtggttgagacgtggatgaaaagagtggctttacaagaaacacctgcggcgaaatgtaatgtatatgcagaggccgtattgaagattgatcctctcaaagtaaacacgcccggttcttttggtaaactatggcgcctatatggagatctgtattgggataagaaggccactagtacagcaagggagttatgggcacaggctctgaaagtaccatttcctttcgttcaagatctggaagaaatttatttaaactgggctgagaaagaattagacaacgaaggaattgagagaacgatttgcatacttgaagatgcattaaaaataccgaaaattcccgatatcttaattgaaaagtttaatagcgggcgcaggagagtgcctgcccaaactgtaatattcaactcgctgcgcatctggtccaaatacattgattacctggaggcctattgtccaaaaggcgctacttcatccagcaaacagttcaataagacaaaagcagcatataacaatgttgttgatctgaggttgattactccagcaatggtggaaaattttgcaatgtttttacaaagtcatcaagaggtagtagatagctttcaggtatatgaaaaaacgatccccctgttcccacctgaaatccagtactacttatggattgagtacttggaagtagcaacctcccctcaattatcatctttaagtcctgaacacatcagatttttgttcgaagaagcgctgaatagtttatgttcgcatggcatagactgtaagacgatttttattgcgtacagtacttttgaagaaaggcaaagcagcttggtcaggaagagtattgaagtgttgcatcgaggtgctgtctcggatgctgtcagtatgaatacgcatcttgaaagtagactacaactgtggaaaatgtgtatctcgaaggccgtatctactatgggtccatcagtagccagagacttgtatcaagagtgtataaaggtcttgccgaactctaaggcagttgagtacgtgataaacttttcagaccttgaggcctctttgggagaaattgtacgagctagagaaattctggtttatggtgcagagcttctacctccatccagaaatacagaattatggaaccgatttgagattttcgagttgaaacacggcgacaaagaaacttacaaagatatgttaaagctgaaaaagctactggattctggcatggtaattgattcggaaagtgttagccaggcgaaaggtaacatcaacttcgtagcagctgcaaccacacatggaccaaattcgcgcggtacagttgaacaaggtaattcacaaccggttaacccagacgaaatagaactagatatatga

SEQ ID NO: 3855 - DNA, 2457 bp, Saccharomyces pastorianus
atggggaacaacccttccactcaggatccatcgcattcggccaagaaggaccatggttaccatctgcatgaagccttcaataaagatcgccaaggtagcataacttctcagctgtttaataatagaaaaagtattcataagaggcatgccagtcatgctaacaacgataatgccgctatccctcctagaatgcaattacttgcgtctcatccctcaacatcagattgtgatgatagtaccgataaggctgtttgtgtcgctagtgagccttcccttttattcaaaaaggattactcagtgaccaatgcagcagatgataacgagactacgttagccaatttgtctttaaatgatcgtcatgacgtaaatgctccggaagaacaagttaaatcaccatcctttttaagtcctggtccatcaatggccactgtaaagcaaactaagaactatccggacgatttgtcgaccgtgaacaataccatagttgatgaaacaattggggacgggcgaaaaggccatcctcatcatgagaggcatcgctcgagtatcattgcattgaagaaaactcttttggaaaattcggctactgattccccctctccgacaagatcatcatccgtacactctacatcgctaccacctctaagcaaagccggttctatcgatattcctattaagcaaacgtattcaaaaaaaccgtctgtccatgcataccagtatcagtaccttgatcctgacccgatattgtctgacgactcacaacttgacaaagaatcaaaaagtgataacatagatgctgaggcaggtgtactgcaaagtgaggatatggtcttaaatcaatctctattacaaaacgctctgaaaaaagacatgcaacgtctctcgagagtaaactcctctaactcaacgtatactatcgacagtacgacccaaaataataataaaaatagcaacaatagtagtaatagtgagaataatattggtaacaaggaaaattcaagcgattctaatgatgaatttgctgcacccatatctgccaccgcaaaaatgatgatgaaattgtatggtgacaaaactttgatggaaagagatttgaataaacatcaaaacaagtcattgaaaaaattgcagaataaaaaattaagatctgcttcaaattcaagaagatcatcgtttgcttctttgcattctttacaaccaagaaaaagtgtcctaacgaatagcttgaatctgcaacctttgcatccacttcatccaattattaacgacgatgacagccaatattccgtaccacagcatagggaaattcttcataattttaattcaatgtcaagcatgtcttcaatatcatcaacaaattcctctgaaagcaccttggtgattttaaaatggaaaaatgatagtaacatgcctgcaacaacagaagtctctataataagtcacgatattgcatctgctcttaaggaacagcgtgaggtcaatttggatgaggatgcaagtttagactcggaaaagcaattaaatccaaggatccgcatgatttatgatgttgtgcgtaaagaatggtttattccagagctttttttacctcccggcatttatagactacaattttccattaatggcatattgactcattcgaactttctacctacagctacaaattcagaaggtaaatttgtcaactggtttgaggttttgcctggttaccacacaatcgaaccatttagagatgaagcagacacggaatctcaggcgagttcgacaatagatgttgaagctcccataaggccggagcctaagcgattatcatcttcttctcgtaaatcttcatattattcggcaaagggtgttgaaaggccaagcacgccgttctcagattacagaggtctaagtaggtcgaactcggcaaatctgcgggattcgtttgttcgtttgaaggcaagcagtttggatttgatggcgcagataaagcctgaaattttggaatattcaaatgaaataccaagtttatttactataggtaatggttccgcaaagcctctacaagaaggtaagccatctgaggaccttccaagttttacgcataaggttattgactgcaatcaagatgatttgtttgccactttacaacaaggcggtaatattgacgcagaaacagcagaaactgtatttttaagtcgataccccatccctgacttgccaatatacttaaactcatcatatttaaacaaaattttaaatcagggcaatccaaattcagagtcaggtgataaggatgaaggcgcgataaaccatattatccctcacgtgaatttaaaccatttattgacaagcagcattagggatgaaatcatcagtgtggcttgtaccacaagatatgagggaaagtttattacccaagtaatttacgccccttgttattataaaacaccgaaagctcatggcaacaagtaa

SEQ ID NO: 3856 - DNA, 792 bp, Saccharomyces pastorianus
atgcccaacagccttcgcgaatctgaaaacaattcaaacaacccaatgatggaaattattagtcatattgaaaagacaggccattcattcgatgttatatacatttcttccgagatcttaatagaaaagtacacctctattcttgaggaccccattaatgagttattgcagttcttaaatgagtcattcaaagttctaaatttcaagaaattaaagtttttgcaatttaaaatattagagaggctaattatcgaaaaagaaacgaaactttcgagtctcactgagattgaaaaccaactgcagaagattaatgaaagtttaacgcggtcgactatattgacagatgaaaattacaaagatacaaaggctgctgacctgacatttgttaaaaaggacgtaagatcgctatcgaagtcaagttcaaattcaagctccagtggacaccaaaacgaaattcatataggcgcaagtaaactaaactatgaaacgtctacgccaacaatgaatctcaataaattagaaatcaaacaattgactgaacaagaaagatctaaacagatcaaacagttgaaccaagatttatccaaattgaaagattgtctatcaatctgtatatcagacatgctagaaattaacaattcgtcatacaacagcttaatgcatacatataaccatattaatttgaccattggaaagatcttgaaacttttcgcagctagcttcaaagcatggatcaaagaatgtctgaagaattggaaactggcaaagttacaaatcgacgaggccctataa

SEQ ID NO: 3857 - DNA, 129 bp, Saccharomyces pastorianus
atggacagacaatccttcaacttagttaaatcctgtgtcagttgtttaatctgtttagatctctcttgttctgttagttgtttgatttcaagtttgttcaaattcattgtgggtgtagatgttttgtag

SEQ ID NO: 3858 - DNA, 228 bp, Saccharomyces pastorianus
atgaggataataagagtagtatacccagtatttacaacttatattcacaaatacgtgtatatgtataaatgtgttatttatggtgcaacgccgggcgctaatgctcattataatgattggtcgatttgcgacttggctagtttccaattctctagacattctctgatccatgctttgaaattggttgtgaaaaattttaagatcttggcgatggtcaagtggatgtga

SEQ ID NO: 3859 - DNA, 711 bp, Saccharomyces pastorianus
atgaagttttttgtcacctcagactctgatgctcaagcgcaaatagttgaaagtcaaatctcaaaatttatgaagacacttccagatgacaaatgcttgctcagtggaccaaagacatctgcgtatcctcttatcaagtccgaaggtaaacccactttgatcaagtttccatttcaggtacattatacttcccaagctctatcgggtgttgcatacacacacaaagatggtgcagcattgcaagtcatgtcaaacatgctgacattcaaacatttgcaccgagaagtgagagagaagggtggtgcttacggtgggggtgcctcttatagcgcattggcaggtatttttagcttctattcctacagagatcctcagcctttgaatagcctggagactttcaaaaatagtggacaatatgtacttgatgatgccaaatggggtacgacagaccttgatgaggctaaattgacaatatttcagcaagttgacgcgcctacaagtcccaaaggagaaggtgtgacttattttatgtcgggtgttacggatgacatgaaacaagcaagaagagagcaacttttggacgtttctctcctagatgttcatagagtcaccgaaaaatacttgttaaacaaagaaggagtaagcactgtaatcgggcccggaattgagggcaagaccgtcttgccaaagtgggaagtcaaagaattgtaa

SEQ ID NO: 3860 - DNA, 1611 bp, Saccharomyces pastorianus
atgttgcgtttccagcggtttgcgtcttcatacgcacaagcgcaggcggttagaaagtacccagtgggtggtatactacatggctatgaagtaagaaggatattgcccgtcccagagctaagactgactgcagtagatctggtgcactcgcaaacaggtgccgaacatcttcacatcgacagagatgataagaataatgtctttagcatcgccttcaaaactaacccaccagatgctactggtgtgccccatatcttggagcatacgacgttgtgtggatctgtgaagtatcctgtgagggaccctttcttcaaaatgctgaataagtctttggcgaatttcatgaatgctatgacaggtcccgattatacatttttccccttttctactaccaatcctcaagattttattaatttaagaggggtttatttagattctacattgaatccactgctgaagcaagaagattttgatcaagagggttggagattagagcataacagcatcacggacccggaaagtgagattgttttcaaaggcgtggtttataatgaaatgaaaggtcaaatatccaatgcgaattactatttttggagtaagttccaacaggccatttatccctctttgaacaattctggtggggatcctatgaaaataacaaacttgaaatacaatgatctcttagacttccatcatagaaactaccatccctccaacgcaaagacctttacatacggtaatttaccattggtggacacactgaagtatttaaaccagcaattttccgggtatggaaagagggcacgcaagaataagttgcttttacctatcgaactaaacaaagacataaatatcaaattaccgggccaagtagatactatgctaccaccggagaaacaaataaagtcctcgatgacatggatttgtggtgctccacaaaatacgtatgagactttcttgttaaaagtattggggaatctattaatggacggtcactcttctgtgatgtaccaaaaactaatagaatcaggaatcggtttggaattctcagtaaattcaggagttgaaccaactacagcagtgaattttttaactgtaggtgtccagggggtgaacgacactcaactgttaaaaaataccgtagatcgaattttccaagaacttttagaagcagattgcccatttgaccgtaaacgcatcgatgccataattcagcaattagagctttctaagaaggatcaaaaggctgattttggtcttcagttactatattccgtgctacctggctggactaatggaatcgatccattcgagaacttattatttgatgaaattttgcaaagattcagaaatgacttgaaaactaagggtgatactttattccaggatttaatacgcaaatatgttactaataagccatgctttacgttttctattcaaggttctgaagacttttccaaatctttggaagatgaagaacaagcacggctaaaaaaaaaaaccgatacactagatgatcaagacaaaaagaacattttcaaacgcggtatactattacaagagaagcaaatgaaaaagaggacttatcatgtttaccgaccttacaaataa

SEQ ID NO: 3861 - DNA, 219 bp, Saccharomyces pastorianus
atggtggtagaagatggttatgaattctttaatgatagaagcctagtcacagtgttttccgccccaaactattgtggggagttcgataattggggggccgtcatgaccgttagtgaaggtctcctgtgctcttttgagttgttggatccattggatagcaccgcgttgaaacaagtcatgaagaagggcagacaagagcgtaaattagctaatcgttaa

SEQ ID NO: 3862 - DNA, 1149 bp, Saccharomyces pastorianus
atgattcaaatggagcctaagtccccgattctaaagaaccgcagaagtacccaatctacgagctcctttacgtattatgaaaatgcgttgaccgatgacgataatgaagacgacagcgaagaccctacgatggctaaagtgactcgtatcagcaccggttcatccgccgataaaaactataagcataccctctcgagacgccacaactctttgcaaccagaaaaagcgaagtctggctcttcgtcctcttcgtccagattgcgcagaagatctgacaatacgttaccttcaaactattcttcaaacatggagcccaatgggaacgctagcagttattctttgaacagatcgaactcgcatgcatcttccacccatagcaggaaatcgtcattcgggtcgacggggaatacagcttacagtacaccattgaattcaccagctctgaaaaagatgagctctaggaacaacgacaacagtaacgaagatgatgatgacgagtactcatcacccatccccaatctaaacatagacaagccttcgtcgtcgtcttcatcgtcgtctgcatcaagaagagaatatctaagtgcttatccaacactcgtacacagagactcatcatcctcacttagtccgcggggcaagggacaacggacgtcttcttcatctggatctagtcagagaatatatgtctcaccaccatctcctacggatgaacttgtgggtgaaagttttatagatggtgacgatgaatccaagacaaataccttgcttgaaatgaaaaggaaaaaaccgattcgtcccattgatatagatgaaatcattcaaaaactactggatgccggttatgctgcaaagagaaccaagaatgtttgcttgaaaaactctgaaattattcaaatttgtcataaagctcgtgaaatatttcttgctcaacctgcgcttttagaactgtccccctctgtgaagatagtgggtgacgttcacggtcaatatgccgatcttttgcgactcttcaccaagtgtggattcccgccaatggcaaactacttatttctgggcgattacgtggaccgtggtaagcagtcctggaaaccatcttgctattgttatgctataagatcaagtatcccgaaaattttttcctcttga

SEQ ID NO: 3863 - DNA, 1224 bp, Saccharomyces pastorianus
atgaaagttggaatgagtattctaggaatgtatataacgcaagaggtcagaaaggaagtacagatgtgcaaaaggattggtggagccaatcaaggcttaaggaggatgattattcgtgtgggtgtggatgtggattatatggtgggcgtgctgatgctggccgtggtggtagtgttttgggtaggtgcctcgtgcttgaccaacgaattactggagacgaatgcgtataataagcccttttttatcacatatctgaatatctcgtcatttgcgctttatttggtgcctgacctgtggaaaagaattcggtcgaaaaggaaggccttgcaggatcagagggatcaaatactacctgtttatacgcatgaatccttgcctgaatttttacccttggtgactgctgcttcctcatctttgtcttccccttcaacggaggacaaagcgaccaaggatactataaggctgagtctgctattctgtgtcttgtggttcgtagcaaatttggcaggtaattccgctttatcgtacacaacagtggcatcgtcgaccattctttcgtccacgtcttcatttttcactttatttcttgctgtgagtttgcaactagaaagtttctcgaaaaagaaattatcaggattgtttgtgtctttgtttggtatcatcctgattgtggtgcaatcttctaaagaaagagattctgttagtgcgtcttcctttttcataggcaacacactagcactacttggatcgttcggttatagtgtttatacgacacttttgaaatatgaggtatcatccaagggccttcaactggacatcaagttattcttgggttacgtcggtatcttcacgtttctgttgttttggccaatcttaatcattttggatctatcgcactgggaaacttttgagttgccaaataattctcacactttttttctggtcttgttaaattgtatcattattttcgttagtgattatttttggtgcaaagcggttattctgacatctcctttggtagttaccattggtttaactttcactattccattggctatgcttgctgattacctttggagaaacgcatcctttacctcttggtatatcgttggtgtttttttcatatttgtttcattttttttggttcacgatcaagaagagtctacaactgaaaataaccattctaccattgaaaaacaacaaaattcacgtcatacagcttga

SEQ ID NO: 3864 - DNA, 957 bp, Saccharomyces pastorianus
atgagtgaaatcggtaagcttgttgaatacagctgtctaatttttttaccgtcaccatatgcggaacaattgaaggaaaccattttgccagatttaaacgcagcgtttgataactctgataccgagggttttgtaaagacaattaactcatacaatgaacttattcgccaagtacctaggtcaagtataatcaatcatttagcgacaattgataagattcctcgttcatttatacatgattttttgcatattgtgtacacaagaagtattcatccacaggcgaaaaagttaagacactacaaggcgtttagtaattacgtttatggtgaacttctgcccaatttcttatctgatgtataccaacaatgcgggttgagaaaaggtgatactttcatggatctaggttcgggggtaggaaattgcgtagtacaagccgctttagaatacggatgcgaattaagctttggttgtgagatcatggaagatgcgagcgatttgactctattacaacatcaagaactaaagaaaaggtgcaagttgtttgggatgcatttaaacaacgtggagttttcattgaagagaagttttgtgaataatgaacgcgttagtgagataattcctctatgcgatgttattctcgtgaataactttttatttgatgaagaattgaataaagaagttgagaaaatattacaagcagcaaaggtcgggtgtaagatcataagtctaaaaaatttaagaagtttggcttatcagatcgatttttacaacattgaaaatattttcaatagattaaaggtacaaaagtatgatctggaagaagatagtgtttcatggacacatagtggtggggagtattatatatctaccgtgatggccgacgttgatgaaagtttgtttagccctaatgccagaggtagaaggaacaaaggaaccccagtgaagtatagtcgatga

SEQ ID NO: 3865 - DNA, 816 bp, Saccharomyces pastorianus
atgagtggccaggaaagcatatctaatggtaattccgactcatttgttatgtcgtcttccaacttaggctctcaggaatcttcaatatccccaggtgacctgatcaaagacagcaatgatcaagtaccgccaacttcacgctcgtcgaaaaactcatttctctccaagcaagtacaggagctactagaaggggctaataagtatgatccgaaatacgggctctccttacctagagggtttttaagagataggaaccgcaaatccaaggacactggattggtgcctcttgttgaaaaggttatacctcccatgcacaaaaaaaccagtgttagaagcatgaggaaaaaatcatctgcaactatgaagaaggatgtaaagaaagtagatactgtaagaaagaaaataagaaataaagtatcaaaaagaaatgatgagcatcttgtaattacaaaacaagaggtaaacgcttctcaaagaaagaatctctcaagaaaaaaagtttttattgagggcaaggaaaaggaagaaaataaacaaaagaaaatctcttcaacatttgtgaattggaatggtccctatttacagttaaagtacccattttttgatataaactatttgaggtcacacaatagttattccggaacccccataccatctgtcactctaaagactaattctccacagtcaacaagtctactttcggaacatgatattcgttcagcaacaaccgttaaactgcaaagcgttttgtttgctaattatatggaagagtacaagattgacttgacaagacggctgttatttatgatccaatga

SEQ ID NO: 3866 - DNA, 207 bp, Saccharomyces pastorianus
atggtttccagcaactgcgtgctgtcggagtgtgggcagttcaagaggttgaccgcgaacttgtcccaaacggtatcaccgtcacatttcttgaacttgactagtgctccgctcctaatggcacagcggtgctgtgaatgcgccagagggaacggatgttggaaaatcacaccgtgtatgtcttggtctacgtctcttatttcatag

SEQ ID NO: 3867 - DNA, 1821 bp, Saccharomyces pastorianus
atgccgctagcatccataccggacatttttataacaccaaatcctgtagtcacgatatcagaaaaggaacaagatgttttagatttgattgcagaacaagtggttacagattataatatcttgggtaatctcggcattccagagatctcatacaaaggtgtgagagattgtcaggaaggtctggtaaaatcaacgatgttacaattattttctagttttgatagattgaatgggaatgatacaattaccaaattttacaatatgaagcagccatatgtttttgtaaaaaagcatcacgaactaatcaaagttaagcacgattctcagcccttcataaaatttctaaattttcgtccaccaaatggcataaagaactttaaatttctattattgagttcgtctttcaaagaagattgtttatcattttcaccgactttatcacagacgtatatcaaccaagaattagggttttgtgagttgcttaaactaaccaatgaagatccgcccgggttaatatatttgaaatcatttgataagaataaattactattactagctgcgcaaatcgtctcatattgctccaataataaaaactcaattaaaaacgtaccgccaatagtgatcatattacccttagataaagccacactaagtgagctagtagacaaggcgaacctttttcaagtgattcggaacgaagtgtgtgccaagatgcctaacatcgagttatttttgaaagtagttcccatggactttatcaaaaacgcattagtgacggtggatcagtacgtcaatgtagccatttctatatataatatgctgccgccaaaatccattaagttcactcatattgcacatacactaccagaaaaggtgaatttcagaaccatgcagcaacaacagcaacaacagcagcaacagcaacaacaacagcaacaacagcagcaacaacagcagcagatacagaacagtagcacagggtcatcatcggtaatctattacgactcgtacatccatctagcatactcacgtagcgtggataaagaatgggtttttgctgctctttccgatagtaatggacaaggcagcatgaccaagacatggtatgtggggaactccagaggaaagttcgacgatgcgtgcaatcagatatggaacatggctttgaatttagcgtccaaaaaatacggcaaaatatgcctaattttgacaagattgaacggaatactcccagacgacgaactaatgaactggagaaggctatccggcagaaacatacacctggcggtggtgtgcgtggatgacaattccaagatctcgttcatagacgaggacaaactttaccctagtttcaagcccatctacaaagacgccaagttcgggggacatatggagatgtccaggctagatgactatgaaataagagacgtagaccaagacatacacggtgtgattttccaacatccgttccctctggcgcattcacagcaccgctgtgccattaggagcggagcactagtcaagttcaagaaatgtgacggtgataccgtttgggacaagttcgcggtcaacctcttgaactgcccacactccgacagcacgcagttgctggaaaccatcctggaagagttccgtaacctggccgccttggacgtatggtacggcctctctgatggcacggatggtcatattccatggcacatcctagcagtgaaaaagatgatgaacacgcttatccacaccagggttaagatcgctaacaccgccactatcacaaacaacaccgccagcctatcatctgccacgatcccggagaattag

SEQ ID NO: 3868 - DNA, 2262 bp, Saccharomyces pastorianus
atgagttctgacgcttccacgtatagacttgaggacgttctatccagcttttacagactagagaaggttacgaagatcaactatcaccagtatattcctaaaacgcagaatgaccaatggtctattcaaatagaatttctgttgcggaaacagaatcccaagaatctggtggcattgctttcaagagatttgtggtgttttagcataaatgatgatcctataccgacgcctcccatggtagaaaataagccggtaaacccagataaagtaggatcttttactgctgattattctaaaccaaacttgccgccccattatgccctatttttgaaggcgttacgaagaacaatctgcattagtttagcactaggctctcacaataagctaatacaatttggaaatgcctgtatatcgttgaacggagacccgagtcatcttatacagttagaaccccacctttttgttaatggtgaccttgcagtatccctatgtgctaagaacatgggtttactgcccatcaaagaggaaaatctagaagaatcatttcttcgaaagcacgcactctatctagcaccatcaggaataaggatgcatatagcgcctgcatccaagcaaggatatttgattcaaccgccaaagcataccggacttctcctgacgacattgagcgtatctcatggtatcaacttgcagaataaaaaaaacctgaaatgggtcgccgtcattcctgacttggggcatcttaatggtcatacacccactatagcctcatacctgaatccaccagtcgaaggtaagaaaatagtatggccattaagcttaatatatgctcaaccggtaatagatgtcgaaggttctacatctagtgatccttcagaatttcacagtttacaagatgcactggatgccattgatgactttatacagctaaaacaaacagctgcttatagaactccaggaagctcaggcgtattgagcagtaatatagcgggcaccaacccgttgagctcagaaggcgcatacacagaacagttccaacactataaaaacaattcgatcaactcacagcccgtttcctacccttctgtccaagaaactagcaaaacatcaccaaaagatatttctcccggtttcacgggtattgataaagtgatgctttcgccgagtgatcaatttgccccggctttcttgaacacgcctaataataatatcaataataatgagttgttcaatgatagaaaacagaccatagtgtccaatgaattagaaaatagtccgctgaagtccgagctggaggtaagtggcagatcattagaaaagataaacaatcccataagcaagacgggaagtgtggaagcaactactaataaagagagccttgtggaacaacaagaacaagttgaaaacctagcgagtgagaaaagtgattctatagtcgataaggaactgttcggtgaagacgaggatgaggatctatttggtgatagtaataaatcaaattctacaaatgagtccaacaaaagtatatccgacgaaattacagaagatatgttcgagatgtcggacgaggaagagagcattaatgggaaagacacaaacaacaataatagtagcatacataccggtcttggcaaggacatgccatttttcacgtctgagaaagccaatattcgtacaatgagtggaacaacaaaaaaatctaatgggaaaagaaaatatctggatattccgatagatgagatgactctacctacaagtccattatacatggatcctggtgcaccacttcccgtagaaacacctcgtgataggcgtagaagtgtttttgcaccattaaatttcaaccctataatagaaaataatgttgataataaatacaaatctggagggaaattttcatttagtcctttacaaaaagaggaagcattgaacttcgacgtttctatggcagacctatccagctctgaagaagaagaggatgaagaggaagagaatggtagcagtgatgaggacctcaaatcattgaatgtacgcgacgacatgaaactttctgacaacgttagcactagtaataatatccatgagccgcaatatatcaattattcgtccattccaagtttgcaagattctatcatgaaacaagacaatttcagttcaggaaacgaaggcagcaacgccggcaacaaggagggatttaattgtatttggaagatcccctcaaaacgatataccgcagacggagtctcccttgaagactgttga

SEQ ID NO: 3869 - DNA, 2052 bp, Saccharomyces pastorianus
atgccctataaaatactccggatgaaaaattcgctcgagacacgtaaatcagaagggatattactggcggatgaaagaaatagattaaggataggagagctgtatcgttacaagttttcggtgaataaaaatgagctcaaagaacaagggatagatgtatcgcaactattcgtgagaattaaaaacgaagaaagtcccctgctccggccagtgtatttgaccgggccgtattccttttacgttgatattagaccgcataattacaatgagaaccgcaggtttcgagggacagaggctattccgtttattgaaaacttgaaaccagacgaaaggtttaaagtaaagatattactgaatcgtaattccagagttggtagtagttctatttattcgtggactatagacattgtttcgcaattagcggtgaccacgatcccgaggttggaattcacttttagaataggaacgacaaggaaagtggtcaagaaaactaacggtccgtttaaaagtgttgaaggtgttgctttggagatatgggacactaaaactctttgggatttgccaccaaaatatccagaaaagcccgtacatctggttatagtgacacatgggatattcgccaatattgggtgcgatatgttatatatgaaggataaacttgaagaaatgacgttccccatggacgagtctattaatccaaatataattgttcgaggttgtatggataacgtgggcaaatctagtcatggtatacattgcttaggtgtaagagttggaaagtatgttcttgaaattgttgatgagttgaacaagaagtacagagtaaataaaatatcattcattgggcactccctggggggtccaacccaatctatggcaatccgctacataaccgtgaaaagaccagatttttttgacccagtgaaaggtgtcaaacccgttaattttattacgctagcgagtcccttcatcggtgtcattggtgattttcccttctatttgtctgttccacttgatatgggcgcccttgggttgacaggaagagacctaaatttgaaatatacacccttaacatccagagatgggttatataccgatgatgaagcatattcggaacgttcaaaatatatactagaaatccttccacaagcaccagctaaaaaaatatttgaagcctttaagagaagaacagtctatgccaatatcatggatgatggtattgttcccttaagaaccgctgcccttttgtatttagactggcgaggtatacataaagttcaaaaaattaggaaagagaataaaaagtcttcaaagtccaagggatacgaatcctcggtgacaccagagagtaaagaagtatcgccattatctaacgaaaatggccataatgttggggagattcctgcagaaagtcctaataagaaggcaaccttacaatggaccctaccacaggctgtcatacatggaggcaggataaataaatatacaagaggtcaaactaatgaggctgtctcggattcggatagtgaacaaggagtaaccactaatgatcaaaaattcgagcctccaaaagaagctaataccttattatccgcgttatcggtactgacagcgtctataccagatcaagaatatattaaaaaccctgccgtaaggaaagatgaaattgttcatgacaaactttatcatccagaagaattgcctcccttacattacgagaataggcccatagttaaaaagcttatatatcctaatgagagtatcaataggattcaagagcgtattgccagggaatggcaggaaacgatgacttggaggaaggtcttggtgcagatcaaaccagattcacataataatattatagtgagaagacgatttgtcaatctgtatggttacgttgccgtcgaacacatggttgagcaccatttcggtaccaaagtttgtagcgagcttgttgatgatccaaacgaaccaaaagatgaaccagaccagcctcgacagtcggaccagtcaaatgggcgcaacaagcctagcaaatcggaaaagtattga

SEQ ID NO: 3870 - DNA, 336 bp, Saccharomyces pastorianus
atggatttccaaaccaacaagagactttgtgatgaaatcgccactatccaatccaagagattgagaaacaagattgctggttacactacccatttgatgaagagaatccaaaagggtccagttagaggtatctctttcaaattgcaagaagaagaaagagaaagaaaggatcaatacgtcccagaagtctctgctttggacttgtctcgttctaacggtgttttgaacgtcgacaaccaaacttctgacttggttaaatctttgggtttgaaattgccattatctgtcatcaatgtttccgctcaaagagacagacgttacaaaaagagaacttaa

SEQ ID NO: 3871 - DNA, 624 bp, Saccharomyces pastorianus
atggattacagaaaattgcaagccattgataaaaaaagaagcaaagaagctaaagaattgtacaaccgaatcaaaccatttgctcgcgttatggctgcacaggattttgaagaatttagcaaggatatactggaagagctacaatgcaggacaaggatacagcaattacaagaatggagaagcaatggtttaacgacgttagaagcaggccttaaatacgatcgagataagcaagcaagaattagcacgtacgagaaatttggctcttctacgatggcatcattaaatgagggcagtagtcgttacagatcaaattccgcgcatagatcgaatgcagaatattctcagaattatagcgaaaatggtggcaggaagaaaaacatgactataagtgatattcagcatgcatctgactatgcattgttgtccaatgacgagcagcaactgtgtatacagctcaaaattttaccaaagccataccttgtaatcaaagaagtcgtgttcagggagttactaaagactggcggcaacctaagcaaaagcgcatgtagggaactactgaatatagatgcaattaaagcaaatagaatatacgatttttttcaaagtcaaaactggatgtaa

SEQ ID NO: 3872 - DNA, 1203 bp, Saccharomyces pastorianus
  modified_base (1180)..(1181): a, c, g, t, unknown, or other
atgtctaacaaattccattgtgatgtttgttcagctgattgcacgaacagagtaagagtgtcatgtgctatctgcccggaatacgacttatgtgtaccctgctattcacaaggctcatatacaggaaaccatcgcccttaccacgattatagaataatagaaaccaattcatatcctattctttgtcctgagtggggtgcagatgaagaactgcaattgatcaagggagcgcagactttagggctcggtaactggcaagatatcgctgagcatataggtagcagggacaaggaagaagttaaagagcattacctgaagtattatctggaaagcagttactatcctatacctgatattactcaaaacatacacgtaccgcaagacgaatttttagaacaacgaagacatagaattgaatcattcagggaaagaccgttagaaccccctaggaagcctatggcatcagttccgagctgtcacgaagttcaaggtttcatgcctggtagattggagtttgaaacagagtttgagaacgaagcagagggaccagtcaaagatatggtttttgaacccgatgatcagcctttggatattgaactaaagtttgccatcttggacatatataattctagattgtcaacaagagcagaaaagaaaaggttattgtttgatagccatttgatggattacagaaaattgcaagccattgataaaaaaagaagcaaagaagctaaagaattgtacaaccgaatcaaaccatttgctcgcgttatggctgcacaggattttgaagaatttagcaaggatatactggaagagctacaatgcaggacaaggatacagcaattacaagaatggagaagcaatggtttaacgacgttagaagcaggccttaaatacgatcgagataagcaagcaagaattagcacgtacgagaaatttggctcttctacgatggcatcattaaatgagggcagtagtcgttacagatcaaattccgcgcatagatcgaatgcagaatattctcagaattatagcgaaaatggtggcaggaagaaaaacatgactataagtgatattcagcatgcatctgactatgcattgttgtccaatgacgagcagcaactgtgtatacagctcaaaattttaccaaagccataccttgtaatcaaagaagtcnngtgttcagggaaaagttactaa

SEQ ID NO: 3873 - DNA, 435 bp, Saccharomyces pastorianus
atgaatttggtttcccacctaaatttggcttttttatacagtttgttgaacactaacgttgacggtaacatcaagatcgtctacgccttgactaccatcaagggtgttggccgtcgttactccaacttggtctgtaagaaggccgatgttgatttacaaaagagagctggtgaattgacccaagaagaattggaaagaattgtccaaatcatgcaaaacccaactcactacaaaatcccagcttggttcttgaaccgtcaaaacgacattactgacggtaaggactaccacactttggctaacaacgtcgaatctaagttgagagacgatttggaaagattaaagaagatcagagctcaccgtggtatcagacacttctggggtttacgtgttagaggtcagcacaccaagaccactggtagaagaagaacttaa

SEQ ID NO: 3874 - DNA, 249 bp, Saccharomyces pastorianus
gcatgctgcaggtcgactctagaggatcccgctagatttttgtttgtcgctccaccatcgatcgacgatttgagaaagagactggagggcagaggtactgaaaccgaagaatccatctccaagagattaagcgccgctgaagctgaattagcatacgccaaaactggcgctcatgaaaaaatcatcgttaacgaggacttggacagggcctacaaggaattgaaggacttcatcttcgctgaaaactaa

SEQ ID NO: 3875 - DNA, 171 bp, Saccharomyces pastorianus
atgtcccgtcctattgttatttccggtccaagcggtacaggtaaatctaccttattgaagaaactatttgctgagtacccaaaatccttcggatttagtgtttcgtccactaccagagctccaagagccggtgaggtcaacggaaaagactacaactttgttggactctag

SEQ ID NO: 3876 - DNA, 225 bp, Saccharomyces pastorianus
atgatgcataaggcccatgaagagaacatttcttcagtaacagggcttatatcaacatcgggatcacctgttatgggatcatcgacatccggtagatcaggggaaggaagaagttcatcatcgtcatcagaatcaacggccctcttagcggtggtcagcagcaccttgaatgctatatttagcaacaccttagataacatatttccatataatatagtgtgctaa

SEQ ID NO: 3877 - DNA, 810 bp, Saccharomyces pastorianus
atgaatatcgaatgtgaaccgggctatgagcttagaagttctgttttagaaacgtacggtattgttcccttctcgaagtattgcgttaaggatgaaagtaaagaaaaggaagttgacgagttggtttggaaagtaagtgaatacctaagaaagaagaatggacaagtggactgtgggaaaggagagaacctatttgaaagtggtgaaacagagaataacctgtatgatatattttctaattcaagaccgtcatgggaaaatcagaaagaatttaatgaacactggaaaaatgtagttgatatactaaaaaacaacgaagaaattgtttggttgccgttggactttgaaatggacaaagaaggtcgtctgcaatcgaaggatgctacttatgtttttcgttcaacttccaaaaggcgcgtcaaactgcaatgccatttgggagcggatattcaggaggggctaaagaagtacggtggttctgtattgatcgccctgagtgttttttttttcatcaagaaagtgcaatcaacgcttaatgattatgtccagggagaacaggtgattgaaaaattggtaaaagaggccattgatcagttaaaaaatgtcaaaaacgacgaagaagaggaatcatttttaacaacagtccaactgagaactatactattgagcggtgtacccaaaatgaaagaacaaaatagcctatgggctcaaactaaagacaagattattaaagaacagtctgaaaatattgaattataccttctagaagaaaatggggaaatcatgacatgttgggaatggaaggattga

SEQ ID NO: 3878 - DNA, 735 bp, Saccharomyces pastorianus
atggagcacacaagccttgatccgaaaactttgaaagtaagccaactaagaagaatactggtggaaaatgacgttacattttcagcgaatgctaggaagcccgccttagtgaaactatttgaagaaaatgttagagagcgtttggaatcttcttctggaactccaaagggtaaagacagtgtcaggaaagctgtgaagtcagaaatgaagaatgcagatcgcaaaaagtccttgaagaataaaaagcaagaatcaagctctgatgcgagtaaaaatgttgaaaccaacaaaaggaagagggaggaaagcagtaaagatgattcaaacccaccacgggtgaaagaagagaaatcttctaaaaagaaaagaaagaagagggctaataaggtcactaaaccgttagagcctctttccaaacctaagctagaaagtgaagaacctttagtaactttatcctccgaaatggaagtccgggaggaacacaaaggaacccctctaggtgaaaatccagtagccgagaagtttgcaaggccagaattacctaatttgaaagtgtcgaacgaatttttagtgcaactaaacaaagagttggcaagtgcgaccaccgagagctatgaccactccataaaatcagctgatctgtcatctattagagcggaaagagaagaacattttaatatttcaactgaaacagagccaaaaagcgaaggtgatccgatatggcaataccgatag

SEQ ID NO: 3879 - DNA, 621 bp, Saccharomyces pastorianus
atgatatacaaactagatcatgggattgatgtggtgaagactgaagagaagctacgtacttacgaagagttgaacaagcagctgatcatgaataatttggagagaagcaaaaccgagatggaaagttttgagcaaagacaaaaatttgaaaaggaaatgaagttgaaaaaacgactgttggaaaggcaaatcgaggaggaggaaaggatgaacaaggagtgggccaagaaggaaattgtcaacaggctgagtacgtccacacaggacgttaacgaaacgatcgagggcgtcaagaatacggtcaagttgaaaaaatcttccgccagaaggaaactggaagaactgaacagggtgctcaagaacaacccgtacttcaattcaaacatgaacgtgcagaactcgagactcaaagacgccgtaccattcacgccgtttaacggtgatagagacatacacccaaggttcaacttgaaggggtcagtgtacaacgacccgttcatcaaggacctcgagcacaggaaggagtttgttgcgtccgggttcaacactaattacgcgtacgaaagggttttgacggaggcattcatgggtcttggatgtgttatatccgaagaactttaa

SEQ ID NO: 3880 - DNA, 387 bp, Saccharomyces pastorianus
atgcttatggatgagtatgaggaaaacaaggacatgtgtccgatctgtaaaacagatcgatacctgtcgccagatgtgaagtttctagtgaatcctgagtgctaccacaggatctgtgagtcatgcgtggaccgaatatttagtctgggtcctgcccagtgtccgtataaagggtgtgacaagatccttagaaagaataaattcaagactcagatattcgatgatgtggaggtcgagaaagaggtcgacatcaggaaaagagtgttcaatgtatttaacaaaaccatggacgattttaatggagaccttgctgaatttaaaaagtatttggaagaggtggaagacattatatacaaactagatcgacagctgatccgcctaagccat

SEQ ID NO: 3881 - DNA, 2625 bp, Saccharomyces pastorianus
atggtgctacgagatcatgattcagagttgcggaactcctacaagcacgtaaggctctttgttcggcccgaccaactggaaggtacagcggacgtgacggggaagctggacgaggacagggccaacaatgacgataagcgcagcttggcgtccatactggactccagctcttcgctgaaaaagaaggggaggagcaccggatacataccatgtgtgtccttcaacaccgtgcccaggtctaaggtttcttcacccctggatgaagacaagagagattttccaggcgtacaagtccctgcagactacacgatggaggaatactacgatgacgagagtggctacgcctccgataacaacactgactatttttccgggaagagctacactggcggctcttccagtcgggagagcagtagttccagccccggcaggtacagttcgccgccacctgcctccatgaagaacatcaaaataggcaagatgttcaagatttcagaaaacgggaggatcgtgagggaggactaccccaccaggcccacggatatcaacgatgcgctcgtgatcaatagagcgtatgcgaattggcgacaactctgggctaagaagaaagaacagatcgatcatcggatagagcaaaaaaacgaatttttcaattacccaacaatacttttcaccccaagcaagaaaaagccctcgaaaggtggtggtgctaatgcaatcaaattcaatcctcccctcgaggatgggtttacgcccttgaccaaatctcaaaagaggaaagagcgtgtgctgagcgaaaatgttgggttccccaatactcctcgaacaattctttgccttattagcggtaggaagcacacctgggtagccctggactgggcgctacggaccctggtccagaatacggaccacattgtggtgttggctaacctgcctcgcctaacaagacacgaccttgggaacggtgactcgatgagtgagcgcaagagaatgctgatgatgatggacgacagcagaagcattgagtctgccacgaggtctaggtccaggtcgagatccaggtccatgtgcacacgaagagcaatgtctctgggcccgcaggactccgataacaagttgaaacaccaaagttttatggaatggacctccggttatacagaaaatgaaatagaacataaacttcaggacttgtttgactacattacactcgtgattcctaaagaccgttccgtcaaagtcaccgtagaaattctgattgggaagaccaagaaaacgctgttggaggccattaacatctacctaccggacttcttcgtgtccagcactttgagatggcaaagaacggatagtcttgttcgttggaagtcaaaccttttgacggataagctgtgcaccaacttcccgattcccacttttattgttccggcgaagagaatggcagaactggaattggatttacaaaggcagtttgcagatccagaggtagtaaaaaataaggacaagaccatttcgaaacctagcttgcttcattccaagtcagcagatgcgagtatcccgactacttcaaattttaaacaggctacaagcaacgactattctatagactcggtgggtgataccgctgatagtagtggtgctgatagtaaccgaaaagggacctcaaatgatgagcctgatgtatccaataatgacgatgttttatccgtgaagtccctaacttctaatgtttcagtaaaggaaaaactacgtgccatggccagaaatcgtagggaaagtatgacgcagcgattgggtgacgctgaccatgattcttctatacctccgggacaaaggcacctgaaaaaattagacatcatcttggaatcttcgctcaagttttcgttagaagtcgaaactattactgatgacactggaagtgaagatgcagacgctaatgggccacaagccatcgactcagggtttgaagaattgaaaagggtcatcactggtggtgctccgcccaaacacgtcgccacccaaaagagatccatgcttgacgttttagacggtcccagtacgcctgggtccaaatccaaatcaagatcaaggtctaaatcgagaacaagagagaaatcgaaaccaaattcccccattgccacggatatataccccgatacaaacgcttctagatctcgttcctcgcaaatcaagttcgcatccactgtaaaagacgcggatggccacgctgcgttaggaagtttcaagtctaagctctcaccggataacacaggcgactcgcaacatcatcatcatcaccatcgcgacgcggatcaagtggtcatgccggcgttcccagaattggccccttcgaagtcgtacagtgtaagttcaagtaacaaggaaccgtctttgaggaaagtgagtagtggatctacgctaagaaaagtaaaatccaatgattcaagctccgctaaacaacggaggaagacgcctgtgaattcaacttacttgagccctaattctggcggtggtggcttattctcgtttttcaaaggtaaatcgagatcatcttcgcctttgagaagtcagagtgagggcaaagaggcatccaagcgtagcggattatttggatttagaaaactatga

SEQ ID NO: 3882 - DNA, 1029 bp, Saccharomyces pastorianus
atggccgaaagccgcggacggaatctctacggatgcaggccggggccctatacgtggcacataaagggaaggctagaagctatgacccattgcacaagcgagaatgcatcgctggattggggcctgagtcggccgtattgtgatgctgctgcttttcttgccctgccctgccttgccctgccctgtcttgccctgtacgtcttctcagcgcccggaatgctctgttcgtttataattactcgcgcttacgacaaagtgcacacctttatttgcagggactatataaaggtggaggtttatatcggcgaggcaggccgtgttcggatctcgagcatcacacaagcgcacgcaagcatgtgggattccttaatcgtgagcatcaacgagacgcacaaactgggcctgcaggactgcctggccgtttttggccacgtcccgatcaccaaggccgtcaagcacgtgaaactgatggatatcgacacgcagacgtccacgttcacgctgaggtttcttcacacggagaccggccagcacatcgagaagatcgtgtacttcatcgacaacgactcgggcaacgacacccgcaccgctgccgggatcaagcagattttcgacagaatgttccgcatcgctgcagagaagagacacctttccccagtccaggtggccaccgtcgagtacccctgcaccctggtcgactggcttatcctcgtgggcgtcacgctaccagcgctgtgctacctgcatcgcccggcactacactgcatcttcagcctggtcccgaacccggtgggcgctaccttggagacgtggctggacagcgaccgcgtgctgctactgatcatccttgctgagttcgtaacccatgccctggagacggtcttcttcatcgttcccagactcaagtactaccgtgtgcccggtgagttcgtacccgagtggctccttctgggccttctggagggctacggccccgccaggcgcctcgacgcacaggctcgcgctcttggcgaagggtctgttgcctag

SEQ ID NO: 3883 - DNA, 1416 bp, Saccharomyces pastorianus
atgatgacggataccctggtagagaagataatcaagatggcattgccgccttcttccaagacggcggttgacaccattcaaaatcgtatggttgctggtaaagagaggcccaagctgtctgtacaaatcatgagtagaaatttcattcagatgaattcaagattaggggtaccttttatgattatggatgaaatcataaagattttgaactggactaacccagcgtacacgatatccataatgtgcttgtacacctttattatcctgagacccttccaaatgctctcgtgcattccaattttctatttattatttggtgtgatggtcccgcaatacctttatattcataaaccaaacccaacaccgtatttggataataaccccacacccgcacagggtcctcccttgcggaagcccgaagttcccaaaccagttcctgaactgagccaagagtttgttttgaatctaacagacttacaaaaccacatgctattatatgtgaaattttacgactttacgctgttcttcttgcaaaagtttgcattctttaccaatgaggcaatctcgtcgttctattttgtcgtgctgctaataattgctacggtaaattttctttacatggacaagttaatcatgcttgttccgattagacctgttttaatactctttggttggtgtttttttattgcctcaaatccatccaatcgagagtatctactaactaaattaaactcagaggatacacgattgaaaaccttgactttgacgtcaaatgtagaatctaaaattctggaacatttgaagctcattgagggtagggagcaccgattggtaattgtttttgagatccagaaatatctgcctgcctataaagagtggcgcccggttggattttctgatgacgactatgctcttttctctgatctaagaatttaccaaaagcctattgaagagaactcagtgaagtctcaagatcatataaagccaccaaaagattgggagtgggactcgaattctcactgggtgcttgatttggaccctaaggagtgggtggaagacgaattcattcagtatgtagagatagactcagagacaaaatgggtatatgacctgaatcttgatggacagagaggttcatatagaaggagaatgtggacaaatagttgcgttagacaaaaattggattctaatatctcagcgagtctcggcgaagaggagatcgtcaaccccttaagagaagaaacatacaggcaaggcgttcatggcgtaaccaaaggctcaatgagcggcggtttaactcatgcaagcgatgatgatgatacagatgggaccattcctgacctgggtcgtgctgacgctgacgcgtcttatccatcaattgaagaactcacagatacccttaattccaccatatag

SEQ ID NO: 3884 - DNA, 708 bp, Saccharomyces pastorianus
atgcctttcaagcagtggaaccattccctgaagaggaaaatggttcctccagcgctaaacctttccagcataccatcatcctcacaaatgcaggcatccaaaagtgctccaccaaacgtaacaagatttccgcaccagcaaatcaaccctagagttagatatatgggtagaatagctgctgcaatccaggagtgtccatctccaataatagcgaatccgtacgtggtggctccgcatccatatgctgggctgtcatcggtaccttactatccatatattccaaccccaacgcatacccacccatacccatgcgaaggttactatccttcactctaccctacccccatgcatgataataccatgacatcctccaacaaccaaggaaagaggagaaaacacacaaggaggtcatcgaatttaaatgatttgacttcgaggaaaaagaacttcatttctaagcaacgtaccggggataacgtcaatagtgaaggtgatagagagacagaaagccccgttgcgaaacaggtactgggcgaagacgtggcacttaacgacgatatgcaccattgtaacgctaatgagagggtcattgcgggagaaatcaatctgcatgacgatgtctttaaattcgaagttcataatgataaagacgaatacatgaagacatgtgaaagaatctggaatgaatggcaaaacttgaaaaagtga

SEQ ID NO: 3885 - DNA, 207 bp, Saccharomyces pastorianus
atgaacaagcaggtagaagggggcccgcagcgagagcaaaggacaactattcaggcgccaagtgagagctctgagccaaatccctgcaaggtaaagcaactaggaatgatgctggtatctccagggctggacgaagatagattgagcgagagaatgatcttgaagatcagaaatcaaaggatatcgaaaaagaccaaaaactactga

SEQ ID NO: 3886 - DNA, 2433 bp, Saccharomyces pastorianus
atgagctttgaagacagtgatgatgatgacgacttagggtctggaaccgagtttattatgcaatcaagatcgagaaggtctaatgctggtaataaattgcaaaagttactacagcaggaattaaaagatatagaatcaaccaaaagacagctctcgtcgtacaacaacggcgaagatgatgatgaggacgaaatcggattattatttcaggaagatgaagacgatcaagattttgaaattgtagagaaagacgacaacgaagagggagaagaagaggaggaggatgaggatgaggcggaaagcataacgaagggacccaccaagacttcaagtgatcaagccgccgatgatttaatgttcagtagtagtgaatcagagggttctaataatgacgaggatgatgatgacgcggaggaaagagaaatacgaaaacaagagctactgtcaagaaagaaaagaaacaagaaactacaaaagggacccgtaatagtcaaaaagcagaaatccaaagttgaacctgcacgagaacaagctacaaaaggacaaacaccacgaagatcacaccataaccatgaacaattgaatgctgaaaccttattgtcaaacacaagaagaacttctaagagatcttctgtcatggaaaatacaatgaaagtttatgagaaattgtctaaagctgaaaaaaagaggaaagtcatacaagaaagaattagaaaacacaaagaacaagaagccaagtatattttaactcaggcggaaaggctaagaattgctaaagaaactgaaaagctaaatattctgtcgttagacaagttcaaagaacaggaaatctggaaaaaagaaaatcgactagctttacaaaaaagacaaaaactaaaatttcaaccaaatgaaaccatacttcagttcttatccactgcgtggttaatgacgccactgatggaattagacgatcgcaaatattggcaagaacaattgagtaagcgtgacaaaaagaagaagaaatatccaagaaaacccaagaaaaccctcggctccaaccagccagatgcaccagatgctaagaaaggggtaagtgaagtatcggtaaaggaggaagacaataccaaccgtgctgtagagaaatcttcgaatgacaaacaaacaacgaccacgggaggcgaaatcccttctactaacgaaaaggttgttgaagaaacgctaacagaggcacccataccaacagcgccatctgaagaaccaacaacaagctcaacaccagaaataacactagatgcaaccacaggcaagcaagccacaaatgatgtgaccactaacaacctgccagaagaagacatagtggacactgtggatataatcacaagcgccaacgacacacagactaaagatacaacgatggacgacttaacgaataccttaagaaataaagagacgggtcctacagattcatcccgtgatgacaaaacagcatttcaaaacgaaaatgaattgcttacatctccacaacggcacggtactcccactgaagacgctgagttgacctctaaggattttaacgctgaaaatgagattttgctcagtgtcaaacacgaaaataccaagaattcgtctgttagcccctcacatgatagtgattctggaagcaacactttaaagcaagttacattcacggattctccccaggtggccatcattgacactgaggagtcaccttcaaaaacaaataccactaacatggatagctcgtccaccgaaaatcccttaccaacgccagtatacgaaggtccagaacagttgacttccagaaattttgtcacaatttatgatttccccaatacgccaccgaacttgaaggattttgatacaaacttatttggttctcagtggtctcatatgaacgccacatccacaacgcagagatcacaggatatacagaccatttttcactctattttaccctcaccatctcagttatcagtaccgtcctcctctaatgtgggcatatcgcatgatttatcagcgctagccaattttccatcttttggtgaatacgataaaaaaatcattcatgaaataaacacagagacaaataaggatttggagattaagatcaaaacgcagcctccaactggtgtcttcttggccaatggtataagaaaaaaatgtctgatcacaaataaagaatgtcagtacttcgatccaagaactggtgtgccatattctgatgtggaagcttataagattattcaacaaattcaggatcccatccctaaggaagaggaaacaacagataccaaacgcgatgaaaccataaacgatgatactgccgaagctgctgatcatgcaagatttaaatggtttggattcaagaatggtggtatttatcttgatttaaatcaaaggcccgccaagggtgttcctaaggggttttga

SEQ ID NO: 3887 - DNA, 687 bp, Saccharomyces pastorianus
atgaacagaatattcggatacgggaacaaaaagagccatgaccagctcttgcaagagtccaaccaatccatgaatcaggctcagcaatcgttatcgaacaggatatctcagttagatactcaaattgcccagctgaacttccaactgcaaaatatccagaaaagtctacagagatcaaataacaagcaaccttcgttgcggaaacaggctctgaagatcctgaacaaacgtaaacagttggaaaatatgaaagattcactggattcgcaatcttggtccatgacgcaggcccagatgaccaatgataacttgcaaaacaccatgatcacgataaacgctctcaagcaaaccaacaacgccatgaaggctcaatacggcaagatagacatagacaagttacaagacatgcaagatgaaatgctggacctaatagaacaaggcgatgaactgcaagaagtcctggcaatgaacaacaacggcgagctcgatgacatcagcgatgcagaactggatgcagagctggatgctctggctcaagaagacttcactttgcaaaccaccgaaagttcattgggtaatgatatgcctaactacttgctaggcgctaacgcaccaccaaatttcatcgatgaagagccaaacatggatgctgaaaataaagataaagctttagaaagcgcccagtaa

SEQ ID NO: 3888 - DNA, 123 bp, Saccharomyces pastorianus
atgaacagaatattcggatacgggaaccaaaagagccatgaccagctcttgcaagagtccaatcaatccatgaatcaggctcagcaatcgttatcgaacaggatatctcagttagatactcaa

SEQ ID NO: 3889 - DNA, 567 bp, Saccharomyces pastorianus
atggacgatgccagtcgtgagaacgaaggtgatctgatttgcgctgctgaaaacgtcagcaccgagcaaatggccttccttgtacgtcactcttcgggctatgtgtgtgctcccatgaccaatgtcattgctgataaattggaccttccattactaagaacgggcatgaagttcgagtccaacgacgacgacaggcacgggaccgcgtacacgataaccgtagatgtcgcccaggacaccactacaggtatctctgctcacgacagatcgacgacgtgcagggccctggccaaccctggctccacgcccaagtcattcttgaagccgggccacatctgccccttgagagccgctgacggtggtgtcctacagagaagaggccacactgaggccggtgtggacttgtgtaaactaagcgggctaagtccagtcgccgtcatcggagaactggtcaacgacgacgaccagggcaccatgatgagactaaacgattgtcaagaattcggcaagaaacacggcattcctttgatttctatcgaagagctggcccaatatctgaagaagtaa

SEQ ID NO: 3890 - DNA, 93 bp, Saccharomyces pastorianus
atgatgagactaaacgattgtcaagaattcggcaagaaacacggcattcctttgatttctatcgaagagctggcccaatatctgaagaagtaa

SEQ ID NO: 3891 - DNA, 1092 bp, Saccharomyces pastorianus
atgcaatgggccatggtaagcgagagcgtgcaactcgacagcggctgcgagcgcgtcgcacaggaatacgacccggccaaggggatcctggtcgttgcgtacgtgcggttaccgcccgcagcgcggcggtacgccagcgacgagacggtgtggtctgtggtgaacgtcgtgaagtgcgacagcgccaacggccgcaacggccagttggtggaccttgtggagtttcgcggcacacgggtgatgagcgctacgattctgcgccgcgagcaccacgagagccaggtggtatccattctgctgactacctttacgggcaagactacgctgtacgagctcagactgaagcagaagtacgaggctcccgccgcgtacgtcgtgcagcggaacatgatcagcagacactacttccagcatccagtggtggccgtgctcgagacgagcagcgtacggggccaagagagagtgttggtggcggcggacgacggcaccgttgcggagctgagctgtctggacctgtccgtgctgcgggcgccccggcggctccggcctgtgcctctgtcgcggctgctggcgctggatgacgagagtagtgcgtatttgcagcggctgaagcggctggcaaagttcgacgaggtgggcgtggccagtgtggcgtacacgcgcgaggacccacagcacgtgtgggtgggcgcggaggatggcggcatctacaaggtcgtgtgggaccagccgggaccgctgtgcctggcgctggacaacaacgggttccaacccgcggattgccactctgcaagggtcactgggatggcgttctgccaggacgatgctcggcggctaatgctgttgctgtcatgttcaacggactggaccgtgcggctgtgggacgtgcgggccggggaagcagctgcgggcgcgccgctgcagttgggcgcgcccgtacttcgtgtgcgctggcttggcgttggcggcattgtcgacggtggtggtcgctcgctacgattcacggtgtggtgtgcggacgggcgtcacgtggtcgcggagtgggcgtttgattcggagtcctccctttacacggcggtggttatctcctaa

SEQ ID NO: 3892 - DNA, 192 bp, Saccharomyces pastorianus
atggagcgactgaaggaactagaggagaaaagaaggcaattgaaggaattgcgtgaaaggcggaaacatgccagcgtgctgagcagcgagacggtgttggcggcgagcggccggcggccagcaacgccaacgccaacgccaacgccaaccatggtgagcgtttctgtgcagactgacatggaagaggctgga

SEQ ID NO: 3893 - DNA, 444 bp, Saccharomyces pastorianus
ccctccgtagatcgtatcggtggcgtcaaggtgagctggttgactggtagaagatcatgtcgatgctacgtggtgcttcttccgtcggtggtggtgccttctccggtaaggattactccaagggtcgatcgttctgctgcttatgccgctagatgggttgctaaatctttagttgccgctggtttgtgtaagagagttcaagttcaattttcttatgctatcggtatcgctgaaccattgtccttgcatgtggacacctatggtacagctactaaatctgatgatgaaatcattgctatcattaagaagaatttcgacttgagaccaggtgtcttagtgaaagaattggatttggctagaccaatttacttgccaactgcttcttatggtcatttcaccaaccaagaatattcctgggaaaagccaaagaaattggacatttaa

SEQ ID NO: 3894 - DNA, 993 bp, Saccharomyces pastorianus
atgtctaaaagcaaaacctttttatttacttctgagtccgtcggtgaaggtcacccagacaagatttgtgaccaagtctccgatgctgtcttggatgcttgtttggaacaagatccatactctaaggtcgcttgtgaaactgctgccaagactggtatgattatggtttttggtgaaattaccactaaggctaagttggattaccaacaaattgtcagagacaccatcaagaagattggttacgatgattctgccaagggtttcgattacaagacttgtaatgttttggttgctattgaacagcaatctccagatattgctcaaggtttacattatgaacagaacttggaggatttaggtgccggtgaccaaggtatcatgtttggttacgctactgatgaaactccagaaggtttaccattgaccattctattggcccacaaattgaatatggctatggctgacgctagaagagacggttccattccatggttgagaccagacacaaagacccaggtcacagttgaatacgaagacgacaatggtagatgggttccaaagagaatagataccgttgttatctctgctcaacatgctgatgaaatttccaccgctgatttgagaactcaactacaaacagacatcgtcgaaaaggtcattcctaaagacatgttagacgaaaacacgaagtacttcatccaaccctccggtagattcgttatcggtggccctcaaggtgatgctggtttgactggtagaaagatcattgtcgatgcctacggtggtgcttcttccgtcggtggtggtgccttctccggtaaggattactccaaggtcgatcgttctgctgcttatgccgctagatgggttgctaaatctttagttgccgctggtttgtgtaagagagttcaagttcaattttcttatgctatcggtatcgctgaaccttgtccttgcatgtggaccctatggtacagtataaatctgatatga

SEQ ID NO: 3895 - DNA, 486 bp, Saccharomyces pastorianus
atgcacactagtctattgtgcttgatgttgataataagcatcaatgctgccgtaacgggtgccttaaaattgattatagggaatctgaggcccgattttgttgatagatgtatgcctgaccttcaaaaaataagcgattcagactcttctgtttttgggttggatatttgcaaacaaacaaacaaatgggttctctacgaagggttgaaaagcacgccgagtggacattcaagttttatagtatctaccatgggctttacgtatctttggcaaaaggcgtttaccacccgcaccacaagaagttacatttggtgcccactactggcgctagtagttatggtctcaagagttgttgaccacagacatcactggtacgatgttgtgtctggcgctgtactagcatttatagtaatttatggttgctggaaatggacattcgtcaatgcggcgaaaagagacattcttccttcaccagtgagtttgtag

SEQ ID NO: 3896 - DNA, 342 bp, Saccharomyces pastorianus
atggtcaggatggatgagaaacataaggaatacttcaggctgtactactttcagtatatgataacgggcctctgtacgatattattcctctattcagagatatctttggttcctagaggccaaaatatccaattcagtcttgatgaccccactatctcaaagcgctatgtgactaacgaactagtgggcccattgggctgcttgattttgagtgtcgggcttagtaatttagttgttttttggagctgtatgttcgacaaggatcaattaaaaaagaataagtacgtggctcagggagaggccagacggcatctcaaaggatttccacttcatgcacactag

SEQ ID NO: 3897 - DNA, 1830 bp, Saccharomyces pastorianus
atgaagaacaatcatccaaatatgtttcgattattgatattagtattggcactggcaagatttataaaggccactgaaggaggtagaacacatgttatagaatttaacgtggctagcaagtatacacctgataaaagaagaatcatctctataaacggccacaatggtacatttggaccggaaattcgggttaaagctggagatacgcttaatctgaaattggtcaattggatatgttcagaacaagaagctggccaagaggatgctatctggagacattactgttctaccgctttacatttccacggggttgtacccctgcggaacgaatatgatgggattcctgacttaacacagcctaccattggctacggggagagttactggtataactttaccatcgataaatcaacttgtggtactttttggtaccattcacattcatcggtgcaatacggcgatggattgaggggcgcgatgataattgaatgcgacgaatatgatagccatgtagtgaaggctgtaagttctgtaaataaagctgggccattacctaatggtatgctcgagatgaacaggcagataaaccgtaaagaatttgcaaaacatgaagtgcaagaagaaattataactatgagtgattggtacacggattggaatctgaacattttaaaaaatagagttatgtcgcttagtggaggcacggatcccaaactcagtggctcgctaataaatgggaaatcttctaacaatgaagccatcaaattgggggtagatgccaagtatttgttattgaggatcataaactctggaatgtccggtactcaagttttccatcttgatgaacaccaattgataatattagaaactgacggtattctgattaatccgtttgttgtagaaacgttgactttggcggttggacaaagatatacaattttagtgagactaaaggaagacttgaatcccattcgtatggttaacggttgtaataagatgatgggctatgtaaccaaacagtggtggttttacagggatagcgctcatctggatccgtcacagagctccggtgacgtttccatcaagaatttgcccggttttaccaaaacagaattatatcgcgatttggaaccaacagaacaagagagtaaaaagttgggtttcgagtctgaatctagtgggttttttgattttgactatgaatattacaaagacgaagagacgaaacaaaagtatggaactggtatgtacaaagtaaacggtcgaacctttaatgaatatattgaagagccggtaaacttacccgaaatcaacgagacatatgacgtgataatcaattctattgaccatatgagacatccatggcatatgcatggtcatcatttccaagtaatttctctcggatctgggggtgaggggccgcttcacaaacaagtgcaagaaggtaaggcatgggaccagtaccagaacgacttgcgtcattgggcccaaacaggaaaggcaccgatggtaagagatagcatcaacatcgccggaaactcttacgcggtgttaagaattaagacagaactgccaggtaaatggcttttacattgtcacgtagactggcatatgatgaagggtctcggcattgtctttgaagtgccagaattgacgggtgatggtgccaaactcgcaaccacacttccattgtcattcccaaccaaggaaccgagcccctctgctgttgttcaacacatgccagatcacccaaacaagaccaaggtaattgccgtttatatcctaattatgtgtgcagttgatggcgccttttactggctgctcatgtaa

SEQ ID NO: 3898 - DNA, 570 bp, Saccharomyces pastorianus
atgcgatatctcgggccccttcgcaaaaggggcccgccgcactttcttcatggatctttcgtatataaaggtccagagcgccaagtaaagctgctctccctccatcggctcacaaattccaactaccatcctgtattaatggaaactaatttttctttcgactcaaatttaatcgttattgtcattatcacgttgtttgccaccagaattatcgctaaaagatttttatctaccccaaaaatggtatctcaagaaacaattgcacacgtaaaggacttgattggccaaaaggaggtcttcgttgcggcgaagacatactgtccttactgtaaagccacattgtccaccttgttccaggaattgaacgttcctaaatccaaagccgttgttttggagttggacgaaatgagcaatggttcagaaatccaggatgctctcgaagaaatttccggccaaagaactgtaccaaacgtttacatcaatggtaagcacatcggtggaaacagcgatttggaagctttgaagaaaaacggtaaattggctgaattattgaaaccggttttcgaataa

SEQ ID NO: 3899 - DNA, 1269 bp, Saccharomyces pastorianus
atgggcttgtgcagcaagagcaagcgcaagtgcaagggtaagagcaagtgtaagtgtaagtgcaaccgcctcagcgagagaaaagatacagcgagcgccgttatgtttaggatagccaaaaatttggtcagaacctttgagcagagcgtgcaggataccctggcgttctcgcaggattcgggcagcctggatgcgttcttccagtccatacctccaaacctgctgtctgcgcagctggcgccgcccgcagaggccatggcagagggtggtaagcacaccaacatgaatgagacccttgccgggttgcgcatcgtctgggtggacgaggtgcagtgccaagtgcagtcctttttcgactatatagtgggcttcaatgatgatccggtgcccgtggtcagtaaccagcacgggttttcctatccggattaccagcagatcacgtccatgttcaacgggcactgcggccggaccgtgaaggttaacgtgtggtctgcgaaggggggcacgttcagagacgagtatctcagcgtggcgtccaaggacagcgatcatttggacgacgtgtctttgaaccacgacgaaaggaagtcttccagcggagaggcgcatcagttccaagcgctcgggttcaaagtccaatggactcctctgatagcgtccactttcacctaccacatcttgaacgtaaacattcctgagggacccgcccagttagcagggctcgtcccggacgaagactacatcatcggctgtcaggacggcctgttggccacggggggtgagacgctcttgcaagatattgtcaggtctagagcgaaccacgacctggtcctgtacgtttacaacaaggtctccgactgtgtgaggcccgtctccgtgcacataggccccgacggaaggctgggttgcaatgttggttacgggttcctccacaggatccccaccgtcaagcaacaacaacaacaacaacaacaacaacaacaacaacaacagcaacacccacagcaagtacagccaatacagccagtgcagcagcagcagcaggacggcgatgcggtcccttttccaacagaatcagaatccgctttcgtcccatctgcattcaccgccccaccggttgtcaagaagaaagcaaagaataagaaggctactcagccattggtcatggacgactacttcaatgaaggtagagacaagtcatctgctccaaaaccaacagagtctgagttgcccgctccaccgccgcaaagacaaccctcatctgattaa

SEQ ID NO: 3900 - DNA, 1410 bp, Saccharomyces pastorianus
atgttgaattgtttaaatacaatcttaggatttttaatcttagttttgcagttgattaacccttcaacagcaaaaaactttaataatgacctgaatattttagatcacaacattgtattggtaaatacaaatgcaaccgttcctaaaaaggaaaaaactaactttgaaacgattaacccaacaaaggatacaaaaatagatgatgcttgtaagaagagcttctattatatcgaaaatgctgccaatctaattgacttgcaagctaaatgttggaaggtcatgggaaacatcgagatttcaagcaactttagtggttcaatggttgatttaggtctaataaaagagatcgaaggtgatctgatcgttaagaataataaacatgtttttaggattcaaggttacaacttagaatctttaagaaaactagagctagaaagtttaaccgcttttgtgtccttggacctacccgttttgaaagaagtcagtactattgactggaaagttttgccaattttaagtagtgttgtcatcaacggaaatatcaaaaaggtaaaaagcatagtaatatctgacacagcactgacgtctattgattacttcaataatgtcaacgaagtagatattttcaatattaacaacaacagattcttagaatctttgtttaccaaactagaaagtgttactaaacaactaactgttcactctaatgctagagagctggaacttgatttgagtagtttacacacagttgaaaacatgacagttaaagacgtctcaaagattaatgtcgctaagcttgcatcagtcaacagttccctggagttcatcgagaatcaattttcaagcttggaactcccacttttgaccaaggttcaaggaactttgggtctaatagataataaaaacttgaaaaaggtaaacttctcaaatgtcaccgacattcaaggggggctgatgattgccaataacaccgagttgattaaaattgatttcttccccaagcttagacagattggtggcgctatctattttgaaggtagctttcaaaaaatagatttcccagaattaaagttggtgaaaggcagcgcctacattaagagttcatctgatgaattaaattgtgaagaatttactactccaaaacatggccgttcaatcataagaggtggtaaaattgaatgcacttctggtatgaaaagaaaaatgttaagcgttgacgaagatgggaacgtgttaggcaaacaggaatcgagcagtgaaccaggaaaaaaggaaaagggaaaaaacaacactaagagccaaggcggttcaaaaaagatggagaatagtgctccaaaagatatctttgttgatatattcaagacctcggtttacactgtattaacaatattatttgcaattgttttctga

SEQ ID NO: 3901 - DNA, 1455 bp, Saccharomyces pastorianus
atgtcaattaaagcaagaacccctccatcaaaactgtactccattcaatcatgtattggtagaggtaacttcggtgatgtttataaagcaatggatagaaccactcaggaaattgtggcaatcaaagtagttaacctagagcattctgatgaagacatcgaactgttggcacaagaaatatttttccttgcggagttaaaatctccacttattaccaactatattactacaatgttggaggatgtctctatgtggattgttatggaatattgtggtggtggatcatgttcagatttgttgaagcgaaattatgtcaatgggttaccagaagaaaaagtttcgttcattattcatcaagtcactttgggtttgaaatatctacatgaacaaaggaaaattcatcgcgatattaaagcggctaatatcttactaaacgaagaaggcatggttaagttgggagattttggagtaagtggccacatccgttccaccatgaaaagggatacctttgttggaacaccttactggatggctccagaagttgtttgttgcgaagttgatgggtataatgaaaaggctgacatatggtccctaggaattaccacctatgaactacttaaaggcttgccgccattatctaaatacgatccgatgaaagttatgactaacctaccaaagaggaaacctccaaaacttcaaggttctttctcggatgcagcaaaggagtttgttgctggatgtcttgttaaagctcccgctgataggccatctgcatatgacttgttatcgtttgaatttattagaaacgttaccataacgaatttgaaaagtgatgttgaattgattaaacaaaagaaggttcaagagagatatacaaaaattccgaaataccctcttcagaatcgtctatataaaaatagtaacaccttgagggggaaagacttttggaattttgaatccaccaggataactgccatacaaacttctaagagtgaactatcccccattacacaggattctccagtttcatccctgaatatggagagcccttacttacatgggcaaactgtgacacccatcacaaacccaaactcttcgtcatttagaaaatgcaataaacctgtctttgagctggattcaggaatggatatagattcaggttgtccacatttacaaacagaaatcgaaatgataacgccttctaatcataacaaaaagcataagaaaaacgatattcaagcgttaaagatagaaaagtttgattatttggagaatattgtgtctcatattctcaatagaatgtacgatcgtgcgcgtgatgatgaaacaagaaaatacgtagacgaaatgctaaagcaattcatcaaaacagaagcaaacgttcccggttttaatgaggtgtttattgaagaaatatcgctcaggattgaagcaataaggaaaggtttcgtttaa

SEQ ID NO: 3902 - DNA, 129 bp, Saccharomyces pastorianus
atggttttagtcaaggacaaagagacactagaaaaactcaccgaagagccttccctggccgacagatcattattcgaatgtgactttcccagtacggccggccagaaaccgactgaatacgactactag

SEQ ID NO: 3903 - DNA, 618 bp, Saccharomyces pastorianus
atgaaatcttccccttccttagcttctaagccgagggctagaaagggtgatgataagagaatcgataacccttttgccaatccagataaagaactagttgtgataaacgatgtaaatgatgacggagagtataagctacttttgaataagttctcggtagtccctggacatattcttctagtgacaaatgggtttaaagatcggctttcagctttgacaccggttgatttaatgactgcttacaaagtactctgttcgctcgatagcgatgaagatagcgacacttctgagaacagacatttggctttttataactgtgggcctcatagcggtttctcccaaaatcacaaacatatacaaattatgcaagtgcccaagaggtttatcccttttcagggcaccttgtgtaatggcaaggaccattttttgcccacttttaactcagagccgctacaagacgatatagttttctttgcgcattttgttttgccaattccagaatcatctaatatggtcgacgaggatcttttagccatgtgttatatctctttggtgcaaagagcacttacgtttttccaagattggaaggatgaagctccgggtctgagtaagtcgtaa

SEQ ID NO: 3904 - DNA, 129 bp, Saccharomyces pastorianus
atggagggtgaggacttaaagcagaaagctcacgacacgtttgctgcagccgaaaagaacagacactggaaactaactaatacagaaccaaagaatttaatggatccgctaaaggcaattcaatactaa

SEQ ID NO: 3905 - DNA, 144 bp, Saccharomyces pastorianus
atgaacactttgagctacgctattaatttctggtcccaaggatcaaaacaggcgttcttcctcaaacacgaaggctacctgggtgctatgggtgctttcttaagcacatcttgtcatccagccactgatacgactgatacgtaa

SEQ ID NO: 3906 - DNA, 954 bp, Saccharomyces pastorianus
atgccgcggattactcaagagatatcgtacaactgtgactatgccgacaacactttcaaacttgccatcgatataggtggtactttagccaaagtggtcttctctcctataggcagtaacaggttgatgttttacaccattgaaaccgagaagattgacaagtttatggagcttttacattttataatcaagaaatacaacaatgggagccactcaatgactcatataattgccactggtgggggcgcctttaagttttacgatttgttaaataaaaactttcctcagatcaaaggcatatcaagatttgaagagatggaaggcttgattcagggtttggatttctttattcatgaaatccccgacgaagtttttacctataacgatcaagatggcgaaataataatacccaccagtaccggttccacgaactcaaagcccatatatccctatcttttagtcaatattggttccggggtttctatattaaaggttacccatccaaacaacttcagtagaataggtggctcttccttgggagggggaactctctggggtcttttatcattaatcaccggtgctcaaagttatgacgaaatgcttaattgggctcaagaaggtgataattctagcattgatatgttagtaggagatatttatggaactggctatagtaagattggcttaaagtcctctgctattgcaagttcctttggtaaagttttccagaatagaattgcttccaacaaatctttgcctaataacgataacgagtcgtgttgctcacatgagtcgatcgagaagaataacgggcaaatgcttaaaaaccccgacatatgtaaaagccttctatttgcaatttcaaacaacattggacaaatagcctatttgcaagctaaagttcacaatgtacaaaatatatacttcggtggatcttatgctagaggtcattga

SEQ ID NO: 3907 - DNA, 330 bp, Saccharomyces pastorianus
atgttctaccttcaatttacgagcaattgcgtaaacctgatagtaagtacaagttattggccgtttgtgttgctggttggttcccgttatctgaccggtaaggacatgaatggtaagccattcgaaattgaggaccccatggcaccaatcctacaaaaagccgccgttaaaggtggttccgatcctcacgaattgttaagtatcgattgcctctttggtcctgagctacgtgataacaaggagtttgttgctcaattaacacactcacttaaggccgtttacaataagggaccaattgccgccgtgaaagaagttcttgaccaagtgtaa

SEQ ID NO: 3908 - DNA, 1278 bp, Saccharomyces pastorianus
atgactaaaacaggagaaacaacagctaccagcttgaatgctaaaaccctcaagagtttccaatcgactctaccggtaccaacttaccccagagaaggtgtcaaacaaggtatcgtccatctaggtgttggtgcattccaccgttcccatttggctgtctttatgcagcgtctaatgcaggaacacaacgtcaaggactggtccatctgtggggttggtttaatgaaagcggacgctcttatgcgtgatgccatggacgcccaagactgcctttacacgcttgtggagcgcggtatcaaggacaccaacgcctacattgttggttccattacggcctacatgtacgcaccagatgaaccaaaggctgtcattgcaaaaatggcccatcctgacacacacatcgtgtctcttaccgtcacagagaacggttactatcacaatgaggccacacactcgttgatggccgatgatgccgcaattatcaacgatttgaatcacccagaaagaccggacactatttacggatatctgtatgaagctttgttgctacgttacaaggcaggtggtcatcctttcactatcatgtcgtgtgataacatgccacagaacggtatcacactcaaggccatgcttgttgagtttgccaaattgaaggatccaaaatttgccgcttggatcgctgacaaggtgactgctcctaacagtatggttgaccgtgtgacaccacgttgcactgacgtcgagcgtaaatttgttgccgacacatatggaattcaagataaatgtcctgtcgtagccgagcctttcatccagtgggtgcttgaagacaacttctctgacggccgtcctccttgggaactcgttggtgtgcaggttgtcaaagacgtggagtcttatgaattgatgaagctacgtttacttaacggtggtcactcggccatgggatatctgggatacctagctggctacacctatatccatgaggttgtgaacgaccctactatcaataagtatatccgtgtcctaatgcacgaggaagtgattccattgttgcctaaagtaccaggtgtcgattttgaagaatacactgcttcagtgttggaaagattttccaatccagccattcaggatactgtctcccgtatttgtttgatgggttcgggtaaaatgcccaagtatgttctaccttcaatttacgagcaattgcgtaaacctgatagtaagtacaagttattggccgtttgtgttgctggttggttcccgttatctgaccggtaa

SEQ ID NO: 3909 - DNA, 1722 bp, Saccharomyces pastorianus
atgtctagcacacaatcatctgttgaaaacagttccgatattcggaatattcccgctgttgacgttcatgtcgcaacgcctgtagaaaaagaatggtctgatgactttgataatgatgaagtccttcacggagggcaattagaaccaccaaagagaggatttttgggatacctgactatctatttactttgtattcctatctctttcggagggtttttacctggctgggatagtggtatcactgccggtttcattaacatggacaattttaaaatgaacttcggatcttacaagcacagtaccggagagtactatttgagtaacgtgcgtatgggtcttttggttgcaatgttcagtatagggtgcgctataggtggccttatgtttgcgcgtctggctgatactttaggcagaagactagcaattgtgatagtggtgttggtgtatattgtaggtgcaatcatccaaatcagttcaagccacaaatggtaccagtattttgtcggtaaaatcatatacggtttaggcgctggtggctgctccgtgttgtgtccaatgcttctgtctgaaatagctcccaaggatctgagaggtggacttatttcattgtaccaattgaacatgacctttgggattttcctaggttactgtagcgtttacggaacacgtaaatacgacaataccgcacaatggagaatacctattgggttatgctttttatgggccctaattatcatcattggtatgttaatggttccagagtcaccaagatatctaatcgaatccgaaagacacgaggaggcacgtacttccattgccaagataaacaaggtttcaccagaagatccatgggtatatggtgaagcggaagaaattatcgcaggtgtgcttgctcaaagggcacaaggggaggcctcgtggaaggagcttttttcagtgaaaaccaaagttttccaacgtttggttaccgggatacttgtgcaaacgttcttgcaacttactggtgaaaactactttttcttctacggaactaccattttcaagtctgttggacttacagatgggttcgaaacctcaatcgttctgggtacagtgaatttcttctctactatcctcgctgttatggttgtagacaaaattggtcgtcgtaaatgtctcctattcggagcagccgggatgatggcctgtatggtcatatttgcaagtattggggtgaaatgtctttacccccatggcgatgacggtccctcttccaagggagcaggtaatgctatgatcgtttttacctgtttcttcatattttgttttgctacaacatgggcacctgtcgcttatatcgttgttgccgagtcgttcccctcaaagcttaaatctagagctatgtcgatttcaactgcgttcaactggttatggcagtttttgattggtttctttacaccatttatcactggatctatcaatttctattacggttacgtgttcgtgggatgcttggtcgctatgtttttctacatcttctttttcttgccagaaacaattgggttgtctttggaggaaattcagcaattgtatgaagaaggtgtaaaaccatggaagtctgcatcttgggttccaccctcaagaaggggtgacacctcagaagaagcccaggttgaaaagaaagactggaagaagtttttcaagttctcgaaggggtctttcaacttgcactcttcaccttag

SEQ ID NO: 3910 - DNA, 486 bp, Saccharomyces pastorianus
atggcaagtaaagaatctaaaaagatgacgaatgatcgaatcgtagttaaggccattgagccaagagacgaagaagattggaacaaactgtgggtagagtatcaaggtttccaaaaaatcgttatgcctttggagatagccaggactactttcgcaaggttcttggacccccaagtcaagctttggggggcaattgccatcgacaccgagactggcaataccattggtttcacacattacttgagccacttgaccgcgtggcaagttgaggaggttatctacatgaatgacttatatgtcaccgagaacgccaggatcaaaggtgtagggaggaagcttatagagtttgtatataagcatgcggatgagctcggcacgtcttcagtatactgggtgacggaccacttcaaccaccgcgcccaattgttgtacaccaaagtagcttacaagacggaaaaagtcgtttacaagagagttgaacactga

SEQ ID NO: 3911 - DNA, 1863 bp, Saccharomyces pastorianus
atgcagagctacttccaagggtttgtgcccattcataccatattttactctgtgttccatcccacagaagggtctaagatcaagtacgagtttcccccgaataacctgaaaagtcatggtatcaatttcaacacaatcaaaaattacatcataccgaagccgatactatgccacaagctgatcactttcaagtacggtacgtataggatcgtatgctatcccgtgaccatcaactccccgatatacgctaggaattttttcagttttaactttgtattcgtgttcccatatgattgtgagacgtctccatacgagccagctatcactagactgggcaaaatgttcaaggtcctggaagagcagaatcaactgctgtccaagtcagaaagagatcctgtttttttcgacttaaaggcaatggaaaactcctcattaacgccctctacagctggtcctccggcgacgtcgaaccctagcagcaacactacaccaacgcatcccacctctgacaaggacgcgaaggatctaagaggcaacaggttcaatggcgaaaagtacaatgacataatcaaaaatttgggacttccggagtccacattttccatacaagatttgctgatgagaatctttcaggacctaaataactactccgaatgcctcataccaatagacgatggtaatgcagtagacataaagattttccctctattgagaccgcctacaacctgtgtttcattggaagacgtgcccctgtcgtctgtaaacttgaagaaaatcatcgatgttaactgggatccaaccatgatgggcatagtcccatatatcgatggtctaaacagcattgcgaaaatctcaaaactcagtcacagtgatccaagtctggtaatcgaatgtatacggcatctcatatactataaatgtgtcacattgtcagatattttccagttttcaaacatatacgccccttcttcattgattagaaattttttaaccgatccattaatggccactgactgtcagtcctatgtcacgtttccggaaatttctaaactatcaaatctacccttgaacaagaattttgactccgttgatcaagatttaacgtcattttctgtgcgaaggaaatctaagtcctctagtgtaccttcaaacgtgaactcccgaactacctcatttagttcgatcagtaaagtttctcaaaattcgtcgttgaattcctctttttcatcagtttctaaagattggaggcattcacagacctcctgctcgagcacaaacatgcatggtatcaacaaccgaaatcaatttttaccgacaagatcgtgcttgtttgacctgtatatatctctctcgcagggccaaacgttaaaatcgtggtatgagttgaaatttacaacttttaaagaaaacaacattgatataagaaggtttataacctttggcttagaaagaagtatcatatacagatgctactccttccctataatgctacatgtcggcttacgtgatacaaaggaaatgacacctattactacaaaagaatcttcaaatgaggataagttactcaagaaaacagattataatcattccttatccgtcactggttctaaaagcacgacgcaaaccaataatcagaaatcggaaagaccatcaaaagtttcatttgatatgcagagagcgaattctttggcaactggtaaatataagatacccaaactcagtgacgaggaaaaaaaaatacttgaaaattcagtaagaagtgctgagaattttgataagatatgcgtcttattaggcaaatctaaacaagaagtggagaactatttaagcgaaatgggagagttcagggtgatcaatagctaa

SEQ ID NO: 3912 - DNA, 3012 bp, Saccharomyces pastorianus
atgccagcggaaaatcaaaatactattcaagagaggagctccaataacatcagtaacaacgttaatactcagattggatgccatggtgttcctaatgaagagttgaacatcacggtggtagtgaggtgcaggggaagaaatgaaagggaaattggtatgaaaagctccgtagtggtgaatgtccccgatatcacgggttccgaagaagtttccatcaatactacgggggacacaggcattacagctcaaatgaacgccaagagatatacagtcgacaaagtttttggccccagcgcttcccaagatctgattttcgatgaagtggcaggccctttattccaagatttcatcaaaggttacaattgtaccgtattagtatacggtatgacatccacgggtaaaacttacaccatgacaggtgacgaaaaactatataacggtgaattgagcgatgctgcgggaattataccgagagttcttttgaagttgtttgacacgctggagttacaacaaaatgactatgtggtaaaatgctcatttatcgaactgtacaatgaagaattaaaggacctactagataacaacagcaataactccagcaataatgctttcgaaggtccttttatgaaaaagttgaggatttttgattcaagtactgccaataacaccaccagcaacagcgctagcagttccagaagtaattccagaaatagttctccacgcgcattgaatgatttgacacctaaagctgctctactaaggaaaagattaagaacaaaatcactgcccaatactatcaagcaacaacatcagcaacaacatcagcaacaaacgataaattctagaaacaactcctcctctaattccggttctacgaataataacattcctggtaacaccaacacaaataatagccaaagaagctcgatggctccaaatgaccaatcgaatggcatatacattcaaaatttgcaagagtttcacataactaatgccatggaaggtttgaacctattgcaaagaggtttgaaacataggcaggtggcttccaccaaaatgaatgacttttcgagtagatcgcataccattttcacaattactttgtataagaagcaccaggatgaattattcaggatatcaaaaatgaatctggtggatttagcaggttcagaaaatattaaccgatctggagcactgaaccaacgtgccaaagaagctggttcaattaaccaaagcctgcttacgctgggaagagtgatcaatgcacttgctgacaaaagcggtcatatcccattccgtgaatcaaaattgacacgtttgctccaagactcacttggtggtaatacaaagactgcattaatcgctacaatatcgcccgcaaaggtgacctccgaagaaacttgcagtacactggagtatgcatcaaaggctaaaaacatcaagaacaaaccacaactgggtgctttcataatgaaagatattctagttaaaaacattactatggaactcgctaaaattaagtccgatcttctttctacgaaatctaaagaaggaatatatatgagccaggaccattacaagaatctgaatagtgatttagaaagctacaaaaatgaagtacaagaatgcaaaagagatatcgaaagtctatcatccaaaaattcattgctattaaaagataaattgaagtctaaagacacaattcaatctcaaaattcccaaatggaatcattaaaggtcacgatcaatcaattaaaggcccagctagataaacaacataaaacagaactagagatatctggcttcaataataaactacagaagctaactgaaataatgcaattagccctacaagattataaaagaagagaactcgaccttaataagaaatttgaaacgcacattagcaaagagatcaaaactttaaaaacaactttgttttcacaattaagtggtatggaacagaaaaatatctcccaagaaactaatatccagcctaatcttgatataatcaaaaatgaagttctgactttaatggaaaccatgcaagaaaaggcagagttaatgtacaaagactgcgtgaagaaaatcctaaatgagtctccaaagtttttcaatgtcatcgtagaaaaaattgacataataagggttgattttcagagattttataataatatagcggaggatctttctgacataagtgaagaaaataacaatctaaaacagtatttgaaaaaccatttcttcaaaaataatcaccaagaactactaaatcatcatatagactccacttatgaaaatatcgaaaagaaaacaagtgagttcgtcgaaaatttcaaaaatactctaaatgaccacctagaggaaaataagaaattaataatgcaaaacctaacgaacgcgactagtgccgttattaatcaagagatggatttattcgaaccaaagagagttaaatgggaaaattcgttcgatctgataaataagtgcgactccatgaataacgaattctataataacatggccaccacattatctcaaattaaaagtacagttgacacatcgtcaaattcaatgaataaatctatttctgtcatgaaagggcaagtggaagaatccgagaatgctgtatctcttctaaaaaacaacaagaaattcaatgatcaatttaaacaattagttgacaagcacacaatattaaaggacaatatcgagaattcaatcacgtcaactcactctcatataacaaatgtagacgacatttacgatacaattgaaaacataatgaagaactatggtaataaggaaaacgctgccaaaaatgagatgatcgataacatcctaaaggaaataccaagcctaagtaagagaataccgttaagactctcaaacacaaatgggaattcagcgcaaaatatactatccccaaaaaaacatgcaattgatgacgaaaatccatctaacaaaattacagacggagaagaagccaggaaaatactaaagacagaatag

SEQ ID NO: 3913 - DNA, 1731 bp, Saccharomyces pastorianus
atgatttcagcagtgagaccaaagtgcaaggaatcagggcacaattcgcagcgctttgagatgaagatcgattacgaccaattgcgcaaactctatgaggatacgtgctgcaccaagaacctgcagtacagctacggcacggccgggttccggaccctggccaaggatctggacacggtgatgttcaccacgggcatcttggccgtgctcaggtcgctgaagctccagggccaatacgtgggggtcatgatcacggcatcgcacaacccgtaccaggacaacggggtcaagatcgtggaaccggacggatcgatgctgctggccgcttgggagccgtatgctatgcagttggccaatgccgcctcgttcgctaccacttttgacgagttctacgccgagttggtcaaattggtcgagcacgagaagatcgatttggatactagtgccgtcgcgccgcacgtcgtggtcggcagggactccagggaaagcagtccctttttgctgcgttgcttgacgtccaccatggccagcgtcttccacgcgcaggtcgtggacctgggctgtgtcaccacgccccagttgcactatgttaccaacttgtccaacagacgccagcgcgaggacggccatgcgacagtggccacggaacaagactactattcgttcttcgtcgaagccttcaacgagctcttcaccacgtaccaaatcgagaaaaggctctctgtccccaaactgtttgttgacacggccaatggtattggtggcccacaattgaagaaactgctggcctccaaagactgggctgtaccatcggacgaaatcgaaattgtcaatgacaaatccgatgttccagaattgctgaatttcgagtgcggtgcagattatgtaaagaccaaccagagattgcccaagggtctttctccatcatcccctgactcgctgtattgctccttcgacggtgacgctgacagggtcgtgttttattatgtcgaccctgaatcaaagttccatctgttggacggtgacaagatatccacgttgtttgcgaaattcttgtcccaacaactggaactggccaatttgacagattctctgaagattggcgtggtgcaaaccgcatacgcgaacgggagctccaccacctacatcgaagacgcgctacattgtcccgtgtcgtgtaccaagacaggcgtcaagcatctgcatcacgaggctgcaactcagtatgatatcggtatttatttcgaggctaatggacatggtacgatcattttcagcgagaagtttcatcaaaccatcgagtcccagttgtccaagtcacaaggtaatttgttggctttaaacactttaaattgttttgctaaactgattaaccagaccgtgggtgatgctatatcggacatgttggcggtccttgccaccttgtccattttacaaatggcaccaacggactgggatagagagtatacggatttacccaacaagttggtcaagtgcattgttcctgatagatcgattttccaaacgactgatcaagaaagaaagctgcaaaaccctgctgggttgcaaactaagatagactccgtcatagctaagtacccaatgggtagaagttttgtcagagccagtggtactgaagatgcggtgagagtttacgcagaatgtgaggatccaaccaagttagaccaattctgcaatgaaatcgtagaatacgttaaatcgtctgtctaa

SEQ ID NO: 3914 - DNA, 174 bp, Saccharomyces pastorianus
atgtcttcaccgaccttctttggagatagacctaaaggaccgatctttggagccaaagcagcggaagcaccaacttcaccaccaacggctcttaggtataagtatttaacttcattaggatcaaactttggaggcatttttgtatatcctttgttcttgttgtcaactttctag

SEQ ID NO: 3915 - DNA, 138 bp, Saccharomyces pastorianus
atgatgtcatccaattggatgttaccactgtgcttgacgttcttgtccttctttctgtctcttggtggttccttcaaggcggtgatgaccaaagaggaagcagatgggacaacagaggcggcagcttgtctgttttga

SEQ ID NO: 3916 - DNA, 630 bp, Saccharomyces pastorianus
atggataatgaaatggaccaattacagaccactaaacaattcctgaattatcttttgaaagaagctaatatcaccaagtcattatgcttgatagaggtcttccaatttgggattttaaagtcatttcatgtaatcgacaataaaaacgacacccccttgaagttttctgacgaaaggttaatccatgagttgagattcaaaccgtttaattcgataggtgttccagagttgccagaacatgaagcctttcagaagtctttgaaagattttactatcgatcgagaggaatcttcatttgatacgagattgaaggccctttcatcctttatagaagaagaggtgcaaaatgtcaacaagtctattgatgagataatctcatgcatcaaggcgggagataacaacggtgtgttagtgacggggacaagattggttcaagagttatccgttgagtactattccaaattaaagcttacttctaaggctatcacaatcaactcgaaagttattatgagtaccttgaaaaaggacactgatcacaaggattacaaggtggaattagtacatgcaactaaaggttggaattactaccctatacaaactttaagggtaaaggaaaaccgccgcaaatga

SEQ ID NO: 3917 - DNA, 1542 bp, Saccharomyces pastorianus
atggaagtagataggatattgggttccctgagcataaccgatgatttcgatcaattggttgacgtgacatgctttttcgatgaattgtgctctaaattaaagccggaaactattgtaaaggaccctcggttcgatttatttgaaggcacgcactctttggaagctgataactccaagctggactccagcctaatagaattaactgacgaagaactagaattcgatttgaatgtcgcgcatgaatcaccattgtcaagtgtgacagctatagcggatagattgcttagatgtgttatctcatggttaaacgagtatcaaaccttacccacaactgtattgagttgtagatatacggaatgcttgttatcatcactgataaagggaacaagttcgggtccattttggaatacaggggacgctctgtatgatgaagtacttgggagctgtgtgcttggggtttgttacttggccaaatttgtacacaggctattaagcgctggcattgtttttgaagaggaggatttgaatttcaacagcatggggttgaacgctttcaataatctgccagatcaagatgttgtcattaaaagtctcataaacagcctccaactattggagacatactcggacgaaagcttacacttggttatgttgaagcatacattaaagatcacactttgcttagtccatttagaagaccatttgacaaactattccacagaaacaatgcatttggatgagttaatcgaaaacgctaattccgtcaatagcatacttccccaattacagttgtctccaccaagtggttcattctctacatatatacagaaacacagatctaatcaatttcccccaagacaaatcacggaaccgcccacagattacggcggtttcattattctggcagaagatatcaaaacagtgcttcttgttaacgaagctaagtctgcgttagaaacttatcaatttgctaatatctttaataagttgaaacaaagacatgttattgcaaggatcttgttcccgttaattttcatcagagacgacagaaccattttgggtaaattttccttcactgacttttaccctttacatattaaagaattttcagcgcaaaccccttctgaaccttcatccgccctaggcggcgaactcattcaagaaagttccaatatccttttggaatggtaccaaaattcctcccaaaacacgtgtagatatagacaggggttcaaccgtcaactaatactatgggattctcttcaagcccagtttgaaagcgtcagttcaaaaattcattgtttctggacgtatttcatgaaattatcaatcatgatcgagttttccctaaaggggtttgacttggaaatttataagccttttgaagcctattctatgttttggtatgtctactacttaagtagccatttggtggacttactaaatgagtgtcagaaagaaatcgagtcaaatattagtgcgatccactctatgaacaaaaaaataaagaaattaaaagcagggggaagaaggaccaattaa

SEQ ID NO: 3918 - DNA, 375 bp, Saccharomyces pastorianus
atggtcaaactaacttcaatcgctgctggtgtcgccgctatcgctgctggcgtcgccgctgcccctgccaccactacattagctccatctgacgaaagagttaacttagttgaattgggtgtctacgtttctgatatcagagctcatatggcccagtattacgcttttcaagccgcccaccctactgatacgtacccaattgaagttgctgaagctgttttcaactacggcgatttcactaccatgttgaccggcatttcacccgaccaagtcactagaatgattaccggtgttccatggtactccaccagattgagaccagccatctccagtgctttatccagcgacggtatctacaccgctattccaaactag

SEQ ID NO: 3919 - DNA, 471 bp, Saccharomyces pastorianus
atgagtggtggcagggaaagtagtagtaacaacaacaacgacagcagtgatgagcggttgctgtttctgaggggcgtgggcgagcgcaacgagatcgggactgcttcccggtttaagccggcacactacaagaagcccgccaggaggcacaagtccgccaggcagctggtatcggacgagaacaagcggatcaacgctttgctgagcaaggccaacaagacgacggacgtcttgccggccgccaagcggcttgtgcccagggcgacgtacttcagcgtggaagcgccgccctccatcaggcccgccaagaagtactgcgacgtgacgggtctgaagggcgtttacaagtctcccacgaacaacatccggtaccacaatgcggagatctaccagttgatcgtgaagccgatggcccccggcgtggaccaggagtacctgaagctgagaggcgccaacttcgtcttgaaatag

SEQ ID NO: 3920 - DNA, 1275 bp, Saccharomyces pastorianus
atgatcgatggtggttcctctggttccagaattcacgtatacgaatttgacacatgtacttctccacctacattaatcaatgaaacgtttgaaatgttacaacctggcttatcctcgtttgacaacgattctgccggtgccgctaaatcgctagatccattattgaccgtggccatgtctgctgttcctgtcaaggcaagaagctgtactccagttagtttgaaagctactgcagggctaagacttttaggtgaagccaaatccgcaaagattttgaaggctgtaagggatcatttggagaaggattatcctttcccggttgtagaaggtgacggtatttctatcatgggcggtgacgaagaaggtgtctttgcttggattaccacaaattatctcttgggtaacattggtaccggtggttctaaattgcctactagcgccgtctttgacttgggtggtggctctacacaaatcgtatttgagcctactttcccaccaaatgaaaaaatggttgagggcgaacataagtttgatttaaattttggtggtgaaacgtatacgctttaccaattctctcatctaggttacggtttgaaccaggtcagaaataagatcaattccgttcttgtagaaagcgccttgaaggaaggtagcatcttggaaggtgatgttacgacgactcataatttatcatctccatgcctgccacctaaagtcaacgccctcaaggaaaaagttaaattaaagtcaggcgaaacctatatcattgactttatgggacccgaggtaccgagtggtccgcaatgtagatttttggccgacacaattttgaataaagatgctgaatgtaagaagccaccatgctcttttaacggtgctcaccaaccttctttggttcgtactttcaaagaaacaaatgatctctacattttctcttacttttacgatagaacccaccccttaggaatgccgctatcatttagtttaaatgaattaatggagttggcaagaacggtatgtaatggcgaagaagtctggaagagtgttttcactgggatcgagggatccttggatgaactgaaaagcgacccacacttctgtatggatttgaacttccaagtatctttactacacacaggttacgatatcccattaaatagggaattaaagactgccaagaaattagccaataacgaaattggttggtgtttaggtgcgtcattaccgctgttagaatctgacaattgggtatgtaaagtcagtaaaattgaataa

SEQ ID NO: 3921 - DNA, 144 bp, Saccharomyces pastorianus
atgataagaaatatgaatgaaaacgcaagcaacagcactgatagttcgtctataagcacaagttcacaagatgagggaaatctgcgtgcaacggaatcaaaagtagctgttggacggactcgtcaagcgcatttcgcaatttag

SEQ ID NO: 3922 - DNA, 753 bp, Saccharomyces pastorianus
atgaaaagtaataaattattgataagggcttccacgaaatcctgcgctgatgttaattgcgaggaggatgctatggacagattaggaccggttaaggttttaacggaaggcaagcttttgagcaagtttgaagagcctggctcaatgagatgtggatattatgaagctaagaattgggtcagaagattgtcaagcgaaacaattgtaggtgaagatacaaataatctttacccattttatgtggatactgcgtatgacgttcgacgtttgaataaagacatcataaacgcaagaattgaattgtatgtggagaatttaatcatcatttgtaatatcaatgacgtttccacagtatttctcatgagggaagttgtggaatggactctgtgcaattttccatcaacaactgtatatgtgcaagatatttttgaaaaatcagctcactttgcagctagtgatctatgcaaagatagcaattgcaagcatagtagaataaagtattggtcaaaggaatttgtccaaaatcatgattcgttcttcgatttggttataactttaggaggtgatgggactgtcctttttgcttcatccatatttcctaaaaatataccacctatcgtcccatttgcccttggttcattggggtttttaactaattttgatcaaaaagttcaaggagacattatcgcatgtcttaacggaaaaggtccgcatcaatttacgtatgcgattgcagtgcaaagtttatcatag

SEQ ID NO: 3923 - DNA, 585 bp, Saccharomyces pastorianus
atgcgattgcagtgcaaagtttatcatagaaacgaaactgaaactgacgctgccaccggaaagcgggtatgttttattgattttgtttctgaacatcacgtcctcaatgaaataaccatagatagaggtccaactccttgcttgtccttattggagctttacggacacaattcattgatgactaaggtccaaggcgatggattgattgtagccacacctacagggtccacagcatactcgttaagtgcaggtgggtctttgatatcgccgagtgtaaacgctatagcggtaacgccaatctgtcctcatactttgagttttaggcctataattttaccagatagtatagagctgaaagttagagtggacttgaattcaagagggacatcgtgggtaaactttgacggcaaagatagaattgaattgaaacaaggtgattatgtcgtagtaactgcaagtccgtatgcagtgccaaccattgagtcatctccgagtgagtttatcgaaagcataagtaaaaatctcaaatggaataagcgagaggaacagaaaccttttgctcatttcctctcaagaaaagtataa

SEQ ID NO: 3924 - DNA, 1446 bp, Saccharomyces pastorianus
atgcgtcctttcttttgggaagcattttttaattctttatcatataggctaaaaataaatatcactttcacaatggcaatcgttcgcaattggctattttgtttagtcggtgttttttcctttgtgttacgtgtagaagccagtacttattgtaacgccacacaagcatgtccccaagataagccatgttgttcacaattcggtgaatgtggtaccggtcaatattgtttgaataactgtgatgtgagatattcgtttagtcaggattcgtgtatgccagtgccaatatgtaagagttcatccaccaagttcaatgattattcttccaagatgggaaatgctgatgttttcttgggtaatgtcagcgaggctgattggttgtattctggtagggttttagattatgatgacgaagaaagtttgattttggctatgccaaaaaacagtggtggtaccattatttcttctacaagggctgtgtggtatggtaaagtcagtgccagaattaagacatcgcaccttgctggtgtgatcactgcgtttatcttatattccggtgcaggtgatgaaattgattacgaatttgttggtgctgatctagaaactgttcaaaccaattactattgggaaagtgttttgaacttcactaatagtgccaatatatccaccactgatacctttgacaacttccatacttacgagatggattggcatgaagactacgtgacatggtctattgacaacgttgttggtaggactttgttcaaaaacgaaacctataactccaccaccaacagttatcactacccacaaactccatccaaagtggatatttctatttggcccggtggtaactctactaatgctccaggtactattgcatggtctggtggtgaaattaactgggacgcaccagacatcagtgatccaggctattactatgctattgtcaatgaaatcaacattacctgttatgatcccccaagttctgttaagaaaaacggtacttctgcctatatttacacttcatccgacgaatttttggaaaaagacatcgctataactgatgatgatgtcatgatggataccgatggaggatctggattggaccctcacaagggagccaccacatcttctgtccaaaaaacttcgtcttcaacttcagcatcttcaaagagttcctctgaagcttcttctagccacagcacctcaacgaagaagggtagcaagactacttctgcgtcctcttcatcaacttcttcttcttcttcttctacaaagaagggagataaggatatctcggcttcaacttctcttgtatctccttcatcaagtggagccgcatccagcagcacaggctcggcaagcagtgccggtatgggtgctaacgttgctacaaactggggcctgactgctgtatgcgttgtcctaggttatataatatag

SEQ ID NO: 3925 - DNA, 744 bp, Saccharomyces pastorianus
atgagttggcgtcgagtgttcattgggcaagaggttctgccagctcgtataatgacaacgggaggcgcttattcaacttatttgcttgacatcgaggggacagtgtgtccgatctcgtttgtgaaagagactttgttcccgtattttacagagcaagtgtcgcaattagtgttgcagcaggattcaggggactccccgatttctgaaatcctgttacagtttcacattgaagataaacagcagttgcaggcgcacatcttggagttggtggcgaacgatgttaaggaccccatcttgaagcagttgcaaggctatgtttgggctcagggctatgaaaccggccagatcaaagcacccgtttatgcagatgccattgatttcatcaagagaaaggaccgtgtgtttatctactccagtgggtctgtaaaggcgcagaagctgttgtttggatacgttctggaccccaatgtgcttacgcacgattcattggatctgaatgctaatataaacgggtatttcgacatcaacacttccgggaagaaaaccgaggcgcaatcatatgctaatatcttgcaagatatcggcgtgggcgctggcgaggtcttgtttttgagtgacaatcctttggagttggatgcggctgctgctgtggggatggctactgggctggctgtacgacctggtaatgcacatgtacccgatgcgcaaaagtaccaagtctacaagaattttgaagatctttaa

SEQ ID NO: 3926 - DNA, 546 bp, Saccharomyces pastorianus
atggcggagcgactcttaatcggatctagcagcttccttgaaggagatggcggcttcttcacccatggcggagatgatagtgaccatcaagtccttaccttcgtcgaaagcggcttgcatggtgtcacccaattcaccttctggggccttgacgtcatccttggtgtcaccgtccatgttcatcaaagacaagaaaccgtcatcgatgtccaacaattggtattcgtttctcttgacaactgggacttccatgttgtgagtagatggagacaaatcttccaacttcttaccagtgaagatatcaatggcgaccatgtggaccttggcgtgaccgtgcttaccggtcttggaggtggacatgtcgacaatcttacatggtctacccttgatgacaacgaaaccactctttctcaaagcggaacattgcattgggtaggtggtggaggtaccggcatcggcggtttcaaaggtgtgttcttcgtcagacattgtatgtgtgtgtgtgtgtatgtgtgtgtgggagagtctatggataattggctatag

SEQ ID NO: 3927 - DNA, 183 bp, Saccharomyces pastorianus
atgaaagaaaactccgacccctttccatcacatcatgcactctctgctgaaccggggttttttctttgtaactttttttttttcgttctcctaaagcattcacaaataaatcttttcttttattttctatttattttgttatttatcatctatatatttagcaacaatatattttgtttttaa

SEQ ID NO: 3928 - DNA, 339 bp, Saccharomyces pastorianus
atggttaacgaggccgaaaaatataaaggccaagatgcagttagaagaaaagctatcgaaaccgccaataaagctgatcaattagccaatgacaccgagaattccttgaaggaatttgaagagagattggataaaaccgactctcaaatcctcaaagaccaaatttcgtcattaagggaattaatatcccgagtgcaagctggcgatgaagttaatggcgaggacttaacaagcaaaattgataaattgcaaacgtcatcgttaaaactctttgaacagctctacaagaataatggaaattctcaatctgaaactaagaatgggaaccccgagaaataa

SEQ ID NO: 3929 - DNA, 1419 bp, Saccharomyces pastorianus
atgttaatagctaagcgtacccaacgggcacataatccactttatactataactcgtttacagtcaacaaaggttcaaggaggagttattggtattgatttaggtaccactaattctgcggtggctattatggaaggtaaagctccaaagatcattgaaaacgcggaaggctcaagaactaccccatctgtagtggctttcactaaggatggtgaacgtttagttggtactccagcaaaacgtcaatccgttataaacccagaaaacactttgtttgctactaagcgtttaatcggtcgccgttttgaagatgctgaagttcaaagggacattaaacaggttcccttcaagattgtaaagcattctaatggggatgcctgggtaaaagcaagagaccaaacatattccccagcacaaataggtggttttgtcctgagtaaaatgaaggaaacggctgacgcttatttgggtaaaagcgtgaaaaatgccgttgttactgttcctgcttactttaacgatgctcaaaggcaggcaaccaaagatgcagggcaaattatagggctgaacgtattgcgggttgttaatgaacccacagctgccgccttagcttatggattggataaatccgagtcaaaagtcgttgcggtttttgacttaggtggaggtacttttgacatctccatcttggacatcgataacggagtttttgaagtcaagtctactaatggtgacactcatttgggtggtgaagatttcgatatctatttgttgagagaaatcgtttctcgttttaaggctgaaaccggtatcgatttagagaatgaccgtatggccattcaaaggataagagaagctgctgaaaaggccaagatcgagttatcgtcgactgtttctaccgaaattaacttgcctttcattactgccgatgccacaggtccgaagcatatcaacatgtctttttctagggcccaacttaaaagtttaaccgctcccttaataaacagaacgattgatccggtcaaaaaagctttgaaagacgcaaagctcacgtcttccgatatatctgatgttttactagtcggcggtatgtcaagaatgcctaaggttgtagaaactgtgaaaaacttattcggcaaggatgcttccaaagccattaaccctgatgaagcggtagcactgggcgccgctattcaaggtgccgtcttgtctggtgaaattactgacgttttgttactggacgttactcctttatcgttaggaattgaaaccctaggaggtgttttcactagattaattccaagaaattccacgattcccaccaaaaaatcccaaattttttccactgccgcagcaggtcaaacagcagtcgaagttaaagttttccaaggcgagagggagttggtcaagataataaattaa

SEQ ID NO: 3930 - DNA, 3528 bp, Saccharomyces pastorianus
atgagacttggtatattggtaaagcatctctatcacaagggaatgtactatctgtgttttagctatgggttatatgcgggaacatccaacgaagtgaataggaaaattgagttttccctagacggacctttcattgtgaactataccattatacagaaattcaaaacgtcttcaaaggtggacgcaatttcttcctgccatctgtttatgtttaacgacggctccattgaaggctttaaattcaaaaacagcaattttgtgaaagtctatgggtctaatgtggttccgaaactagatgccacctcttctcctatctccaactggctaaatgcctctctagatggtttgctatacacttgtaataataacatgtcatatgatagtacttcctgtaagccaagtttcaaaatccattcctttgactttgggaacaagttagtggaaatgttttatgcagccgatggagagattatttcgttcgattttatcagcagagagcgattaattcacagtaaaaaatacctagggaagccggatgtctcttttatttgcttgattaagagtgaatacaatgaaaatttgattttagaggaatatgattgtgttaaggatcacatttcccccaagggcctaaagtctaatttcagtggggggcatcgcatttacaaccttttaccgatatccaatggtgagttttgttacatgaaaataatttacgatcacactgtcatagtactgactaatacacatatccagattattaaactaggaaaagaggggttcgaaagaacagccttcttaaacaatataggccttccgaaagaagagggttttcaatttctaaaagactcatgcgatttcatgtatgaaaaatcagggatctctttaaccctttatgatacgcacgccaataaatatactgccaaagtagatcaaagtctactagaaaaacgaaaggtgcagaacggtctacagtggttaagagaaaagatattcaagctttctaaacatgatctatgcgactctgtgctacagctcccaggaaaacagtatataactcttacaagaatgaatggaatacacttcatatcaaacaaccaccgcggccctagagcagagaaggtgaaagggggacctacttataggaacaaagtttatctcgcatctcaaatcgttcgaaataatggaacagatatagactcattgcttatgagcggaagttttaactcgaaaagggggtttttagaaaagaaatctctggtatacgatgaaaaaattttcaagctatctgcttccattaagctgtcactagagaacgtaactgatttttggattacagacttaatggctggagatgagaaccatttcacgtatgagtcaatgggatcaatttacagaaatggagagttattgatggacggatcatataattacggcgtattagttacaagaacggggatgattttggaaaacaatatggatggctctaccagtgaaattaagcaagtcggcgatctacaatttgacagcaacatttcgaatatgttttgctattctatcgaaaactctacagtcagaatttcaacacttcaaccccaatctagttctctacataaagtaaaggacgtcttcattgagggtgttgattcgaaaaacagcatcataagttcttgctgggatggagatgacatattttatttggccgtatactctgaaggtaaaattttcatatgggatacaagccaaaataaacttatatcttctcgactagattattcctttatagtctttgacatattggtaaaaggatctcagtttgatagtaacgccaaaaatgaatctaattttgtcatcgcatcatcatacgttggttgtgtgagagtctacaaatcaaattcgaatttcctagaagtagcattagaaatatattcctctcatagccaaaagttggaaatattagatacgccctccgattcaccattggtttttctttataacgaaaaagaaacaattatgctaaatttggatagcttgacttacggattcatacaattgggcgtgattccaagaaaaatgagaatacatccaaaaaaaccgtgtttctctctttgcgttttggacattgaatctcaaataaatgtgtttgattttgctgcgacgtttgatcatgggaactttactaagcacatgatttcattgaaaccgcaagtgaagaattatatgtaccatctttctagtgttcccttacatctatgcaccatgccagataatgccaatcaggctgtggtatgtatacttgacactaatagtgggcagtatgagctaatgctattcgattaccttttaatgaaaccaatatctacgtttagtcttcccaaagcgaagtattcgcatgcaattttgaagccgttttggtcggaagataattcaatctactcatcgcttagatatttttacggcaataaatttatcgtgtgtttaggcactgatgataaacgtacaaaattttggttatttgaaatcagaaacagcgtaattgtccagctatatgcggattgcctggaagatcgtatatgctctgtctgcgtttactacgaaggtagtgttgttttattttcaggcgatagtggcatagcaacgtacaagatacagatgctaaaagaaacttctgaagtactcgaagctcgttctttcccaatacttgagtcgattgaatctacgggatttctagcatatatgactggcgatgatttgattcaactgaatactataaaaggcttcataaaaaccaatctttcgatcagcgaagctatagaatatccgtcagagtattcagagaccgtttgcatgaactttatagatttttcagacattacgcatgtggcgactaaaaggatctccaggaagtcagtggagcctgataatgattattccgaaaatggaaaacactcctcattaagccgattttcaggtctttctcaaaccgaaagggtgtattctggcatatcctatgtcgctactattgattctgataacacacttgcaatttatgacgattctaacaaatcattggttaatgaagacaggttaattatgccctatcttaaaatccaattacctgatacaataatctcgttggcacccattccggacggattccaaaacctccaaatatgttcaggcttggacaatgaaagattagagggagtcttacctctttttatgatttgcggtacaaagggtcaaatttatattgtatcggaattatttaatgaatcatggatgaggtcgttgcgtcattacaagaaaatcaagctcaatgatgaaagaaaagccctagattcagaaaccaacatgcgaaatgttagtggacaatacgctgtgagtactggacctgggataaatagcagtgggtttgaagggctagggaggaacttgaagagaagacgtgttaattatttaccattcaagactatagatttttttgatcctgcaatactaagaaaggtgactaaaaaacgcctttaa

SEQ ID NO: 3931 - DNA, 930 bp, Saccharomyces pastorianus
atgactatgacaccagacctggtagaaaaatggttcccaggtgaccactctgatgttggcggaggttgggcccctgattgtgagacagaagaaaatttatctaacttaccactacggtggatcttagcggaagcaatcaaatttggagtcaagttcaaacctggttcgatacatgagtatgccgccaaacatacttcaattgaatctctgtttgcggatgctcatgactatcttgatttcggttcaccgaggaaaggttctaggtcaaatgtgatggacgataattatgagactcatcatgaggagtttgataggattaagaaaatggaagattctctgaaccaaataaaagagactcgactgagtttaaaagatgaggaagaaaaaataaaggatgcctttaccctcaaatgcggacatgcgaataggtttataagggtggtatggtggatattagagatgcttcccattggaataaggatggagaataaacaagggaaatggcaaaactttcatgtgcccaatcttgggagatctcgttatgtaccagagtacgttagtttgcattggtcagtctactggagaattaaacttgatcgtgagtacagaccaaataatctgcccgaatatgtcaggcaactattccaagattttgagggtattgatttaaaaactaataaaattatagataaatataatggccaagttcgaggtgaggagactaggatcgacgaaggacctcccgatgatgaagaatcgcagctccgcttgggacaaaaagcgagctattttgctaccatatccaacgcaaggttattcgacaccaaatattcccatttaaaaaagaaatttttggactgggctggcagttcttggggcgaaattccagatgatttagaaatacacttgaaacatgacgtatccttataa

SEQ ID NO: 3932 - DNA, 897 bp, Saccharomyces pastorianus
atggacaatttcagatatgttcataaacaatataacaaaagtgaaatagggagcgacagtaacgtagattcatcattgcgttcatcgtttgggaaaaatattattctttgttttgatggaacaagagaaaattttgggcctcagcccttcactaatattttaaagttataccgccttctcgaaaacagtgatgactctgaacaaatttgctattatcaacctggaattggttcagttggatttgacgctgttgttgatgtaagaagacggttaactttttcgcatttacaaaatttattggattctatgtttgcttttagtttagacaaccacatatgttctgcataccttttcttgatgaagtattttgaaccaggagataaaatttatatgttcggtttttctagaggggcttttattgctagggtacttgccggaatgattgaaagggttggcctcttgaagaaagggttggaagaaatggttaaaatggcctggcaaatttatgagagatgggaatacgactcacagccaaatcaactacaatacacagggactttggccgaagagtttaagaagacattctcaagggactatgaggtgaagatatatttccagggtttgtttgattcggtaaactcagtgggaatattaagggaccgtttgtttccttgtacccaaagaagcaatattgtggaacatgttcgtcattgtgtatccctagatgaaagacgtggaaaatttaaacagttgtgtttcacgccgatgccttacattccaaaactactctcattgacatacgttacaaacttatctgaccagtgctcaccaatgccattctcagatccatcgaagcaggttttggcccaagaaaatcctttgatcaatacactgtaa

SEQ ID NO: 3933 - DNA, 4413 bp, Saccharomyces pastorianus
atggatagcaagggactcaccacggtagatccagtcactattataatcaaagaatgcatcaatttatcaacagcaatgaggaaatactccaagttcacctcccaatctggagtggctgctttattgggaggggggagtgaaatatttagcaaccaagatgattatttggctcacacattcaacaatttgaacactaacaagcataatgatccatttttgtcaggcttcattcaattaagactcatgttaaataagctgaaaaatctagataacattgactcgctgactattttacagccatttttattaatcgtaagcacaagttctatctctggttacatcacgtctttggcccttgattctttacaaaaattctttactttgaatattatcaatgaatcatccaaaaactacattggagcacatagggcaactgtgaacgctttaacacactgcaggtttgaaggctctcaacaactctctgacgattctgttctgctgaaagtcgtgtttttgctgcgctcaatcgtcgattcaccatacggggacttattatcaaactcaatcatatatgatgtgttgcaaacaattctttcgctggcctgtaataatagaagaagcgaagttctcaggaatgcagcccaatcaacgatgatttctgtgactgtaaagatttttgcgaaattaaaggttattgagcccatcgatgccaatcaggtatacattaatgacgaaagctacacaaatgacgtactgaaagctgatacgattggtacaaatgtgcaatccaaagaaaccgaaattcaaaaagataccatcgcctctgatatacatgacgaggaagcaattagcgaagatgatggcaatgaggaaacgcatgggcatctagagaagaacgtagataagattgaacagttagaaattgtacagaaaacaaccagatcaaattccaaaatccaagcgtacgcagatgacaactatgggttgccggtggctaggcaatatctgaacttactattatcgttgattgcaccagaaaatgagctcaaacactcttattcaactagaatttttggtttagagttaatccaaacagcattggaaatatcgggcgacagattacagctatacccccgccttttcactttgatatcagatcctattttcaaaagcattttgtttattatccagaacactacgaaactttcgctcttacaggctactttgcagttatttactacactggttgtcatattaggcaataatttacaattgcaaattgagctaaccttaacaagaatattttccattcttttggacgatggttctgcaagcagttcaaaccttgaaaacaagaacaaaccgtcaataataaaagagcttttgattgagcaaatttctattttatggactaggtcgccatctttcttcactgccactttcatcaatttcgactgtaaccttgatagagcagatgtttccataaacttcctaaaagcgctgactaaacttgccttacctgaatcagctttgaccagcacagagagtgttccacctatttgcctcgaaggtttagtgtctttagtcgatgatatgttcgatcatatgaaggacattgacagagaagaatttgccggacaagagaatgaaatggagattttaaagaaaagggatcgtaaaacggagtttattgaatgtaccaatgcttttaacgaaaaaccaaaaaatggtattcctatgttaataaaaaaaggttttattgcttctgaatctgataaagatattgctgagtttcttttcaagaacaacaatcgtatgaataagaaaacgataggtttactgctgtgccatccagataagataaatttgctaaccgaatacattcgtttgtttgattttgccggattgagggttgatgaagctattagaattttgttgacgaaatttaggttgcctggtgaatcgcaacagatcgaaagaattattgaggctttttcgtccacatactgtgaaaaccaaaactacgatccatccaaaatcagtgacaacgctgaggatgacatatctacggttcaaccggatgctgattccgtttttattttaagttattccatcattatgctaaacacggacttgcataacccccaagtgaaggaacatatgtcattcgaggattattccggtaacttaaggggatgctgtaatcacaaagatttcccattttggtacctggatagaatttattgttcaatcagagataaggaaattgttatgccagaagagcaccatggtaacgagaagtggtttgaagatgcttggaataacttaatttcttctactacggtgataactgagataaaaaaagacacacagtcagttatggataaactgacacctttggagcttttgaactttgatagaacaattttcaaacaagttggaccaagcattgtgagtacgctattcaacatttacgtagttgcatcagatgatcatatatcgaccagaatgataacaagtttggataaatgttcatttattgctgccttttttgacttcaaagacctctttaatgatatactgaactctattgctaagggaactactttagtaagttcaagccatgatgatgaactttcgactctagcatttgagtacggtccaatgccattagtacaaattacatttgaagacacaaatactgtgattccagttagtacagatgccgttagatttggtaggtcatttaagggtcaactaaacacagtagtgcttttccgtataatccgtaggaataaagaccccaagatattttctaagaagctatggtcaaacattgtcaatattattttaacgctattcgaagacttgattctgcctcctgatattttcccagatttgcaaaaaagactaaaattgggtaacttacccaagccatctcccgaagtttctattaataagagcaaagaaagtaagggtcttctgtcaactttcgcttcatatttaaaaggtgatgaagaaccgacggaagaagaaatcaaatcttctaaaaaagcaatggaatgcatcaagtccagtaacatcgctgcttctgtctttgggaatgaatcgaatgtgaccgcagatttaataaagaccctactcgagtctgcaaagacagagaaaaacgttgataattccagatattttgaagcagagcttctattcatcgtcgaattgacaatcgcattgtttttgttttgcaaacaagaaagggatttgggaaagtttatactacaaaaggtttttcagctttctcatacaaagggcctcacaaaaaggactgttcgtagaatgctgacatacaaagttttgttgatttctttgtgtgtggatcaaagtgaatatttatccaaattaataagtgatgaactattaaagaaaagcgaaattttcacccagaaattttttgccactaatcaaggtagagattttttgaaaaagttattttcattaactgaatcagagttttatagagagtatctattaggacacgaaaatttttggaaatttctaaggaaggttacagcaatgaaagagcaaagtgaaagtgtttttgaatatctaaatgaatccataaaaacagacacaaatattttgacaaatgagaattttatgtgggtactaggactattagatgaaatctcatcaatgggagccgttggtaaccattgggaaaaagaataccagaagttgacggagagtggacataaagtggataaggagaacccttacaaaaaatcaattgatttgtcactgaaatctattacattaacatcacacttgctagaagataatgataatttgaataaaaacgagatatttgctattatccaagctttggcacatcagtgcatcaacccatgtaagcaggtaagtgaattcgccgtggaaacactacaaaatactcttatcaacaagatcgaggtaccgtctgatgagatggaatccgtggaagagttaatcgagggcggattattaccactattgaactcgagcgaaacacaacaagatcagaaaatccccatttcgtccatattaacaataatatcgaacgtttacttacactttctgaagacgggaaagacaagtaacgaaacgtttttgaaaatcttgggtatttttaacaaattcgtagatgactcagaaatcgagaggcagttacagcaattgattcttgataagaagagtattgaaaaggaagctagcgcaacatcgtcccatctatcctcacgcgatcaaacacccgcatccagcgatatccaagatggggctgcggcaccgattaacgaaaccacgattgatgacattaaaccagaggtttcaaatgatgacgatatagaaaatgaaggagagaaagaaattacagaatag

SEQ ID NO: 3934 - DNA, 864 bp, Saccharomyces pastorianus
atgtggccagggagtgatgttacgtacaacgattgtgaagaaatgccgagagaaagaatgccattttatttcgacaagtttaaccaatgggaaccacttgatgaaaagttgtctcagattttccggtatgtagacatgcctcagctaagggacaggcccgaattgatactgagctacgtacctaatgtcgattggtatggccacaatttcggatacgatttacgagataagcggctacaagatctgatcggcgaagttgacggattctgccacgagttgattgaaggcttacagaaaagaaatctgttggcgttaagcaacgttatgtttgtcagcgaccacgggatgagcaatgtcgacatgaataacgtggagaatatcgttgtatgggaaaaaatgtttcccgacggtgcgatgtccaagtacgtatcgcatctctataacgagggcccgatgatgatggtctatttagaagatcctcgagacaggcgctggatgcgagacttgatcgagttcaccctgcggaaagtgtacggggaggaaatctcgagcaagttccacgtgatcttgagggaagatttcgagccggattggaagtatttccgctacgatgacaaaccacacgcatatgacgacagggtgggcgatatctgggttctcgcggatgcgcactgcgcaatcttgaaagaaaccggcgacgtacgagccggggtgatggggacgcacggctacaactttgccaactgtagcgacatggcgtccatgttcatcggcatgggtccgatgttcaacaatggagtcataccaccgttcgagaacacagaaatctacaaattactaattgaggccagcggtgtcgtataa

SEQ ID NO: 3935 - DNA, 426 bp, Saccharomyces pastorianus
atgcttcttttggagcaaggtaggagggaccttgagaaaaatgaccaaaatggcgttaaggcaagagcttctacgacatggaattggttgtggaaaagtgtgctatgtggtatgactgttgttatgttgctttcatgtgataaacgctcggcaaggtatgatgctggacccagggaaattgtacatagatcgagtacttattttaacggtacgcatgagtttaagacattaacaatattgatatctatcgatgggttccttccgagattaatagatgaaaagtgcacgccgtttctttacagcttacataacttgcagtcgccatatgacataaatatcagcactgcaccgcacatgatcccgagcttccccacacagacattccccaatcattggagtatggtgacgggaataataccccattga

SEQ ID NO: 3936 - DNA, 612 bp, Saccharomyces pastorianus
atgaaacttttgatgagtgatcatgaggtagatttagtcaatgatagcatgcaggagttccatgtgaagttcttgggtcctaaggacacaccatatgaaaatggtgtatggagactacatgttgagttgcccgataactatccatataagtccccaagcatagggtttgttaacaagatatttcatccaaacatcgacatcgcatcgggatcgatatgtttggacgtgattaattctacatggtcgcctttatacgatttgataaatattgtggagtggatgataccgggtttattaaaggaacccaacgggagcgatcccttgaataacgaagctgccacactacagttacgagataaaaaactgtatgaggaaaagatcaaagaatatatagataagtatgccacaagagaaaaatacgagcagatgttcggtgaagacgatggaaatggtgataccgatggcgacggggacgcacagaatggcactgattcggatgatgacatggaggacactaggatgtccagtggtgacgatagcgtcgatgagttaagtgaagacctaagtgacatcgatgtcagtgatgacgaggacgaggacgtggacgtctag

SEQ ID NO: 3937 - DNA, 720 bp, Saccharomyces pastorianus
atgaatgataatcataattattctgcctctacaacccaacacccctattatggtcatcctatagagagtcaactagctctaacagccgctgggagtgtcagcgctcctggtgctcctgtcgcaaccgaaaatgggctgcccatatctaacatgcaaccagtactccatcaagccaataacagtaacccaaatgctgcttcttcctctgccactgctgctggcccttcggcgactccttatcctgtttattctatgaacgttccctatcatagttctcccgcttccgcattcaggagagctcaggacaatactacttcaaatccaaacgcggaaccttctttaactgcaggcacgaatgcaccaaatcccggatacgctaactctcaacaatacactacatcacaagtatattaccaagggtttcctcaatattccatgaccagtgctcagaattcatcgatgtatcagcatcaacatcaacaccaacaccaacaccctttaccgacagtatacccaataacagcgtcgcaacaaaatataataaacgcaagccacgcttcgaacactattggctctgatcctcagcaccatcactatcagcaggaagctaacgatcataagaattttaccatgggccattcgaatagtaatattttaaacattaccaataacgatacgatgaacaatattaatacgaataccactactactacacaataa

SEQ ID NO: 3938 - DNA, 1041 bp, Saccharomyces pastorianus
atggatatcgagcctacttttaaaggatacattgaagatgaagatgatgctttgcttattctccaagctaccctggacggtaagctgaaacatattcccagaaggccatatgaaattgaaagaccctacttgatcgtatccggcagtatattcgtgtttatcgaagagatttccggaatcaaaagatggactgacggagtttcttggtctccatcgagaatatcaggcaagtttctaatttataaagaattggataaggagaacgccaacactggtgctaatgccaatgttaattcgaccagcaattctgactctgccattatctcagatgggccttccgacgcaaaggatccttcctcttccaagatcaaattacctcctttaaagaatcatcaattcgacttaccccccactatggctcattcgaattttgaatcggatcaagaatcatccatttctccatcgaaccgttcgaatttaccactaaaatataccggtctagtgaaaaagacaatctcagtgaaattgaagagacctccatttaattctatagaaaatttacacattgtctcatactattccgtcaaggatatcaaacaaagccgtttggtgacgccaaaagcctctcccttcttaaaagatactagaccttcacaagagctaattatcgcaatggaaaacacaacattgggcaatgtgaaaaataataccaacaccactaatgcgaacaactctaatagtataaacaacaaaagtaactcctcgactcctttaaatactgttatctccacaaataacaatagtgctaatataaatgctgctggcggtaatcaatttactagtgcgaacaagaattattattacaaaagtgatgaaagctctgggtacccaatcgcccaattcgctcctgcgttgccttcaacaactttgatgtatacaatgaatccaccttacatcactcaatctcctgataacgcaaatcccactggcatgaacactcatagcaataacaataataatatcatcataatactatactaa

SEQ ID NO: 3939 - DNA, 690 bp, Saccharomyces pastorianus
atgacgtccgtaagaaaaagaaagattaacagatcttccgtcgggaaggcaacgagaagaaccaaagacaaacagagaaaaattaacatccaatccaatccaattattgccgcaaattgggactattctttgacattggcacaaaattataagaaattaggactaagggccaaactacaggcgccagcgggcggtgaagaggccgatctaactaaggtagtcaagaaagtgccattaacaaagtctgtgttggatgaagacgacgacgaagacgaagaagagaagagtgatgatgcggaggctagtgttgaactagatgaaaacgagattccagaaggtgaggcaaggatacaacgcgataaggatggcgaaattgtaagagttgtttatggtaagaaaaagagtttcgatgtcgatgaggatgttgcctcgataagggctaagggaaccagtgagaaaactgaagtagtcaaacaactagaagaatttgcatctagacctgttatcataaaagaacgctgccaaagtgaaagagaggaagagtggctgggcagattatacaagaaacatggggatgattacaaaaaaatgttcttcgataagaagttgaatatctaccaacaatctgaaggcgatctaaaaagaagaatattgaaatggaaaaaaagaaacggtaacgtgctggagtaa
